(19) United States
(12) Patent Application Publication
(10) Pub. No.: US 2021/0115453 A1
(43) Pub. Date: Apr. 22, 2021

(54) TRANSPOSON SYSTEM AND METHODS OF USE

(71) Applicant: Poseida Therapeutics, Inc., San Diego, CA (US)

(72) Inventors: Devon SHEDLOCK, San Diego, CA (US); David HERMANSON, San Diego, CA (US); Eric OSTERTAG, San Diego, CA (US); Maximilian RICHTER, San Diego, CA (US); Stacey Ann CRANERT, San Diego, CA (US)

(21) Appl. No.: 16/640,807

(22) PCT Filed: Aug. 31, 2018
(86) PCT No.: PCT/US2018/049257

§ 371 Date: Feb. 21, 2020

Related U.S. Application Data
(60) Provisional application No. 62/608,546, filed on Dec. 20, 2017.
(60) Provisional application No. 62/558,286, filed on Sep. 13, 2017.
(60) Provisional application No. 62/552,861, filed on Aug. 31, 2017.

(51) Int. Cl. C12N 15/52; C12N 5/078; C12N 9/12

(52) U.S. Cl. CPC C12N 15/52; C12N 5/0634; C12N 9/1241; C12N 2501/2302; C12N 2501/2307; C12N 2501/26; C12N 2501/2321; C12N 2501/22; C12N 2501/125; C12N 2501/145; C12N 2501/2315

(57) ABSTRACT

Disclosed are methods for the ex-vivo genetic modification of an immune cell comprising delivering to the immune cell, (a) a nucleic acid or amino acid sequence comprising a sequence encoding a transposase enzyme and (b) a recombinant and non-naturally occurring DNA sequence comprising a DNA sequence encoding a transposon.

### RELATED APPLICATIONS

[0001] This application claims the benefit of provisional application U.S. Ser. No. 62/552,861, filed Aug. 31, 2017, U.S. Ser. No. 62/558,286, filed Sep. 13, 2017 and U.S. Ser. No. 62/608,546, filed Dec. 20, 2017, the contents of each of which are herein incorporated by reference in their entirety.

### INCORPORATION OF SEQUENCE LISTING

[0002] The contents of the text file named “POTH-029/001WO_SeqList.txt,” which was created on Aug. 31, 2018 and is 44,366 KB in size, are hereby incorporated by reference in their entirety.

### FIELD OF THE DISCLOSURE

[0003] The present invention is directed to compositions and methods for targeted gene modification.

### BACKGROUND

[0004] Ex vivo genetic modification of non-transformed primary human T lymphocytes using non-viral vector-based gene transfer delivery systems has been extremely difficult. As a result, most groups have generally used viral vector-based transduction such as retrovirus, including lentivirus. A number of non-viral methods have been tested and include antibody-targeted liposomes, nanoparticles, aptamer siRNA chimeras, electroporation, nucleofection, lipofection, and peptide transduction. Overall, these approaches have resulted in poor transfection efficiency, direct cell toxicity, or a lack of experimental throughput.

[0005] The use of plasmid vectors for genetic modification of human lymphocytes has been limited by low efficiency using currently available plasmid transfection systems and by the toxicity that many plasmid transfection reagents have on these cells. There is a long-felt and unmet need for a method of nonviral gene modification in immune cells.

### SUMMARY

[0006] When compared with viral transduction of immune cells, such as T lymphocytes, delivery of transgenes via DNA transposons, such as piggyBac and Sleeping Beauty, offers significant advantages in ease of use, ability to delivery much larger cargo, speed to clinic and cost of production. The piggyBac DNA transposon, in particular, offers additional advantages in giving long-term, high-level and stable expression of transgenes, and in being significantly less mutagenic than a retrovirus, being non-oncogenic and being fully reversible. Previous attempts to use DNA transposons to deliver transgenes to T cells have been unsuccessful at generating commercially viable products or manufacturing methods because the previous methods have been inefficient. For example, the poor efficiency demonstrated by previous methods of using DNA transposons to deliver transgenes to T cells has resulted in the need for prolonged expansion ex vivo. Previous unsuccessful attempts by others to solve this problem have all focused on increasing the amount of DNA transposon delivered to the immune cell, which has been a strategy that worked well for non-immune cells. This disclosure demonstrates that increasing the amount of DNA transposon makes the efficiency problem worse in immune cells by increasing DNA-mediated toxicity. To solve this problem, counterintuitively, the methods of the disclosure decrease the amount of DNA delivered to the immune cell. Using the methods of the disclosure, the data provided herein demonstrate not only that decreasing the amount of DNA transposon introduced into the cell increased viability but also that this method increased the percentage of cells that harbored a transposition event, resulting in a viable commercial process and a viable commercial product. Thus, the methods of the disclosure demonstrate success where others have failed.

[0007] The disclosure provides a nonviral method for the ex-vivo genetic modification of an immune cell or an immune cell precursor comprising delivering to the immune cell or the immune cell precursor, (a) a nucleic acid or amino acid sequence comprising a sequence encoding a transposase enzyme and (b) a recombinant and non-naturally occurring DNA sequence comprising a DNA sequence encoding a transposon. In certain embodiments, the method further comprises the step of stimulating the immune cell or the immune cell precursor with one or more cytokine(s).

[0008] In certain embodiments of the methods of the disclosure, the sequence encoding a transposase enzyme is an mRNA sequence. The mRNA sequence encoding a transposase enzyme may be produced in vitro.

[0009] In certain embodiments of the methods of the disclosure, the sequence encoding a transposase enzyme is a DNA sequence. The DNA sequence encoding a transposase enzyme may be produced in vitro. The DNA sequence may be a cDNA sequence.

[0010] In certain embodiments of the methods of the disclosure, the sequence encoding a transposase enzyme is an amino acid sequence. The amino acid sequence encoding a transposase enzyme may be produced in vitro. A protein Super piggybac transposase (SPB) may be delivered following pre-incubation with transposon DNA.

[0011] In certain embodiments of the methods of the disclosure, the delivering step comprises electroporation or nucleofection of the immune cell or the immune cell precursor.

[0012] In certain embodiments of the methods of the disclosure, the method further comprises the step of stimulating the immune cell or the immune cell precursor with one or more cytokines. In certain embodiments, the step of stimulating the immune cell or the immune cell precursor with one or more cytokine(s) occurs following the delivering step. Alternatively, or in addition, in certain embodiments, the step of stimulating the immune cell or the immune cell precursor with one or more cytokine(s) occurs prior to the delivering step. In certain embodiments, the one or more cytokine(s) comprise(s) IL-2, IL-21, IL-7 and/or IL-15.

[0013] In certain embodiments of the methods of the disclosure, the immune cell or the immune cell precursor is an autologous immune cell or immune cell precursor. The immune cell or immune cell precursor may be a human immune cell, a human immune cell precursor, an autologous immune cell, and/or an autologous immune cell precursor. The immune cell may be derived from a non-autologous source, including, but not limited to a primary cell, a cultured cell or cell line, an embryonic or adult stem cell, an induced pluripotent stem cell or a transdifferentiated cell. The immune cell may have been previously genetically modified or derived from a cell or cell line that has been genetically modified. The immune cell may be modified or may be derived from a cell or cell line that has been modified to suppress one or more apoptotic pathways. The immune cell may be modified or may be derived from a cell or cell line that has been modified to be “universally” allogenic by a majority of recipients in the context, for example, of a therapy involving an adoptive cell transfer.

[0014] In certain embodiments of the methods of the disclosure, the immune cell is an activated immune cell.

[0015] In certain embodiments of the methods of the disclosure, the immune cell is a resting immune cell.

[0016] In certain embodiments of the methods of the disclosure, the immune cell is a T-lymphocyte. In certain embodiments, the T-lymphocyte is an activated T-lymphocyte. In certain embodiments, the T-lymphocyte is a resting T-lymphocyte.

[0017] In certain embodiments of the methods of the disclosure, the immune cell is a Natural Killer (NK) cell.

[0018] In certain embodiments of the methods of the disclosure, the immune cell is a Cytokine-induced Killer (CIK) cell.

[0019] In certain embodiments of the methods of the disclosure, the immune cell is a Natural Killer T (NKT) cell.

[0020] In certain embodiments of the methods of the disclosure, the immune cell is isolated or derived from a human.

[0021] In certain embodiments of the methods of the disclosure, the immune cell precursor is a stem cell or stem-like cell capable of differentiation into an immune cell. In some embodiments, the immune cell precursor is a hematopoietic stem cell (HSC). In some embodiments, the immune cell precursor is a primitive hematopoietic stem cell. In some embodiments, the immune cell precursor is a human HSC or human primitive HSC.

[0022] In certain embodiments of the methods of the disclosure, the method further comprising the step of differentiating the immune cell precursor into an immune cell. In some embodiments, the immune cell is a T lymphocyte (T cell), a B lymphocyte (B cell), a Natural Killer (NK) cell, or a Cytokine-induced Killer (CIK) cell.

[0023] In certain embodiments of the methods of the disclosure, the immune cell is isolated or derived from a non-human mammal. In certain embodiments, the non-human mammal is a rodent, a rabbit, a cat, a dog, a pig, a horse, a cow, or a camel. In certain embodiments, the immune cell is isolated or derived from a non-human primate.

[0024] In certain embodiments of the methods of the disclosure, the mRNA sequence encoding the transposase enzyme is produced in vitro.

[0025] In certain embodiments, the transposon is a piggyBac transposon or a piggyBac-like transposon. In certain embodiments, and, in particular, those embodiments wherein the transposon is a piggyBac transposon, the transposase is a piggyBac transposase. In certain embodiments, and, in particular, those embodiments wherein the transposon is a piggyBac-like transposon, the transposase is a piggyBac-like transposase.

[0026] In certain embodiments, the piggyBac transposase comprises an amino acid sequence comprising SEQ ID NO: 14487. In certain embodiments, and, in particular, those embodiments wherein the transposon is a piggyBac transposon, the transposase is a piggyBac™ or a Super piggyBac™ (SPB) transposase. In certain embodiments, and, in particular, those embodiments wherein the transposase is a Super piggyBac™ (SPB) transposase, the sequence encoding the transposase is an mRNA sequence.

[0027] In certain embodiments of the methods of the disclosure, the transposase enzyme is a piggyBac™ (PB) transposase enzyme. The piggyBac (PB) transposase enzyme may comprise or consist of an amino acid sequence at least 75%, 80%, 85%, 90%, 95%, 99% or any percentage in between identical to:

| (SEQ ID NO: 14487) | |
|---|---|
| 1 | MGSSLDDEHI LSALLQSDDE LVGEDSDSEI SDHVSEDDVQ SDTEEAFIDE VHEVQPTSSG |
| 61 | SEILDEQNVI EQPGSSLASN RILTLPQRTI RGKNKHCWST SKSTRRSRVS ALNIVRSQRG |
| 121 | PTRMCRNIYD PLLCFKLFFT DEIISEIVKW TNAEISLKRR ESMTGATFRD TNEDEIYAFF |
| 181 | GILVMTAVRK DNHMSTDDLF DRSLSMVYVS VMSRDRFDFL IRCLRMDDKS IRPTLRENDV |
| 241 | FTPVRKIWDL FIHQCIQNYT PGAHLTIDEQ LLGFRGRCPF RMYIPNKPSK YGIKILMMCD |
| 301 | SGTKYMINGM PYLGRGTQTN GVPLGEYYVK ELSKPVHGSC RNITCDNWFT SIPLAKNLLQ |
| 361 | EPYKLTIVGT VRSNKREIPE VLKNSRSRPV GTSMFCFDGP LTLVSYKPKP AKMVYLLSSC |
| 421 | DEDASINEST GKPQMVMYYN QTKGGVDTLD QMCSVMTCSR KTNRWPMALL YGMINIACIN |
| 481 | SFIIYSHNVS SKGEKVQSRK KFMRNLYMSL TSSFMRKRLE APTLKRYLRD NISNILPNEV |
| 541 | PGTSDDSTEE PVMKKRTYCT YCPSKIRRKA NASCKKCKKV ICREHNIDMC QSCF. |

[0028] In certain embodiments of the methods of the disclosure, the transposase enzyme is a piggyBac™ (PB) transposase enzyme that comprises or consists of an amino acid sequence having an amino acid substitution at one or more of positions 30, 165, 282, or 538 of the sequence:

| (SEQ ID NO: 14487) | |
|---|---|
| 1 | MGSSLDDEHI LSALLQSDDE LVGEDSDSEI SDHVSEDDVQ SDTEEAFIDE VHEVQPTSSG |
| 61 | SEILDEQNVI EQPGSSLASN RILTLPQRTI RGKNKHCWST SKSTRRSRVS ALNIVRSQRG |
| 121 | PTRMCRNIYD PLLCFKLFFT DEIISEIVKW TNAEISLKRR ESMTGATFRD TNEDEIYAFF |
| 181 | GILVMTAVRK DNHMSTDDLF DRSLSMVYVS VMSRDRFDFL IRCLRMDDKS IRPTLRENDV |
| 241 | FTPVRKIWDL FIHQCIQNYT PGAHLTIDEQ LLGFRGRCPF RMYIPNKPSK YGIKILMMCD |
| 301 | SGTKYMINGM PYLGRGTQTN GVPLGEYYVK ELSKPVHGSC RNITCDNWFT SIPLAKNLLQ |
| 361 | EPYKLTIVGT VRSNKREIPE VLKNSRSRPV GTSMFCFDGP LTLVSYKPKP AKMVYLLSSC |
| 421 | DEDASINEST GKPQMVMYYN QTKGGVDTLD QMCSVMTCSR KTNRWPMALL YGMINIACIN |
| 481 | SFIIYSHNVS SKGEKVQSRK KFMRNLYMSL TSSFMRKRLE APTLKRYLRD NISNILPNEV |
| 541 | PGTSDDSTEE PVMKKRTYCT YCPSKIRRKA NASCKKCKKV ICREHNIDMC QSCF. |

[0029] In certain embodiments, the transposase enzyme is a piggyBac™ (PB) transposase enzyme that comprises or consists of an amino acid sequence having an amino acid substitution at two or more of positions 30, 165, 282, or 538 of the sequence of SEQ ID NO: 14487. In certain embodiments, the transposase enzyme is a piggyBac™ (PB) transposase enzyme that comprises or consists of an amino acid sequence having an amino acid substitution at three or more of positions 30, 165, 282, or 538 of the sequence of SEQ ID NO: 14487. In certain embodiments, the transposase enzyme is a piggyBac™ (PB) transposase enzyme that comprises or consists of an amino acid sequence having an amino acid substitution at each of the following positions 30, 165, 282, and 538 of the sequence of SEQ ID NO: 14487. In certain embodiments, the amino acid substitution at position 30 of the sequence of SEQ ID NO: 14487 is a substitution of a valine (V) for an isoleucine (I). In certain embodiments, the amino acid substitution at position 165 of the sequence of SEQ ID NO: 14487 is a substitution of a serine (S) for a glycine (G). In certain embodiments, the amino acid substitution at position 282 of the sequence of SEQ ID NO: 14487 is a substitution of a valine (V) for a methionine (M). In certain embodiments, the amino acid substitution at position 538 of the sequence of SEQ ID NO: 14487 is a substitution of a lysine (K) for an asparagine (N).

[0030] In certain embodiments of the methods of the disclosure, the transposase enzyme is a Super piggyBac™ (SPB) transposase enzyme. In certain embodiments, the Super piggyBac™ (SPB) transposase enzymes of the disclosure may comprise or consist of the amino acid sequence of the sequence of SEQ ID NO: 14487 wherein the amino acid substitution at position 30 is a substitution of a valine (V) for an isoleucine (I), the amino acid substitution at position 165 is a substitution of a serine (S) for a glycine (G), the amino acid substitution at position 282 is a substitution of a valine (V) for a methionine (M), and the amino acid substitution at position 538 is a substitution of a lysine (K) for an asparagine (N). In certain embodiments, the Super piggyBac™ (SPB) transposase enzyme may comprise or consist of an amino acid sequence at least 75%, 80%, 85%, 90%, 95%, 99% or any percentage in between identical to:

| (SEQ ID NO: 14484) | |
|---|---|
| 1 | MGSSLDDEHI LSALLQSDDE LVGEDSDSEV SDHVSEDDVQ SDTEEAFIDE VHEVQPTSSG |
| 61 | SEILDEQNVI EQPGSSLASN RILTLPQRTI RGKNKHCWST SKSTRRSRVS ALNIVRSQRG |
| 121 | PTRMCRNIYD PLLCFKLFFT DEIISEIVKW TNAEISLKRR ESMTSATFRD TNEDEIYAFF |
| 181 | GILVMTAVRK DNHMSTDDLF DRSLSMVYVS VMSRDRFDFL IRCLRMDDKS IRPTLRENDV |
| 241 | FTPVRKIWDL FIHQCIQNYT PGAHLTIDEQ LLGFRGRCPF RVYIPNKPSK YGIKILMMCD |
| 301 | SGTKYMINGM PYLGRGTQTN GVPLGEYYVK ELSKPVHGSC RNITCDNWFT SIPLAKNLLQ |
| 361 | EPYKLTIVGT VRSNKREIPE VLKNSRSRPV GTSMFCFDGP LTLVSYKPKP AKMVYLLSSC |
| 421 | DEDASINEST GKPQMVMYYN QTKGGVDTLD QMCSVMTCSR KTNRWPMALL YGMINIACIN |
| 481 | SFIIYSHNVS SKGEKVQSRK KFMRNLYMSL TSSFMRKRLE APTLKRYLRD NISNILPKEV |
| 541 | PGTSDDSTEE PVMKKRTYCT YCPSKIRRKA NASCKKCKKV ICREHNIDMC QSCF. |

[0031] In certain embodiments of the methods of the disclosure, including those embodiments wherein the transposase comprises the above-described mutations at positions 30, 165, 282 and/or 538, the piggyBac™ or Super piggyBac™ transposase enzyme may further comprise an amino acid substitution at one or more of positions 3, 46, 82, 103, 119, 125, 177, 180, 185, 187, 200, 207, 209, 226, 235, 240, 241, 243, 258, 296, 298, 311, 315, 319, 327, 328, 340, 421, 436, 456, 470, 486, 503, 552, 570 and 591 of the sequence of SEQ ID NO: 14487 or SEQ ID NO: 14484. In certain embodiments, including those embodiments wherein the transposase comprises the above-described mutations at positions 30, 165, 282 and/or 538, the piggyBac™ or Super piggyBac™ transposase enzyme may further comprise an amino acid substitution at one or more of positions 46, 119, 125, 177, 180, 185, 187, 200, 207, 209, 226, 235, 240, 241, 243, 296, 298, 311, 315, 319, 327, 328, 340, 421, 436, 456, 470, 485, 503, 552 and 570. In certain embodiments, the amino acid substitution at position 3 of SEQ ID NO: 14487 or SEQ ID NO: 14484 is a substitution of an asparagine (N) for a serine (S). In certain embodiments, the amino acid substitution at position 46 of SEQ ID NO: 14487 or SEQ ID NO: 14484 is a substitution of a serine (S) for an alanine (A). In certain embodiments, the amino acid substitution at position 46 of SEQ ID NO: 14487 or SEQ ID NO: 14484 is a substitution of a threonine (T) for an alanine (A). In certain embodiments, the amino acid substitution at position 82 of SEQ ID NO: 14487 or SEQ ID NO: 14484 is a substitution of a tryptophan (W) for an isoleucine (I). In certain embodiments, the amino acid substitution at position 103 of SEQ ID NO: 14487 or SEQ ID NO: 14484 is a substitution of a proline (P) for a serine (S). In certain embodiments, the amino acid substitution at position 119 of SEQ ID NO: 14487 or SEQ ID NO: 14484 is a substitution of a proline (P) for an arginine (R). In certain embodiments, the amino acid substitution at position 125 of SEQ ID NO: 14487 or SEQ ID NO: 14484 is a substitution of an alanine (A) a cysteine (C). In certain embodiments, the amino acid substitution at position 125 of SEQ ID NO: 14487 or SEQ ID NO: 14484 is a substitution of a leucine (L) for a cysteine (C). In certain embodiments, the amino acid substitution at position 177 of SEQ ID NO: 14487 or SEQ ID NO: 14484 is a substitution of a lysine (K) for a tyrosine (Y). In certain embodiments, the amino acid substitution at position 177 of SEQ ID NO: 14487 or SEQ ID NO: 14484 is a substitution of a histidine (H) for a tyrosine (Y). In certain embodiments, the amino acid substitution at position 180 of SEQ ID NO: 14487 or SEQ ID NO: 14484 is a substitution of a leucine (L) for a phenylalanine (F). In certain embodiments, the amino acid substitution at position 180 of SEQ ID NO: 14487 or SEQ ID NO: 14484 is a substitution of an isoleucine (I) for a phenylalanine (F). In certain embodiments, the amino acid substitution at position 180 of SEQ ID NO: 14487 or SEQ ID NO: 14484 is a substitution of a valine (V) for a phenylalanine (F). In certain embodiments, the amino acid substitution at position 185 of SEQ ID NO: 14487 or SEQ ID NO: 14484 is a substitution of a leucine (L) for a methionine (M). In certain embodiments, the amino acid substitution at position 187 of SEQ ID NO: 14487 or SEQ ID NO: 14484 is a substitution of a glycine (G) for an alanine (A). In certain embodiments, the amino acid substitution at position 200 of SEQ ID NO: 14487 or SEQ ID NO: 14484 is a substitution of a tryptophan (W) for a phenylalanine (F). In certain embodiments, the amino acid substitution at position 207 of SEQ ID NO: 14487 or SEQ ID NO: 14484 is a substitution of a proline (P) for a valine (V). In certain embodiments, the amino acid substitution at position 209 of SEQ ID NO: 14487 or SEQ ID NO: 14484 is a substitution of a phenylalanine (F) for a valine (V). In certain embodiments, the amino acid substitution at position 226 of SEQ ID NO: 14487 or SEQ ID NO: 14484 is a substitution of a phenylalanine (F) for a methionine (M). In certain embodiments, the amino acid substitution at position 235 of SEQ ID NO: 14487 or SEQ ID NO: 14484 is a substitution of an arginine (R) for a leucine (L). In certain embodiments, the amino acid substitution at position 240 of SEQ ID NO: 14487 or SEQ ID NO: 14484 is a substitution of a lysine (K) for a valine (V). In certain embodiments, the amino acid substitution at position 241 of SEQ ID NO: 14487 or SEQ ID NO: 14484 is a substitution of a leucine (L) for a phenylalanine (F). In certain embodiments, the amino acid substitution at position 243 of SEQ ID NO: 14487 or SEQ ID NO: 14484 is a substitution of a lysine (K) for a proline (P). In certain embodiments, the amino acid substitution at position 258 of SEQ ID NO: 14487 or SEQ ID NO: 14484 is a substitution of a serine (S) for an asparagine (N). In certain embodiments, the amino acid substitution at position 296 of SEQ ID NO: 14487 or SEQ ID NO: 14484 is a substitution of a tryptophan (W) for a leucine (L). In certain embodiments, the amino acid substitution at position 296 of SEQ ID NO: 14487 or SEQ ID NO: 14484 is a substitution of a tyrosine (Y) for a leucine (L). In certain embodiments, the amino acid substitution at position 296 of SEQ ID NO: 14487 or SEQ ID NO: 14484 is a substitution of a phenylalanine (F) for a leucine (L). In certain embodiments, the amino acid substitution at position 298 of SEQ ID NO: 14487 or SEQ ID NO: 14484 is a substitution of a leucine (L) for a methionine (M). In certain embodiments, the amino acid substitution at position 298 of SEQ ID NO: 14487 or SEQ ID NO: 14484 is a substitution of an alanine (A) for a methionine (M). In certain embodiments, the amino acid substitution at position 298 of SEQ ID NO: 14487 or SEQ ID NO: 14484 is a substitution of a valine (V) for a methionine (M). In certain embodiments, the amino acid substitution at position 311 of SEQ ID NO: 14487 or SEQ ID NO: 14484 is a substitution of an isoleucine (I) for a proline (P). In certain embodiments, the amino acid substitution at position 311 of SEQ ID NO: 14487 or SEQ ID NO: 14484 is a substitution of a valine for a proline (P). In certain embodiments, the amino acid substitution at position 315 of SEQ ID NO: 14487 or SEQ ID NO: 14484 is a substitution of a lysine (K) for an arginine (R). In certain embodiments, the amino acid substitution at position 319 of SEQ ID NO: 14487 or SEQ ID NO: 14484 is a substitution of a glycine (G) for a threonine (T). In certain embodiments, the amino acid substitution at position 327 of SEQ ID NO: 14487 or SEQ ID NO: 14484 is a substitution of an arginine (R) for a tyrosine (Y). In certain embodiments, the amino acid substitution at position 328 of SEQ ID NO: 14487 or SEQ ID NO: 14484 is a substitution of a valine (V) for a tyrosine (Y). In certain embodiments, the amino acid substitution at position 340 of SEQ ID NO: 14487 or SEQ ID NO: 14484 is a substitution of a glycine (G) for a cysteine (C). In certain embodiments, the amino acid substitution at position 340 of SEQ ID NO: 14487 or SEQ ID NO: 14484 is a substitution of a leucine (L) for a cysteine (C). In certain embodiments, the amino acid substitution at position 421 of SEQ ID NO: 14487 or SEQ ID NO: 14484 is a substitution of a histidine (H) for the aspartic acid (D). In certain embodiments, the amino acid substitution at position 436 of SEQ ID NO: 14487 or SEQ ID NO: 14484 is a substitution of an isoleucine (I) for a valine (V). In certain embodiments, the amino acid substitution at position 456 of SEQ ID NO: 14487 or SEQ ID NO: 14484 is a substitution of a tyrosine (Y) for a methionine (M). In certain embodiments, the amino acid substitution at position 470 of SEQ ID NO: 14487 or SEQ ID NO: 14484 is a substitution of a phenylalanine (F) for a leucine (L). In certain embodiments, the amino acid substitution at position 485 of SEQ ID NO: 14487 or SEQ ID NO: 14484 is a substitution of a lysine (K) for a serine (S). In certain embodiments, the amino acid substitution at position 503 of SEQ ID NO: 14487 or SEQ ID NO: 14484 is a substitution of a leucine (L) for a methionine (M). In certain embodiments, the amino acid substitution at position 503 of SEQ ID NO: 14487 or SEQ ID NO: 14484 is a substitution of an isoleucine (I) for a methionine (M). In certain embodiments, the amino acid substitution at position 552 of SEQ ID NO: 14487 or SEQ ID NO: 14484 is a substitution of a lysine (K) for a valine (V). In certain embodiments, the amino acid substitution at position 570 of SEQ ID NO: 14487 or SEQ ID NO: 14484 is a substitution of a threonine (T) for an alanine (A). In certain embodiments, the amino acid substitution at position 591 of SEQ ID NO: 14487 or SEQ ID NO: 14484 is a substitution of a proline (P) for a glutamine (Q). In certain embodiments, the amino acid substitution at position 591 of SEQ ID NO: 14487 or SEQ ID NO: 14484 is a substitution of an arginine (R) for a glutamine (Q).

[0032] In certain embodiments of the methods of the disclosure, including those embodiments wherein the transposase comprises the above-described mutations at positions 30, 165, 282 and/or 538, the piggyBac™ transposase enzyme may comprise or the Super piggyBac™ transposase enzyme may further comprise an amino acid substitution at one or more of positions 103, 194, 372, 375, 450, 509 and 570 of the sequence of SEQ ID NO: 14487 or SEQ ID NO: 14484. In certain embodiments of the methods of the disclosure, including those embodiments wherein the transposase comprises the above-described mutations at positions 30, 165, 282 and/or 538, the piggyBac™ transposase enzyme may comprise or the Super piggyBac™ transposase enzyme may further comprise an amino acid substitution at two, three, four, five, six or more of positions 103, 194, 372, 375, 450, 509 and 570 of the sequence of SEQ ID NO: 14487 or SEQ ID NO: 14484. In certain embodiments, including those embodiments wherein the transposase comprises the above-described mutations at positions 30, 165, 282 and/or 538, the piggyBac™ transposase enzyme may comprise or the Super piggyBac™ transposase enzyme may further comprise an amino acid substitution at positions 103, 194, 372, 375, 450, 509 and 570 of the sequence of SEQ ID NO: 14487 or SEQ ID NO: 14484. In certain embodiments, the amino acid substitution at position 103 of SEQ ID NO: 14487 or SEQ ID NO: 14484 is a substitution of a proline (P) for a serine (S). In certain embodiments, the amino acid substitution at position 194 of SEQ ID NO: 14487 or SEQ ID NO: 14484 is a substitution of a valine (V) for a methionine (M). In certain embodiments, the amino acid substitution at position 372 of SEQ ID NO: 14487 or SEQ ID NO: 14484 is a substitution of an alanine (A) for an arginine (R). In certain embodiments, the amino acid substitution at position 375 of SEQ ID NO: 14487 or SEQ ID NO: 14484 is a substitution of an alanine (A) for a lysine (K). In certain embodiments, the amino acid substitution at position 450 of SEQ ID NO: 14487 or SEQ ID NO: 14484 is a substitution of an asparagine (N) for an aspartic acid (D). In certain embodiments, the amino acid substitution at position 509 of SEQ ID NO: 14487 or SEQ ID NO: 14484 is a substitution of a glycine (G) for a serine (S). In certain embodiments, the amino acid substitution at position 570 of SEQ ID NO: 14487 or SEQ ID NO: 14484 is a substitution of a serine (S) for an asparagine (N). In certain embodiments, the piggyBac™ transposase enzyme may comprise a substitution of a valine (V) for a methionine (M) at position 194 of SEQ ID NO: 14487. In certain embodiments, including those embodiments wherein the piggyBac™ transposase enzyme may comprise a substitution of a valine (V) for a methionine (M) at position 194 of SEQ ID NO: 14487, the piggyBac™ transposase enzyme may further comprise an amino acid substitution at positions 372, 375 and 450 of the sequence of SEQ ID NO: 14487 or SEQ ID NO: 14484. In certain embodiments, the piggyBac™ transposase enzyme may comprise a substitution of a valine (V) for a methionine (M) at position 194 of SEQ ID NO: 14487, a substitution of an alanine (A) for an arginine (R) at position 372 of SEQ ID NO: 14487, and a substitution of an alanine (A) for a lysine (K) at position 375 of SEQ ID NO: 14487. In certain embodiments, the piggyBac™ transposase enzyme may comprise a substitution of a valine (V) for a methionine (M) at position 194 of SEQ ID NO: 14487, a substitution of an alanine (A) for an arginine (R) at position 372 of SEQ ID NO: 14487, a substitution of an alanine (A) for a lysine (K) at position 375 of SEQ ID NO: 14487 and a substitution of an asparagine (N) for an aspartic acid (D) at position 450 of SEQ ID NO: 14487.

[0033] In certain embodiments of the methods of the disclosure, the transposase enzyme is a Super piggyBac™ (SPB) transposase enzyme. The Super piggyBac (PB) transposase enzyme may comprise or consist of an amino acid sequence at least 75% identical to:

(SEQ ID NO: 14484)
MGSSLDDEHILSALLQSDDELVGEDSDSEVSDHVSEDDVQSDTEEAFI
DEVHEVQPTSSGSEILDEQNVIEQPGSSLASNRILTLPQRTIRGKNKH
CWSTSKSTRRSRVSALNIVRSQRGPTRMCRNIYDPLLCFKLFFTDEII
SEIVKWTNAEISLKRRESMTSATFRDTNEDEIYAFFGILVMTAVRKDN
HMSTDDLFDRSLSMVYVSVMSRDRFDFLIRCLRMDDKSIRPTLRENDV
FTPVRKIWDLFIHQCIQNYTPGAHLTIDEQLLGFRGRCPFRVYIPNKP
SKYGIKILMMCDSGTKYMINGMPYLGRGTQTNGVPLGEYYVKELSKPV
HGSCRNITCDNWFTSIPLAKNLLQEPYKLTIVGTVRSNKREIPEVLKN
SRSRPVGTSMFCFDGPLTLVSYKPKPAKMVYLLSSCDEDASINESTGK
PQMVMYYNQTKGGVDTLDQMCSVMTCSRKTNRWPMALLYGMINIACIN
SFIIYSHNVSSKGEKVQSRKKFMRNLYMSLTSSFMRKRLEAPTLKRYL
RDNISNILPKEVPGTSDDSTEEPVMKKRTYCTYCPSKIRRKANASCKK
CKKVICREHNIDMCQSCF.

[0034] In certain embodiments of the methods of the disclosure, the transposon is a Sleeping Beauty transposon. In certain embodiments of the methods of the disclosure, the transposase enzyme is a Sleeping Beauty transposase enzyme (see, for example, U.S. Pat. No. 9,228,180, the contents of which are incorporated herein in their entirety). In certain embodiments, the Sleeping Beauty transposase is a hyperactive Sleeping Beauty (SB100X) transposase. In certain embodiments, the Sleeping Beauty transposase enzyme comprises an amino acid sequence at least 75%, 80%, 85%, 90%, 95%, 99% or any percentage in between identical to:

| (SEQ ID NO: 14485) | |
|---|---|
| 1 | MGKSKEISQD LRKKIVDLHK SGSSLGAISK RLKVPRSSVQ TIVRKYKHHG TTQPSYRSGR |
| 61 | RRVLSPRDER TLVRKVQINP RTTAKDLVKM LEETGTKVSI STVKRVLYRH NLKGRSARKK |
| 121 | PLLQNRHKKA RLRFATAHGD KDRTFWRNVL WSDETKIELF GHNDHRYVWR KKGEACKPKN |
| 181 | TIPTVKHGGG SIMLWGCFAA GGTGALHKID GIMRKENYVD ILKQHLKTSV RKLKLGRKWV |
| 241 | FQMDNDPKHT SKVVAKWLKD NKVKVLEWPS QSPDLNPIEN LWAELKKRVR ARRPTNLTQL |
| 301 | HQLCQEEWAK IHPTYCGKLV EGYPKRLTQV KQFKGNATKY. |

In certain embodiments, including those wherein the Sleeping Beauty transposase is a hyperactive Sleeping Beauty (SB100X) transposase, the Sleeping Beauty transposase enzyme comprises an amino acid sequence at least at least 75%, 80%, 85%, 90%, 95%, 99% or any percentage in between identical to:

| (SEQ ID NO: 14486) | |
|---|---|
| 1 | MGKSKEISQD LRKRIVDLHK SGSSLGAISK RLAVPRSSVQ TIVRKYKHHG TTQPSYRSGR |
| 61 | RRVLSPRDER TLVRKVQINP RTTAKDLVKM LEETGTKVSI STVKRVLYRH NLKGHSARKK |
| 121 | PLLQNRHKKA RLRFATAHGD KDRTFWRNVL WSDETKIELF GHNDHRYVWR KKGEACKPKN |
| 181 | TIPTVKHGGG SIMLWGCFAA GGTGALHKID GIMDAVQYVD ILKQHLKTSV RKLKLGRKWV |
| 241 | FQHDNDPKHT SKVVAKWLKD NKVKVLEWPS QSPDLNPIEN LWAELKKRVR ARRPTNLTQL |
| 301 | HQLCQEEWAK IHPNYCGKLV EGYPKRLTQV KQFKGNATKY. |

[0035] In certain embodiments of the methods of the disclosure, the transposon is a Helraiser transposon. In certain embodiments of the Helraiser transposon sequence, the transposase is flanked by left and right terminal sequences termed LTS and RTS. In certain embodiments, these sequences terminate with a conserved 5′-TC/CTAG-3′ motif. In certain embodiments, a 19 bp palindromic sequence with the potential to form the hairpin termination structure is located 11 nucleotides upstream of the RTS and comprises the sequence

(SEQ ID NO: 14500)
GTGCACGAATTTCGTGCACCGGGCCACTAG.

[0036] In certain embodiments of the methods of the disclosure, and, in particular those embodiments wherein the transposon is a Helraiser transposon, the transposase enzyme is a Helitron transposase enzyme. In certain embodiments, the Helitron transposase enzyme of the disclosure comprises an amino acid sequence comprising:

| (SEQ ID NO: 14501) | |
|---|---|
| 1 | MSKEQLLIQR SSAAERCRRY RQKMSAEQRA SDLERRRRLQ QNVSEEQLLE KRRSEAEKQR |
| 61 | RHRQKMSKDQ RAFEVERRRW RRQNMSREQS STSTTNTGRN CLLSKNGVHE DAILEHSCGG |
| 121 | MTVRCEFCLS LNFSDEKPSD GKFTRCCSKG KVCPNDIHFP DYPAYLKRLM TNEDSDSKNF |
| 181 | MENIRSINSS FAFASMGANI ASPSGYGPYC FRIHGQVYHR TGTLHPSDGV SRKFAQLYIL |
| 241 | DTAEATSKRL AMPENQGCSE RLMININNLM HEINELTKSY KMLHEVEKEA QSEAAAKGIA |
| 301 | PTEVIMAIKY DRNSDPGRYN SPRVTEVAVI FRNEDGEPPF ERDLLIHCKP DPNNPNATKM |
| 361 | KQISILFPTL DAMTYPILFP HGEKGWGTDI ALRLRDNSVI DNNTRQNVRT RVTQMQYYGF |
| 421 | HLSVRDTFNP ILNAGKLTQQ FIVDSYSKME ANRINFIKAN QSKLRVEKYS GLMDYLKSRS |
| 481 | ENDNVPIGKM IILPSSFEGS PRNMQQRYQD AMAIVTKYGK PDLFITMTCN PKWADITNNL |
| 541 | QRWQKVENRP DLVARVFNIK LNALLNDICK FHLFGKVIAK IHVIEFQKRG LPHAHILLIL |
| 601 | DSESKLRSED DIDRIVKAEI PDEDQCPRLF QIVKSNMVHG PCGIQNPNSP CMENGKCSKG |
| 661 | YPKEFQNATI GNIDGYPKYK RRSGSTMSIG NKVVDNTWIV PYNPYLCLKY NCHINVEVCA |
| 721 | SIKSVKYLFK YIYKGHDCAN IQISEKNIIN HDEVQDFIDS RYVSAPEAVW RLFAMRMHDQ |
| 781 | SHAITRLAIH LPNDQNLYFH TDDFAEVLDR AKRHNSTLMA WFLLNREDSD ARNYYYWEIP |
| 841 | QHYVFNNSLW TKRRKGGNKV LGRLFTVSFR EPERYYLRLL LLHVKGAISF EDLRTVGGVT |
| 901 | YDTFHEAAKH RGLLLDDTIW KDTIDDAIIL NMPKQLRQLF AYICVFGCPS AADKLWDENK |
| 961 | SHFIEDFCWK LHRREGACVN CEMHALNEIQ EVFTLHGMKC SHFKLPDYPL LMNANTCDQL |
| 1021 | YEQQQAEVLI NSLNDEQLAA FQTITSAIED QTVHPKCFFL DGPGGSGKTY LYKVLTHYIR |
| 1081 | GRGGTVLPTA STGIAANLLL GGRTFHSQYK LPIPLNETSI SRLDIKSEVA KTIKKAQLLI |
| 1141 | IDECTMASSH AINAIDRLLR EIMNLNVAFG GKVLLLGGDF RQCLSIVPHA MRSAIVQTSL |
| 1201 | KYCNVWGCFR KLSLKTNMRS EDSAYSEWLV KLGDGKLDSS FHLGMDIIEI PHEMICNGSI |
| 1261 | IEATFGNSIS IDNIKNISKR AILCPKNEHV QKLNEEILDI LDGDFHTYLS DDSIDSTDDA |
| 1321 | EKENFPIEFL NSITPSGMPC HKLKLKVGAI IMLLRNLNSK WGLCNGTRFI IKRLRPNIIE |
| 1381 | AEVLTGSAEG EVVLIPRIDL SPSDTGLPFK LIRRQFPVMP AFAMTINKSQ GQTLDRVGIF |
| 1441 | LPEPVFAHGQ LYVAFSRVRR ACDVKVKVVN TSSQGKLVKH SESVFTLNVV YREILE. |

[0037] In certain embodiments of the methods of the disclosure, the transposon is a Tol2 transposon.

[0038] In certain embodiments of the methods of the disclosure, and, in particular those embodiments wherein the transposon is a Tol2 transposon, the transposase enzyme is a Tol2 transposase enzyme. In certain embodiments, the Tol2 transposase enzyme of the disclosure comprises an amino acid sequence comprising:

| (SEQ ID NO: 14502) | |
|---|---|
| 1 | MEEVCDSSAA ASSTVQNQPQ DQEHPWPYLR EFFSLSGVNK DSFKMKCVLC LPLNKEISAF |
| 61 | KSSPSNLRKH IERMHPNYLK NYSKLTAQKR KIGTSTHASS SKQLKVDSVF PVKHVSPVTV |
| 121 | NKAILRYIIQ GLHPFSTVDL PSFKELISTL QPGISVITRP TLRSKIAEAA LIMKQKVTAA |
| 181 | MSEVEWIATT TDCWTARRKS FIGVTAHWIN PGSLERHSAA LACKRLMGSH TFEVLASAMN |
| 241 | DIHSEYEIRD KVVCTTTDSG SNFMKAFRVF GVENNDIETE ARRCESDDTD SEGCGEGSDG |
| 301 | VEFQDASRVL DQDDGFEFQL PKHQKCACHL LNLVSSVDAQ KALSNEHYKK LYRSVFGKCQ |
| 361 | ALWNKSSRSA LAAEAVESES RLQLLRPNQT RWNSTFMAVD RILQICKEAG EGALRNICTS |
| 421 | LEVPMFNPAE MLFLTEWANT MRPVAKVLDI LQAETNTQLG WLLPSVHQLS LKLQRLHHSL |
| 481 | RYCDPLVDAL QQGIQTRFKH MFEDPEIiAA AILLPKFRTS WTNDETIIKR GMDYIRVHLE |
| 541 | PLDHKKELAN SSSDDEDFFA SLKPTTHEAS KELDGYLACV SDTRESLLTF PAICSLSIKT |
| 601 | NTPLPASAAC ERLFSTAGLL FSPKRARLDT NNFENQLLLK LNLRFYNFE. |

[0039] In certain embodiments of the methods of the disclosure, the piggyBac-like transposon comprises an amino acid sequence having at least 5%, 10%, 15%, 20%, 25%, 30%, 35%, 40%, 45%, 50%, 55%, 60%, 65%, 70%, 75%, 80%, 85%, 90%, 95% or any percentage in between of identity to the amino acid sequence of SEQ ID NO: 14487.

[0040] In certain embodiments of the methods of the disclosure, a vector comprises the recombinant and non-naturally occurring DNA sequence encoding the transposon. In some embodiments, the vector comprises any form of DNA and wherein the vector comprises at least 100 nucleotides (nts), 500 nts, 1000 nts, 1500 nts, 2000 nts, 2500 nts, 3000 nts, 3500 nts, 4000 nts, 4500 nts, 5000 nts, 6500 nts, 7000 nts, 7500 nts, 8000 nts, 8500 nts, 9000 nts, 9500 nts, 10,000 nts or any number of nucleotides in between. In some embodiments, the vector comprises single-stranded or double-stranded DNA. In some embodiments, the vector comprises circular DNA. In some embodiments, the vector is a plasmid vector. In some embodiments, the vector is a nanoplasmid vector. In some embodiments, the vector is a minicircle. In some embodiments, the vector comprises linear or linearized DNA. In some embodiments, the linear or linearized DNA is produced in vitro. In some embodiments, the linear or linearized DNA is a product of a restriction digest of a circular DNA. In some embodiments, the circular DNA is a plasmid vector, a nanoplasmid vector or a minicircle DNA vector. In some embodiments, the linear or linearized DNA is a product of a polymerase chain reaction (PCR). In some embodiments, the vector is a double-stranded Doggybone™ DNA sequence. In some embodiments, the Doggybone™ DNA sequence is produced by an enzymatic process that solely encodes an antigen expression cassette, comprising antigen, promoter, poly-A tail and telomeric ends.

[0041] In certain embodiments of the methods of the disclosure, the immune cell or the immune cell precursor is isolated or derived from a human. In certain embodiments, the immune cell or the immune cell precursor is isolated or derived from a non-human mammal. In certain embodiments, the non-human mammal is a rodent, a rabbit, a cat, a dog, a pig, a horse, a cow, a camel or a primate.

[0042] In certain embodiments of the methods of the disclosure, the recombinant and non-naturally occurring DNA sequence encoding a transposon further comprises a sequence encoding a chimeric antigen receptor or a portion thereof. In certain embodiments, the chimeric antigen receptor (CAR) comprises (a) an ectodomain comprising an antigen recognition region, (b) a transmembrane domain, and (c) an endodomain comprising at least one costimulatory domain. In certain embodiments, the antigen recognition region comprises one or more of an antibody or a fragment thereof a single chain antibody (scFv), a single domain antibody, an antibody mimetic, a protein scaffold, a Centyrin, a VHH, and a VH.

[0043] Chimeric antigen receptors (CARs) of the disclosure may comprise (a) an ectodomain comprising an antigen recognition region, (b) a transmembrane domain, and (c) an endodomain comprising at least one costimulatory domain. In certain embodiments, the ectodomain may further comprise a signal peptide. Alternatively, or in addition, in certain embodiments, the ectodomain may further comprise a hinge between the antigen recognition region and the transmembrane domain. In certain embodiments of the CARs of the disclosure, the signal peptide may comprise a sequence encoding a human CD2, CD3δ, CD3ε, CD3γ, CD3ζ, CD4, CD8α, CD19, CD28, 4-1BB or GM-CSFR signal peptide. In certain embodiments of the CARs of the disclosure, the signal peptide may comprise a sequence encoding a human CD8α signal peptide. In certain embodiments, the transmembrane domain may comprise a sequence encoding a human CD2, CD3δ, CD3ε, CD3γ, CD3ζ, CD4, CD8α, CD19, CD28, 4-1BB or GM-CSFR transmembrane domain. In certain embodiments of the CARs of the disclosure, the transmembrane domain may comprise a sequence encoding a human CD8α transmembrane domain. In certain embodiments of the CARs of the disclosure, the endodomain may comprise a human CD3 endodomain. In certain embodiments of the CARs of the disclosure, the at least one costimulatory domain may comprise a human 4-1BB, CD28, CD40, ICOS, MyD88, OX-40 intracellular segment, or any combination thereof. In certain embodiments of the CARs of the disclosure, the at least one costimulatory domain may comprise a CD28 and/or a 4-1BB costimulatory domain. In certain embodiments of the CARs of the disclosure, the hinge may comprise a sequence derived from a human CD8α, IgG4, and/or CD4 sequence. In certain embodiments of the CARs of the disclosure, the hinge may comprise a sequence derived from a human CD8α sequence.

[0044] In certain embodiments of the methods of the disclosure, the recombinant and non-naturally occurring DNA sequence encoding a transposon further comprises a sequence encoding a chimeric antigen receptor or a portion thereof. The portion of the sequence encoding a chimeric antigen receptor may encode an antigen recognition region. The antigen recognition region may comprise one or more complementarity determining region(s). The antigen recognition region may comprise an antibody, an antibody mimetic, a protein scaffold or a fragment thereof. In certain embodiments, the antibody is a chimeric antibody, a recombinant antibody, a humanized antibody or a human antibody. In certain embodiments, the antibody is affinity-tuned. Nonlimiting examples of antibodies of the disclosure include a single-chain variable fragment (scFv), a VHH, a single domain antibody (sdAB), a small modular immunopharmaceutical (SMIP) molecule, or a nanobody. In certain embodiments, the VHH is camelid. Alternatively, or in addition, in certain embodiments, the VHH is humanized. Nonlimiting examples of antibody fragments of the disclosure include a complementary determining region, a variable region, a heavy chain, a light chain, or any combination thereof. Nonlimiting examples of antibody mimetics of the disclosure include an affibody, an afflilin, an affimer, an affitin, an alphabody, an anticalin, and avimer, a DARPin, a Fynomer, a Kunitz domain peptide, or a monobody. Nonlimiting examples of protein scaffolds of the disclosure include a Centyrin.

[0045] In certain embodiments of the methods of the disclosure, the nucleic acid sequence encoding the transposase enzyme is a DNA sequence, and an amount of the DNA sequence encoding the transposase enzyme and an amount of the DNA sequence encoding the transposon is equal to or less than 10.0 μg per 100 μL of an electroporation or nucleofection reaction. In certain embodiments, a concentration of the amount of the DNA sequence encoding the transposase enzyme and an amount of the DNA sequence encoding the transposon in the electroporation or nucleofection reaction is equal to or less than 100 μg/mL.

[0046] In certain embodiments of the methods of the disclosure, the nucleic acid sequence encoding the transposase enzyme is a DNA sequence, and an amount of the DNA sequence encoding the transposase enzyme and an amount of the DNA sequence encoding the transposon is equal to or less than 7.5 μg per 100 μL of an electroporation or nucleofection reaction. In certain embodiments, a concentration of the amount of the DNA sequence encoding the transposase enzyme and an amount of the DNA sequence encoding the transposon in the electroporation or nucleofection reaction is equal to or less than 75 μg/mL.

[0047] In certain embodiments of the methods of the disclosure, the nucleic acid sequence encoding the transposase enzyme is a DNA sequence, and an amount of the DNA sequence encoding the transposase enzyme and an amount of the DNA sequence encoding the transposon is equal to or less than 6.0 μg per 100 μL of an electroporation or nucleofection reaction. In certain embodiments, a concentration of the amount of the DNA sequence encoding the transposase enzyme and an amount of the DNA sequence encoding the transposon in the electroporation or nucleofection reaction is equal to or less than 60 μg/mL. In certain embodiments, the transposase is a Sleeping Beauty transposase. In certain embodiments, the Sleeping Beauty transposase is a Sleeping Beauty 100X (SB100X) transposase.

[0048] In certain embodiments of the methods of the disclosure, the nucleic acid sequence encoding the transposase enzyme is a DNA sequence, and an amount of the DNA sequence encoding the transposase enzyme and an amount of the DNA sequence encoding the transposon is equal to or less than 5.0 μg per 100 μL of an electroporation or nucleofection reaction. In certain embodiments, a concentration of the amount of the DNA sequence encoding the transposase enzyme and an amount of the DNA sequence encoding the transposon in the electroporation or nucleofection reaction is equal to or less than 50 μg/mL.

[0049] In certain embodiments of the methods of the disclosure, the nucleic acid sequence encoding the transposase enzyme is a DNA sequence, and an amount of the DNA sequence encoding the transposase enzyme and an amount of the DNA sequence encoding the transposon is equal to or less than 2.5 μg per 100 μL of an electroporation or nucleofection reaction. In certain embodiments, a concentration of the amount of the DNA sequence encoding the transposase enzyme and an amount of the DNA sequence encoding the transposon in the electroporation or nucleofection reaction is equal to or less than 25 μg/mL.

[0050] In certain embodiments of the methods of the disclosure, the nucleic acid sequence encoding the transposase enzyme is a DNA sequence, and an amount of the DNA sequence encoding the transposase enzyme and an amount of the DNA sequence encoding the transposon is equal to or less than 1.67 μg per 100 μL of an electroporation or nucleofection reaction. In certain embodiments, a concentration of the amount of the DNA sequence encoding the transposase enzyme and an amount of the DNA sequence encoding the transposon in the electroporation or nucleofection reaction is equal to or less than 16.7 μg/mL. In certain embodiments, the transposase is a Super piggyBac (PB) transposase. In certain embodiments, the piggyBac transposase comprises an amino acid sequence comprising SEQ ID NO: 14487.

[0051] In certain embodiments of the methods of the disclosure, the transposase is a piggyBac transposase. In certain embodiments, the piggyBac transposase comprises an amino acid sequence comprising SEQ ID NO: 14487. In certain embodiments, the piggyBac transposase is a hyperactive variant and wherein the hyperactive variant comprises an amino acid substitution at one or more of positions 30, 165, 282 and 538 of SEQ ID NO: 14487. In certain embodiments, the amino acid substitution at position 30 of SEQ ID NO: 14487 is a substitution of a valine (V) for an isoleucine (I) (I30V). In certain embodiments, the amino acid substitution at position 165 of SEQ ID NO: 14487 is a substitution of a serine (S) for a glycine (G) (G165S). In certain embodiments, the amino acid substitution at position 282 of SEQ ID NO: 14487 is a substitution of a valine (V) for a methionine (M) (M282V). In certain embodiments, the amino acid substitution at position 538 of SEQ ID NO: 14487 is a substitution of a lysine (K) for an asparagine (N) (N538K).

[0052] In certain embodiments of the methods of the disclosure, the nucleic acid sequence encoding the transposase enzyme is a DNA sequence, and (b) wherein an amount of the DNA sequence encoding the transposase enzyme and an amount of the DNA sequence encoding the transposon is equal to or less than 1.67 μg per 100 μL of an electroporation or nucleofection reaction. In certain embodiments, a concentration of the amount of the DNA sequence encoding the transposase enzyme and the amount of the DNA sequence encoding the transposon in the electroporation or nucleofection reaction is equal to or less than 16.7 μg/mL. In certain embodiments, the transposase is a Super piggyBac (PB) transposase. In certain embodiments, the Super piggyBac (PB) transposase enzyme comprises an amino acid sequence at least 75% identical to:

(SEQ ID NO: 14484)
MGSSLDDEHILSALLQSDDELVGEDSDSEVSDHVSEDDVQSDTEEAFI
DEVHEVQPTSSGSEILDEQNVIEQPGSSLASNRILTLPQRTIRGKNKH
CWSTSKSTRRSRVSALNIVRSQRGPTRMCRNIYDPLLCFKLFFTDEII
SEIVKWTNAEISLKRRESMTSATFRDTNEDEIYAFFGILVMTAVRKDN
HMSTDDLFDRSLSMVYVSVMSRDRFDFLIRCLRMDDKSIRPTLRENDV
FTPVRKIWDLFIHQCIQNYTPGAHLTIDEQLLGFRGRCPFRVYIPNKP
SKYGIKILMMCDSGTKYMINGMPYLGRGTQTNGVPLGEYYVKELSKPV
HGSCRNITCDNWFTSIPLAKNLLQEPYKLTIVGTVRSNKREIPEVLKN
SRSRPVGTSMFCFDGPLTLVSYKPKPAKMVYLLSSCDEDASINESTGK
PQMVMYYNQTKGGVDTLDQMCSVMTCSRKTNRWPMALLYGMINIACIN
SFIIYSHNVSSKGEKVQSRKKFMRNLYMSLTSSFMRKRLEAPTLKRYL
RDNISNILPKEVPGTSDDSTEEPVMKKRTYCTYCPSKIRRKANASCKK
CKKVICREHNIDMCQSCF.

[0053] In certain embodiments of the methods of the disclosure, the nucleic acid sequence encoding the transposase enzyme is a DNA sequence, and an amount of the DNA sequence encoding the transposase enzyme and an amount of the DNA sequence encoding the transposon is equal to or less than 0.55 μg per 100 μL of an electroporation or nucleofection reaction. In certain embodiments, a concentration of the amount of the DNA sequence encoding the transposase enzyme and an amount of the DNA sequence encoding the transposon in the electroporation or nucleofection reaction is equal to or less than 5.5 μg/mL.

[0054] In certain embodiments of the methods of the disclosure, the nucleic acid sequence encoding the transposase enzyme is a DNA sequence, and an amount of the DNA sequence encoding the transposase enzyme and an amount of the DNA sequence encoding the transposon is equal to or less than 0.19 μg per 100 μL of an electroporation or nucleofection reaction. In certain embodiments, a concentration of the amount of the DNA sequence encoding the transposase enzyme and an amount of the DNA sequence encoding the transposon in the electroporation or nucleofection reaction is equal to or less than 1.9 μg/mL.

[0055] In certain embodiments of the methods of the disclosure, the nucleic acid sequence encoding the transposase enzyme is a DNA sequence, and an amount of the DNA sequence encoding the transposase enzyme and an amount of the DNA sequence encoding the transposon is equal to or less than 0.10 μg per 100 μL of an electroporation or nucleofection reaction. In certain embodiments, a concentration of the amount of the DNA sequence encoding the transposase enzyme and an amount of the DNA sequence encoding the transposon in the electroporation or nucleofection reaction is equal to or less than 1.0 μg/mL.

[0056] In certain embodiments of the methods of the disclosure, the nucleic acid sequence encoding the transposase enzyme is a RNA sequence, and an amount of the DNA sequence encoding the transposon is equal to or less than 10.0 μg per 100 μL of an electroporation or nucleofection reaction. In certain embodiments, a concentration of the amount of the DNA sequence encoding the transposon in the electroporation or nucleofection reaction is equal to or less than 100 μg/mL.

[0057] In certain embodiments of the methods of the disclosure, the nucleic acid sequence encoding the transposase enzyme is a RNA sequence, and an amount of the DNA sequence encoding the transposon is equal to or less than 7.5 μg per 100 μL of an electroporation or nucleofection reaction. In certain embodiments, a concentration of the amount of the DNA sequence encoding the transposon in the electroporation or nucleofection reaction is equal to or less than 75 μg/mL.

[0058] In certain embodiments of the methods of the disclosure, the nucleic acid sequence encoding the transposase enzyme is a RNA sequence, and an amount of the DNA sequence encoding the transposon is equal to or less than 6.0 μg per 100 μL of an electroporation or nucleofection reaction. In certain embodiments, a concentration of the amount of the DNA sequence encoding the transposon in the electroporation or nucleofection reaction is equal to or less than 60 μg/mL. In certain embodiments, the transposase is a Sleeping Beauty transposase. In certain embodiments, the Sleeping Beauty transposase is a Sleeping Beauty 100X (SB100X) transposase.

[0059] In certain embodiments of the methods of the disclosure, the nucleic acid sequence encoding the transposase enzyme is a RNA sequence, and an amount of the DNA sequence encoding the transposon is equal to or less than 5.0 μg per 100 μL of an electroporation or nucleofection reaction. In certain embodiments, a concentration of the amount of the DNA sequence encoding the transposon in the electroporation or nucleofection reaction is equal to or less than 50 μg/mL.

[0060] In certain embodiments of the methods of the disclosure, the nucleic acid sequence encoding the transposase enzyme is a RNA sequence, and an amount of the DNA sequence encoding the transposon is equal to or less than 2.5 μg per 100 μL of an electroporation or nucleofection reaction. In certain embodiments, a concentration of the amount of the DNA sequence encoding the transposon in the electroporation or nucleofection reaction is equal to or less than 25 μg/mL.

[0061] In certain embodiments of the methods of the disclosure, the nucleic acid sequence encoding the transposase enzyme is a RNA sequence, and an amount of the DNA sequence encoding the transposon is equal to or less than 1.67 μg per 100 μL of an electroporation or nucleofection reaction. In certain embodiments, a concentration of the amount of the DNA sequence encoding the transposon in the electroporation or nucleofection reaction is equal to or less than 16.7 μg/mL. In certain embodiments, the transposase is a Super piggyBac (PB) transposase.

[0062] In certain embodiments of the methods of the disclosure, the nucleic acid sequence encoding the transposase enzyme is a RNA sequence, and an amount of the DNA sequence encoding the transposon is equal to or less than 0.55 μg per 100 μL of an electroporation or nucleofection reaction. In certain embodiments, a concentration of the amount of the DNA sequence encoding the transposon in the electroporation or nucleofection reaction is equal to or less than 5.5 μg/mL.

[0063] In certain embodiments of the methods of the disclosure, the nucleic acid sequence encoding the transposase enzyme is a RNA sequence, and an amount of the DNA sequence encoding the transposon is equal to or less than 0.19 μg per 100 μL of an electroporation or nucleofection reaction. In certain embodiments, a concentration of the amount of the DNA sequence encoding the transposon in the electroporation or nucleofection reaction is equal to or less than 1.9 μg/mL.

[0064] In certain embodiments of the methods of the disclosure, the nucleic acid sequence encoding the transposase enzyme is a RNA sequence, and an amount of the DNA sequence encoding the transposon is equal to or less than 0.1 μg per 100 μL of an electroporation or nucleofection reaction. In certain embodiments, a concentration of the amount of the DNA sequence encoding the transposon in the electroporation or nucleofection reaction is equal to or less than 1.0 μg/mL.

[0065] The disclosure provides an immune cell modified according to the method of the disclosure. The immune cell may be a T-lymphocyte, a Natural Killer (NK) cell, a Cytokine-induced Killer (CIK) cell or a Natural Killer T (NKT) cell. The immune cell may be further modified by a second gene editing tool, including, but not limited to those gene editing tools comprising an endonuclease operably-linked to either a Cas9 or a TALE sequence. In certain embodiments of the second gene editing tool, the endonuclease is operably-linked to either a Cas9 or a TALE sequence covalently. In certain embodiments of the second gene editing tool, the endonuclease is operably-linked to either a Cas9 or a TALE sequence non-covalently. In certain embodiments, the endonuclease comprises a Clo051 domain. In certain embodiments, Clo051 domain comprises a sequence of

(SEQ ID NO: 14503)
EGIKSNISLLKDELRGQISHISHEYLSLIDLAFDSKQNRLFEMKVLEL
LVNEYGFKGRHLGGSRKPDGIVYSTTLEDNFGIIVDTKAYSEGYSLPI
SQADEMERYVRENSNRDEEVNPNKWWENFSEEVKKYYFVFISGSFKGK
FEEQLRRLSMTTGVNGSAVNVVNLLLGAEKIRSGEMTIEELERAMFNN
SEFILKY.

[0066] In certain embodiments, the Cas9 is an inactivated Cas9 (dCas9). In certain embodiments, the inactivated Cas9 is isolated or derived from Staphylococcus aureus and comprises D10A and N580A within the catalytic site. In certain embodiments, the Cas9 is a small and inactivated Cas9 (dSaCas9). In certain embodiments, the dSaCas9 comprises the amino acid sequence of

| (SEQ ID NO: 14497) | |
|---|---|
| 1 | MKRNYILGLA IGITSVGYGI IDYETRDVID AGVRLFKEAN VENNEGRRSK RGARRLKRRR |
| 61 | RHRIQRVKKL LFDYNLLTDH SELSGINPYE ARVKGLSQKL SEEEFSAALL HLAKRRGVHN |
| 121 | VNEVEEDTGN ELSTKEQISR NSKALEEKYV AELQLERLKK DGEVRGSINR FKTSDYVKEA |
| 181 | KQLLKVQKAY HQLDQSFIDT YIDLLETRRT YYEGPGEGSP FGWKDIKEWY EMLMGHCTYF |
| 241 | PEELRSVKYA YNADLYNALN DLNNLVITRD ENEKLEYYEK FQIIENVFKQ KKKPTLKQIA |
| 301 | KEILVNEEDI KGYRVTSTGK PEFTNLKVYH DIKDITARKE IIENAELLDQ IAKILTIYQS |
| 361 | SEDIQEELTN LNSELTQEEI EQISNLKGYT GTHNLSLKAI NLILDELWHT NDNQIAIFNR |
| 421 | LKLVPKKVDL SQQKEIPTTL VDDFILSPVV KRSFIQSIKV INAIIKKYGL PNDIIIELAR |
| 481 | EKNSKDAQKM INEMQKRNRQ TNERIEEIIR TTGKENAKYL IEKIKLHDMQ EGKCLYSLEA |
| 541 | IPLEDLLNNP FNYEVDHIIP RSVSFDNSFN NKVLVKQEEA SKKGNRTPFQ YLSSSDSKIS |
| 601 | YETFKKHILN LAKGKGRISK TKKEYLLEER DINRFSVQKD FINRNLVDTR YATRGLMNLL |
| 661 | RSYFRVNNLD VKVKSINGGF TSFLRRKWKF KKERNKGYKH HAEDALIIAN ADFIFKEWKK |
| 721 | LDKAKKVMEN QMFEEKQAES MPEIETEQEY KEIFITPHQI KHIKDFKDYK YSHRVDKKPN |
| 781 | RELINDTLYS TRKDDKGNTL IVNNLNGLYD KDNDKLKKLI NKSPEKLLMY HHDPQTYQKL |
| 841 | KLIMEQYGDE KNPLYKYYEE TGNYLTKYSK KDNGPVIKKI KYYGNKLNAH LDITDDYPNS |
| 901 | RNKVVKLSLK PYRFDVYLDN GVYKFVTVKN LDVIKKENYY EVNSKCYEEA KKLKKISNQA |
| 961 | EFIASFYNND LIKINGELYR VIGVNNDLLN RIEVNMIDIT YREYLENMND KRPPRIIKTI |
| 1021 | ASKTQSIKKY STDILGNLYE VKSKKHPQII KKG. |

[0067] In certain embodiments, the Cas9 is an inactivated Cas9 (dCas9). In certain embodiments, the inactivated Cas9 (dCas9) is isolated or derived from Staphylococcus pyogenes and comprises D10A and H840A within the catalytic site. In certain embodiments, the dCas9 comprises the amino acid sequence of:

| (SEQ ID NO: 14498) | |
|---|---|
| 1 | XDKKYSIGLA IGTNSVGWAV ITDEYKVPSK KFKVLGNTDR HSIKKNLIGA LLFDSGETAE |
| 61 | ATRLKRTARR RYTRRKNRIC YLQEIFSNEM AKVDDSFFHR LEESFLVEED KKHERHPIFG |
| 121 | NIVDEVAYHE KYPTIYHLRK KLVDSTDKAD LRLIYLALAH MIKFRGHFLI EGDLNPDNSD |
| 181 | VDKLFIQLVQ TYNQLFEENP INASGVDAKA ILSARLSKSR RLENLIAQLP GEKKNGLFGN |
| 241 | LIALSLGLTP NFKSNFDLAE DAKLQLSKDT YDDDLDNLLA QIGDQYADLF LAAKNLSDAI |
| 301 | LLSDILRVNT EITKAPLSAS MIKRYDEHHQ DLTLLKALVR QQLPEKYKEI FFDQSKNGYA |
| 361 | GYIDGGASQE EFYKFIKPIL EKMDGTEELL VKLNREDLLR KQRTFDNGSI PHQIHLGELH |
| 421 | AILRRQEDFY PFLKDNREKI EKILTFRIPY YVGPLARGNS RFAWMTRKSE ETITPWNFEE |
| 481 | VVDKGASAQS FIERMTNFDK NLPNEKVLPK HSLLYEYFTV YNELTKVKYV TEGMRKPAFL |
| 541 | SGEQKKAIVD LLFKTNRKVT VKQLKEDYFK KIECFDSVEI SGVEDRFNAS LGTYHDLLKI |
| 601 | IKDKDFLDNE ENEDILEDIV LTLTLFEDRE MIEERLKTYA HLFDDKVMKQ LKRRRYTGWG |
| 661 | RLSRKLINGI RDKQSGKTIL DFLKSDGFAN RNFMQLIHDD SLTFKEDIQK AQVSGQGDSL |
| 721 | HEHIANLAGS PAIKKGILQT VKVVDELVKV MGRHKPENIV IEMARENQTT QKGQKNSRER |
| 781 | MKRIEEGIKE LGSQILKEHP VENTQLQNEK LYLYYLQNGR DMYVDQELDI NRLSDYDVDA |
| 841 | IVPQSFLKDD SIDNKVLTRS DKNRGKSDNV PSEEVVKKMK NYWRQLLNAK LITQRKFDNL |
| 901 | TKAERGGLSE LDKAGFIKRQ LVETRQITKH VAQILDSRMN TKYDENDKLI REVKVITLKS |
| 961 | KLVSDFRKDF QFYKVREINN YHHAHDAYLN AVVGTALIKK YPKLESEFVY GDYKVYDVRK |
| 1021 | MIAKSEQEIG KATAKYFFYS NIMNFFKTEI TLANGEIRKR PLIETNGETG EIVWDKGRDF |
| 1081 | ATVRKVLSMP QVNIVKKTEV QTGGFSKESI LPKRNSDKLI ARKKDWDPKK YGGFDSPTVA |
| 1141 | YSVLVVAKVE KGKSKKLKSV KELLGITIME RSSFEKNPID FLEAKGYKEV KKDLIIKLPK |
| 1201 | YSLFELENGR KRMLASAGEL QKGNELALPS KYVNFLYLAS HYEKLKGSPE DNEQKQLFVE |
| 1261 | QHKHYLDEII EQISEFSKRV ILADANLDKV LSAYNKHRDK PIREQAENII HLFTLTNLGA |
| 1321 | PAAFKYFDTT IDRKRYTSTK EVLDATLIHQ SITGLYETRI DLSQLGGD. |

[0068] In certain embodiments, the Cas9 is an inactivated Cas9 (dCas9). In certain embodiments, the inactivated Cas9 (dCas9) is isolated or derived from Staphylococcus pyogenes and comprises D10A and H840A within the catalytic site. In certain embodiments, the dCas9 comprises the amino acid sequence of:

| (SEQ ID NO: 14499) | |
|---|---|
| 1 | MDKKYSIGLA IGTNSVGWAV ITDEYKVPSK KFKVLGNTDR HSIKKNLIGA LLFDSGETAE |
| 61 | ATRLKRTARR RYTRRKNRIC YLQEIFSNEM AKVDDSFFHR LEESFLVEED KKHERHPIFG |
| 121 | NIVDEVAYHE KYPTIYHLRK KLVDSTDKAD LRLIYLALAH MIKFRGHFLI EGDLNPDNSD |
| 181 | VDKLFIQLVQ TYNQLFEENP INASGVDAKA ILSARLSKSR RLENLIAQLP GEKKNGLFGN |
| 241 | LIALSLGLTP NFKSNFDLAE DAKLQLSKDT YDDDLDNLLA QIGDQYADLF LAAKNLSDAI |
| 301 | LLSDILRVNT EITKAPLSAS MIKRYDEHHQ DLTLLKALVR QQLPEKYKEI FFDQSKNGYA |
| 361 | GYIDGGASQE EFYKFIKPIL EKMDGTEELL VKLNREDLLR KQRTFDNGSI PHQIHLGELH |
| 421 | AILRRQEDFY PFLKDNREKI EKILTFRIPY YVGPLARGNS RFAWMTRKSE ETITPWNFEE |
| 481 | VVDKGASAQS FIERMTNFDK NLPNEKVLPK HSLLYEYFTV YNELTKVKYV TEGMRKPAFL |
| 541 | SGEQKKAIVD LLFKTNRKVT VKQLKEDYFK KIECFDSVEI SGVEDRFNAS LGTYHDLLKI |
| 601 | IKDKDFLDNE ENEDILEDIV LTLTLFEDRE MIEERLKTYA HLFDDKVMKQ LKRRRYTGWG |
| 661 | RLSRKLINGI RDKQSGKTIL DFLKSDGFAN RNFMQLIHDD SLTFKEDIQK AQVSGQGDSL |
| 721 | HEHIANLAGS PAIKKGILQT VKVVDELVKV MGRHKPENIV IEMARENQTT QKGQKNSRER |
| 781 | MKRIEEGIKE LGSQILKEHP VENTQLQNEK LYLYYLQNGR DMYVDQELDI NRLSDYDVDA |
| 841 | IVPQSFLKDD SIDNKVLTRS DKNRGKSDNV PSEEVVKKMK NYWRQLLNAK LITQRKFDNL |
| 901 | TKAERGGLSE LDKAGFIKRQ LVETRQITKH VAQILDSRMN TKYDENDKLI REVKVITLKS |
| 961 | KLVSDFRKDF QFYKVREINN YHHAHDAYLN AVVGTALIKK YPKLESEFVY GDYKVYDVRK |
| 1021 | MIAKSEQEIG KATAKYFFYS NIMNFFKTEI TLANGEIRKR PLIETNGETG EIVWDKGRDF |
| 1081 | ATVRKVLSMP QVNIVKKTEV QTGGFSKESI LPKRNSDKLI ARKKDWDPKK YGGFDSPTVA |
| 1141 | YSVLVVAKVE KGKSKKLKSV KELLGITIME RSSFEKNPID FLEAKGYKEV KKDLIIKLPK |
| 1201 | YSLFELENGR KRMLASAGEL QKGNELALPS KYVNFLYLAS HYEKLKGSPE DNEQKQLFVE |
| 1261 | QHKHYLDEII EQISEFSKRV ILADANLDKV LSAYNKHRDK PIREQAENII HLFTLTNLGA |
| 1321 | PAAFKYFDTT IDRKRYTSTK EVLDATLIHQ SITGLYETRI DLSQLGGD. |

[0069] The disclosure provides an immune cell modified according to the method of the disclosure. The immune cell may be a T-lymphocyte, a Natural Killer (NK) cell, a Cytokine-induced Killer (CIK) cell or a Natural Killer T (NKT) cell. The immune cell may be further modified by a second gene editing tool, including, but not limited to those gene editing tools comprising an endonuclease operably-linked to either a Cas9 or a TALE sequence. Alternatively or in addition, the second gene editing tool may include an excision-only piggyBac transposase to re-excise the inserted sequences or any portion thereof. For example, the excision-only piggyBac transposase may be used to “re-excise” the transposon.

[0070] In certain embodiments, the transposon is a piggyBac transposon. In certain embodiments, and, in particular, those embodiments wherein the transposon is a piggyBac transposon, the transposase is a piggyBac™ or a Super piggyBac™ (SPB) transposase. In certain embodiments, and, in particular, those embodiments wherein the transposase is a Super piggyBac™ (SPB) transposase, the sequence encoding the transposase is an mRNA sequence.

[0071] In certain embodiments of the methods of the disclosure, the transposase enzyme is a piggyBac™ (PB) transposase enzyme. The piggyBac (PB) transposase enzyme may comprise or consist of an amino acid sequence at least 75%, 80%, 85%, 90%, 95%, 99% or any percentage in between identical to:

(SEQ ID NO: 14487)

| | |
|---|---|
| 1 | MGSSLDDEHI LSALLQSDDE LVGEDSDSEI SDHVSEDDVQ |
| | SDTEEAFIDE VHEVQPTSSG |
| 61 | SEILDEQNVI EQPGSSLASN RILTLPQRTI RGKNKHCWST |
| | SKSTRRSRVS ALNIVRSQRG |
| 121 | PTRMCRNIYD PLLCFKLFFT DEIISEIVKW TNAEISLKRR |
| | ESMTGATFRD TNEDEIYAFF |
| 181 | GILVMTAVRK DNHMSTDDLF DRSLSMVYVS VMSRDRFDFL |
| | IRCLRMDDKS IRPTLRENDV |
| 241 | FTPVRKIWDL FIHQCIQNYT PGAHLTIDEQ LLGFRGRCPF |
| | RMYIPNKPSK YGIKILMMCD |
| 301 | SGTKYMINGM PYLGRGTQTN GVPLGEYYVK ELSKPVHGSC |
| | RNITCDNWFT SIPLAKNLLQ |
| 361 | EPYKLTIVGT VRSNKREIPE VLKNSRSRPV GTSMFCFDGP |
| | LTLVSYKPKP AKMVYLLSSC |
| 421 | DEDASINEST GKPQMVMYYN QTKGGVDTLD QMCSVMTCSR |
| | KTNRWPMALL YGMINIACIN |
| 481 | SFIIYSHNVS SKGEKVQSRK KFMRNLYMSL TSSFMRKRLE |
| | APTLKRYLRD NISNILPNEV |
| 541 | PGTSDDSTEE PVMKKRTYCT YCPSKIRRKA NASCKKCKKV |
| | ICREHNIDMC QSCF. |

[0072] In certain embodiments of the methods of the disclosure, the transposase enzyme is a piggyBac™ (PB) transposase enzyme that comprises or consists of an amino acid sequence having an amino acid substitution at one or more of positions 30, 165, 282, or 538 of the sequence:

(SEQ ID NO: 14487)

| | |
|---|---|
| 1 | MGSSLDDEHI LSALLQSDDE LVGEDSDSEI SDHVSEDDVQ |
| | SDTEEAFIDE VHEVQPTSSG |
| 61 | SEILDEQNVI EQPGSSLASN RILTLPQRTI RGKNKHCWST |
| | SKSTRRSRVS ALNIVRSQRG |
| 121 | PTRMCRNIYD PLLCFKLFFT DEIISEIVKW TNAEISLKRR |
| | ESMTGATFRD TNEDEIYAFF |
| 181 | GILVMTAVRK DNHMSTDDLF DRSLSMVYVS VMSRDRFDFL |
| | IRCLRMDDKS IRPTLRENDV |
| 241 | FTPVRKIWDL FIHQCIQNYT PGAHLTIDEQ LLGFRGRCPF |
| | RMYIPNKPSK YGIKILMMCD |
| 301 | SGTKYMINGM PYLGRGTQTN GVPLGEYYVK ELSKPVHGSC |
| | RNITCDNWFT SIPLAKNLLQ |
| 361 | EPYKLTIVGT VRSNKREIPE VLKNSRSRPV GTSMFCFDGP |
| | LTLVSYKPKP AKMVYLLSSC |
| 421 | DEDASINEST GKPQMVMYYN QTKGGVDTLD QMCSVMTCSR |
| | KTNRWPMALL YGMINIACIN |
| 481 | SFIIYSHNVS SKGEKVQSRK KFMRNLYMSL TSSFMRKRLE |
| | APTLKRYLRD NISNILPNEV |
| 541 | PGTSDDSTEE PVMKKRTYCT YCPSKIRRKA NASCKKCKKV |
| | ICREHNIDMC QSCF. |

[0073] In certain embodiments, the transposase enzyme is a piggyBac™ (PB) transposase enzyme that comprises or consists of an amino acid sequence having an amino acid substitution at two or more of positions 30, 165, 282, or 538 of the sequence of SEQ ID NO: 14487. In certain embodiments, the transposase enzyme is a piggyBac™ (PB) transposase enzyme that comprises or consists of an amino acid sequence having an amino acid substitution at three or more of positions 30, 165, 282, or 538 of the sequence of SEQ ID NO: 14487. In certain embodiments, the transposase enzyme is a piggyBac™ (PB) transposase enzyme that comprises or consists of an amino acid sequence having an amino acid substitution at each of the following positions 30, 165, 282, and 538 of the sequence of SEQ ID NO: 14487. In certain embodiments, the amino acid substitution at position 30 of the sequence of SEQ ID NO: 14487 is a substitution of a valine (V) for an isoleucine (I). In certain embodiments, the amino acid substitution at position 165 of the sequence of SEQ ID NO: 14487 is a substitution of a serine (S) for a glycine (G). In certain embodiments, the amino acid substitution at position 282 of the sequence of SEQ ID NO: 14487 is a substitution of a valine (V) for a methionine (M). In certain embodiments, the amino acid substitution at position 538 of the sequence of SEQ ID NO: 14487 is a substitution of a lysine (K) for an asparagine (N).

[0074] In certain embodiments of the methods of the disclosure, the transposase enzyme is a Super piggyBac™ (SPB) transposase enzyme. In certain embodiments, the Super piggyBac™ (SPB) transposase enzymes of the disclosure may comprise or consist of the amino acid sequence of the sequence of SEQ ID NO: 14487 wherein the amino acid substitution at position 30 is a substitution of a valine (V) for an isoleucine (I), the amino acid substitution at position 165 is a substitution of a serine (S) for a glycine (G), the amino acid substitution at position 282 is a substitution of a valine (V) for a methionine (M), and the amino acid substitution at position 538 is a substitution of a lysine (K) for an asparagine (N). In certain embodiments, the Super piggyBac™ (SPB) transposase enzyme may comprise or consist of an amino acid sequence at least 75%, 80%, 85%, 90%, 95%, 99% or any percentage in between identical to:

(SEQ ID NO: 14484)

| | |
|---|---|
| 1 | MGSSLDDEHI LSALLQSDDE LVGEDSDSEV SDHVSEDDVQ |
| | SDTEEAFIDE VHEVQPTSSG |
| 61 | SEILDEQNVI EQPGSSLASN RILTLPQRTI RGKNKHCWST |
| | SKSTRRSRVS ALNIVRSQRG |
| 121 | PTRMCRNIYD PLLCFKLFFT DEIISEIVKW TNAEISLKRR |
| | ESMTSATFRD TNEDEIYAFF |
| 181 | GILVMTAVRK DNHMSTDDLF DRSLSMVYVS VMSRDRFDFL |
| | IRCLRMDDKS IRPTLRENDV |
| 241 | FTPVRKIWDL FIHQCIQNYT PGAHLTIDEQ LLGFRGRCPF |
| | RVYIPNKPSK YGIKILMMCD |
| 301 | SGTKYMINGM PYLGRGTQTN GVPLGEYYVK ELSKPVHGSC |
| | RNITCDNWFT SIPLAKNLLQ |
| 361 | EPYKLTIVGT VRSNKREIPE VLKNSRSRPV GTSMFCFDGP |
| | LTLVSYKPKP AKMVYLLSSC |
| 421 | DEDASINEST GKPQMVMYYN QTKGGVDTLD QMCSVMTCSR |
| | KTNRWPMALL YGMINIACIN |
| 481 | SFIIYSHNVS SKGEKVQSRK KFMRNLYMSL TSSFMRKRLE |
| | APTLKRYLRD NISNILPKEV |
| 541 | PGTSDDSTEE PVMKKRTYCT YCPSKIRRKA NASCKKCKKV |
| | ICREHNIDMC QSCF. |

[0075] In certain embodiments of the methods of the disclosure, including those embodiments wherein the transposase comprises the above-described mutations at positions 30, 165, 282 and/or 538, the piggyBac™ or Super piggyBac™ transposase enzyme may further comprise an amino acid substitution at one or more of positions 3, 46, 82, 103, 119, 125, 177, 180, 185, 187, 200, 207, 209, 226, 235, 240, 241, 243, 258, 296, 298, 311, 315, 319, 327, 328, 340, 421, 436, 456, 470, 486, 503, 552, 570 and 591 of the sequence of SEQ ID NO: 14487 or SEQ ID NO: 14484. In certain embodiments, including those embodiments wherein the transposase comprises the above-described mutations at positions 30, 165, 282 and/or 538, the piggyBac™ or Super piggyBac™ transposase enzyme may further comprise an amino acid substitution at one or more of positions 46, 119, 125, 177, 180, 185, 187, 200, 207, 209, 226, 235, 240, 241, 243, 296, 298, 311, 315, 319, 327, 328, 340, 421, 436, 456, 470, 485, 503, 552 and 570. In certain embodiments, the amino acid substitution at position 3 of SEQ ID NO: 14487 or SEQ ID NO: 14484 is a substitution of an asparagine (N) for a serine (S). In certain embodiments, the amino acid substitution at position 46 of SEQ ID NO: 14487 or SEQ ID NO: 14484 is a substitution of a serine (S) for an alanine (A). In certain embodiments, the amino acid substitution at position 46 of SEQ ID NO: 14487 or SEQ ID NO: 14484 is a substitution of a threonine (T) for an alanine (A). In certain embodiments, the amino acid substitution at position 82 of SEQ ID NO: 14487 or SEQ ID NO: 14484 is a substitution of a tryptophan (W) for an isoleucine (I). In certain embodiments, the amino acid substitution at position 103 of SEQ ID NO: 14487 or SEQ ID NO: 14484 is a substitution of a proline (P) for a serine (S). In certain embodiments, the amino acid substitution at position 119 of SEQ ID NO: 14487 or SEQ ID NO: 14484 is a substitution of a proline (P) for an arginine (R). In certain embodiments, the amino acid substitution at position 125 of SEQ ID NO: 14487 or SEQ ID NO: 14484 is a substitution of an alanine (A) a cysteine (C). In certain embodiments, the amino acid substitution at position 125 of SEQ ID NO: 14487 or SEQ ID NO: 14484 is a substitution of a leucine (L) for a cysteine (C). In certain embodiments, the amino acid substitution at position 177 of SEQ ID NO: 14487 or SEQ ID NO: 14484 is a substitution of a lysine (K) for a tyrosine (Y). In certain embodiments, the amino acid substitution at position 177 of SEQ ID NO: 14487 or SEQ ID NO: 14484 is a substitution of a histidine (H) for a tyrosine (Y). In certain embodiments, the amino acid substitution at position 180 of SEQ ID NO: 14487 or SEQ ID NO: 14484 is a substitution of a leucine (L) for a phenylalanine (F). In certain embodiments, the amino acid substitution at position 180 of SEQ ID NO: 14487 or SEQ ID NO: 14484 is a substitution of an isoleucine (I) for a phenylalanine (F). In certain embodiments, the amino acid substitution at position 180 of SEQ ID NO: 14487 or SEQ ID NO: 14484 is a substitution of a valine (V) for a phenylalanine (F). In certain embodiments, the amino acid substitution at position 185 of SEQ ID NO: 14487 or SEQ ID NO: 14484 is a substitution of a leucine (L) for a methionine (M). In certain embodiments, the amino acid substitution at position 187 of SEQ ID NO: 14487 or SEQ ID NO: 14484 is a substitution of a glycine (G) for an alanine (A). In certain embodiments, the amino acid substitution at position 200 of SEQ ID NO: 14487 or SEQ ID NO: 14484 is a substitution of a tryptophan (W) for a phenylalanine (F). In certain embodiments, the amino acid substitution at position 207 of SEQ ID NO: 14487 or SEQ ID NO: 14484 is a substitution of a proline (P) for a valine (V). In certain embodiments, the amino acid substitution at position 209 of SEQ ID NO: 14487 or SEQ ID NO: 14484 is a substitution of a phenylalanine (F) for a valine (V). In certain embodiments, the amino acid substitution at position 226 of SEQ ID NO: 14487 or SEQ ID NO: 14484 is a substitution of a phenylalanine (F) for a methionine (M). In certain embodiments, the amino acid substitution at position 235 of SEQ ID NO: 14487 or SEQ ID NO: 14484 is a substitution of an arginine (R) for a leucine (L). In certain embodiments, the amino acid substitution at position 240 of SEQ ID NO: 14487 or SEQ ID NO: 14484 is a substitution of a lysine (K) for a valine (V). In certain embodiments, the amino acid substitution at position 241 of SEQ ID NO: 14487 or SEQ ID NO: 14484 is a substitution of a leucine (L) for a phenylalanine (F). In certain embodiments, the amino acid substitution at position 243 of SEQ ID NO: 14487 or SEQ ID NO: 14484 is a substitution of a lysine (K) for a proline (P). In certain embodiments, the amino acid substitution at position 258 of SEQ ID NO: 14487 or SEQ ID NO: 14484 is a substitution of a serine (S) for an asparagine (N). In certain embodiments, the amino acid substitution at position 296 of SEQ ID NO: 14487 or SEQ ID NO: 14484 is a substitution of a tryptophan (W) for a leucine (L). In certain embodiments, the amino acid substitution at position 296 of SEQ ID NO: 14487 or SEQ ID NO: 14484 is a substitution of a tyrosine (Y) for a leucine (L). In certain embodiments, the amino acid substitution at position 296 of SEQ ID NO: 14487 or SEQ ID NO: 14484 is a substitution of a phenylalanine (F) for a leucine (L). In certain embodiments, the amino acid substitution at position 298 of SEQ ID NO: 14487 or SEQ ID NO: 14484 is a substitution of a leucine (L) for a methionine (M). In certain embodiments, the amino acid substitution at position 298 of SEQ ID NO: 14487 or SEQ ID NO: 14484 is a substitution of an alanine (A) for a methionine (M). In certain embodiments, the amino acid substitution at position 298 of SEQ ID NO: 14487 or SEQ ID NO: 14484 is a substitution of a valine (V) for a methionine (M). In certain embodiments, the amino acid substitution at position 311 of SEQ ID NO: 14487 or SEQ ID NO: 14484 is a substitution of an isoleucine (I) for a proline (P). In certain embodiments, the amino acid substitution at position 311 of SEQ ID NO: 14487 or SEQ ID NO: 14484 is a substitution of a valine for a proline (P). In certain embodiments, the amino acid substitution at position 315 of SEQ ID NO: 14487 or SEQ ID NO: 14484 is a substitution of a lysine (K) for an arginine (R). In certain embodiments, the amino acid substitution at position 319 of SEQ ID NO: 14487 or SEQ ID NO: 14484 is a substitution of a glycine (G) for a threonine (T). In certain embodiments, the amino acid substitution at position 327 of SEQ ID NO: 14487 or SEQ ID NO: 14484 is a substitution of an arginine (R) for a tyrosine (Y). In certain embodiments, the amino acid substitution at position 328 of SEQ ID NO: 14487 or SEQ ID NO: 14484 is a substitution of a valine (V) for a tyrosine (Y). In certain embodiments, the amino acid substitution at position 340 of SEQ ID NO: 14487 or SEQ ID NO: 14484 is a substitution of a glycine (G) for a cysteine (C). In certain embodiments, the amino acid substitution at position 340 of SEQ ID NO: 14487 or SEQ ID NO: 14484 is a substitution of a leucine (L) for a cysteine (C). In certain embodiments, the amino acid substitution at position 421 of SEQ ID NO: 14487 or SEQ ID NO: 14484 is a substitution of a histidine (H) for the aspartic acid (D). In certain embodiments, the amino acid substitution at position 436 of SEQ ID NO: 14487 or SEQ ID NO: 14484 is a substitution of an isoleucine (I) for a valine (V). In certain embodiments, the amino acid substitution at position 456 of SEQ ID NO: 14487 or SEQ ID NO: 14484 is a substitution of a tyrosine (Y) for a methionine (M). In certain embodiments, the amino acid substitution at position 470 of SEQ ID NO: 14487 or SEQ ID NO: 14484 is a substitution of a phenylalanine (F) for a leucine (L). In certain embodiments, the amino acid substitution at position 485 of SEQ ID NO: 14487 or SEQ ID NO: 14484 is a substitution of a lysine (K) for a serine (S). In certain embodiments, the amino acid substitution at position 503 of SEQ ID NO: 14487 or SEQ ID NO: 14484 is a substitution of a leucine (L) for a methionine (M). In certain embodiments, the amino acid substitution at position 503 of SEQ ID NO: 14487 or SEQ ID NO: 14484 is a substitution of an isoleucine (I) for a methionine (M). In certain embodiments, the amino acid substitution at position 552 of SEQ ID NO: 14487 or SEQ ID NO: 14484 is a substitution of a lysine (K) for a valine (V). In certain embodiments, the amino acid substitution at position 570 of SEQ ID NO: 14487 or SEQ ID NO: 14484 is a substitution of a threonine (T) for an alanine (A). In certain embodiments, the amino acid substitution at position 591 of SEQ ID NO: 14487 or SEQ ID NO: 14484 is a substitution of a proline (P) for a glutamine (Q). In certain embodiments, the amino acid substitution at position 591 of SEQ ID NO: 14487 or SEQ ID NO: 14484 is a substitution of an arginine (R) for a glutamine (Q).

[0076] In certain embodiments of the methods of the disclosure, including those embodiments wherein the transposase comprises the above-described mutations at positions 30, 165, 282 and/or 538, the piggyBac™ transposase enzyme may comprise or the Super piggyBac™ transposase enzyme may further comprise an amino acid substitution at one or more of positions 103, 194, 372, 375, 450, 509 and 570 of the sequence of SEQ ID NO: 14487 or SEQ ID NO: 14484. In certain embodiments of the methods of the disclosure, including those embodiments wherein the transposase comprises the above-described mutations at positions 30, 165, 282 and/or 538, the piggyBac™ transposase enzyme may comprise or the Super piggyBac™ transposase enzyme may further comprise an amino acid substitution at two, three, four, five, six or more of positions 103, 194, 372, 375, 450, 509 and 570 of the sequence of SEQ ID NO: 14487 or SEQ ID NO: 14484. In certain embodiments, including those embodiments wherein the transposase comprises the above-described mutations at positions 30, 165, 282 and/or 538, the piggyBac™ transposase enzyme may comprise or the Super piggyBac™ transposase enzyme may further comprise an amino acid substitution at positions 103, 194, 372, 375, 450, 509 and 570 of the sequence of SEQ ID NO: 14487 or SEQ ID NO: 14484. In certain embodiments, the amino acid substitution at position 103 of SEQ ID NO: 14487 or SEQ ID NO: 14484 is a substitution of a proline (P) for a serine (S). In certain embodiments, the amino acid substitution at position 194 of SEQ ID NO: 14487 or SEQ ID NO: 14484 is a substitution of a valine (V) for a methionine (M). In certain embodiments, the amino acid substitution at position 372 of SEQ ID NO: 14487 or SEQ ID NO: 14484 is a substitution of an alanine (A) for an arginine (R). In certain embodiments, the amino acid substitution at position 375 of SEQ ID NO: 14487 or SEQ ID NO: 14484 is a substitution of an alanine (A) for a lysine (K). In certain embodiments, the amino acid substitution at position 450 of SEQ ID NO: 14487 or SEQ ID NO: 14484 is a substitution of an asparagine (N) for an aspartic acid (D). In certain embodiments, the amino acid substitution at position 509 of SEQ ID NO: 14487 or SEQ ID NO: 14484 is a substitution of a glycine (G) for a serine (S). In certain embodiments, the amino acid substitution at position 570 of SEQ ID NO: 14487 or SEQ ID NO: 14484 is a substitution of a serine (S) for an asparagine (N). In certain embodiments, the piggyBac™ transposase enzyme may comprise a substitution of a valine (V) for a methionine (M) at position 194 of SEQ ID NO: 14487. In certain embodiments, including those embodiments wherein the piggyBac™ transposase enzyme may comprise a substitution of a valine (V) for a methionine (M) at position 194 of SEQ ID NO: 14487, the piggyBac™ transposase enzyme may further comprise an amino acid substitution at positions 372, 375 and 450 of the sequence of SEQ ID NO: 14487 or SEQ ID NO: 14484. In certain embodiments, the piggyBac™ transposase enzyme may comprise a substitution of a valine (V) for a methionine (M) at position 194 of SEQ ID NO: 14487, a substitution of an alanine (A) for an arginine (R) at position 372 of SEQ ID NO: 14487, and a substitution of an alanine (A) for a lysine (K) at position 375 of SEQ ID NO: 14487. In certain embodiments, the piggyBac™ transposase enzyme may comprise a substitution of a valine (V) for a methionine (M) at position 194 of SEQ ID NO: 14487, a substitution of an alanine (A) for an arginine (R) at position 372 of SEQ ID NO: 14487, a substitution of an alanine (A) for a lysine (K) at position 375 of SEQ ID NO: 14487 and a substitution of an asparagine (N) for an aspartic acid (D) at position 450 of SEQ ID NO: 14487.

[0077] The disclosure provides a culture media for enhancing viability of a modified immune cell comprising IL-2, IL-21, IL-7, IL-15 or any combination thereof. The modified immune cell may be a T-lymphocyte, a Natural Killer (NK) cell, a Cytokine-induced Killer (CIK) cell or a Natural Killer T (NKT) cell. In some embodiments, the modified immune cell is a T-lymphocyte. In some embodiments, the T-lymphocyte is an early memory T-cell. In some embodiments, the T-lymphocyte is a stem cell-like T-cell. In some embodiments, the T-lymphocyte is a stem memory T cell (T_{SCM}). In some embodiments, the T-lymphocyte is a central memory T cell (T_{CM}). The modified immune cell may contain one or more exogenous DNA sequences. The modified immune cell may contain one or more exogenous RNA sequences. The modified immune cell may have been electroporated or nucleofected.

### BRIEF DESCRIPTION OF THE DRAWINGS

[0078] FIG. 1 is a series of graphs depicting transfection efficiency and cell viability following plasmid DNA nucleofection in primary human T lymphocytes.

[0079] FIG. 2 is a series of graphs depicting DNA cytotoxicity to T cells.

[0080] FIG. 3 is a series of graphs showing that DNA-mediated cytotoxicity in T cells is dose dependent.

[0081] FIG. 4 is a series of graphs showing that extracellular plasmid DNA is not cytotoxic.

[0082] FIG. 5 is a series of graphs depicting efficient transposition using SPB mRNA in Jurkat cells.

[0083] FIG. 6 is a series of graphs depicting efficient transposition in T lymphocytes using SPB mRNA.

[0084] FIG. 7 is a series of graphs depicting efficient delivery of linearized DNA transposon products.

[0085] FIG. 8 is a series of graphs showing that addition of that IL-7 and IL-15 and immediate stimulation of T cells post-nucleofection enhances cell viability.

[0086] FIG. 9 is a series of graphs showing that IL-7 and IL-15 rescue T cells from DNA mediated toxicity

[0087] FIG. 10 is a series of graphs showing that immediate stimulation of T cells post-nucleofection enhances cell viability.

[0088] FIG. 11A-C is a series of graphs depicting T cell transposition with varying amounts of DNA. Primary human pan T cells were nucleofected with varying amounts of DNA using piggyBac™. T cells were nucleofected with the indicated amounts of transposon and 5 μg SPB mRNA. Cells were then stimulated on day 2 post-nucleofection through CD3 and CD28. As expected, T cells nucleofected with high amounts of DNA exhibited high episomal expression at day 1 post nucleofection whereas almost no episomal expression was observed at low DNA doses. In contrast, following expansion at day 21 post nucleofection the greatest percentage of transgene positive cells were observed in lower DNA amounts peaking at 1.67 μg for this transposon. (A) Flow analysis for transgene positive cells at day 1 and 21. (B) Percentage of transgene positive T cells. (C) Percentage of viable T cells at day 1 and 21. For all graphs shown in this figure, the Y-axis ranges from 0 to 100% in increments of 20% and the X-axis ranges from 0 to 10⁵ by powers of 10.

[0089] FIG. 12A-B is a series of graphs depicting T cell transposition with low DNA amounts using the Sleeping Beauty™ 100X (SB100X) transposase. Primary human pan T cells were nucleofected with GFP plasmids encoding either the piggyBac™ (PB) or Sleeping Beauty™ (SB) ITRs. (A) Cells were nucleofected with the indicated amounts of SB transposon and 1 μg SB transposase mRNA. (B) Cells were nucleofected with the indicated amounts of SB transposase and 0.75 μg SB transposon. Flow analysis was performed on day 14 post nucleofection for all samples. For all graphs shown in this figure, the Y-axis ranges from 0 to 250K in increments of 50K and the X-axis ranges from 0 to 10⁵ by powers of 10.

[0090] FIG. 13A is a series of plots depicting T cells transposed with a plasmid containing a sequence encoding a transposon comprising a sequence encoding an inducible caspase polypeptide (a safety switch, “iC9”), a CARTyrin (anti-BCMA), and a selectable marker. Left-hand plots depict live T cells exposed to transposase in the absence of the plasmid. Right-hand plots depict live T cells exposed to transposase in the presence of the plasmid. Cells were exposed to either a hyperactive transposase (the “Super piggyBac”) or a wild type piggyBac transposase.

[0091] FIG. 13B is a series of plots depicting T cells transposed with a plasmid containing a sequence encoding a green fluorescent protein (GFP). Left-hand plots depict live T cells exposed to transposase in the absence of the plasmid. Right-hand plots depict live T cells exposed to transposase in the presence of the plasmid. Cells were exposed to either a hyperactive transposase (the “Super piggyBac”) or a wild type piggyBac transposase.

[0092] FIG. 13C is a table depicting the percent of transformed T cells resulting from transposition with WT versus hyperactive piggyBac transposase. T cells contacted with the hyperactive piggyBac transposase (the Super piggyBac transposase) were transformed at a rate 4-fold greater than WT transposase.

[0093] FIG. 13D is a graph depicting the percent of transformed T cells resulting from transposition with WT versus hyperactive piggyBac transposase 5 days after nucleofection. T cells contacted with the hyperactive piggyBac transposase (the Super piggyBac transposase) were transformed at a rate far greater than WT transposase.

[0094] FIG. 14 is a graph depicting transposition in natural killer (NK) cells. Transposition of non-activated NK cells derived from CD3-depleted leukopheresis (containing CD14/CD19/CD56+ cells) is shown. Cells were electroporated (EP) with plasmid piggyBac transposon DNA encoding GFP and mRNA encoding super piggyBac. The program from Lonza 4D nucleofector or BTX ECM 830 (500V, 700 usec pulse length, 0.2 mm electrode gap, one pulse) is indicated on the X-axis. Transposed cells were co-cultured (stimulated) at day 2 with artificial antigen presenting cells (aAPCs). Fluorescent activated cell sorting (FACS) analysis of percent GFP positive cells at day 7 post-EP (day 5 post-stim) is indicated on the Y-axis with gray bars. Percent viability as shown by percent 7-Aminoactinomycin D (7AAD)-negative cells at day 2 post-EP is indicated on the Y-axis with gray bars.

[0095] FIG. 15A-B are a series of 10 FACs plots (FIG. 15A) and a graph (FIG. 15B) showing transposon titration for transposition in natural killer (NK) cells. Transposition of non-activated NK cells from CD3-depleted leukopheresis (containing CD14/CD19/CD56+ cells) is shown. Cells were electroporated with a plasmid piggyBac transposon encoding GFP at amounts ranging from 0 to 10 ug of DNA and 5 ug mRNA encoding Super piggyBac using the indicated Maxcyte electroporator program. Transposed cells were stimulated at day 2 with artificial antigen presenting cells (aAPCs). FIG. 15A FACs plots top row shows CD56+(y-axis) versus GFP+(x-axis) expression, while the bottom row shows 7AAD (y-axis) versus forward scatter (FSC, x-axis). FIG. 15B is a bar graph analysis of the percentage of GFP+ cells of CD56+ cells at day 6 post-electroporation (EP) and day 4 post-stimulation (black bars), and the percent viability as shown by 7AAD-negative cells at day 2 post EP (gray bars).

[0096] FIG. 16A-B are a series of 7 FACs plots (FIG. 16A) and a graph (FIG. 16B) showing dose-dependent DNA-mediated cytotoxicity in NK cells. FACS analysis of live cells (7AAD-negative/FSC) at day 2 post-EP using the Lonza 4D Nucleofector program DN-100 are shown (FIG. 16A). FACS plots (FIG. 16A) are quantified in a graph (FIG. 16B). 5E6 cells per EP were electroporated in 100 uL P3 buffer in cuvettes. Cells were electroporated with no DNA (Mock) or varying amounts of piggyBac GFP transposon co-delivered with 5 ug Super piggyBac mRNA.

[0097] FIG. 17 is a series of 5 graphs showing the in vitro differentiation of piggyBac modified hematopoietic stem and precursor cells (HSPCs) into B cells. Human CD34+ HSPCs were electroporated with mRNA encoding Super piggyBac along with a piggyBac transposon encoding GFP. After electroporation, HSPCs were primed for B cell differentiation in presence of human IL-3, Flt3L, TPO, SCF, and G-CSF for 5 days. On day 6, cells were transferred to a layer of MS-5 feeder cells and fed bi-weekly, along with transfer to a fresh layer of feeders once per week. On day 34 of the in vitro differentiation process, CD19+ B cells were generated and detectable in the culture. Top row: FACs plots showing CD19 (y-axis) and CD34 (x-axis) in, from left to right, human primary bone marrow cells, at day 6 of in vitro differentiation, and at day 34 of in vitro differentiation. Bottom row: graphs depicting GFP expression in the indicated boxed populations of cells from the FACs plots in the top row at days 6 and 34 of in vitro differentiation.

[0098] FIG. 18 is a schematic depiction of the Csy4-T2A-Clo051-G4Slinker-dCas9 construct map.

[0099] FIG. 19 is a schematic depiction of the pRT1-Clo051-dCas9 Double NLS construct map.

### DETAILED DESCRIPTION

[0100] Disclosed are compositions and methods for the ex-vivo genetic modification of an immune cell or a precursor thereof comprising delivering to the immune cell or immune precursor cell, (a) a nucleic acid or amino acid sequence comprising a sequence encoding a transposase enzyme and (b) a recombinant and non-naturally occurring DNA sequence comprising a DNA sequence encoding a transposon. In certain embodiments, the method further comprises the step of stimulating the immune cell or immune precursor cell with one or more cytokine(s).

### Immune and Immune Precursor Cells

[0101] In certain embodiments, immune cells of the disclosure comprise lymphoid progenitor cells, natural killer (NK) cells, T lymphocytes (T-cell), stem memory T cells (T_{SCM} cells), Stem cell-like T cells, B lymphocytes (B-cells), myeloid progenitor cells, neutrophils, basophils, eosinophils, monocytes, macrophages, platelets, erythrocytes, red blood cells (RBCs), megakaryocytes or osteoclasts.

[0102] In certain embodiments, immune precursor cells comprise any cells which can differentiate into one or more types of immune cells. In certain embodiments, immune precursor cells comprise multipotent stem cells that can self renew and develop into immune cells. In certain embodiments, immune precursor cells comprise hematopoietic stem cells (HSCs) or descendants thereof. In certain embodiments, immune precursor cells comprise precursor cells that can develop into immune cells. In certain embodiments, the immune precursor cells comprise hematopoietic progenitor cells (HPCs).

### Hematopoietic Stem Cells (HSCs)

[0103] Hematopoietic stem cells (HSCs) are multipotent, self-renewing cells. All differentiated blood cells from the lymphoid and myeloid lineages arise from HSCs. HSCs can be found in adult bone marrow, peripheral blood, mobilized peripheral blood, peritoneal dialysis effluent and umbilical cord blood.

[0104] HSCs of the disclosure may be isolated or derived from a primary or cultured stem cell. HSCs of the disclosure may be isolated or derived from an embryonic stem cell, a multipotent stem cell, a pluripotent stem cell, an adult stem cell, or an induced pluripotent stem cell (iPSC).

[0105] Immune precursor cells of the disclosure may comprise an HSC or an HSC descendent cell. Exemplary HSC descendent cells of the disclosure include, but are not limited to, multipotent stem cells, lymphoid progenitor cells, natural killer (NK) cells, T lymphocyte cells (T-cells), B lymphocyte cells (B-cells), myeloid progenitor cells, neutrophils, basophils, eosinophils, monocytes, and macrophages.

[0106] HSCs produced by the methods of the disclosure may retain features of “primitive” stem cells that, while isolated or derived from an adult stem cell and while committed to a single lineage, share characteristics of embryonic stem cells. For example, the “primitive” HSCs produced by the methods of the disclosure retain their “stemness” following division and do not differentiate. Consequently, as an adoptive cell therapy, the “primitive” HSCs produced by the methods of the disclosure not only replenish their numbers, but expand in vivo. “Primitive” HSCs produced by the methods of the disclosure may be therapeutically-effective when administered as a single dose. In some embodiments, primitive HSCs of the disclosure are CD34+. In some embodiments, primitive HSCs of the disclosure are CD34+ and CD38−. In some embodiments, primitive HSCs of the disclosure are CD34+, CD38− and CD90+. In some embodiments, primitive HSCs of the disclosure are CD34+, CD38−, CD90+ and CD45RA−. In some embodiments, primitive HSCs of the disclosure are CD34+, CD38−, CD90+, CD45RA−, and CD49f+. In some embodiments, the most primitive HSCs of the disclosure are CD34+, CD38−, CD90+, CD45RA−, and CD49f+.

[0107] In some embodiments of the disclosure, primitive HSCs, HSCs, and/or HSC descendent cells may be modified according to the methods of the disclosure to express an exogenous sequence (e.g. a chimeric antigen receptor or therapeutic protein). In some embodiments of the disclosure, modified primitive HSCs, modified HSCs, and/or modified HSC descendent cells may be forward differentiated to produce a modified immune cell including, but not limited to, a modified T cell, a modified natural killer cell and/or a modified B-cell of the disclosure.

### T Cells

[0108] Modified T cells of the disclosure may be derived from modified hematopoietic stem and progenitor cells (HSPCs) or modified HSCs.

[0109] Unlike traditional biologics and chemotherapeutics, modified-T cells of the disclosure possess the capacity to rapidly reproduce upon antigen recognition, thereby potentially obviating the need for repeat treatments. To achieve this, in some embodiments, modified-T cells of the disclosure not only drive an initial response, but also persist in the patient as a stable population of viable memory T cells to prevent potential relapses. Alternatively, in some embodiments, when it is not desired, modified-T cells of the disclosure do not persist in the patient.

[0110] Intensive efforts have been focused on the development of antigen receptor molecules that do not cause T cell exhaustion through antigen-independent (tonic) signaling, as well as of a modified-T cell product containing early memory T cells, especially stem cell memory (T_{SCM}) or stem cell-like T cells. Stem cell-like modified-T cells of the disclosure exhibit the greatest capacity for self-renewal and multipotent capacity to derive central memory (T_{CM}) T cells or T_{CM} like cells, effector memory (T_{EM}) and effector T cells (T_{E}), thereby producing better tumor eradication and long-term modified-T cell engraftment. A linear pathway of differentiation may be responsible for generating these cells: Naïve T cells (T_{N})>T_{SCM}>T_{CM}>T_{EM}>T_{E}>T_{TE}, whereby T_{N} is the parent precursor cell that directly gives rise to T_{SCM}, which then, in turn, directly gives rise to T_{CM}, etc. Compositions of T cells of the disclosure may comprise one or more of each parental T cell subset with T_{SCM} cells being the most abundant (e.g. T_{SCM}>T_{CM}>T_{EM}>T_{E}>T_{TE}).

[0111] In some embodiments of the methods of the disclosure, the immune cell precursor is differentiated into or is capable of differentiating into an early memory T cell, a stem cell like T-cell, a Naïve T cells (T_{N}), a T_{SCM}, a T_{CM}, a T_{EM}, a T_{E}, or a T_{TE}. In some embodiments, the immune cell precursor is a primitive HSC, an HSC, or a HSC descendent cell of the disclosure.

[0112] In some embodiments of the methods of the disclosure, the immune cell is an early memory T cell, a stem cell like T-cell, a Naïve T cells (T_{N}), a T_{SCM}, a T_{CM}, a T_{EM}, a T_{E}, or a T_{TE}.

[0113] In some embodiments of the methods of the disclosure, the immune cell is an early memory T cell.

[0114] In some embodiments of the methods of the disclosure, the immune cell is a stem cell like T-cell.

[0115] In some embodiments of the methods of the disclosure, the immune cell is a T_{SCM}.

[0116] In some embodiments of the methods of the disclosure, the immune cell is a T_{CM}.

[0117] In some embodiments of the methods of the disclosure, the methods modify and/or the methods produce a plurality of modified T cells, wherein at least 2%, 5%, 10%, 15%, 20%, 25%, 30%, 35%, 40%, 45%, 50%, 60%, 65%, 70%, 75%, 80%, 85%, 90%, 95%, 99% or any percentage in between of the plurality of modified T cells expresses one or more cell-surface marker(s) of an early memory T cell. In certain embodiments, the plurality of modified early memory T cells comprises at least one modified stem cell-like T cell. In certain embodiments, the plurality of modified early memory T cells comprises at least one modified T_{SCM}. In certain embodiments, the plurality of modified early memory T cells comprises at least one modified T_{CM}.

[0118] In some embodiments of the methods of the disclosure, the methods modify and/or the methods produce a plurality of modified T cells, wherein at least 2%, 5%, 10%, 15%, 20%, 25%, 30%, 35%, 40%, 45%, 50%, 60%, 65%, 70%, 75%, 80%, 85%, 90%, 95%, 99% or any percentage in between of the plurality of modified T cells expresses one or more cell-surface marker(s) of a stem cell-like T cell. In certain embodiments, the plurality of modified stem cell-like T cells comprises at least one modified T_{SCM}. In certain embodiments, the plurality of modified stem cell-like T cells comprises at least one modified T_{CM}.

[0119] In some embodiments of the methods of the disclosure, the methods modify and/or the methods produce a plurality of modified T cells, wherein at least 2%, 5%, 10%, 15%, 20%, 25%, 30%, 35%, 40%, 45%, 50%, 60%, 65%, 70%, 75%, 80%, 85%, 90%, 95%, 99% or any percentage in between of the plurality of modified T cells expresses one or more cell-surface marker(s) of a stem memory T cell (T_{SCM}). In certain embodiments, the cell-surface markers comprise CD62L and CD45RA. In certain embodiments, the cell-surface markers comprise one or more of CD62L, CD45RA, CD28, CCR7, CD127, CD45RO, CD95, CD95 and IL-2Rβ. In certain embodiments, the cell-surface markers comprise one or more of CD45RA, CD95, CCR7, and CD62L.

[0120] In some embodiments of the methods of the disclosure, the methods modify and/or the methods produce a plurality of modified T cells, wherein at least 2%, 5%, 10%, 15%, 20%, 25%, 30%, 35%, 40%, 45%, 50%, 60%, 65%, 70%, 75%, 80%, 85%, 90%, 95%, 99% or any percentage in between of the plurality of modified T cells expresses one or more cell-surface marker(s) of a central memory T cell (T_{CM}). In certain embodiments, the cell-surface markers comprise one or more of CD45RO, CD95, CCR7, and CD62L.

[0121] In some embodiments of the methods of the disclosure, the methods modify and/or the methods produce a plurality of modified T cells, wherein at least 2%, 5%, 10%, 15%, 20%, 25%, 30%, 35%, 40%, 45%, 50%, 60%, 65%, 70%, 75%, 80%, 85%, 90%, 95%, 99% or any percentage in between of the plurality of modified T cells expresses one or more cell-surface marker(s) of a naïve T cell (T_{N}). In certain embodiments, the cell-surface markers comprise one or more of CD45RA, CCR7 and CD62L.

[0122] In some embodiments of the methods of the disclosure, the methods modify and/or the methods produce a plurality of modified T cells, wherein at least 2%, 5%, 10%, 15%, 20%, 25%, 30%, 35%, 40%, 45%, 50%, 60%, 65%, 70%, 75%, 80%, 85%, 90%, 95%, 99% or any percentage in between of the plurality of modified T cells expresses one or more cell-surface marker(s) of an effector T-cell (modified T_{EFF}). In certain embodiments, the cell-surface markers comprise one or more of CD45RA, CD95, and IL-2Rβ.

[0123] In some embodiments of the methods of the disclosure, the methods modify and/or the methods produce a plurality of modified T cells, wherein at least 2%, 5%, 10%, 15%, 20%, 25%, 30%, 35%, 40%, 45%, 50%, 60%, 65%, 70%, 75%, 80%, 85%, 90%, 95%, 99% or any percentage in between of the plurality of modified T cells expresses one or more cell-surface marker(s) of a stem cell-like T cell, a stem memory T cell (T_{SCM}) or a central memory T cell (T_{CM}).

[0124] In some embodiments of the methods of the disclosure, a buffer comprises the immune cell or precursor thereof. The buffer maintains or enhances a level of cell viability and/or a stem-like phenotype of the immune cell or precursor thereof, including T-cells. In certain embodiments, the buffer maintains or enhances a level of cell viability and/or a stem-like phenotype of the primary human T cells prior to the nucleofection. In certain embodiments, the buffer maintains or enhances a level of cell viability and/or a stem-like phenotype of the primary human T cells during the nucleofection. In certain embodiments, the buffer maintains or enhances a level of cell viability and/or a stem-like phenotype of the primary human T cells following the nucleofection. In certain embodiments, the buffer comprises one or more of KCl, MgCl₂, ClNa, Glucose and Ca (NO₃)₂ in any absolute or relative abundance or concentration, and, optionally, the buffer further comprises a supplement selected from the group consisting of HEPES, Tris/HCl, and a phosphate buffer. In certain embodiments, the buffer comprises 5 mM KCl, 15 mM MgCl₂, 90 mM ClNa, 10 mM Glucose and 0.4 mM Ca(NO₃)₂. In certain embodiments, the buffer comprises 5 mM KCl, 15 mM MgCl₂, 90 mM ClNa, 10 mM Glucose and 0.4 mM Ca(NO₃)₂ and a supplement comprising 20 mM HEPES and 75 mM Tris/HCl. In certain embodiments, the buffer comprises 5 mM KCl, 15 mM MgCl₂, 90 mM ClNa, 10 mM Glucose and 0.4 mM Ca(NO₃)₂ and a supplement comprising 40 mM Na₂HPO₄/NaH₂PO₄ at pH 7.2. In certain embodiments, the composition comprising primary human T cells comprises 100 μl of the buffer and between 5×10⁶ and 25×10⁶ cells. In certain embodiments, the composition comprises a scalable ratio of 250e6 primary human T cells per milliliter of buffer or other media during the introduction step.

[0125] In some embodiments of the methods of the disclosure, the introducing step may comprise delivery of transposon and/or transposase by a method other than electroporation or nucleofection. In some embodiments, a composition comprises a scalable ratio of 250e6 primary human T cells per milliliter of buffer or other media during the introduction step.

[0126] In some embodiments of the methods of the disclosure, the introducing step comprises one or more of topical delivery, adsorption, absorption, electroporation, spin-fection, co-culture, transfection, mechanical delivery, sonic delivery, vibrational delivery, magnetofection or by nanoparticle-mediated delivery.

[0127] In some embodiments of the methods of the disclosure, the introducing step comprises liposomal transfection, calcium phosphate transfection, fugene transfection, and dendrimer-mediated transfection.

[0128] In some embodiments of the methods of the disclosure, the introducing step comprises mechanical transfection comprises cell squeezing, cell bombardment, or gene gun techniques.

[0129] In some embodiments of the methods of the disclosure, the introducing step comprises nanoparticle-mediated transfection comprises liposomal delivery, delivery by micelles, and delivery by polymerosomes.

[0130] In some embodiments of the methods of the disclosure, the methods comprise contacting an immune cell of the disclosure, including a T cell of the disclosure, and a T-cell expansion composition. In some embodiments of the methods of the disclosure, the step of introducing a transposon and/or transposase of the disclosure into an immune cell of the disclosure may further comprise contacting the immune cell and a T-cell expansion composition. In some embodiments, including those in which the introducing step of the methods comprises an electroporation or a nucleofection step, the electroporation or a nucleofection step may be performed with the immune cell contacting T-cell expansion composition of the disclosure.

[0131] In some embodiments of the methods of the disclosure, the T-cell expansion composition comprises, consists essentially of or consists of phosphorus; one or more of an octanoic acid, a palmitic acid, a linoleic acid, and an oleic acid; a sterol; and an alkane.

[0132] In certain embodiments of the methods of producing a modified T cell of the disclosure, the expansion supplement comprises one or more cytokine(s). The one or more cytokine(s) may comprise any cytokine, including but not limited to, lymphokines. Exemplary lympokines include, but are not limited to, interleukin-2 (IL-2), interleukin-3 (IL-3), interleukin-4 (IL-4), interleukin-5 (IL-5), interleukin-6 (IL-6), interleukin-7 (IL-7), interleukin-15 (IL-15), interleukin-21 (IL-21), granulocyte-macrophage colony-stimulating factor (GM-CSF) and interferon-gamma (INFγ). The one or more cytokine(s) may comprise IL-2.

[0133] In some embodiments of the methods of the disclosure, the T-cell expansion composition comprises human serum albumin, recombinant human insulin, human transferrin, 2-Mercaptoethanol, and an expansion supplement. In certain embodiments of this method, the T-cell expansion composition further comprises one or more of octanoic acid, nicotinamide, 2,4,7,9-tetramethyl-5-decyn-4,7-diol (TMDD), diisopropyl adipate (DIPA), n-butyl-benzenesulfonamide, 1,2-benzenedicarboxylic acid, bis(2-methylpropyl) ester, palmitic acid, linoleic acid, oleic acid, stearic acid hydrazide, oleamide, a sterol and an alkane. In certain embodiments of this method, the T-cell expansion composition further comprises one or more of octanoic acid, palmitic acid, linoleic acid, oleic acid and a sterol. In certain embodiments of this method, the T-cell expansion composition further comprises one or more of octanoic acid at a concentration of between 0.9 mg/kg to 90 mg/kg, inclusive of the endpoints; palmitic acid at a concentration of between 0.2 mg/kg to 20 mg/kg, inclusive of the endpoints; linoleic acid at a concentration of between 0.2 mg/kg to 20 mg/kg, inclusive of the endpoints; oleic acid at a concentration of 0.2 mg/kg to 20 mg/kg, inclusive of the endpoints; and a sterol at a concentration of about 0.1 mg/kg to 10 mg/kg, inclusive of the endpoints. In certain embodiments of this method, the T-cell expansion composition further comprises one or more of octanoic acid at a concentration of about 9 mg/kg, palmitic acid at a concentration of about 2 mg/kg, linoleic acid at a concentration of about 2 mg/kg, oleic acid at a concentration of about 2 mg/kg and a sterol at a concentration of about 1 mg/kg. In certain embodiments of this method, the T-cell expansion composition further comprises one or more of octanoic acid at a concentration of between 6.4 μmol/kg and 640 μmol/kg, inclusive of the endpoints; palmitic acid at a concentration of between 0.7 μmol/kg and 70 μmol/kg, inclusive of the endpoints; linoleic acid at a concentration of between 0.75 μmol/kg and 75 μmol/kg, inclusive of the endpoints; oleic acid at a concentration of between 0.75 μmol/kg and 75 μmol/kg, inclusive of the endpoints; and a sterol at a concentration of between 0.25 μmol/kg and 25 μmol/kg, inclusive of the endpoints. In certain embodiments of this method, the T-cell expansion composition further comprises one or more of octanoic acid at a concentration of about 64 μmol/kg, palmitic acid at a concentration of about 7 μmol/kg, linoleic acid at a concentration of about 7.5 μmol/kg, oleic acid at a concentration of about 7.5 μmol/kg and a sterol at a concentration of about 2.5 μmol/kg.

[0134] In certain embodiments, the T-cell expansion composition comprises one or more of human serum albumin, recombinant human insulin, human transferrin, 2-Mercaptoethanol, and an expansion supplement to produce a plurality of expanded modified T-cells, wherein at least 2% of the plurality of modified T-cells expresses one or more cell-surface marker(s) of an early memory T cell, a stem cell-like T cell, a stem memory T cell (T_{SCM}) and/or a central memory T cell (T_{CM}). In certain embodiments, the T-cell expansion composition comprises or further comprises one or more of octanoic acid, nicotinamide, 2,4,7,9-tetramethyl-5-decyn-4,7-diol (TMDD), diisopropyl adipate (DIPA), n-butyl-benzenesulfonamide, 1,2-benzenedicarboxylic acid, bis(2-methylpropyl) ester, palmitic acid, linoleic acid, oleic acid, stearic acid hydrazide, oleamide, a sterol and an alkane. In certain embodiments, the T-cell expansion composition comprises one or more of octanoic acid, palmitic acid, linoleic acid, oleic acid and a sterol (e.g. cholesterol). In certain embodiments, the T-cell expansion composition comprises one or more of octanoic acid at a concentration of between 0.9 mg/kg to 90 mg/kg, inclusive of the endpoints; palmitic acid at a concentration of between 0.2 mg/kg to 20 mg/kg, inclusive of the endpoints; linoleic acid at a concentration of between 0.2 mg/kg to 20 mg/kg, inclusive of the endpoints; oleic acid at a concentration of 0.2 mg/kg to 20 mg/kg, inclusive of the endpoints; and a sterol at a concentration of about 0.1 mg/kg to 10 mg/kg, inclusive of the endpoints (wherein mg/kg=parts per million). In certain embodiments, the T-cell expansion composition comprises one or more of octanoic acid at a concentration of about 9 mg/kg, palmitic acid at a concentration of about 2 mg/kg, linoleic acid at a concentration of about 2 mg/kg, oleic acid at a concentration of about 2 mg/kg, and a sterol at a concentration of about 1 mg/kg (wherein mg/kg=parts per million). In certain embodiments, the T-cell expansion composition comprises one or more of octanoic acid at a concentration of 9.19 mg/kg, palmitic acid at a concentration of 1.86 mg/kg, linoleic acid at a concentration of about 2.12 mg/kg, oleic acid at a concentration of about 2.13 mg/kg, and a sterol at a concentration of about 1.01 mg/kg (wherein mg/kg=parts per million). In certain embodiments, the T-cell expansion composition comprises octanoic acid at a concentration of 9.19 mg/kg, palmitic acid at a concentration of 1.86 mg/kg, linoleic acid at a concentration of 2.12 mg/kg, oleic acid at a concentration of about 2.13 mg/kg, and a sterol at a concentration of 1.01 mg/kg (wherein mg/kg=parts per million). In certain embodiments, the T-cell expansion composition comprises one or more of octanoic acid at a concentration of between 6.4 μmol/kg and 640 μmol/kg, inclusive of the endpoints; palmitic acid at a concentration of between 0.7 μmol/kg and 70 μmol/kg, inclusive of the endpoints; linoleic acid at a concentration of between 0.75 μmol/kg and 75 μmol/kg, inclusive of the endpoints; oleic acid at a concentration of between 0.75 μmol/kg and 75 μmol/kg, inclusive of the endpoints; and a sterol at a concentration of between 0.25 μmol/kg and 25 μmol/kg, inclusive of the endpoints. In certain embodiments, the T-cell expansion composition comprises one or more of octanoic acid at a concentration of about 64 μmol/kg, palmitic acid at a concentration of about 7 μmol/kg, linoleic acid at a concentration of about 7.5 μmol/kg, oleic acid at a concentration of about 7.5 μmol/kg and a sterol at a concentration of about 2.5 μmol/kg. In certain embodiments, the T-cell expansion composition comprises one or more of octanoic acid at a concentration of about 63.75 μmol/kg, palmitic acid at a concentration of about 7.27 μmol/kg, linoleic acid at a concentration of about 7.57 μmol/kg, oleic acid at a concentration of about 7.56 μmol/kg and a sterol at a concentration of about 2.61 μmol/kg. In certain embodiments, the T-cell expansion composition comprises octanoic acid at a concentration of about 63.75 μmol/kg, palmitic acid at a concentration of about 7.27 μmol/kg, linoleic acid at a concentration of about 7.57 μmol/kg, oleic acid at a concentration of 7.56 μmol/kg and a sterol at a concentration of 2.61 μmol/kg.

[0135] As used herein, the terms “supplemented T-cell expansion composition” or “T-cell expansion composition” may be used interchangeably with a media comprising one or more of human serum albumin, recombinant human insulin, human transferrin, 2-Mercaptoethanol, and an expansion supplement at 37° C. Alternatively, or in addition, the terms “supplemented T-cell expansion composition” or “T-cell expansion composition” may be used interchangeably with a media comprising one or more of phosphorus, an octanoic fatty acid, a palmitic fatty acid, a linoleic fatty acid and an oleic acid. In certain embodiments, the media comprises an amount of phosphorus that is 10-fold higher than may be found in, for example, Iscove's Modified Dulbecco's Medium ((IMDM); available at ThermoFisher Scientific as Catalog number 12440053).

[0136] As used herein, the terms “supplemented T-cell expansion composition” or “T-cell expansion composition” may be used interchangeably with a media comprising one or more of human serum albumin, recombinant human insulin, human transferrin, 2-Mercaptoethanol, Iscove's MDM, and an expansion supplement at 37° C. Alternatively, or in addition, the terms “supplemented T-cell expansion composition” or “T-cell expansion composition” may be used interchangeably with a media comprising one or more of the following elements: boron, sodium, magnesium, phosphorus, potassium, and calcium. In certain embodiments, the terms “supplemented T-cell expansion composition” or “T-cell expansion composition” may be used interchangeably with a media comprising one or more of the following elements present in the corresponding average concentrations: boron at 3.7 mg/L, sodium at 3000 mg/L, magnesium at 18 mg/L, phosphorus at 29 mg/L, potassium at 15 mg/L and calcium at 4 mg/L.

[0137] As used herein, the terms “supplemented T-cell expansion composition” or “T-cell expansion composition” may be used interchangeably with a media comprising one or more of human serum albumin, recombinant human insulin, human transferrin, 2-Mercaptoethanol, and an expansion supplement at 37° C. Alternatively, or in addition, the terms “supplemented T-cell expansion composition” or “T-cell expansion composition” may be used interchangeably with a media comprising one or more of the following components: octanoic acid (CAS No. 124-07-2), nicotinamide (CAS No. 98-92-0), 2,4,7,9-tetramethyl-5-decyn-4,7-diol (TMDD) (CAS No. 126-86-3), diisopropyl adipate (DIPA) (CAS No. 6938-94-9), n-butyl-benzenesulfonamide (CAS No. 3622-84-2), 1,2-benzenedicarboxylic acid, bis(2-methylpropyl) ester (CAS No. 84-69-5), palmitic acid (CAS No. 57-10-3), linoleic acid (CAS No. 60-33-3), oleic acid (CAS No. 112-80-1), stearic acid hydrazide (CAS No. 4130-54-5), oleamide (CAS No. 3322-62-1), sterol (e.g., cholesterol) (CAS No. 57-88-5), and alkanes (e.g., nonadecane) (CAS No. 629-92-5). In certain embodiments, the terms “supplemented T-cell expansion composition” or “T-cell expansion composition” may be used interchangeably with a media comprising one or more of the following components: octanoic acid (CAS No. 124-07-2), nicotinamide (CAS No. 98-92-0), 2,4,7,9-tetramethyl-5-decyn-4,7-diol (TMDD) (CAS No. 126-86-3), diisopropyl adipate (DIPA) (CAS No. 6938-94-9), n-butyl-benzenesulfonamide (CAS No. 3622-84-2), 1,2-benzenedicarboxylic acid, bis(2-methylpropyl) ester (CAS No. 84-69-5), palmitic acid (CAS No. 57-10-3), linoleic acid (CAS No. 60-33-3), oleic acid (CAS No. 112-80-1), stearic acid hydrazide (CAS No. 4130-54-5), oleamide (CAS No. 3322-62-1), sterol (e.g., cholesterol) (CAS No. 57-88-5), alkanes (e.g., nonadecane) (CAS No. 629-92-5), and phenol red (CAS No. 143-74-8). In certain embodiments, the terms “supplemented T-cell expansion composition” or “T-cell expansion composition” may be used interchangeably with a media comprising one or more of the following components: octanoic acid (CAS No. 124-07-2), nicotinamide (CAS No. 98-92-0), 2,4,7,9-tetramethyl-5-decyn-4,7-diol (TMDD) (CAS No. 126-86-3), diisopropyl adipate (DIPA) (CAS No. 6938-94-9), n-butyl-benzenesulfonamide (CAS No. 3622-84-2), 1,2-benzenedicarboxylic acid, bis(2-methylpropyl) ester (CAS No. 84-69-5), palmitic acid (CAS No. 57-10-3), linoleic acid (CAS No. 60-33-3), oleic acid (CAS No. 112-80-1), stearic acid hydrazide (CAS No. 4130-54-5), oleamide (CAS No. 3322-62-1), phenol red (CAS No. 143-74-8) and lanolin alcohol.

[0138] In certain embodiments, the terms “supplemented T-cell expansion composition” or “T-cell expansion composition” may be used interchangeably with a media comprising one or more of human serum albumin, recombinant human insulin, human transferrin, 2-Mercaptoethanol, and an expansion supplement at 37° C. Alternatively, or in addition, the terms “supplemented T-cell expansion composition” or “T-cell expansion composition” may be used interchangeably with a media comprising one or more of the following ions: sodium, ammonium, potassium, magnesium, calcium, chloride, sulfate and phosphate.

[0139] As used herein, the terms “supplemented T-cell expansion composition” or “T-cell expansion composition” may be used interchangeably with a media comprising one or more of human serum albumin, recombinant human insulin, human transferrin, 2-Mercaptoethanol, and an expansion supplement at 37° C. Alternatively, or in addition, the terms “supplemented T-cell expansion composition” or “T-cell expansion composition” may be used interchangeably with a media comprising one or more of the following free amino acids: histidine, asparagine, serine, glutamate, arginine, glycine, aspartic acid, glutamic acid, threonine, alanine, proline, cysteine, lysine, tyrosine, methionine, valine, isoleucine, leucine, phenylalanine and tryptophan. In certain embodiments, the terms “supplemented T-cell expansion composition” or “T-cell expansion composition” may be used interchangeably with a media comprising one or more of the following free amino acids in the corresponding average mole percentages: histidine (about 1%), asparagine (about 0.5%), serine (about 1.5%), glutamine (about 67%), arginine (about 1.5%), glycine (about 1.5%), aspartic acid (about 1%), glutamic acid (about 2%), threonine (about 2%), alanine (about 1%), proline (about 1.5%), cysteine (about 1.5%), lysine (about 3%), tyrosine (about 1.5%), methionine (about 1%), valine (about 3.5%), isoleucine (about 3%), leucine (about 3.5%), phenylalanine (about 1.5%) and tryptophan (about 0.5%). In certain embodiments, the terms “supplemented T-cell expansion composition” or “T-cell expansion composition” may be used interchangeably with a media comprising one or more of the following free amino acids in the corresponding average mole percentages: histidine (about 0.78%), asparagine (about 0.4%), serine (about 1.6%), glutamine (about 67.01%), arginine (about 1.67%), glycine (about 1.72%), aspartic acid (about 1.00%), glutamic acid (about 1.93%), threonine (about 2.38%), alanine (about 1.11%), proline (about 1.49%), cysteine (about 1.65%), lysine (about 2.84%), tyrosine (about 1.62%), methionine (about 0.85%), valine (about 3.45%), isoleucine (about 3.14%), leucine (about 3.3%), phenylalanine (about 1.64%) and tryptophan (about 0.37%).

[0140] As used herein, the terms “supplemented T-cell expansion composition” or “T-cell expansion composition” may be used interchangeably with a media comprising one or more of human serum albumin, recombinant human insulin, human transferrin, 2-Mercaptoethanol, Iscove's MDM, and an expansion supplement at 37° C. Alternatively, or in addition, the terms “supplemented T-cell expansion composition” or “T-cell expansion composition” may be used interchangeably with a media comprising one or more of phosphorus, an octanoic fatty acid, a palmitic fatty acid, a linoleic fatty acid and an oleic acid. In certain embodiments, the media comprises an amount of phosphorus that is 10-fold higher than may be found in, for example, Iscove's Modified Dulbecco's Medium ((IMDM); available at ThermoFisher Scientific as Catalog number 12440053).

[0141] In certain embodiments, the terms “supplemented T-cell expansion composition” or “T-cell expansion composition” may be used interchangeably with a media comprising one or more of octanoic acid, palmitic acid, linoleic acid, oleic acid and a sterol (e.g. cholesterol). In certain embodiments, the terms “supplemented T-cell expansion composition” or “T-cell expansion composition” may be used interchangeably with a media comprising one or more of octanoic acid at a concentration of between 0.9 mg/kg to 90 mg/kg, inclusive of the endpoints; palmitic acid at a concentration of between 0.2 mg/kg to 20 mg/kg, inclusive of the endpoints; linoleic acid at a concentration of between 0.2 mg/kg to 20 mg/kg, inclusive of the endpoints; oleic acid at a concentration of 0.2 mg/kg to 20 mg/kg, inclusive of the endpoints; and a sterol at a concentration of about 0.1 mg/kg to 10 mg/kg, inclusive of the endpoints (wherein mg/kg=parts per million). In certain embodiments, the terms “supplemented T-cell expansion composition” or “T-cell expansion composition” may be used interchangeably with a media comprising one or more of octanoic acid at a concentration of about 9 mg/kg, palmitic acid at a concentration of about 2 mg/kg, linoleic acid at a concentration of about 2 mg/kg, oleic acid at a concentration of about 2 mg/kg, and a sterol at a concentration of about 1 mg/kg (wherein mg/kg=parts per million). In certain embodiments, the terms “supplemented T-cell expansion composition” or “T-cell expansion composition” may be used interchangeably with a media comprising one or more of octanoic acid at a concentration of 9.19 mg/kg, palmitic acid at a concentration of 1.86 mg/kg, linoleic acid at a concentration of about 2.12 mg/kg, oleic acid at a concentration of about 2.13 mg/kg, and a sterol at a concentration of about 1.01 mg/kg (wherein mg/kg=parts per million). In certain embodiments, the terms “supplemented T-cell expansion composition” or “T-cell expansion composition” may be used interchangeably with a media comprising one or more of octanoic acid at a concentration of 9.19 mg/kg, palmitic acid at a concentration of 1.86 mg/kg, linoleic acid at a concentration of 2.12 mg/kg, oleic acid at a concentration of about 2.13 mg/kg, and a sterol at a concentration of 1.01 mg/kg (wherein mg/kg=parts per million). In certain embodiments, the terms “supplemented T-cell expansion composition” or “T-cell expansion composition” may be used interchangeably with a media comprising one or more of octanoic acid at a concentration of between 6.4 μmol/kg and 640 μmol/kg, inclusive of the endpoints; palmitic acid at a concentration of between 0.7 μmol/kg and 70 μmol/kg, inclusive of the endpoints; linoleic acid at a concentration of between 0.75 μmol/kg and 75 μmol/kg, inclusive of the endpoints; oleic acid at a concentration of between 0.75 μmol/kg and 75 μmol/kg, inclusive of the endpoints; and a sterol at a concentration of between 0.25 μmol/kg and 25 μmol/kg, inclusive of the endpoints. In certain embodiments, the terms “supplemented T-cell expansion composition” or “T-cell expansion composition” may be used interchangeably with a media comprising one or more of octanoic acid at a concentration of about 64 μmol/kg, palmitic acid at a concentration of about 7 μmol/kg, linoleic acid at a concentration of about 7.5 μmol/kg, oleic acid at a concentration of about 7.5 μmol/kg and a sterol at a concentration of about 2.5 μmol/kg.

[0142] In certain embodiments, the terms “supplemented T-cell expansion composition” or “T-cell expansion composition” may be used interchangeably with a media comprising one or more of octanoic acid at a concentration of about 63.75 μmol/kg, palmitic acid at a concentration of about 7.27 μmol/kg, linoleic acid at a concentration of about 7.57 μmol/kg, oleic acid at a concentration of about 7.56 μmol/kg and a sterol at a concentration of about 2.61 μmol/kg. In certain embodiments, the terms “supplemented T-cell expansion composition” or “T-cell expansion composition” may be used interchangeably with a media comprising one or more of octanoic acid at a concentration of about 63.75 μmol/kg, palmitic acid at a concentration of about 7.27 μmol/kg, linoleic acid at a concentration of about 7.57 μmol/kg, oleic acid at a concentration of 7.56 μmol/kg and a sterol at a concentration of 2.61 μmol/kg.

[0143] Modified T-cells of the disclosure, including modified stem cell-like T cells, T_{SCM} and/or T_{CM} of the disclosure, may be incubated, cultured, grown, stored, or otherwise, combined at any step in the methods of the procedure with a growth medium comprising one or more inhibitors a component of a PI3K pathway. Exemplary inhibitors a component of a PI3K pathway include, but are not limited to, an inhibitor of GSK3β such as TWS119 (also known as GSK 3B inhibitor XII; CAS Number 601514-19-6 having a chemical formula C₁₈H₁₄N₄O₂). Exemplary inhibitors of a component of a PI3K pathway include, but are not limited to, bb007 (BLUEBIRDBIO™).

[0144] In some embodiments of the methods of the disclosure, the methods comprise contacting an immune cell of the disclosure and a T-cell activator composition. In some embodiments of the methods of the disclosure, the methods comprise contacting an immune cell precursor of the disclosure and a T-cell activator composition. In some embodiments of the methods of the disclosure, the methods comprise contacting a modified T cell of the disclosure and a T-cell activator composition. In some embodiments, the T-cell activator composition comprises one or more of an anti-human CD3 monospecific tetrameric antibody complex, an anti-human CD28 monospecific tetrameric antibody complex and an activation supplement to produce an activated modified T-cell or a plurality of activated modified T-cells. In some embodiments, the activated modified T-cell expresses one or more cell-surface marker(s) of an early memory T cell, a stem cell-like T cell, a T_{SCM} or a T_{CM}. In some embodiments, at least 2%, 5%, 10%, 15%, 20%, 25%, 30%, 35%, 40%, 45%, 50%, 60%, 65%, 70%, 75%, 80%, 85%, 90%, 95%, 99% or any percentage in between of the plurality of activated modified T-cells express one or more cell-surface marker(s) of an early memory T cell, a stem cell-like T cell, a T_{SCM} or a T_{CM}.

[0145] In certain embodiments of the methods of producing a modified T cell (e.g. a stem cell-like T cell, a T_{SCM} and/or a T_{CM}) of the disclosure, the activation supplement may comprise one or more cytokine(s). The one or more cytokine(s) may comprise any cytokine, including but not limited to, lymphokines. Exemplary lympokines include, but are not limited to, interleukin-2 (IL-2), interleukin-3 (IL-3), interleukin-4 (IL-4), interleukin-5 (IL-5), interleukin-6 (IL-6), interleukin-7 (IL-7), interleukin-15 (IL-15), interleukin-21 (IL-21), granulocyte-macrophage colony-stimulating factor (GM-CSF) and interferon-gamma (INFγ). The one or more cytokine(s) may comprise IL-2.

### Natural Killer (NK) Cells

[0146] In certain embodiments, the modified immune or immune precursor cells of the disclosure are natural killer (NK) cells. In certain embodiments, NK cells are cytotoxic lymphocytes that differentiate from lymphoid progenitor cells.

[0147] Modified NK cells of the disclosure may be derived from modified hematopoietic stem and progenitor cells (HSPCs) or modified HSCs.

[0148] In certain embodiments, non-activated NK cells are derived from CD3-depleted leukopheresis (containing CD14/CD19/CD56+ cells).

[0149] In certain embodiments, NK cells are electroporated using a Lonza 4D nucleofector or BTX ECM 830 (500V, 700 usec pulse length, 0.2 mm electrode gap, one pulse). All Lonza 4D nucleofector programs are contemplated as within the scope of the methods of the disclosure.

[0150] In certain embodiments, 5×10E6 cells were electroporated per electroporation in 100 μL P3 buffer in cuvettes. However, this ratio of cells per volume is scalable for commercial manufacturing methods.

[0151] In certain embodiments, NK cells were stimulated by co-culture with an additional cell line. In certain embodiments, the additional cell line comprises artificial antigen presenting cells (aAPCs). In certain embodiments, stimulation occurs at day 1, 2, 3, 4, 5, 6, or 7 following electroporation. In certain embodiments, stimulation occurs at day 2 following electroporation.

[0152] In certain embodiments, NK cells express CD56.

B cells

[0153] In certain embodiments, the modified immune or immune precursor cells of the disclosure are B cells. B cells are a type of lymphocyte that express B cell receptors on the cell surface. B cell receptors bind to specific antigens.

[0154] Modified B cells of the disclosure may be derived from modified hematopoietic stem and progenitor cells (HSPCs) or modified HSCs.

[0155] In certain embodiments, HSPCs are modified using the methods of the disclosure, and then primed for B cell differentiation in presence of human IL-3, Flt3L, TPO, SCF, and G-CSF for at least 3 days, at least 4 days, at least 5 days, at least 6 days or at least 7 days. In certain embodiments, HSPCs are modified using the methods of the disclosure, and then primed for B cell differentiation in presence of human IL-3, Flt3L, TPO, SCF, and G-CSF for 5 days.

[0156] In certain embodiments, following priming, modified HSPC cells are transferred to a layer of feeder cells and fed bi-weekly, along with transfer to a fresh layer of feeders once per week. In certain embodiments, the feeder cells are MS-5 feeder cells.

[0157] In certain embodiments, modified HSPC cells are cultured with MS-5 feeder cells for at least 7, 14, 21, 28, 30, 33, 35, 42 or 48 days. In certain embodiments, modified HSPC cells were cultured with MS-5 feeder cells for 33 days.

### Chimeric Antigen Receptors

[0158] In certain embodiments, a modified immune or pre-immune cell of the disclosure comprises a chimeric antigen receptor.

[0159] In certain embodiments of the methods of the disclosure, the recombinant and non-naturally occurring DNA sequence encoding a transposon further comprises a sequence encoding a chimeric antigen receptor or a portion thereof. Chimeric antigen receptors (CARs) of the disclosure may comprise (a) an ectodomain comprising an antigen recognition region, (b) a transmembrane domain, and (c) an endodomain comprising at least one costimulatory domain. In certain embodiments, the ectodomain may further comprise a signal peptide. Alternatively, or in addition, in certain embodiments, the ectodomain may further comprise a hinge between the antigen recognition region and the transmembrane domain. In certain embodiments of the CARs of the disclosure, the signal peptide may comprise a sequence encoding a human CD2, CD3δ, CD3ε, CD3γ, CD3ζ, CD4, CD8α, CD19, CD28, 4-1BB or GM-CSFR signal peptide. In certain embodiments of the CARs of the disclosure, the signal peptide may comprise a sequence encoding a human CD8α signal peptide. In certain embodiments, the transmembrane domain may comprise a sequence encoding a human CD2, CD3δ, CD3ε, CD3γ, CD3ζ, CD4, CD8α, CD19, CD28, 4-1BB or GM-CSFR transmembrane domain. In certain embodiments of the CARs of the disclosure, the transmembrane domain may comprise a sequence encoding a human CD8α transmembrane domain. In certain embodiments of the CARs of the disclosure, the endodomain may comprise a human CD3 endodomain.

[0160] In certain embodiments of the CARs of the disclosure, the at least one costimulatory domain may comprise a human 4-1BB, CD28, CD40, ICOS, MyD88, OX-40 intracellular segment, or any combination thereof. In certain embodiments of the CARs of the disclosure, the at least one costimulatory domain may comprise a CD28 and/or a 4-1BB costimulatory domain. In certain embodiments of the CARs of the disclosure, the hinge may comprise a sequence derived from a human CD8α, IgG4, and/or CD4 sequence. In certain embodiments of the CARs of the disclosure, the hinge may comprise a sequence derived from a human CD8α sequence.

[0161] The CD28 costimulatory domain may comprise an amino acid sequence comprising

(SEQ ID NO: 14659)
RVKFSRSADAPAYKQGQNQLYNELNLGRREEYDVLDKRRGRDPEMGGKPR
RKNPQEGLYNELQKDKMAEAYSEIGMKGERRRGKGHDGLYQGLSTATKDT
YDALHMQALPPR

or a sequence having at least 70%, 80%, 90%, 95%, or 99% identity to the amino acid sequence comprising

(SEQ ID NO: 14659)
RVKFSRSADAPAYKQGQNQLYNELNLGRREEYDVLDKRRGRDPEMGGKPR
RKNPQEGLYNELQKDKMAEAYSEIGMKGERRRGKGHDGLYQGLSTATKDT
YDALHMQALPPR.

The CD28 costimulatory domain may be encoded by the nucleic acid sequence comprising

(SEQ ID NO: 14660)
cgcgtgaagtttagtcgatcagcagatgccccagcttacaaacagggaca
gaaccagctgtataacgagctgaatctgggccgccgagaggaatatgacg
tgctggataagcggagaggacgcgaccccgaaatgggaggcaagcccagg
cgcaaaaaccctcaggaaggcctgtataacgagctgcagaaggacaaaat
ggcagaagcctattctgagatcggcatgaagggggagcgacggagaggca
aagggcacgatgggctgtaccagggactgagcaccgccacaaaggacacc
tatgatgctctgcatatgcaggcactgcctccaagg.

[0162] The 4-1BB costimulatory domain may comprise an amino acid sequence comprising

(SEQ ID NO: 14661)
KRGRKKLLYIFKQPFMRPVQTTQEEDGCSCRFPEEEEGGCEL

or a sequence having at least 70%, 80%, 90%, 95%, or 99% identity to the amino acid sequence comprising

(SEQ ID NO: 14661)
KRGRKKLLYIFKQPFMRPVQTTQEEDGCSCRFPEEEEGGCEL.

The 4-1BB costimulatory domain may be encoded by the nucleic acid sequence comprising

(SEQ ID NO: 14662)
aagagaggcaggaagaaactgctgtatattttcaaacagcccttcatgcg
ccccgtgcagactacccaggaggaagacgggtgctcctgtcgattccctg
aggaagaggaaggcgggtgtgagctg.

The 4-1BB costimulatory domain may be located between the transmembrane domain and the CD28 costimulatory domain.

[0163] In certain embodiments of the CARs of the disclosure, the hinge may comprise a sequence derived from a human CD8α, IgG4, and/or CD4 sequence. In certain embodiments of the CARs of the disclosure, the hinge may comprise a sequence derived from a human CD8α sequence. The hinge may comprise a human CD8α amino acid sequence comprising

(SEQ ID NO: 14663)
TTTPAPRPPTPAPTIASQPLSLRPEACRPAAGGAVHTRGLDFACD

or a sequence having at least 70%, 80%, 90%, 95%, or 99% identity to the amino acid sequence comprising

(SEQ ID NO: 14663)
TTTPAPRPPTPAPTIASQPLSLRPEACRPAAGGAVHTRGLDFACD.

The human CD8α hinge amino acid sequence may be encoded by the nucleic acid sequence comprising

(SEQ ID NO: 14664)
actaccacaccagcacctagaccaccaactccagctccaaccatcgcgag
tcagcccctgagtctgagacctgaggcctgcaggccagctgcaggaggag
ctgtgcacaccaggggcctggacttcgcctgcgac.

### ScFv

[0164] The disclosure provides single chain variable fragment (scFv) compositions and methods for use of these compositions to recognize and bind to a specific target protein. ScFv compositions comprise a heavy chain variable region and a light chain variable region of an antibody. ScFv compositions may be incorporated into an antigen recognition region of a chimeric antigen receptor of the disclosure. ScFvs are fusion proteins of the variable regions of the heavy (VH) and light (VL) chains of immunoglobulins, and the VH and VL domains are connected with a short peptide linker. ScFvs retain the specificity of the original immunoglobulin, despite removal of the constant regions and the introduction of the linker. An exemplary linker comprises a sequence of GGGGSGGGGSGGGGS (SEQ ID NO: 14665).

### Centyrins

[0165] Centyrins of the disclosure specifically bind to an antigen. Chimeric antigen receptors of the disclosure comprising one or more Centyrins that specifically bind an antigen may be used to direct the specificity of a cell, (e.g. a cytotoxic immune cell) towards the specific antigen.

[0166] Centyrins of the disclosure may comprise a protein scaffold, wherein the scaffold is capable of specifically binding an antigen. Centyrins of the disclosure may comprise a protein scaffold comprising a consensus sequence of at least one fibronectin type III (FN3) domain, wherein the scaffold is capable of specifically binding an antigen. The at least one fibronectin type III (FN3) domain may be derived from a human protein. The human protein may be Tenascin-C. The consensus sequence may comprise

(SEQ ID NO: 14488)
LPAPKNLVVSEVTEDSLRLSWTAPDAAFDSFLIQYQESEKVGEAINLTVP
GSERSYDLTGLKPGTEYTVSIYGVKGGHRSNPLSAEFTT
or
MLPAPKNLVVSEVTEDSLRLSWTAPDAAFDSFLIQYQESEKVGEAINLTV
PGSERSYD

The consensus sequence may comprise an amino sequence at least 74% identical to

(SEQ ID NO: 14488)
LPAPKNLVVSEVTEDSLRLSWTAPDAAFDSFLIQYQESEKVGEAINLTVP
GSERSYDLTGLKPGTEYTVSIYGVKGGHRSNPLSAEFTT
or
(SEQ ID NO: 14489)
MLPAPKNLVVSEVTEDSLRLSWTAPDAAFDSFLIQYQESEKVGEAINLTV
PGSERSYDLTGLKPGTEYTVSIYGVKGGHRSNPLSAEFTT.

The consensus sequence may encoded by a nucleic acid sequence comprising

(SEQ ID NO: 14490)
atgctgcctgcaccaaagaacctggtggtgtctcatgtgacagaggatag
tgccagactgtcatggactgctcccgacgcagccttcgatagttttatca
tcgtgtaccgggagaacatcgaaaccggcgaggccattgtcctgacagtg
ccagggtccgaacgctcttatgacctgacagatctgaagcccggaactga
gtactatgtgcagatcgccggcgtcaaaggaggcaatatcagcttccctc
tgtccgcaatcttcaccaca.

The consensus sequence may be modified at one or more positions within (a) a A-B loop comprising or consisting of the amino acid residues TEDS (SEQ ID NO: 14491) at positions 13-16 of the consensus sequence; (b) a B-C loop comprising or consisting of the amino acid residues TAPDAAF (SEQ ID NO: 14492) at positions 22-28 of the consensus sequence; (c) a C-D loop comprising or consisting of the amino acid residues SEKVGE (SEQ ID NO: 14493) at positions 38-43 of the consensus sequence; (d) a D-E loop comprising or consisting of the amino acid residues GSER (SEQ ID NO: 14494) at positions 51-54 of the consensus sequence; (e) a E-F loop comprising or consisting of the amino acid residues GLKPG (SEQ ID NO: 14495) at positions 60-64 of the consensus sequence; (f) a F-G loop comprising or consisting of the amino acid residues KGGHRSN (SEQ ID NO: 14496) at positions 75-81 of the consensus sequence; or (g) any combination of (a)-(f). Centyrins of the disclosure may comprise a consensus sequence of at least 5 fibronectin type III (FN3) domains, at least 10 fibronectin type III (FN3) domains or at least 15 fibronectin type III (FN3) domains. The scaffold may bind an antigen with at least one affinity selected from a K_{D} of less than or equal to 10M, less than or equal to 10⁻¹⁰ M, less than or equal to 10⁻¹¹ M, less than or equal to 10⁻¹²M, less than or equal to 10⁻¹³M, less than or equal to 10⁻¹⁴M, and less than or equal to 10⁻¹⁵M. The K_{D} may be determined by surface plasmon resonance.

[0167] The term “antibody mimetic” is intended to describe an organic compound that specifically binds a target sequence and has a structure distinct from a naturally-occurring antibody. Antibody mimetics may comprise a protein, a nucleic acid, or a small molecule. The target sequence to which an antibody mimetic of the disclosure specifically binds may be an antigen. Antibody mimetics may provide superior properties over antibodies including, but not limited to, superior solubility, tissue penetration, stability towards heat and enzymes (e.g. resistance to enzymatic degradation), and lower production costs. Exemplary antibody mimetics include, but are not limited to, an affibody, an afflilin, an affimer, an affitin, an alphabody, an anticalin, and avimer (also known as avidity multimer), a DARPin (Designed Ankyrin Repeat Protein), a Fynomer, a Kunitz domain peptide, and a monobody.

[0168] Affibody molecules of the disclosure comprise a protein scaffold comprising or consisting of one or more alpha helix without any disulfide bridges. Preferably, affibody molecules of the disclosure comprise or consist of three alpha helices. For example, an affibody molecule of the disclosure may comprise an immunoglobulin binding domain. An affibody molecule of the disclosure may comprise the Z domain of protein A.

[0169] Affilin molecules of the disclosure comprise a protein scaffold produced by modification of exposed amino acids of, for example, either gamma-B crystallin or ubiquitin. Affilin molecules functionally mimic an antibody's affinity to antigen, but do not structurally mimic an antibody. In any protein scaffold used to make an affilin, those amino acids that are accessible to solvent or possible binding partners in a properly-folded protein molecule are considered exposed amino acids. Any one or more of these exposed amino acids may be modified to specifically bind to a target sequence or antigen.

[0170] Affimer molecules of the disclosure comprise a protein scaffold comprising a highly stable protein engineered to display peptide loops that provide a high affinity binding site for a specific target sequence. Exemplary affimer molecules of the disclosure comprise a protein scaffold based upon a cystatin protein or tertiary structure thereof. Exemplary affimer molecules of the disclosure may share a common tertiary structure of comprising an alpha-helix lying on top of an anti-parallel beta-sheet.

[0171] Affitin molecules of the disclosure comprise an artificial protein scaffold, the structure of which may be derived, for example, from a DNA binding protein (e.g. the DNA binding protein Sac7d). Affitins of the disclosure selectively bind a target sequence, which may be the entirety or part of an antigen. Exemplary affitins of the disclosure are manufactured by randomizing one or more amino acid sequences on the binding surface of a DNA binding protein and subjecting the resultant protein to ribosome display and selection. Target sequences of affitins of the disclosure may be found, for example, in the genome or on the surface of a peptide, protein, virus, or bacteria. In certain embodiments of the disclosure, an affitin molecule may be used as a specific inhibitor of an enzyme. Affitin molecules of the disclosure may include heat-resistant proteins or derivatives thereof.

[0172] Alphabody molecules of the disclosure may also be referred to as Cell-Penetrating Alphabodies (CPAB). Alphabody molecules of the disclosure comprise small proteins (typically of less than 10 kDa) that bind to a variety of target sequences (including antigens). Alphabody molecules are capable of reaching and binding to intracellular target sequences. Structurally, alphabody molecules of the disclosure comprise an artificial sequence forming single chain alpha helix (similar to naturally occurring coiled-coil structures). Alphabody molecules of the disclosure may comprise a protein scaffold comprising one or more amino acids that are modified to specifically bind target proteins. Regardless of the binding specificity of the molecule, alphabody molecules of the disclosure maintain correct folding and thermostability.

[0173] Anticalin molecules of the disclosure comprise artificial proteins that bind to target sequences or sites in either proteins or small molecules. Anticalin molecules of the disclosure may comprise an artificial protein derived from a human lipocalin. Anticalin molecules of the disclosure may be used in place of, for example, monoclonal antibodies or fragments thereof. Anticalin molecules may demonstrate superior tissue penetration and thermostability than monoclonal antibodies or fragments thereof. Exemplary anticalin molecules of the disclosure may comprise about 180 amino acids, having a mass of approximately 20 kDa. Structurally, anticalin molecules of the disclosure comprise a barrel structure comprising antiparallel beta-strands pairwise connected by loops and an attached alpha helix. In preferred embodiments, anticalin molecules of the disclosure comprise a barrel structure comprising eight antiparallel beta-strands pairwise connected by loops and an attached alpha helix.

[0174] Avimer molecules of the disclosure comprise an artificial protein that specifically binds to a target sequence (which may also be an antigen). Avimers of the disclosure may recognize multiple binding sites within the same target or within distinct targets. When an avimer of the disclosure recognize more than one target, the avimer mimics function of a bi-specific antibody. The artificial protein avimer may comprise two or more peptide sequences of approximately 30-35 amino acids each. These peptides may be connected via one or more linker peptides. Amino acid sequences of one or more of the peptides of the avimer may be derived from an A domain of a membrane receptor. Avimers have a rigid structure that may optionally comprise disulfide bonds and/or calcium. Avimers of the disclosure may demonstrate greater heat stability compared to an antibody.

[0175] DARPins (Designed Ankyrin Repeat Proteins) of the disclosure comprise genetically-engineered, recombinant, or chimeric proteins having high specificity and high affinity for a target sequence. In certain embodiments, DARPins of the disclosure are derived from ankyrin proteins and, optionally, comprise at least three repeat motifs (also referred to as repetitive structural units) of the ankyrin protein. Ankyrin proteins mediate high-affinity protein-protein interactions. DARPins of the disclosure comprise a large target interaction surface.

[0176] Fynomers of the disclosure comprise small binding proteins (about 7 kDa) derived from the human Fyn SH3 domain and engineered to bind to target sequences and molecules with equal affinity and equal specificity as an antibody.

[0177] Kunitz domain peptides of the disclosure comprise a protein scaffold comprising a Kunitz domain. Kunitz domains comprise an active site for inhibiting protease activity. Structurally, Kunitz domains of the disclosure comprise a disulfide-rich alpha+beta fold. This structure is exemplified by the bovine pancreatic trypsin inhibitor. Kunitz domain peptides recognize specific protein structures and serve as competitive protease inhibitors. Kunitz domains of the disclosure may comprise Ecallantide (derived from a human lipoprotein-associated coagulation inhibitor (LACI)).

[0178] Monobodies of the disclosure are small proteins (comprising about 94 amino acids and having a mass of about 10 kDa) comparable in size to a single chain antibody. These genetically engineered proteins specifically bind target sequences including antigens. Monobodies of the disclosure may specifically target one or more distinct proteins or target sequences. In preferred embodiments, monobodies of the disclosure comprise a protein scaffold mimicking the structure of human fibronectin, and more preferably, mimicking the structure of the tenth extracellular type III domain of fibronectin. The tenth extracellular type III domain of fibronectin, as well as a monobody mimetic thereof, contains seven beta sheets forming a barrel and three exposed loops on each side corresponding to the three complementarity determining regions (CDRs) of an antibody. In contrast to the structure of the variable domain of an antibody, a monobody lacks any binding site for metal ions as well as a central disulfide bond. Multispecific monobodies may be optimized by modifying the loops BC and FG. Monobodies of the disclosure may comprise an adnectin.

### VHH

[0179] In certain embodiments, the CAR comprises a single domain antibody (SdAb). In certain embodiments, the SdAb is a VHH.

[0180] The disclosure provides chimeric antigen receptors (CARs) comprising at least one VHH (a VCAR). Chimeric antigen receptors of the disclosure may comprise more than one VHH. For example, a bi-specific VCAR may comprise two VHHs that specifically bind two distinct antigens.

[0181] VHH proteins of the disclosure specifically bind to an antigen. Chimeric antigen receptors of the disclosure comprising one or more VHHs that specifically bind an antigen may be used to direct the specificity of a cell, (e.g. a cytotoxic immune cell) towards the specific antigen.

[0182] At least one VHH protein or VCAR of the disclosure can be optionally produced by a cell line, a mixed cell line, an immortalized cell or clonal population of immortalized cells, as well known in the art. See, e.g., Ausubel, et al., ed., Current Protocols in Molecular Biology, John Wiley & Sons, Inc., NY, N.Y. (1987-2001); Sambrook, et al., Molecular Cloning: A Laboratory Manual, 2nd Edition, Cold Spring Harbor, N.Y. (1989); Harlow and Lane, Antibodies, a Laboratory Manual, Cold Spring Harbor, N.Y. (1989); Colligan, et al., eds., Current Protocols in Immunology, John Wiley & Sons, Inc., NY (1994-2001); Colligan et al., Current Protocols in Protein Science, John Wiley & Sons, NY, N.Y., (1997-2001).

[0183] Amino acids from a VHH protein can be altered, added and/or deleted to reduce immunogenicity or reduce, enhance or modify binding, affinity, on-rate, off-rate, avidity, specificity, half-life, stability, solubility or any other suitable characteristic, as known in the art.

[0184] Optionally, VHH proteins can be engineered with retention of high affinity for the antigen and other favorable biological properties. To achieve this goal, the VHH proteins can be optionally prepared by a process of analysis of the parental sequences and various conceptual engineered products using three-dimensional models of the parental and engineered sequences. Three-dimensional models are commonly available and are familiar to those skilled in the art. Computer programs are available which illustrate and display probable three-dimensional conformational structures of selected candidate sequences and can measure possible immunogenicity (e.g., Immunofilter program of Xencor, Inc. of Monrovia, Calif.). Inspection of these displays permits analysis of the likely role of the residues in the functioning of the candidate sequence, i.e., the analysis of residues that influence the ability of the candidate VHH protein to bind its antigen. In this way, residues can be selected and combined from the parent and reference sequences so that the desired characteristic, such as affinity for the target antigen(s), is achieved. Alternatively, or in addition to, the above procedures, other suitable methods of engineering can be used.

[0185] Screening VHH for specific binding to similar proteins or fragments can be conveniently achieved using nucleotide (DNA or RNA display) or peptide display libraries, for example, in vitro display. This method involves the screening of large collections of peptides for individual members having the desired function or structure. The displayed nucleotide or peptide sequences can be from 3 to 5000 or more nucleotides or amino acids in length, frequently from 5-100 amino acids long, and often from about 8 to 25 amino acids long. In addition to direct chemical synthetic methods for generating peptide libraries, several recombinant DNA methods have been described. One type involves the display of a peptide sequence on the surface of a bacteriophage or cell. Each bacteriophage or cell contains the nucleotide sequence encoding the particular displayed peptide sequence. The VHH proteins of the disclosure can bind human or other mammalian proteins with a wide range of affinities (KD). In a preferred embodiment, at least one VHH of the present invention can optionally bind to a target protein with high affinity, for example, with a KD equal to or less than about 10⁻⁷ M, such as but not limited to, 0.1-9.9 (or any range or value therein)×10⁻⁸, 10⁻⁹, 10⁻¹⁰, 10⁻¹¹, 10⁻¹², 10⁻¹³, 10⁻¹⁴, 10⁻¹⁵ or any range or value therein, as determined by surface plasmon resonance or the Kinexa method, as practiced by those of skill in the art.

[0186] The affinity or avidity of a VHH or a VCAR for an antigen can be determined experimentally using any suitable method. (See, for example, Berzofsky, et al., “Antibody-Antigen Interactions,” In Fundamental Immunology, Paul, W. E., Ed., Raven Press: New York, N.Y. (1984); Kuby, Janis Immunology, W.H. Freeman and Company: New York, N.Y. (1992); and methods described herein). The measured affinity of a particular VHH-antigen or VCAR-antigen interaction can vary if measured under different conditions (e.g., salt concentration, pH). Thus, measurements of affinity and other antigen-binding parameters (e.g., KD, Kon, Koff) are preferably made with standardized solutions of VHH or VCAR and antigen, and a standardized buffer, such as the buffer described herein.

[0187] Competitive assays can be performed with the VHH or VCAR of the disclosure in order to determine what proteins, antibodies, and other antagonists compete for binding to a target protein with the VHH or VCAR of the present invention and/or share the epitope region. These assays as readily known to those of ordinary skill in the art evaluate competition between antagonists or ligands for a limited number of binding sites on a protein. The protein and/or antibody is immobilized or insolubilized before or after the competition and the sample bound to the target protein is separated from the unbound sample, for example, by decanting (where the protein/antibody was preinsolubilized) or by centrifuging (where the protein/antibody was precipitated after the competitive reaction). Also, the competitive binding may be determined by whether function is altered by the binding or lack of binding of the VHH or VCAR to the target protein, e.g., whether the VCAR molecule inhibits or potentiates the enzymatic activity of, for example, a label. ELISA and other functional assays may be used, as well known in the art.

### VH

[0188] In certain embodiments, the CAR comprises a single domain antibody (SdAb). In certain embodiments, the SdAb is a VH.

[0189] The disclosure provides chimeric antigen receptors (CARs) comprising a single domain antibody (VCARs). In certain embodiments, the single domain antibody comprises a VH. In certain embodiments, the VH is isolated or derived from a human sequence. In certain embodiments, VH comprises a human CDR sequence and/or a human framework sequence and a non-human or humanized sequence (e.g. a rat Fc domain). In certain embodiments, the VH is a fully humanized VH. In certain embodiments, the VH s neither a naturally occurring antibody nor a fragment of a naturally occurring antibody. In certain embodiments, the VH is not a fragment of a monoclonal antibody. In certain embodiments, the VH is a UniDab™ antibody (TeneoBio).

[0190] In certain embodiments, the VH is fully engineered using the UniRat™ (TeneoBio) system and “NGS-based Discovery” to produce the VH. Using this method, the specific VH are not naturally-occurring and are generated using fully engineered systems. The VH are not derived from naturally-occurring monoclonal antibodies (mAbs) that were either isolated directly from the host (for example, a mouse, rat or human) or directly from a single clone of cells or cell line (hybridoma). These VHs were not subsequently cloned from said cell lines. Instead, VH sequences are fully-engineered using the UniRat™ system as transgenes that comprise human variable regions (VH domains) with a rat Fc domain, and are thus human/rat chimeras without a light chain and are unlike the standard mAb format. The native rat genes are knocked out and the only antibodies expressed in the rat are from transgenes with VH domains linked to a Rat Fc (UniAbs). These are the exclusive Abs expressed in the UniRat. Next generation sequencing (NGS) and bioinformatics are used to identify the full antigen-specific repertoire of the heavy-chain antibodies generated by UniRat™ after immunization. Then, a unique gene assembly method is used to convert the antibody repertoire sequence information into large collections of fully-human heavy-chain antibodies that can be screened in vitro for a variety of functions. In certain embodiments, fully humanized VH are generated by fusing the human VH domains with human Fcs in vitro (to generate a non-naturally occurring recombinant VH antibody). In certain embodiments, the VH are fully humanized, but they are expressed in vivo as human/rat chimera (human VH, rat Fc) without a light chain. Fully humanized VHs are expressed in vivo as human/rat chimera (human VH, rat Fc) without a light chain are about 80 kDa (vs 150 kDa).

[0191] VCARs of the disclosure may comprise at least one VH of the disclosure. In certain embodiments, the VH of the disclosure may be modified to remove an Fc domain or a portion thereof. In certain embodiments, a framework sequence of the VH of the disclosure may be modified to, for example, improve expression, decrease immunogenicity or to improve function.

[0192] As used throughout the disclosure, the singular forms “a,” “and,” and “the” include plural referents unless the context clearly dictates otherwise. Thus, for example, reference to “a method” includes a plurality of such methods and reference to “a dose” includes reference to one or more doses and equivalents thereof known to those skilled in the art, and so forth.

[0193] The term “about” or “approximately” means within an acceptable error range for the particular value as determined by one of ordinary skill in the art, which will depend in part on how the value is measured or determined, e.g., the limitations of the measurement system. For example, “about” can mean within 1 or more standard deviations. Alternatively, “about” can mean a range of up to 20%, or up to 10%, or up to 5%, or up to 1% of a given value. Alternatively, particularly with respect to biological systems or processes, the term can mean within an order of magnitude, preferably within 5-fold, and more preferably within 2-fold, of a value. Where particular values are described in the application and claims, unless otherwise stated the term “about” meaning within an acceptable error range for the particular value should be assumed.

[0194] The disclosure provides isolated or substantially purified polynucleotide or protein compositions. An “isolated” or “purified” polynucleotide or protein, or biologically active portion thereof, is substantially or essentially free from components that normally accompany or interact with the polynucleotide or protein as found in its naturally occurring environment. Thus, an isolated or purified polynucleotide or protein is substantially free of other cellular material or culture medium when produced by recombinant techniques, or substantially free of chemical precursors or other chemicals when chemically synthesized. Optimally, an “isolated” polynucleotide is free of sequences (optimally protein encoding sequences) that naturally flank the polynucleotide (i.e., sequences located at the 5′ and 3′ ends of the polynucleotide) in the genomic DNA of the organism from which the polynucleotide is derived. For example, in various embodiments, the isolated polynucleotide can contain less than about 5 kb, 4 kb, 3 kb, 2 kb, 1 kb, 0.5 kb, or 0.1 kb of nucleotide sequence that naturally flank the polynucleotide in genomic DNA of the cell from which the polynucleotide is derived. A protein that is substantially free of cellular material includes preparations of protein having less than about 30%, 20%, 10%, 5%, or 1% (by dry weight) of contaminating protein. When the protein of the invention or biologically active portion thereof is recombinantly produced, optimally culture medium represents less than about 30%, 20%, 10%, 5%, or 1% (by dry weight) of chemical precursors or non-protein-of-interest chemicals.

[0195] The disclosure provides fragments and variants of the disclosed DNA sequences and proteins encoded by these DNA sequences. As used throughout the disclosure, the term “fragment” refers to a portion of the DNA sequence or a portion of the amino acid sequence and hence protein encoded thereby. Fragments of a DNA sequence comprising coding sequences may encode protein fragments that retain biological activity of the native protein and hence DNA recognition or binding activity to a target DNA sequence as herein described. Alternatively, fragments of a DNA sequence that are useful as hybridization probes generally do not encode proteins that retain biological activity or do not retain promoter activity. Thus, fragments of a DNA sequence may range from at least about 20 nucleotides, about 50 nucleotides, about 100 nucleotides, and up to the full-length polynucleotide of the invention.

[0196] Nucleic acids or proteins of the disclosure can be constructed by a modular approach including preassembling monomer units and/or repeat units in target vectors that can subsequently be assembled into a final destination vector. Polypeptides of the disclosure may comprise repeat monomers of the disclosure and can be constructed by a modular approach by preassembling repeat units in target vectors that can subsequently be assembled into a final destination vector. The disclosure provides polypeptide produced by this method as well nucleic acid sequences encoding these polypeptides. The disclosure provides host organisms and cells comprising nucleic acid sequences encoding polypeptides produced this modular approach.

[0197] The term “antibody” is used in the broadest sense and specifically covers single monoclonal antibodies (including agonist and antagonist antibodies) and antibody compositions with polyepitopic specificity. It is also within the scope hereof to use natural or synthetic analogs, mutants, variants, alleles, homologs and orthologs (herein collectively referred to as “analogs”) of the antibodies hereof as defined herein. Thus, according to one embodiment hereof, the term “antibody hereof” in its broadest sense also covers such analogs. Generally, in such analogs, one or more amino acid residues may have been replaced, deleted and/or added, compared to the antibodies hereof as defined herein.

[0198] “Antibody fragment”, and all grammatical variants thereof, as used herein are defined as a portion of an intact antibody comprising the antigen binding site or variable region of the intact antibody, wherein the portion is free of the constant heavy chain domains (i.e. CH2, CH3, and CH4, depending on antibody isotype) of the Fc region of the intact antibody. Examples of antibody fragments include Fab, Fab′, Fab′-SH, F(ab′)₂, and Fv fragments; diabodies; any antibody fragment that is a polypeptide having a primary structure consisting of one uninterrupted sequence of contiguous amino acid residues (referred to herein as a “single-chain antibody fragment” or “single chain polypeptide”), including without limitation (l) single-chain Fv (scFv) molecules (2) single chain polypeptides containing only one light chain variable domain, or a fragment thereof that contains the three CDRs of the light chain variable domain, without an associated heavy chain moiety and (3) single chain polypeptides containing only one heavy chain variable region, or a fragment thereof containing the three CDRs of the heavy chain variable region, without an associated light chain moiety; and multispecific or multivalent structures formed from antibody fragments. In an antibody fragment comprising one or more heavy chains, the heavy chain(s) can contain any constant domain sequence (e.g. CHI in the IgG isotype) found in a non-Fc region of an intact antibody, and/or can contain any hinge region sequence found in an intact antibody, and/or can contain a leucine zipper sequence fused to or situated in the hinge region sequence or the constant domain sequence of the heavy chain(s). The term further includes single domain antibodies (“sdAB”) which generally refers to an antibody fragment having a single monomeric variable antibody domain, (for example, from camelids). Such antibody fragment types will be readily understood by a person having ordinary skill in the art.

[0199] “Binding” refers to a sequence-specific, non-covalent interaction between macromolecules (e.g., between a protein and a nucleic acid). Not all components of a binding interaction need be sequence-specific (e.g., contacts with phosphate residues in a DNA backbone), as long as the interaction as a whole is sequence-specific.

[0200] The term “comprising” is intended to mean that the compositions and methods include the recited elements, but do not exclude others. “Consisting essentially of” when used to define compositions and methods, shall mean excluding other elements of any essential significance to the combination when used for the intended purpose. Thus, a composition consisting essentially of the elements as defined herein would not exclude trace contaminants or inert carriers. “Consisting of shall mean excluding more than trace elements of other ingredients and substantial method steps. Embodiments defined by each of these transition terms are within the scope of this invention.

[0201] The term “epitope” refers to an antigenic determinant of a polypeptide. An epitope could comprise three amino acids in a spatial conformation, which is unique to the epitope. Generally, an epitope consists of at least 4, 5, 6, or 7 such amino acids, and more usually, consists of at least 8, 9, or 10 such amino acids. Methods of determining the spatial conformation of amino acids are known in the art, and include, for example, x-ray crystallography and two-dimensional nuclear magnetic resonance.

[0202] As used herein, “expression” refers to the process by which polynucleotides are transcribed into mRNA and/or the process by which the transcribed mRNA is subsequently being translated into peptides, polypeptides, or proteins. If the polynucleotide is derived from genomic DNA, expression may include splicing of the mRNA in a eukaryotic cell.

[0203] “Gene expression” refers to the conversion of the information, contained in a gene, into a gene product. A gene product can be the direct transcriptional product of a gene (e.g., mRNA, tRNA, rRNA, antisense RNA, ribozyme, shRNA, micro RNA, structural RNA or any other type of RNA) or a protein produced by translation of an mRNA. Gene products also include RNAs which are modified, by processes such as capping, polyadenylation, methylation, and editing, and proteins modified by, for example, methylation, acetylation, phosphorylation, ubiquitination, ADP-ribosylation, myristilation, and glycosylation.

[0204] “Modulation” or “regulation” of gene expression refers to a change in the activity of a gene. Modulation of expression can include, but is not limited to, gene activation and gene repression.

[0205] The term “operatively linked” or its equivalents (e.g., “linked operatively”) means two or more molecules are positioned with respect to each other such that they are capable of interacting to affect a function attributable to one or both molecules or a combination thereof.

[0206] Non-covalently linked components and methods of making and using non-covalently linked components, are disclosed. The various components may take a variety of different forms as described herein. For example, non-covalently linked (i.e., operatively linked) proteins may be used to allow temporary interactions that avoid one or more problems in the art. The ability of non-covalently linked components, such as proteins, to associate and dissociate enables a functional association only or primarily under circumstances where such association is needed for the desired activity. The linkage may be of duration sufficient to allow the desired effect.

[0207] A method for directing proteins to a specific locus in a genome of an organism is disclosed. The method may comprise the steps of providing a DNA localization component and providing an effector molecule, wherein the DNA localization component and the effector molecule are capable of operatively linking via a non-covalent linkage.

[0208] The term “scFv” refers to a single-chain variable fragment. scFv is a fusion protein of the variable regions of the heavy (VH) and light chains (VL) of immunoglobulins, connected with a linker peptide. The linker peptide may be from about 5 to 40 amino acids or from about 10 to 30 amino acids or about 5, 10, 15, 20, 25, 30, 35, or 40 amino acids in length. Single-chain variable fragments lack the constant Fc region found in complete antibody molecules, and, thus, the common binding sites (e.g., Protein G) used to purify antibodies. The term further includes a scFv that is an intrabody, an antibody that is stable in the cytoplasm of the cell, and which may bind to an intracellular protein.

[0209] The term “single domain antibody” means an antibody fragment having a single monomeric variable antibody domain which is able to bind selectively to a specific antigen. A single-domain antibody generally is a peptide chain of about 110 amino acids long, comprising one variable domain (VH) of a heavy-chain antibody, or of a common IgG, which generally have similar affinity to antigens as whole antibodies, but are more heat-resistant and stable towards detergents and high concentrations of urea. Examples are those derived from camelid or fish antibodies. Alternatively, single-domain antibodies can be made from common murine or human IgG with four chains.

[0210] The terms “specifically bind” and “specific binding” as used herein refer to the ability of an antibody, an antibody fragment or a nanobody to preferentially bind to a particular antigen that is present in a homogeneous mixture of different antigens. In certain embodiments, a specific binding interaction will discriminate between desirable and undesirable antigens in a sample. In certain embodiments more than about ten- to 100-fold or more (e.g., more than about 1000- or 10,000-fold). “Specificity” refers to the ability of an immunoglobulin or an immunoglobulin fragment, such as a nanobody, to bind preferentially to one antigenic target versus a different antigenic target and does not necessarily imply high affinity.

[0211] A “target site” or “target sequence” is a nucleic acid sequence that defines a portion of a nucleic acid to which a binding molecule will bind, provided sufficient conditions for binding exist.

[0212] The terms “nucleic acid” or “oligonucleotide” or “polynucleotide” refer to at least two nucleotides covalently linked together. The depiction of a single strand also defines the sequence of the complementary strand. Thus, a nucleic acid may also encompass the complementary strand of a depicted single strand. A nucleic acid of the disclosure also encompasses substantially identical nucleic acids and complements thereof that retain the same structure or encode for the same protein.

[0213] Probes of the disclosure may comprise a single stranded nucleic acid that can hybridize to a target sequence under stringent hybridization conditions. Thus, nucleic acids of the disclosure may refer to a probe that hybridizes under stringent hybridization conditions.

[0214] Nucleic acids of the disclosure may be single- or double-stranded. Nucleic acids of the disclosure may contain double-stranded sequences even when the majority of the molecule is single-stranded. Nucleic acids of the disclosure may contain single-stranded sequences even when the majority of the molecule is double-stranded. Nucleic acids of the disclosure may include genomic DNA, cDNA, RNA, or a hybrid thereof. Nucleic acids of the disclosure may contain combinations of deoxyribo- and ribo-nucleotides. Nucleic acids of the disclosure may contain combinations of bases including uracil, adenine, thymine, cytosine, guanine, inosine, xanthine hypoxanthine, isocytosine and isoguanine. Nucleic acids of the disclosure may be synthesized to comprise non-natural amino acid modifications. Nucleic acids of the disclosure may be obtained by chemical synthesis methods or by recombinant methods.

[0215] Nucleic acids of the disclosure, either their entire sequence, or any portion thereof, may be non-naturally occurring. Nucleic acids of the disclosure may contain one or more mutations, substitutions, deletions, or insertions that do not naturally-occur, rendering the entire nucleic acid sequence non-naturally occurring. Nucleic acids of the disclosure may contain one or more duplicated, inverted or repeated sequences, the resultant sequence of which does not naturally-occur, rendering the entire nucleic acid sequence non-naturally occurring. Nucleic acids of the disclosure may contain modified, artificial, or synthetic nucleotides that do not naturally-occur, rendering the entire nucleic acid sequence non-naturally occurring.

[0216] Given the redundancy in the genetic code, a plurality of nucleotide sequences may encode any particular protein. All such nucleotides sequences are contemplated herein.

[0217] As used throughout the disclosure, the term “operably linked” refers to the expression of a gene that is under the control of a promoter with which it is spatially connected. A promoter can be positioned 5′ (upstream) or 3′ (downstream) of a gene under its control. The distance between a promoter and a gene can be approximately the same as the distance between that promoter and the gene it controls in the gene from which the promoter is derived. Variation in the distance between a promoter and a gene can be accommodated without loss of promoter function.

[0218] As used throughout the disclosure, the term “promoter” refers to a synthetic or naturally-derived molecule which is capable of conferring, activating or enhancing expression of a nucleic acid in a cell. A promoter can comprise one or more specific transcriptional regulatory sequences to further enhance expression and/or to alter the spatial expression and/or temporal expression of same. A promoter can also comprise distal enhancer or repressor elements, which can be located as much as several thousand base pairs from the start site of transcription. A promoter can be derived from sources including viral, bacterial, fungal, plants, insects, and animals. A promoter can regulate the expression of a gene component constitutively or differentially with respect to cell, the tissue or organ in which expression occurs or, with respect to the developmental stage at which expression occurs, or in response to external stimuli such as physiological stresses, pathogens, metal ions, or inducing agents. Representative examples of promoters include the bacteriophage T7 promoter, bacteriophage T3 promoter, SP6 promoter, lac operator-promoter, tac promoter, SV40 late promoter, SV40 early promoter, RSV-LTR promoter, CMV IE promoter, EF-1 Alpha promoter, CAG promoter, SV40 early promoter or SV40 late promoter and the CMV IE promoter.

[0219] As used throughout the disclosure, the term “substantially complementary” refers to a first sequence that is at least 60%, 65%, 70%, 75%, 80%, 85%, 90%, 95%, 97%, 98% or 99% identical to the complement of a second sequence over a region of 8, 9, 10, 11, 12, 13, 14, 15, 16, 17, 18, 19, 20, 21, 22, 23, 24, 25, 30, 35, 40, 45, 50, 55, 60, 65, 70, 75, 80, 85, 90, 95, 100, 180, 270, 360, 450, 540, or more nucleotides or amino acids, or that the two sequences hybridize under stringent hybridization conditions.

[0220] As used throughout the disclosure, the term “substantially identical” refers to a first and second sequence are at least 60%, 65%, 70%, 75%, 80%, 85%, 90%, 95%, 97%, 98% or 99% identical over a region of 8, 9, 10, 11, 12, 13, 14, 15, 16, 17, 18, 19, 20, 21, 22, 23, 24, 25, 30, 35, 40, 45, 50, 55, 60, 65, 70, 75, 80, 85, 90, 95, 100, 180, 270, 360, 450, 540 or more nucleotides or amino acids, or with respect to nucleic acids, if the first sequence is substantially complementary to the complement of the second sequence.

[0221] As used throughout the disclosure, the term “variant” when used to describe a nucleic acid, refers to (i) a portion or fragment of a referenced nucleotide sequence; (ii) the complement of a referenced nucleotide sequence or portion thereof; (iii) a nucleic acid that is substantially identical to a referenced nucleic acid or the complement thereof; or (iv) a nucleic acid that hybridizes under stringent conditions to the referenced nucleic acid, complement thereof, or a sequences substantially identical thereto.

[0222] As used throughout the disclosure, the term “vector” refers to a nucleic acid sequence containing an origin of replication. A vector can be a viral vector, bacteriophage, bacterial artificial chromosome or yeast artificial chromosome. A vector can be a DNA or RNA vector. A vector can be a self-replicating extrachromosomal vector, and preferably, is a DNA plasmid. A vector may comprise a combination of an amino acid with a DNA sequence, an RNA sequence, or both a DNA and an RNA sequence.

[0223] As used throughout the disclosure, the term “variant” when used to describe a peptide or polypeptide, refers to a peptide or polypeptide that differs in amino acid sequence by the insertion, deletion, or conservative substitution of amino acids, but retain at least one biological activity. Variant can also mean a protein with an amino acid sequence that is substantially identical to a referenced protein with an amino acid sequence that retains at least one biological activity.

[0224] A conservative substitution of an amino acid, i.e., replacing an amino acid with a different amino acid of similar properties (e.g., hydrophilicity, degree and distribution of charged regions) is recognized in the art as typically involving a minor change. These minor changes can be identified, in part, by considering the hydropathic index of amino acids, as understood in the art. Kyte et al., J. Mol. Biol. 157: 105-132 (1982). The hydropathic index of an amino acid is based on a consideration of its hydrophobicity and charge. Amino acids of similar hydropathic indexes can be substituted and still retain protein function. In one aspect, amino acids having hydropathic indexes of ±2 are substituted. The hydrophilicity of amino acids can also be used to reveal substitutions that would result in proteins retaining biological function. A consideration of the hydrophilicity of amino acids in the context of a peptide permits calculation of the greatest local average hydrophilicity of that peptide, a useful measure that has been reported to correlate well with antigenicity and immunogenicity. U.S. Pat. No. 4,554,101, incorporated fully herein by reference.

[0225] Substitution of amino acids having similar hydrophilicity values can result in peptides retaining biological activity, for example immunogenicity. Substitutions can be performed with amino acids having hydrophilicity values within ±2 of each other. Both the hyrophobicity index and the hydrophilicity value of amino acids are influenced by the particular side chain of that amino acid. Consistent with that observation, amino acid substitutions that are compatible with biological function are understood to depend on the relative similarity of the amino acids, and particularly the side chains of those amino acids, as revealed by the hydrophobicity, hydrophilicity, charge, size, and other properties.

[0226] As used herein, “conservative” amino acid substitutions may be defined as set out in Tables A, B, or C below. In some embodiments, fusion polypeptides and/or nucleic acids encoding such fusion polypeptides include conservative substitutions have been introduced by modification of polynucleotides encoding polypeptides of the invention. Amino acids can be classified according to physical properties and contribution to secondary and tertiary protein structure. A conservative substitution is a substitution of one amino acid for another amino acid that has similar properties. Exemplary conservative substitutions are set out in Table A.

TABLE A
Conservative Substitutions I

| Side chain characteristics | | Amino Acid |
|---|---|---|
| Aliphatic | Non-polar | G A P I L V F |
| | Polar-uncharged | C S T M N Q |
| | Polar-charged | D E K R |
| Aromatic | | H F W Y |
| Other | | N Q D E |

[0227] Alternately, conservative amino acids can be grouped as described in Lehninger, (Biochemistry, Second Edition; Worth Publishers, Inc. NY, N.Y. (1975), pp. 71-77) as set forth in Table B.

TABLE B
Conservative Substitutions II

| Side Chain Characteristic | | Amino Acid |
|---|---|---|
| Non-polar | Aliphatic: | A L I V P |
| (hydrophobic) | Aromatic: | F W Y |
| | Sulfur-containing: | M |
| | Borderline: | G Y |
| Uncharged-polar | Hydroxyl: | S T Y |
| | Amides: | N Q |
| | Sulfhydryl: | C |
| | Borderline: | G Y |

| | |
|---|---|
| Positively Charged (Basic): | K R H |
| Negatively Charged (Acidic): | D E |

[0228] Alternately, exemplary conservative substitutions are set out in Table C.

TABLE C
Conservative Substitutions III

| Original Residue | Exemplary Substitution |
|---|---|
| Ala (A) | Val Leu Ile Met |
| Arg (R) | Lys His |
| Asn (N) | Gln |
| Asp (D) | Glu |
| Cys (C) | Ser Thr |
| Gln (Q) | Asn |
| Glu (E) | Asp |
| Gly (G) | Ala Val Leu Pro |
| His (H) | Lys Arg |
| Ile (I) | Leu Val Met Ala Phe |
| Leu (L) | Ile Val Met Ala Phe |
| Lys (K) | Arg His |
| Met (M) | Leu Ile Val Ala |
| Phe (F) | Trp Tyr Ile |
| Pro (P) | Gly Ala Val Leu Ile |
| Ser (S) | Thr |
| Thr (T) | Ser |
| Trp (W) | Tyr Phe Ile |
| Tyr (Y) | Trp Phe Thr Ser |
| Val (V) | Ile Leu Met Ala |

[0229] It should be understood that the polypeptides of the disclosure are intended to include polypeptides bearing one or more insertions, deletions, or substitutions, or any combination thereof, of amino acid residues as well as modifications other than insertions, deletions, or substitutions of amino acid residues. Polypeptides or nucleic acids of the disclosure may contain one or more conservative substitution.

[0230] As used throughout the disclosure, the term “more than one” of the aforementioned amino acid substitutions refers to 2, 3, 4, 5, 6, 7, 8, 9, 10, 11, 12, 13, 14, 15, 16, 17, 18, 19, or 20 or more of the recited amino acid substitutions. The term “more than one” may refer to 2, 3, 4, or 5 of the recited amino acid substitutions.

[0231] Polypeptides and proteins of the disclosure, either their entire sequence, or any portion thereof, may be non-naturally occurring. Polypeptides and proteins of the disclosure may contain one or more mutations, substitutions, deletions, or insertions that do not naturally-occur, rendering the entire amino acid sequence non-naturally occurring. Polypeptides and proteins of the disclosure may contain one or more duplicated, inverted or repeated sequences, the resultant sequence of which does not naturally-occur, rendering the entire amino acid sequence non-naturally occurring. Polypeptides and proteins of the disclosure may contain modified, artificial, or synthetic amino acids that do not naturally-occur, rendering the entire amino acid sequence non-naturally occurring.

[0232] As used throughout the disclosure, “sequence identity” may be determined by using the stand-alone executable BLAST engine program for blasting two sequences (bl2seq), which can be retrieved from the National Center for Biotechnology Information (NCBI) ftp site, using the default parameters (Tatusova and Madden, FEMS Microbiol Lett., 1999, 174, 247-250; which is incorporated herein by reference in its entirety). The terms “identical” or “identity” when used in the context of two or more nucleic acids or polypeptide sequences, refer to a specified percentage of residues that are the same over a specified region of each of the sequences. The percentage can be calculated by optimally aligning the two sequences, comparing the two sequences over the specified region, determining the number of positions at which the identical residue occurs in both sequences to yield the number of matched positions, dividing the number of matched positions by the total number of positions in the specified region, and multiplying the result by 100 to yield the percentage of sequence identity. In cases where the two sequences are of different lengths or the alignment produces one or more staggered ends and the specified region of comparison includes only a single sequence, the residues of single sequence are included in the denominator but not the numerator of the calculation. When comparing DNA and RNA, thymine (T) and uracil (U) can be considered equivalent. Identity can be performed manually or by using a computer sequence algorithm such as BLAST or BLAST 2.0.

[0233] As used throughout the disclosure, the term “endogenous” refers to nucleic acid or protein sequence naturally associated with a target gene or a host cell into which it is introduced.

[0234] As used throughout the disclosure, the term “exogenous” refers to nucleic acid or protein sequence not naturally associated with a target gene or a host cell into which it is introduced, including non-naturally occurring multiple copies of a naturally occurring nucleic acid, e.g., DNA sequence, or naturally occurring nucleic acid sequence located in a non-naturally occurring genome location.

[0235] The disclosure provides methods of introducing a polynucleotide construct comprising a DNA sequence into a host cell. By “introducing” is intended presenting to the plant the polynucleotide construct in such a manner that the construct gains access to the interior of the host cell. The methods of the invention do not depend on a particular method for introducing a polynucleotide construct into a host cell, only that the polynucleotide construct gains access to the interior of one cell of the host. Methods for introducing polynucleotide constructs into bacteria, plants, fungi and animals are known in the art including, but not limited to, stable transformation methods, transient transformation methods, and virus-mediated methods.

### Transposons/Transposases

[0236] Exemplary transposon/transposase systems of the disclosure include, but are not limited to, piggyBac transposons and transposases, Sleeping Beauty transposons and transposases, Helraiser transposons and transposases and Tol2 transposons and transposases.

[0237] The piggyBac transposase recognizes transposon-specific inverted terminal repeat sequences (ITRs) on the ends of the transposon, and moves the contents between the ITRs into TTAA chromosomal sites. The piggyBac transposon system has no payload limit for the genes of interest that can be included between the ITRs. In certain embodiments, and, in particular, those embodiments wherein the transposon is a piggyBac transposon, the transposase is a piggyBac™ or a Super piggyBac™ (SPB) transposase. In certain embodiments, and, in particular, those embodiments wherein the transposase is a Super piggyBac™ (SPB) transposase, the sequence encoding the transposase is an mRNA sequence.

[0238] In certain embodiments of the methods of the disclosure, the transposase enzyme is a piggyBac™ (PB) transposase enzyme. The piggyBac (PB) transposase enzyme may comprise or consist of an amino acid sequence at least 75%, 80%, 85%, 90%, 95%, 99% or any percentage in between identical to:

| (SEQ ID NO: 14487) | |
|---|---|
| 1 | MGSSLDDEHI LSALLQSDDE LVGEDSDSEI SDHVSEDDVQ SDTEEAFIDE VHEVQPTSSG |
| 61 | SEILDEQNVI EQPGSSLASN RILTLPQRTI RGKNKHCWST SKSTRRSRVS ALNIVRSQRG |
| 121 | PTRMCRNIYD PLLCFKLFFT DEIISEIVKW TNAEISLKRR ESMTGATFRD TNEDEIYAFF |
| 181 | GILVMTAVRK DNHMSTDDLF DRSLSMVYVS VMSRDRFDFL IRCLRMDDKS IRPTLRENDV |
| 241 | FTPVRKIWDL FIHQCIQNYT PGAHLTIDEQ LLGFRGRCPF RMYIPNKPSK YGIKILMMCD |
| 301 | SGTKYMINGM PYLGRGTQTN GVPLGEYYVK ELSKPVHGSC RNITCDNWFT SIPLAKNLLQ |
| 361 | EPYKLTIVGT VRSNKREIPE VLKNSRSRPV GTSMFCFDGP LTLVSYKPKP AKMVYLLSSC |
| 421 | DEDASINEST GKPQMVMYYN QTKGGVDTLD QMCSVMTCSR KTNRWPMALL YGMINIACIN |
| 481 | SFIIYSHNVS SKGEKVQSRK KFMRNLYMSL TSSFMRKRLE APTLKRYLRD NISNILPNEV |
| 541 | PGTSDDSTEE PVMKKRTYCT YCPSKIRRKA NASCKKCKKV ICREHNIDMC QSCF. |

[0239] In certain embodiments of the methods of the disclosure, the transposase enzyme is a piggyBac™ (PB) transposase enzyme that comprises or consists of an amino acid sequence having an amino acid substitution at one or more of positions 30, 165, 282, or 538 of the sequence:

| (SEQ ID NO: 14487) | |
|---|---|
| 1 | MGSSLDDEHI LSALLQSDDE LVGEDSDSEI SDHVSEDDVQ SDTEEAFIDE VHEVQPTSSG |
| 61 | SEILDEQNVI EQPGSSLASN RILTLPQRTI RGKNKHCWST SKSTRRSRVS ALNIVRSQRG |
| 121 | PTRMCRNIYD PLLCFKLFFT DEIISEIVKW TNAEISLKRR ESMTGATFRD TNEDEIYAFF |
| 181 | GILVMTAVRK DNHMSTDDLF DRSLSMVYVS VMSRDRFDFL IRCLRMDDKS IRPTLRENDV |
| 241 | FTPVRKIWDL FIHQCIQNYT PGAHLTIDEQ LLGFRGRCPF RMYIPNKPSK YGIKILMMCD |
| 301 | SGTKYMINGM PYLGRGTQTN GVPLGEYYVK ELSKPVHGSC RNITCDNWFT SIPLAKNLLQ |
| 361 | EPYKLTIVGT VRSNKREIPE VLKNSRSRPV GTSMFCFDGP LTLVSYKPKP AKMVYLLSSC |
| 421 | DEDASINEST GKPQMVMYYN QTKGGVDTLD QMCSVMTCSR KTNRWPMALL YGMINIACIN |
| 481 | SFIIYSHNVS SKGEKVQSRK KFMRNLYMSL TSSFMRKRLE APTLKRYLRD NISNILPNEV |
| 541 | PGTSDDSTEE PVMKKRTYCT YCPSKIRRKA NASCKKCKKV ICREHNIDMC QSCF. |

[0240] In certain embodiments, the transposase enzyme is a piggyBac™ (PB) transposase enzyme that comprises or consists of an amino acid sequence having an amino acid substitution at two or more of positions 30, 165, 282, or 538 of the sequence of SEQ ID NO: 14487. In certain embodiments, the transposase enzyme is a piggyBac™ (PB) transposase enzyme that comprises or consists of an amino acid sequence having an amino acid substitution at three or more of positions 30, 165, 282, or 538 of the sequence of SEQ ID NO: 14487. In certain embodiments, the transposase enzyme is a piggyBac™ (PB) transposase enzyme that comprises or consists of an amino acid sequence having an amino acid substitution at each of the following positions 30, 165, 282, and 538 of the sequence of SEQ ID NO: 14487. In certain embodiments, the amino acid substitution at position 30 of the sequence of SEQ ID NO: 14487 is a substitution of a valine (V) for an isoleucine (I). In certain embodiments, the amino acid substitution at position 165 of the sequence of SEQ ID NO: 14487 is a substitution of a serine (S) for a glycine (G). In certain embodiments, the amino acid substitution at position 282 of the sequence of SEQ ID NO: 14487 is a substitution of a valine (V) for a methionine (M). In certain embodiments, the amino acid substitution at position 538 of the sequence of SEQ ID NO: 14487 is a substitution of a lysine (K) for an asparagine (N).

[0241] In certain embodiments of the methods of the disclosure, the transposase enzyme is a Super piggyBac™ (SPB) transposase enzyme. In certain embodiments, the Super piggyBac™ (SPB) transposase enzymes of the disclosure may comprise or consist of the amino acid sequence of the sequence of SEQ ID NO: 14487 wherein the amino acid substitution at position 30 is a substitution of a valine (V) for an isoleucine (I), the amino acid substitution at position 165 is a substitution of a serine (S) for a glycine (G), the amino acid substitution at position 282 is a substitution of a valine (V) for a methionine (M), and the amino acid substitution at position 538 is a substitution of a lysine (K) for an asparagine (N). In certain embodiments, the Super piggyBac™ (SPB) transposase enzyme may comprise or consist of an amino acid sequence at least 75%, 80%, 85%, 90%, 95%, 99% or any percentage in between identical to:

| (SEQ ID NO: 14484) | |
|---|---|
| 1 | MGSSLDDEHI LSALLQSDDE LVGEDSDSEV SDHVSEDDVQ SDTEEAFIDE VHEVQPTSSG |
| 61 | SEILDEQNVI EQPGSSLASN RILTLPQRTI RGKNKHCWST SKSTRRSRVS ALNIVRSQRG |
| 121 | PTRMCRNIYD PLLCFKLFFT DEIISEIVKW TNAEISLKRR ESMTSATFRD TNEDEIYAFF |
| 181 | GILVMTAVRK DNHMSTDDLF DRSLSMVYVS VMSRDREDFL IRCLRMDDKS IRPTLRENDV |
| 241 | FTPVRKIWDL FIHQCIQNYT PGAHLTIDEQ LLGFRGRCPF RVYIPNKPSK YGIKILMMCD |
| 301 | SGTKYMINGM PYLGRGTQTN GVPLGEYYVK ELSKPVHGSC RNITCDNWFT SIPLAKNLLQ |
| 361 | EPYKLTIVGT VRSNKREIPE VLKNSRSRPV GTSMFCFDGP LTLVSYKPKP AKMVYLLSSC |
| 421 | DEDASINEST GKPQMVMYYN QTKGGVDTLD QMCSVMTCSR KTNRWPMALL YGMINIACIN |
| 481 | SFIIYSHNVS SKGEKVQSRK KFMRNLYMSL TSSFMRKRLE APTLKRYLRD NISNILPKEV |
| 541 | PGTSDDSTEE PVMKKRTYCT YCPSKIRRKA NASCKKCKKV ICREHNIDMC QSCF. |

[0242] In certain embodiments of the methods of the disclosure, including those embodiments wherein the transposase comprises the above-described mutations at positions 30, 165, 282 and/or 538, the piggyBac™ or Super piggyBac™ transposase enzyme may further comprise an amino acid substitution at one or more of positions 3, 46, 82, 103, 119, 125, 177, 180, 185, 187, 200, 207, 209, 226, 235, 240, 241, 243, 258, 296, 298, 311, 315, 319, 327, 328, 340, 421, 436, 456, 470, 486, 503, 552, 570 and 591 of the sequence of SEQ ID NO: 14487 or SEQ ID NO: 14484. In certain embodiments, including those embodiments wherein the transposase comprises the above-described mutations at positions 30, 165, 282 and/or 538, the piggyBac™ or Super piggyBac™ transposase enzyme may further comprise an amino acid substitution at one or more of positions 46, 119, 125, 177, 180, 185, 187, 200, 207, 209, 226, 235, 240, 241, 243, 296, 298, 311, 315, 319, 327, 328, 340, 421, 436, 456, 470, 485, 503, 552 and 570. In certain embodiments, the amino acid substitution at position 3 of SEQ ID NO: 14487 or SEQ ID NO: 14484 is a substitution of an asparagine (N) for a serine (S). In certain embodiments, the amino acid substitution at position 46 of SEQ ID NO: 14487 or SEQ ID NO: 14484 is a substitution of a serine (S) for an alanine (A). In certain embodiments, the amino acid substitution at position 46 of SEQ ID NO: 14487 or SEQ ID NO: 14484 is a substitution of a threonine (T) for an alanine (A). In certain embodiments, the amino acid substitution at position 82 of SEQ ID NO: 14487 or SEQ ID NO: 14484 is a substitution of a tryptophan (W) for an isoleucine (I). In certain embodiments, the amino acid substitution at position 103 of SEQ ID NO: 14487 or SEQ ID NO: 14484 is a substitution of a proline (P) for a serine (S). In certain embodiments, the amino acid substitution at position 119 of SEQ ID NO: 14487 or SEQ ID NO: 14484 is a substitution of a proline (P) for an arginine (R). In certain embodiments, the amino acid substitution at position 125 of SEQ ID NO: 14487 or SEQ ID NO: 14484 is a substitution of an alanine (A) a cysteine (C). In certain embodiments, the amino acid substitution at position 125 of SEQ ID NO: 14487 or SEQ ID NO: 14484 is a substitution of a leucine (L) for a cysteine (C). In certain embodiments, the amino acid substitution at position 177 of SEQ ID NO: 14487 or SEQ ID NO: 14484 is a substitution of a lysine (K) for a tyrosine (Y). In certain embodiments, the amino acid substitution at position 177 of SEQ ID NO: 14487 or SEQ ID NO: 14484 is a substitution of a histidine (H) for a tyrosine (Y). In certain embodiments, the amino acid substitution at position 180 of SEQ ID NO: 14487 or SEQ ID NO: 14484 is a substitution of a leucine (L) for a phenylalanine (F). In certain embodiments, the amino acid substitution at position 180 of SEQ ID NO: 14487 or SEQ ID NO: 14484 is a substitution of an isoleucine (I) for a phenylalanine (F). In certain embodiments, the amino acid substitution at position 180 of SEQ ID NO: 14487 or SEQ ID NO: 14484 is a substitution of a valine (V) for a phenylalanine (F). In certain embodiments, the amino acid substitution at position 185 of SEQ ID NO: 14487 or SEQ ID NO: 14484 is a substitution of a leucine (L) for a methionine (M). In certain embodiments, the amino acid substitution at position 187 of SEQ ID NO: 14487 or SEQ ID NO: 14484 is a substitution of a glycine (G) for an alanine (A). In certain embodiments, the amino acid substitution at position 200 of SEQ ID NO: 14487 or SEQ ID NO: 14484 is a substitution of a tryptophan (W) for a phenylalanine (F). In certain embodiments, the amino acid substitution at position 207 of SEQ ID NO: 14487 or SEQ ID NO: 14484 is a substitution of a proline (P) for a valine (V). In certain embodiments, the amino acid substitution at position 209 of SEQ ID NO: 14487 or SEQ ID NO: 14484 is a substitution of a phenylalanine (F) for a valine (V). In certain embodiments, the amino acid substitution at position 226 of SEQ ID NO: 14487 or SEQ ID NO: 14484 is a substitution of a phenylalanine (F) for a methionine (M). In certain embodiments, the amino acid substitution at position 235 of SEQ ID NO: 14487 or SEQ ID NO: 14484 is a substitution of an arginine (R) for a leucine (L). In certain embodiments, the amino acid substitution at position 240 of SEQ ID NO: 14487 or SEQ ID NO: 14484 is a substitution of a lysine (K) for a valine (V). In certain embodiments, the amino acid substitution at position 241 of SEQ ID NO: 14487 or SEQ ID NO: 14484 is a substitution of a leucine (L) for a phenylalanine (F). In certain embodiments, the amino acid substitution at position 243 of SEQ ID NO: 14487 or SEQ ID NO: 14484 is a substitution of a lysine (K) for a proline (P). In certain embodiments, the amino acid substitution at position 258 of SEQ ID NO: 14487 or SEQ ID NO: 14484 is a substitution of a serine (S) for an asparagine (N). In certain embodiments, the amino acid substitution at position 296 of SEQ ID NO: 14487 or SEQ ID NO: 14484 is a substitution of a tryptophan (W) for a leucine (L). In certain embodiments, the amino acid substitution at position 296 of SEQ ID NO: 14487 or SEQ ID NO: 14484 is a substitution of a tyrosine (Y) for a leucine (L). In certain embodiments, the amino acid substitution at position 296 of SEQ ID NO: 14487 or SEQ ID NO: 14484 is a substitution of a phenylalanine (F) for a leucine (L). In certain embodiments, the amino acid substitution at position 298 of SEQ ID NO: 14487 or SEQ ID NO: 14484 is a substitution of a leucine (L) for a methionine (M). In certain embodiments, the amino acid substitution at position 298 of SEQ ID NO: 14487 or SEQ ID NO: 14484 is a substitution of an alanine (A) for a methionine (M). In certain embodiments, the amino acid substitution at position 298 of SEQ ID NO: 14487 or SEQ ID NO: 14484 is a substitution of a valine (V) for a methionine (M). In certain embodiments, the amino acid substitution at position 311 of SEQ ID NO: 14487 or SEQ ID NO: 14484 is a substitution of an isoleucine (I) for a proline (P). In certain embodiments, the amino acid substitution at position 311 of SEQ ID NO: 14487 or SEQ ID NO: 14484 is a substitution of a valine for a proline (P). In certain embodiments, the amino acid substitution at position 315 of SEQ ID NO: 14487 or SEQ ID NO: 14484 is a substitution of a lysine (K) for an arginine (R). In certain embodiments, the amino acid substitution at position 319 of SEQ ID NO: 14487 or SEQ ID NO: 14484 is a substitution of a glycine (G) for a threonine (T). In certain embodiments, the amino acid substitution at position 327 of SEQ ID NO: 14487 or SEQ ID NO: 14484 is a substitution of an arginine (R) for a tyrosine (Y). In certain embodiments, the amino acid substitution at position 328 of SEQ ID NO: 14487 or SEQ ID NO: 14484 is a substitution of a valine (V) for a tyrosine (Y). In certain embodiments, the amino acid substitution at position 340 of SEQ ID NO: 14487 or SEQ ID NO: 14484 is a substitution of a glycine (G) for a cysteine (C). In certain embodiments, the amino acid substitution at position 340 of SEQ ID NO: 14487 or SEQ ID NO: 14484 is a substitution of a leucine (L) for a cysteine (C). In certain embodiments, the amino acid substitution at position 421 of SEQ ID NO: 14487 or SEQ ID NO: 14484 is a substitution of a histidine (H) for the aspartic acid (D). In certain embodiments, the amino acid substitution at position 436 of SEQ ID NO: 14487 or SEQ ID NO: 14484 is a substitution of an isoleucine (I) for a valine (V). In certain embodiments, the amino acid substitution at position 456 of SEQ ID NO: 14487 or SEQ ID NO: 14484 is a substitution of a tyrosine (Y) for a methionine (M). In certain embodiments, the amino acid substitution at position 470 of SEQ ID NO: 14487 or SEQ ID NO: 14484 is a substitution of a phenylalanine (F) for a leucine (L). In certain embodiments, the amino acid substitution at position 485 of SEQ ID NO: 14487 or SEQ ID NO: 14484 is a substitution of a lysine (K) for a serine (S). In certain embodiments, the amino acid substitution at position 503 of SEQ ID NO: 14487 or SEQ ID NO: 14484 is a substitution of a leucine (L) for a methionine (M). In certain embodiments, the amino acid substitution at position 503 of SEQ ID NO: 14487 or SEQ ID NO: 14484 is a substitution of an isoleucine (I) for a methionine (M). In certain embodiments, the amino acid substitution at position 552 of SEQ ID NO: 14487 or SEQ ID NO: 14484 is a substitution of a lysine (K) for a valine (V). In certain embodiments, the amino acid substitution at position 570 of SEQ ID NO: 14487 or SEQ ID NO: 14484 is a substitution of a threonine (T) for an alanine (A). In certain embodiments, the amino acid substitution at position 591 of SEQ ID NO: 14487 or SEQ ID NO: 14484 is a substitution of a proline (P) for a glutamine (Q). In certain embodiments, the amino acid substitution at position 591 of SEQ ID NO: 14487 or SEQ ID NO: 14484 is a substitution of an arginine (R) for a glutamine (Q).

[0243] In certain embodiments of the methods of the disclosure, including those embodiments wherein the transposase comprises the above-described mutations at positions 30, 165, 282 and/or 538, the piggyBac™ transposase enzyme may comprise or the Super piggyBac™ transposase enzyme may further comprise an amino acid substitution at one or more of positions 103, 194, 372, 375, 450, 509 and 570 of the sequence of SEQ ID NO: 14487 or SEQ ID NO: 14484. In certain embodiments of the methods of the disclosure, including those embodiments wherein the transposase comprises the above-described mutations at positions 30, 165, 282 and/or 538, the piggyBac™ transposase enzyme may comprise or the Super piggyBac™ transposase enzyme may further comprise an amino acid substitution at two, three, four, five, six or more of positions 103, 194, 372, 375, 450, 509 and 570 of the sequence of SEQ ID NO: 14487 or SEQ ID NO: 14484. In certain embodiments, including those embodiments wherein the transposase comprises the above-described mutations at positions 30, 165, 282 and/or 538, the piggyBac™ transposase enzyme may comprise or the Super piggyBac™ transposase enzyme may further comprise an amino acid substitution at positions 103, 194, 372, 375, 450, 509 and 570 of the sequence of SEQ ID NO: 14487 or SEQ ID NO: 14484. In certain embodiments, the amino acid substitution at position 103 of SEQ ID NO: 14487 or SEQ ID NO: 14484 is a substitution of a proline (P) for a serine (S). In certain embodiments, the amino acid substitution at position 194 of SEQ ID NO: 14487 or SEQ ID NO: 14484 is a substitution of a valine (V) for a methionine (M). In certain embodiments, the amino acid substitution at position 372 of SEQ ID NO: 14487 or SEQ ID NO: 14484 is a substitution of an alanine (A) for an arginine (R). In certain embodiments, the amino acid substitution at position 375 of SEQ ID NO: 14487 or SEQ ID NO: 14484 is a substitution of an alanine (A) for a lysine (K). In certain embodiments, the amino acid substitution at position 450 of SEQ ID NO: 14487 or SEQ ID NO: 14484 is a substitution of an asparagine (N) for an aspartic acid (D). In certain embodiments, the amino acid substitution at position 509 of SEQ ID NO: 14487 or SEQ ID NO: 14484 is a substitution of a glycine (G) for a serine (S). In certain embodiments, the amino acid substitution at position 570 of SEQ ID NO: 14487 or SEQ ID NO: 14484 is a substitution of a serine (S) for an asparagine (N). In certain embodiments, the piggyBac™ transposase enzyme may comprise a substitution of a valine (V) for a methionine (M) at position 194 of SEQ ID NO: 14487. In certain embodiments, including those embodiments wherein the piggyBac™ transposase enzyme may comprise a substitution of a valine (V) for a methionine (M) at position 194 of SEQ ID NO: 14487, the piggyBac™ transposase enzyme may further comprise an amino acid substitution at positions 372, 375 and 450 of the sequence of SEQ ID NO: 14487 or SEQ ID NO: 14484. In certain embodiments, the piggyBac™ transposase enzyme may comprise a substitution of a valine (V) for a methionine (M) at position 194 of SEQ ID NO: 14487, a substitution of an alanine (A) for an arginine (R) at position 372 of SEQ ID NO: 14487, and a substitution of an alanine (A) for a lysine (K) at position 375 of SEQ ID NO: 14487. In certain embodiments, the piggyBac™ transposase enzyme may comprise a substitution of a valine (V) for a methionine (M) at position 194 of SEQ ID NO: 14487, a substitution of an alanine (A) for an arginine (R) at position 372 of SEQ ID NO: 14487, a substitution of an alanine (A) for a lysine (K) at position 375 of SEQ ID NO: 14487 and a substitution of an asparagine (N) for an aspartic acid (D) at position 450 of SEQ ID NO: 14487.

[0244] The sleeping beauty transposon is transposed into the target genome by the Sleeping Beauty transposase that recognizes ITRs, and moves the contents between the ITRs into TA chromosomal sites. In various embodiments, SB transposon-mediated gene transfer, or gene transfer using any of a number of similar transposons, may be used in the compositions and methods of the disclosure.

[0245] In certain embodiments, and, in particular, those embodiments wherein the transposon is a Sleeping Beauty transposon, the transposase is a Sleeping Beauty transposase or a hyperactive Sleeping Beauty transposase (SB100X).

[0246] In certain embodiments of the methods of the disclosure, the Sleeping Beauty transposase enzyme comprises an amino acid sequence at least 75%, 80%, 85%, 90%, 95%, 99% or any percentage in between identical to:

| (SEQ ID NO: 14485) | | |
|---|---|---|
| 1 | MGKSKEISQD LRKKIVDLHK | SGSSLGAISK RLKVPRSSVQ TIVRKYKHHG TTQPSYRSGR |
| 61 | RRVLSPRDER TLVRKVQINP | RTTAKDLVKM LEETGTKVSI STVKRVLYRH NLKGRSARKK |
| 121 | PLLQNRHKKA RLRFATAHGD | KDRTFWRNVL WSDETKIELF GHNDHRYVWR KKGEACKPKN |
| 181 | TIPTVKHGGG SIMLWGCFAA | GGTGALHKID GIMRKENYVD ILKQHLKTSV RKLKLGRKWV |
| 241 | FQMDNDPKHT SKVVAKWLKD | NKVKVLEWPS QSPDLNPIEN LWAELKKRVR ARRPTNLTQL |
| 301 | HQLCQEEWAK IHPTYCGKLV | EGYPKRLTQV KQFKGNATKY. |

[0247] In certain embodiments of the methods of the disclosure, the hyperactive Sleeping Beauty (SB100X) transposase enzyme comprises an amino acid sequence at least 75%, 80%, 85%, 90%, 95%, 99% or any percentage in between identical to:

| (SEQ ID NO: 14486) | |
|---|---|
| 1 | MGKSKEISQD LRKRIVDLHK SGSSLGAISK RLAVPRSSVQ TIVRKYKHHG TTQPSYRSGR |
| 61 | RRVLSPRDER TLVRKVQINP RTTAKDLVKM LEETGTKVSI STVKRVLYRH NLKGHSARKK |
| 121 | PLLQNRHKKA RLRFATAHGD KDRTFWRNVL WSDETKIELF GHNDHRYVWR KKGEACKPKN |
| 181 | TIPTVKHGGG SIMLWGCFAA GGTGALHKID GIMDAVQYVD ILKQHLKTSV RKLKLGRKWV |
| 241 | FQHDNDPKHT SKVVAKWLKD NKVKVLEWPS QSPDLNPIEN LWAELKKRVR ARRPTNLTQL |
| 301 | HQLCQEEWAK IHPNYCGKLV EGYPKRLTQV KQFKGNATKY. |

[0248] The Helraiser transposon is transposed by the Helitron transposase. Helitron transposases mobilize the Helraiser transposon, an ancient element from the bat genome that was active about 30 to 36 million years ago. An exemplary Helraiser transposon of the disclosure includes Helibat1, which comprises a nucleic acid sequence comprising:

| (SEQ ID NO: 14652) | |
|---|---|
| 1 | TCCTATATAA TAAAAGAGAA ACATGCAAAT TGACCATCCC TCCGCTACGC TCAAGCCACG |
| 61 | CCCACCAGCC AATCAGAAGT GACTATGCAA ATTAACCCAA CAAAGATGGC AGTTAAATTT |
| 121 | GCATACGCAG GTGTCAAGCG CCCCAGGAGG CAACGGCGGC CGCGGGCTCC CAGGACCTTC |
| 181 | GCTGGCCCCG GGAGGCGAGG CCGGCCGCGC CTAGCCACAC CCGCGGGCTC CCGGGACCTT |
| 241 | CGCCAGCAGA GAGCAGAGCG GGAGAGCGGG CGGAGAGCGG GAGGTTTGGA GGACTTGGCA |
| 301 | GAGCAGGAGG CCGCTGGACA TAGAGCAGAG CGAGAGAGAG GGTGGCTTGG AGGGCGTGGC |
| 361 | TCCCTCTGTC ACCCCAGCTT CCTCATCACA GCTGTGGAAA CTGACAGCAG GGAGGAGGAA |
| 421 | GTCCCACCCC CACAGAATCA GCCAGAATCA GCCGTTGGTC AGACAGCTCT CAGCGGCCTG |
| 481 | ACAGCCAGGA CTCTCATTCA CCTGCATCTC AGACCGTGAC AGTAGAGAGG TGGGACTATG |
| 541 | TCTAAAGAAC AACTGTTGAT ACAACGTAGC TCTGCAGCCG AAAGATGCCG GCGTTATCGA |
| 601 | CAGAAAATGT CTGCAGAGCA ACGTGCGTCT GATCTTGAAA GAAGGCGGCG CCTGCAACAG |
| 661 | AATGTATCTG AAGAGCAGCT ACTGGAAAAA CGTCGCTCTG AAGCCGAAAA ACAGCGGCGT |
| 721 | CATCGACAGA AAATGTCTAA AGACCAACGT GCCTTTGAAG TTGAAAGAAG GCGGTGGCGA |
| 781 | CGACAGAATA TGTCTAGAGA ACAGTCATCA ACAAGTACTA CCAATACCGG TAGGAACTGC |
| 841 | CTTCTCAGCA AAAATGGAGT ACATGAGGAT GCAATTCTCG AACATAGTTG TGGTGGAATG |
| 901 | ACTGTTCGAT GTGAATTTTG CCTATCACTA AATTTCTCTG ATGAAAAACC ATCCGATGGG |
| 961 | AAATTTACTC GATGTTGTAG CAAAGGGAAA GTCTGTCCAA ATGATATACA TTTTCCAGAT |
| 1021 | TACCCGGCAT ATTTAAAAAG ATTAATGACA AACGAAGATT CTGACAGTAA AAATTTCATG |
| 1081 | GAAAATATTC GTTCCATAAA TAGTTCTTTT GCTTTTGCTT CCATGGGTGC AAATATTGCA |
| 1141 | TCGCCATCAG GATATGGGCC ATACTGTTTT AGAATACACG GACAAGTTTA TCACCGTACT |
| 1201 | GGAACTTTAC ATCCTTCGGA TGGTGTTTCT CGGAAGTTTG CTCAACTCTA TATTTTGGAT |
| 1261 | ACAGCCGAAG CTACAAGTAA AAGATTAGCA ATGCCAGAAA ACCAGGGCTG CTCAGAAAGA |
| 1321 | CTCATGATCA ACATCAACAA CCTCATGCAT GAAATAAATG AATTAACAAA ATCGTACAAG |
| 1381 | ATGCTACATG AGGTAGAAAA GGAAGCCCAA TCTGAAGCAG CAGCAAAAGG TATTGCTCCC |
| 1441 | ACAGAAGTAA CAATGGCGAT TAAATACGAT CGTAACAGTG ACCCAGGTAG ATATAATTCT |
| 1501 | CCCCGTGTAA CCGAGGTTGC TGTCATATTC AGAAACGAAG ATGGAGAACC TCCTTTTGAA |
| 1561 | AGGGACTTGC TCATTCATTG TAAACCAGAT CCCAATAATC CAAATGCCAC TAAAATGAAA |
| 1621 | CAAATCAGTA TCCTGTTTCC TACATTAGAT GCAATGACAT ATCCTATTCT TTTTCCACAT |
| 1681 | GGTGAAAAAG GCTGGGGAAC AGATATTGCA TTAAGACTCA GAGACAACAG TGTAATCGAC |
| 1741 | AATAATACTA GACAAAATGT AAGGACACGA GTCACACAAA TGCAGTATTA TGGATTTCAT |
| 1801 | CTCTCTGTGC GGGACACGTT CAATCCTATT TTAAATGCAG GAAAATTAAC TCAACAGTTT |
| 1861 | ATTGTGGATT CATATTCAAA AATGGAGGCC AATCGGATAA ATTTCATCAA AGCAAACCAA |
| 1921 | TCTAAGTTGA GAGTTGAAAA ATATAGTGGT TTGATGGATT ATCTCAAATC TAGATCTGAA |
| 1981 | AATGACAATG TGCCGATTGG TAAAATGATA ATACTTCCAT CATCTTTTGA GGGTAGTCCC |
| 2041 | AGAAATATGC AGCAGCGATA TCAGGATGCT ATGGCAATTG TAACGAAGTA TGGCAAGCCC |
| 2101 | GATTTATTCA TAACCATGAC ATGCAACCCC AAATGGGCAG ATATTACAAA CAATTTACAA |
| 2161 | CGCTGGCAAA AAGTTGAAAA CAGACCTGAC TTGGTAGCCA GAGTTTTTAA TATTAAGCTG |
| 2221 | AATGCTCTTT TAAATGATAT ATGTAAATTC CATTTATTTG GCAAAGTAAT AGCTAAAATT |
| 2281 | CATGTCATTG AATTTCAGAA ACGCGGACTG CCTCACGCTC ACATATTATT GATATTAGAT |
| 2341 | AGTGAGTCCA AATTACGTTC AGAAGATGAC ATTGACCGTA TAGTTAAGGC AGAAATTCCA |
| 2401 | GATGAAGACC AGTGTCCTCG ACTTTTTCAA ATTGTAAAAT CAAATATGGT ACATGGACCA |
| 2461 | TGTGGAATAC AAAATCCAAA TAGTCCATGT ATGGAAAATG GAAAATGTTC AAAGGGATAT |
| 2521 | CCAAAAGAAT TTCAAAATGC GACCATTGGA AATATTGATG GATATCCCAA ATACAAACGA |
| 2581 | AGATCTGGTA GCACCATGTC TATTGGAAAT AAAGTTGTCG ATAACACTTG GATTGTCCCT |
| 2641 | TATAACCCGT ATTTGTGCCT TAAATATAAC TGTCATATAA ATGTTGAAGT CTGTGCATCA |
| 2701 | ATTAAAAGTG TCAAATATTT ATTTAAATAC ATCTATAAAG GGCACGATTG TGCAAATATT |
| 2761 | CAAATTTCTG AAAAAAATAT TATCAATCAT GACGAAGTAC AGGACTTCAT TGACTCCAGG |
| 2821 | TATGTGAGCG CTCCTGAGGC TGTTTGGAGA CTTTTTGCAA TGCGAATGCA TGACCAATCT |
| 2881 | CATGCAATCA CAAGATTAGC TATTCATTTG CCAAATGATC AGAATTTGTA TTTTCATACC |
| 2941 | GATGATTTTG CTGAAGTTTT AGATAGGGCT AAAAGGCATA ACTCGACTTT GATGGCTTGG |
| 3001 | TTCTTATTGA ATAGAGAAGA TTCTGATGCA CGTAATTATT ATTATTGGGA GATTCCACAG |
| 3061 | CATTATGTGT TTAATAATTC TTTGTGGACA AAACGCCGAA AGGGTGGGAA TAAAGTATTA |
| 3121 | GGTAGACTGT TCACTGTGAG CTTTAGAGAA CCAGAACGAT ATTACCTTAG ACTTTTGCTT |
| 3181 | CTGCATGTAA AAGGTGCGAT AAGTTTTGAG GATCTGCGAA CTGTAGGAGG TGTAACTTAT |
| 3241 | GATACATTTC ATGAAGCTGC TAAACACCGA GGATTATTAC TTGATGACAC TATCTGGAAA |
| 3301 | GATACGATTG ACGATGCAAT CATCCTTAAT ATGCCCAAAC AACTACGGCA ACTTTTTGCA |
| 3361 | TATATATGTG TGTTTGGATG TCCTTCTGCT GCAGACAAAT TATGGGATGA GAATAAATCT |
| 3421 | CATTTTATTG AAGATTTCTG TTGGAAATTA CACCGAAGAG AAGGTGCCTG TGTGAACTGT |
| 3481 | GAAATGCATG CCCTTAACGA AATTCAGGAG GTATTCACAT TGCATGGAAT GAAATGTTCA |
| 3541 | CATTTCAAAC TTCCGGACTA TCCTTTATTA ATGAATGCAA ATACATGTGA TCAATTGTAC |
| 3601 | GAGCAACAAC AGGCAGAGGT TTTGATAAAT TCTCTGAATG ATGAACAGTT GGCAGCCTTT |
| 3661 | CAGACTATAA CTTCAGCCAT CGAAGATCAA ACTGTACACC CCAAATGCTT TTTCTTGGAT |
| 3721 | GGTCCAGGTG GTAGTGGAAA AACATATCTG TATAAAGTTT TAACACATTA TATTAGAGGT |
| 3781 | CGTGGTGGTA CTGTTTTACC CACAGCATCT ACAGGAATTG CTGCAAATTT ACTTCTTGGT |
| 3841 | GGAAGAACCT TTCATTCCCA ATATAAATTA CCAATTCCAT TAAATGAAAC TTCAATTTCT |
| 3901 | AGACTCGATA TAAAGAGTGA AGTTGCTAAA ACCATTAAAA AGGCCCAACT TCTCATTATT |
| 3961 | GATGAATGCA CCATGGCATC CAGTCATGCT ATAAACGCCA TAGATAGATT ACTAAGAGAA |
| 4021 | ATTATGAATT TGAATGTTGC ATTTGGTGGG AAAGTTCTCC TTCTCGGAGG GGATTTTCGA |
| 4081 | CAATGTCTCA GTATTGTACC ACATGCTATG CGATCGGCCA TAGTACAAAC GAGTTTAAAG |
| 4141 | TACTGTAATG TTTGGGGATG TTTCAGAAAG TTGTCTCTTA AAACAAATAT GAGATCAGAG |
| 4201 | GATTCTGCTT ATAGTGAATG GTTAGTAAAA CTTGGAGATG GCAAACTTGA TAGCAGTTTT |
| 4261 | CATTTAGGAA TGGATATTAT TGAAATCCCC CATGAAATGA TTTGTAACGG ATCTATTATT |
| 4321 | GAAGCTACCT TTGGAAATAG TATATCTATA GATAATATTA AAAATATATC TAAACGTGCA |
| 4381 | ATTCTTTGTC CAAAAAATGA GCATGTTCAA AAATTAAATG AAGAAATTTT GGATATACTT |
| 4441 | GATGGAGATT TTCACACATA TTTGAGTGAT GATTCCATTG ATTCAACAGA TGATGCTGAA |
| 4501 | AAGGAAAATT TTCCCATCGA ATTTCTTAAT AGTATTACTC CTTCGGGAAT GCCGTGTCAT |
| 4561 | AAATTAAAAT TGAAAGTGGG TGCAATCATC ATGCTATTGA GAAATCTTAA TAGTAAATGG |
| 4621 | GGTCTTTGTA ATGGTACTAG ATTTATTATC AAAAGATTAC GACCTAACAT TATCGAAGCT |
| 4681 | GAAGTATTAA CAGGATCTGC AGAGGGAGAG GTTGTTCTGA TTCCAAGAAT TGATTTGTCC |
| 4741 | CCATCTGACA CTGGCCTCCC ATTTAAATTA ATTCGAAGAC AGTTTCCCGT GATGCCAGCA |
| 4801 | TTTGCGATGA CTATTAATAA ATCACAAGGA CAAACTCTAG ACAGAGTAGG AATATTCCTA |
| 4861 | CCTGAACCCG TTTTCGCACA TGGTCAGTTA TATGTTGCTT TCTCTCGAGT TCGAAGAGCA |
| 4921 | TGTGACGTTA AAGTTAAAGT TGTAAATACT TCATCACAAG GGAAATTAGT CAAGCACTCT |
| 4981 | GAAAGTGTTT TTACTCTTAA TGTGGTATAC AGGGAGATAT TAGAATAAGT TTAATCACTT |
| 5041 | TATCAGTCAT TGTTTGCATC AATGTTGTTT TTATATCATG TTTTTGTTGT TTTTATATCA |
| 5101 | TGTCTTTGTT GTTGTTATAT CATGTTGTTA TTGTTTATTT ATTAATAAAT TTATGTATTA |
| 5161 | TTTTCATATA CATTTTACTC ATTTCCTTTC ATCTCTCACA CTTCTATTAT AGAGAAAGGG |
| 5221 | CAAATAGCAA TATTAAAATA TTTCCTCTAA TTAATTCCCT TTCAATGTGC ACGAATTTCG |
| 5281 | TGCACCGGGC CACTAG. |

[0249] Unlike other transposases, the Helitron transposase does not contain an RNase-H like catalytic domain, but instead comprises a RepHel motif made up of a replication initiator domain (Rep) and a DNA helicase domain. The Rep domain is a nuclease domain of the HUH superfamily of nucleases.

[0250] An exemplary Helitron transposase of the disclosure comprises an amino acid sequence comprising:

| (SEQ ID NO: 14501) | |
|---|---|
| 1 | MSKEQLLIQR SSAAERCRRY RQKMSAEQRA SDLERRRRLQ QNVSEEQLLE KRRSEAEKQR |
| 61 | RHRQKMSKDQ RAFEVERRRW RRQNMSREQS STSTTNTGRN CLLSKNGVHE DAILEHSCGG |
| 121 | MTVRCEFCLS LNFSDEKPSD GKFTRCCSKG KVCPNDIHFP DYPAYLKRLM TNEDSDSKNF |
| 181 | MENIRSINSS FAFASMGANI ASPSGYGPYC FRIHGQVYHR TGTLHPSDGV SRKFAQLYIL |
| 241 | DTAEATSKRL AMPENQGCSE RLMININNLM HEINELTKSY KMLHEVEKEA QSEAAAKGIA |
| 301 | PTEVIMAIKY DRNSDPGRYN SPRVTEVAVI FRNEDGEPPF ERDLLIHCKP DPNNPNATKM |
| 361 | KQISILFPTL DAMTYPILFP HGEKGWGTDI ALRLRDNSVI DNNTRQNVRT RVTQMQYYGF |
| 421 | HLSVRDTFNP ILNAGKLTQQ FIVDSYSKME ANRINFIKAN QSKLRVEKYS GLMDYLKSRS |
| 481 | ENDNVPIGKM IILPSSFEGS PRNMQQRYQD AMAIVTKYGK PDLFITMTCN PKWADITNNL |
| 541 | QRWQKVENRP DLVARVFNIK LNALLNDICK FHLFGKVIAK IHVIEFQKRG LPHAHILLIL |
| 601 | DSESKLRSED DIDRIVKAEI PDEDQCPRLF QIVKSNMVHG PCGIQNPNSP CMENGKCSKG |
| 661 | YPKEFQNATI GNIDGYPKYK RRSGSTMSIG NKVVDNTWIV PYNPYLCLKY NCHINVEVCA |
| 721 | SIKSVKYLFK YIYKGHDCAN IQISEKNIIN HDEVQDFIDS RYVSAPEAVW RLFAMRMHDQ |
| 781 | SHAITRLAIH LPNDQNLYFH TDDFAEVLDR AKRHNSTLMA WFLLNREDSD ARNYYYWEIP |
| 841 | QHYVFNNSLW TKRRKGGNKV LGRLFTVSFR EPERYYLRLL LLHVKGAISF EDLRTVGGVT |
| 901 | YDTFHEAAKH RGLLLDDTIW KDTIDDAIIL NMPKQLRQLF AYICVFGCPS AADKLWDENK |
| 961 | SHFIEDFCWK LHRREGACVN CEMHALNEIQ EVFTLHGMKC SHFKLPDYPL LMNANTCDQL |
| 1021 | YEQQQAEVLI NSLNDEQLAA FQTITSAIED QTVHPKCFFL DGPGGSGKTY LYKVLTHYIR |
| 1081 | GRGGTVLPTA STGIAANLLL GGRTFHSQYK LPIPLNETSI SRLDIKSEVA KTIKKAQLLI |
| 1141 | IDECTMASSH AINAIDRLLR EIMNLNVAFG GKVLLLGGDF RQCLSIVPHA MRSAIVQTSL |
| 1201 | KYCNVWGCFR KLSLKTNMRS EDSAYSEWLV KLGDGKLDSS FHLGMDIIEI PHEMICNGSI |
| 1261 | IEATFGNSIS IDNIKNISKR AILCPKNEHV QKLNEEILDI LDGDFHTYLS DDSIDSTDDA |
| 1321 | EKENFPIEFL NSITPSGMPC HKLKLKVGAI IMLLRNLNSK WGLCNGTRFI IKRLRPNIIE |
| 1381 | AEVLTGSAEG EVVLIPRIDL SPSDTGLPFK LIRRQFPVMP AFAMTINKSQ GQTLDRVGIF |
| 1441 | LPEPVFAHGQ LYVAFSRVRR ACDVKVKVVN TSSQGKLVKH SESVFTLNVV YREILE. |

[0251] In Helitron transpositions, a hairpin close to the 3′ end of the transposon functions as a terminator. However, this hairpin can be bypassed by the transposase, resulting in the transduction of flanking sequences. In addition, Helraiser transposition generates covalently closed circular intermediates. Furthermore, Helitron transpositions can lack target site duplications. In the Helraiser sequence, the transposase is flanked by left and right terminal sequences termed LTS and RTS. These sequences terminate with a conserved 5′-TC/CTAG-3′ motif. A 19 bp palindromic sequence with the potential to form the hairpin termination structure is located 11 nucleotides upstream of the RTS and consists of the sequence

(SEQ ID NO: 14500)
GTGCACGAATTTCGTGCACCGGGCCACTAG.

[0252] Tol2 transposons may be isolated or derived from the genome of the medaka fish, and may be similar to transposons of the hAT family. Exemplary Tol2 transposons of the disclosure are encoded by a sequence comprising about 4.7 kilobases and contain a gene encoding the Tol2 transposase, which contains four exons. An exemplary Tol2 transposase of the disclosure comprises an amino acid sequence comprising the following:

| (SEQ ID NO: 14502) | |
|---|---|
| 1 | MEEVCDSSAA ASSTVQNQPQ DQEHPWPYLR EFFSLSGVNK DSFKMKCVLC LPLNKEISAF |
| 61 | KSSPSNLRKH IERMHPNYLK NYSKLTAQKR KIGTSTHASS SKQLKVDSVF PVKHVSPVTV |
| 121 | NKAILRYIIQ GLHPFSTVDL PSFKELISTL QPGISVITRP TLRSKIAEAA LIMKQKVTAA |
| 181 | MSEVEWIATT TDCWTARRKS FIGVTAHWIN PGSLERHSAA LACKRLMGSH TFEVLASAMN |
| 241 | DIHSEYEIRD KVVCTTTDSG SNFMKAFRVF GVENNDIETE ARRCESDDTD SEGCGEGSDG |
| 301 | VEFQDASRVL DQDDGFEFQL PKHQKCACHL LNLVSSVDAQ KALSNEHYKK LYRSVFGKCQ |
| 361 | ALWNKSSRSA LAAEAVESES RLQLLRPNQT RWNSTFMAVD RILQICKEAG EGALRNICTS |
| 421 | LEVPMFNPAE MLFLTEWANT MRPVAKVLDI LQAETNTQLG WLLPSVHQLS LKLQRLHHSL |
| 481 | RYCDPLVDAL QQGIQTRFKH MFEDPEITAA AILLPKFRTS WTNDETIIKR GMDYIRVHLE |
| 541 | PLDHKKELAN SSSDDEDFFA SLKPTTHEAS KELDGYLACV SDTRESLLTF PAICSLSIKT |
| 601 | NTPLPASAAC ERLFSTAGLL FSPKRARLDT NNFENQLLLK LNLRFYNFE. |

[0253] An exemplary Tol2 transposon of the disclosure, including inverted repeats, subterminal sequences and the Tol2 transposase, is encoded by a nucleic acid sequence comprising the following:

| (SEQ ID NO: 14653) | |
|---|---|
| 1 | CAGAGGTGTA AAGTACTTGA GTAATTTTAC TTGATTACTG TACTTAAGTA TTATTTTTGG |
| 61 | GGATTTTTAC TTTACTTGAG TACAATTAAA AATCAATACT TTTACTTTTA CTTAATTACA |
| 121 | TTTTTTTAGA AAAAAAAGTA CTTTTTACTC CTTACAATTT TATTTACAGT CAAAAAGTAC |
| 181 | TTATTTTTTG GAGATCACTT CATTCTATTT TCCCTTGCTA TTACCAAACC AATTGAATTG |
| 241 | CGCTGATGCC CAGTTTAATT TAAATGTTAT TTATTCTGCC TATGAAAATC GTTTTCACAT |
| 301 | TATATGAAAT TGGTCAGACA TGTTCATTGG TCCTTTGGAA GTGACGTCAT GTCACATCTA |
| 361 | TTACCACAAT GCACAGCACC TTGACCTGGA AATTAGGGAA ATTATAACAG TCAATCAGTG |
| 421 | GAAGAAAATG GAGGAAGTAT GTGATTCATC AGCAGCTGCG AGCAGCACAG TCCAAAATCA |
| 481 | GCCACAGGAT CAAGAGCACC CGTGGCCGTA TCTTCGCGAA TTCTTTTCTT TAAGTGGTGT |
| 541 | AAATAAAGAT TCATTCAAGA TGAAATGTGT CCTCTGTCTC CCGCTTAATA AAGAAATATC |
| 601 | GGCCTTCAAA AGTTCGCCAT CAAACCTAAG GAAGCATATT GAGGTAAGTA CATTAAGTAT |
| 661 | TTTGTTTTAC TGATAGTTTT TTTTTTTTTT TTTTTTTTTT TTTTTGGGTG TGCATGTTTT |
| 721 | GACGTTGATG GCGCGCCTTT TATATGTGTA GTAGGCCTAT TTTCACTAAT GCATGCGATT |
| 781 | GACAATATAA GGCTCACGTA ATAAAATGCT AAAATGCATT TGTAATTGGT AACGTTAGGT |
| 841 | CCACGGGAAA TTTGGCGCCT ATTGCAGCTT TGAATAATCA TTATCATTCC GTGCTCTCAT |
| 901 | TGTGTTTGAA TTCATGCAAA ACACAAGAAA ACCAAGCGAG AAATTTTTTT CCAAACATGT |
| 961 | TGTATTGTCA AAACGGTAAC ACTTTACAAT GAGGTTGATT AGTTCATGTA TTAACTAACA |
| 1021 | TTAAATAACC ATGAGCAATA CATTTGTTAC TGTATCTGTT AATCTTTGTT AACGTTAGTT |
| 1081 | AATAGAAATA CAGATGTTCA TTGTTTGTTC ATGTTAGTTC ACAGTGCATT AACTAATGTT |
| 1141 | AACAAGATAT AAAGTATTAG TAAATGTTGA AATTAACATG TATACGTGCA GTTCATTATT |
| 1201 | AGTTCATGTT AACTAATGTA GTTAACTAAC GAACCTTATT GTAAAAGTGT TACCATCAAA |
| 1261 | ACTAATGTAA TGAAATCAAT TCACCCTGTC ATGTCAGCCT TACAGTCCTG TGTTTTTGTC |
| 1321 | AATATAATCA GAAATAAAAT TAATGTTTGA TTGTCACTAA ATGCTACTGT ATTTCTAAAA |
| 1381 | TCAACAAGTA TTTAACATTA TAAAGTGTGC AATTGGCTGC AAATGTCAGT TTTATTAAAG |
| 1441 | GGTTAGTTCA CCCAAAAATG AAAATAATGT CATTAATGAC TCGCCCTCAT GTCGTTCCAA |
| 1501 | GCCCGTAAGA CCTCCGTTCA TCTTCAGAAC ACAGTTTAAG ATATTTTAGA TTTAGTCCGA |
| 1561 | GAGCTTTCTG TGCCTCCATT GAGAATGTAT GTACGGTATA CTGTCCATGT CCAGAAAGGT |
| 1621 | AATAAAAACA TCAAAGTAGT CCATGTGACA TCAGTGGGTT AGTTAGAATT TTTTGAAGCA |
| 1681 | TCGAATACAT TTTGGTCCAA AAATAACAAA ACCTACGACT TTATTCGGCA TTGTATTCTC |
| 1741 | TTCCGGGTCT GTTGTCAATC CGCGTTCACG ACTTCGCAGT GACGCTACAA TGCTGAATAA |
| 1801 | AGTCGTAGGT TTTGTTATTT TTGGACCAAA ATGTATTTTC GATGCTTCAA ATAATTCTAC |
| 1861 | CTAACCCACT GATGTCACAT GGACTACTTT GATGTTTTTA TTACCTTTCT GGACATGGAC |
| 1921 | AGTATACCGT ACATACATTT TCAGTGGAGG GACAGAAAGC TCTCGGACTA AATCTAAAAT |
| 1981 | ATCTTAAACT GTGTTCCGAA GATGAACGGA GGTGTTACGG GCTTGGAACG ACATGAGGGT |
| 2041 | GAGTCATTAA TGACATCTTT TCATTTTTGG GTGAACTAAC CCTTTAATGC TGTAATCAGA |
| 2101 | GAGTGTATGT GTAATTGTTA CATTTATTGC ATACAATATA AATATTTATT TGTTGTTTTT |
| 2161 | ACAGAGAATG CACCCAAATT ACCTCAAAAA CTACTCTAAA TTGACAGCAC AGAAGAGAAA |
| 2221 | GATCGGGACC TCCACCCATG CTTCCAGCAG TAAGCAACTG AAAGTTGACT CAGTTTTCCC |
| 2281 | AGTCAAACAT GTGTCTCCAG TCACTGTGAA CAAAGCTATA TTAAGGTACA TCATTCAAGG |
| 2341 | ACTTCATCCT TTCAGCACTG TTGATCTGCC ATCATTTAAA GAGCTGATTA GTACACTGCA |
| 2401 | GCCTGGCATT TCTGTCATTA CAAGGCCTAC TTTACGCTCC AAGATAGCTG AAGCTGCTCT |
| 2461 | GATCATGAAA CAGAAAGTGA CTGCTGCCAT GAGTGAAGTT GAATGGATTG CAACCACAAC |
| 2521 | GGATTGTTGG ACTGCACGTA GAAAGTCATT CATTGGTGTA ACTGCTCACT GGATCAACCC |
| 2581 | TGGAAGTCTT GAAAGACATT CCGCTGCACT TGCCTGCAAA AGATTAATGG GCTCTCATAC |
| 2641 | TTTTGAGGTA CTGGCCAGTG CCATGAATGA TATCCACTCA GAGTATGAAA TACGTGACAA |
| 2701 | GGTTGTTTGC ACAACCACAG ACAGTGGTTC CAACTTTATG AAGGCTTTCA GAGTTTTTGG |
| 2761 | TGTGGAAAAC AATGATATCG AGACTGAGGC AAGAAGGTGT GAAAGTGATG ACACTGATTC |
| 2821 | TGAAGGCTGT GGTGAGGGAA GTGATGGTGT GGAATTCCAA GATGCCTCAC GAGTCCTGGA |
| 2881 | CCAAGACGAT GGCTTCGAAT TCCAGCTACC AAAACATCAA AAGTGTGCCT GTCACTTACT |
| 2941 | TAACCTAGTC TCAAGCGTTG ATGCCCAAAA AGCTCTCTCA AATGAACACT ACAAGAAACT |
| 3001 | CTACAGATCT GTCTTTGGCA AATGCCAAGC TTTATGGAAT AAAAGCAGCC GATCGGCTCT |
| 3061 | AGCAGCTGAA GCTGTTGAAT CAGAAAGCCG GCTTCAGCTT TTAAGGCCAA ACCAAACGCG |
| 3121 | GTGGAATTCA ACTTTTATGG CTGTTGACAG AATTCTTCAA ATTTGCAAAG AAGCAGGAGA |
| 3181 | AGGCGCACTT CGGAATATAT GCACCTCTCT TGAGGTTCCA ATGTAAGTGT TTTTCCCCTC |
| 3241 | TATCGATGTA AACAAATGTG GGTTGTTTTT GTTTAATACT CTTTGATTAT GCTGATTTCT |
| 3301 | CCTGTAGGTT TAATCCAGCA GAAATGCTGT TCTTGACAGA GTGGGCCAAC ACAATGCGTC |
| 3361 | CAGTTGCAAA AGTACTCGAC ATCTTGCAAG CGGAAACGAA TACACAGCTG GGGTGGCTGC |
| 3421 | TGCCTAGTGT CCATCAGTTA AGCTTGAAAC TTCAGCGACT CCACCATTCT CTCAGGTACT |
| 3481 | GTGACCCACT TGTGGATGCC CTACAACAAG GAATCCAAAC ACGATTCAAG CATATGTTTG |
| 3541 | AAGATCCTGA GATCATAGCA GCTGCCATCC TTCTCCCTAA ATTTCGGACC TCTTGGACAA |
| 3601 | ATGATGAAAC CATCATAAAA CGAGGTAAAT GAATGCAAGC AACATACACT TGACGAATTC |
| 3661 | TAATCTGGGC AACCTTTGAG CCATACCAAA ATTATTCTTT TATTTATTTA TTTTTGCACT |
| 3721 | TTTTAGGAAT GTTATATCCC ATCTTTGGCT GTGATCTCAA TATGAATATT GATGTAAAGT |
| 3781 | ATTCTTGCAG CAGGTTGTAG TTATCCCTCA GTGTTTCTTG AAACCAAACT CATATGTATC |
| 3841 | ATATGTGGTT TGGAAATGCA GTTAGATTTT ATGCTAAAAT AAGGGATTTG CATGATTTTA |
| 3901 | GATGTAGATG ACTGCACGTA AATGTAGTTA ATGACAAAAT CCATAAAATT TGTTCCCAGT |
| 3961 | CAGAAGCCCC TCAACCAAAC TTTTCTTTGT GTCTGCTCAC TGTGCTTGTA GGCATGGACT |
| 4021 | ACATCAGAGT GCATCTGGAG CCTTTGGACC ACAAGAAGGA ATTGGCCAAC AGTTCATCTG |
| 4081 | ATGATGAAGA TTTTTTCGCT TCTTTGAAAC CGACAACACA TGAAGCCAGC AAAGAGTTGG |
| 4141 | ATGGATATCT GGCCTGTGTT TCAGACACCA GGGAGTCTCT GCTCACGTTT CCTGCTATTT |
| 4201 | GCAGCCTCTC TATCAAGACT AATACACCTC TTCCCGCATC GGCTGCCTGT GAGAGGCTTT |
| 4261 | TCAGCACTGC AGGATTGCTT TTCAGCCCCA AAAGAGCTAG GCTTGACACT AACAATTTTG |
| 4321 | AGAATCAGCT TCTACTGAAG TTAAATCTGA GGTTTTACAA CTTTGAGTAG CGTGTACTGG |
| 4381 | CATTAGATTG TCTGTCTTAT AGTTTGATAA TTAAATACAA ACAGTTCTAA AGCAGGATAA |
| 4441 | AACCTTGTAT GCATTTCATT TAATGTTTTT TGAGATTAAA AGCTTAAACA AGAATCTCTA |
| 4501 | GTTTTCTTTC TTGCTTTTAC TTTTACTTCC TTAATACTCA AGTACAATTT TAATGGAGTA |
| 4561 | CTTTTTTACT TTTACTCAAG TAAGATTCTA GCCAGATACT TTTACTTTTA ATTGAGTAAA |
| 4621 | ATTTTCCCTA AGTACTTGTA CTTTCACTTG AGTAAAATTT TTGAGTACTT TTTACACCTC |
| 4681 | TG. |

[0254] Exemplary transposon/transposase systems of the disclosure include, but are not limited to, piggyBac and piggyBac-like transposons and transposases.

[0255] PiggyBac and piggyBac-like transposases recognizes transposon-specific inverted terminal repeat sequences (ITRs) on the ends of the transposon, and moves the contents between the ITRs into TTAA or TTAT chromosomal sites. The piggyBac or piggyBac-like transposon system has no payload limit for the genes of interest that can be included between the ITRs.

[0256] In certain embodiments, and, in particular, those embodiments wherein the transposon is a piggyBac transposon, the transposase is a piggyBac™, Super piggyBac™ (SPB) transposase. In certain embodiments, and, in particular, those embodiments wherein the transposase is a piggyBac™, Super piggyBac™ (SPB), the sequence encoding the transposase is an mRNA sequence.

[0257] In certain embodiments of the methods of the disclosure, the transposase enzyme is a piggyBac or piggyBac-like transposase enzyme.

[0258] In certain embodiments of the methods of the disclosure, the transposase enzyme is a piggyBac or a piggyBac-like transposase enzyme. The piggyBac (PB) or piggyBac-like transposase enzyme may comprise or consist of an amino acid sequence at least 5%, 10%, 15%, 20%, 25%, 30%, 35%, 40%, 45%, 50%, 55%, 60%, 65%, 70%, 75%, 80%, 85%, 90%, 95%, 99% or any percentage in between identical to:

| (SEQ ID NO: 14487) | |
|---|---|
| 1 | MGSSLDDEHI LSALLQSDDE LVGEDSDSEI SDHVSEDDVQ SDTEEAFIDE VHEVQPTSSG |
| 61 | SEILDEQNVI EQPGSSLASN RILTLPQRTI RGKNKHCWST SKSTRRSRVS ALNIVRSQRG |
| 121 | PTRMCRNIYD PLLCFKLFFT DEIISEIVKW TNAEISLKRR ESMTGATFRD TNEDEIYAFF |
| 181 | GILVMTAVRK DNHMSTDDLF DRSLSMVYVS VMSRDRFDFL IRCLRMDDKS IRPTLRENDV |
| 241 | FTPVRKIWDL FIHQCIQNYT PGAHLTIDEQ LLGFRGRCPF RMYIPNKPSK YGIKILMMCD |
| 301 | SGTKYMINGM PYLGRGTQTN GVPLGEYYVK ELSKPVHGSC RNITCDNWFT SIPLAKNLLQ |
| 361 | EPYKLTIVGT VRSNKREIPE VLKNSRSRPV GTSMFCFDGP LTLVSYKPKP AKMVYLLSSC |
| 421 | DEDASINEST GKPQMVMYYN QTKGGVDTLD QMCSVMTCSR KTNRWPMALL YGMINIACIN |
| 481 | SFIIYSHNVS SKGEKVQSRK KFMRNLYMSL TSSFMRKRLE APTLKRYLRD NISNILPNEV |
| 541 | PGTSDDSTEE PVMKKRTYCT YCPSKIRRKA NASCKKCKKV ICREHNIDMC QSCF. |

[0259] In certain embodiments of the methods of the disclosure, the transposase enzyme is a piggyBac or piggyBac-like transposase enzyme that comprises or consists of an amino acid sequence having an amino acid substitution at one or more of positions 30, 165, 282, or 538 of the sequence:

| (SEQ ID NO: 14487) | |
|---|---|
| 1 | MGSSLDDEHI LSALLQSDDE LVGEDSDSEI SDHVSEDDVQ SDTEEAFIDE VHEVQPTSSG |
| 61 | SEILDEQNVI EQPGSSLASN RILTLPQRTI RGKNKHCWST SKSTRRSRVS ALNIVRSQRG |
| 121 | PTRMCRNIYD PLLCFKLFFT DEIISEIVKW TNAEISLKRR ESMTGATFRD TNEDEIYAFF |
| 181 | GILVMTAVRK DNHMSTDDLF DRSLSMVYVS VMSRDRFDFL IRCLRMDDKS IRPTLRENDV |
| 241 | FTPVRKIWDL FIHQCIQNYT PGAHLTIDEQ LLGFRGRCPF RMYIPNKPSK YGIKILMMCD |
| 301 | SGTKYMINGM PYLGRGTQTN GVPLGEYYVK ELSKPVHGSC RNITCDNWFT SIPLAKNLLQ |
| 361 | EPYKLTIVGT VRSNKREIPE VLKNSRSRPV GTSMFCFDGP LTLVSYKPKP AKMVYLLSSC |
| 421 | DEDASINEST GKPQMVMYYN QTKGGVDTLD QMCSVMTCSR KTNRWPMALL YGMINIACIN |
| 481 | SFIIYSHNVS SKGEKVQSRK KFMRNLYMSL TSSFMRKRLE APTLKRYLRD NISNILPNEV |
| 541 | PGTSDDSTEE PVMKKRTYCT YCPSKIRRKA NASCKKCKKV ICREHNIDMC QSCF. |

[0260] In certain embodiments, the transposase enzyme is a piggyBac or piggyBac-like transposase enzyme that comprises or consists of an amino acid sequence having an amino acid substitution at two or more of positions 30, 165, 282, or 538 of the sequence of SEQ ID NO: 14487. In certain embodiments, the transposase enzyme is a piggyBac or piggyBac-like transposase enzyme that comprises or consists of an amino acid sequence having an amino acid substitution at three or more of positions 30, 165, 282, or 538 of the sequence of SEQ ID NO: 14487. In certain embodiments, the transposase enzyme is a piggyBac or piggyBac-like transposase enzyme that comprises or consists of an amino acid sequence having an amino acid substitution at each of the following positions 30, 165, 282, and 538 of the sequence of SEQ ID NO: 14487. In certain embodiments, the amino acid substitution at position 30 of the sequence of SEQ ID NO: 14487 is a substitution of a valine (V) for an isoleucine (I). In certain embodiments, the amino acid substitution at position 165 of the sequence of SEQ ID NO: 14487 is a substitution of a serine (S) for a glycine (G). In certain embodiments, the amino acid substitution at position 282 of the sequence of SEQ ID NO: 14487 is a substitution of a valine (V) for a methionine (M). In certain embodiments, the amino acid substitution at position 538 of the sequence of SEQ ID NO: 14487 is a substitution of a lysine (K) for an asparagine (N).

[0261] In certain embodiments of the methods of the disclosure, the transposase enzyme is a Super piggyBac™ (SPB) or piggyBac-like transposase enzyme. In certain embodiments, the Super piggyBac™ (SPB) or piggyBac-like transposase enzyme of the disclosure may comprise or consist of the amino acid sequence of the sequence of SEQ ID NO: 14487 wherein the amino acid substitution at position 30 is a substitution of a valine (V) for an isoleucine (I), the amino acid substitution at position 165 is a substitution of a serine (S) for a glycine (G), the amino acid substitution at position 282 is a substitution of a valine (V) for a methionine (M), and the amino acid substitution at position 538 is a substitution of a lysine (K) for an asparagine (N). In certain embodiments, the Super piggyBac™ (SPB) or piggyBac-like transposase enzyme may comprise or consist of an amino acid sequence at least 5%, 10%, 15%, 20%, 25%, 30%, 35%, 40%, 45%, 50%, 55%, 60%, 65%, 70%, 75%, 80%, 85%, 90%, 95%, 99% or any percentage in between identical to:

| (SEQ ID NO: 14484) | |
|---|---|
| 1 | MGSSLDDEHI LSALLQSDDE LVGEDSDSEV SDHVSEDDVQ SDTEEAFIDE VHEVQPTSSG |
| 61 | SEILDEQNVI EQPGSSLASN RILTLPQRTI RGKNKHCWST SKSTRRSRVS ALNIVRSQRG |
| 121 | PTRMCRNIYD PLLCFKLFFT DEIISEIVKW TNAEISLKRR ESMTSATFRD TNEDEIYAFF |
| 181 | GILVMTAVRK DNHMSTDDLF DRSLSMVYVS VMSRDRFDFL IRCLRMDDKS IRPTLRENDV |
| 241 | FTPVRKIWDL FIHQCIQNYT PGAHLTIDEQ LLGFRGRCPF RVYIPNKPSK YGIKILMMCD |
| 301 | SGTKYMINGM PYLGRGTQTN GVPLGEYYVK ELSKPVHGSC RNITCDNWFT SIPLAKNLLQ |
| 361 | EPYKLTIVGT VRSNKREIPE VLKNSRSRPV GTSMFCFDGP LTLVSYKPKP AKMVYLLSSC |
| 421 | DEDASINEST GKPQMVMYYN QTKGGVDTLD QMCSVMTCSR KTNRWPMALL YGMINIACIN |
| 481 | SFIIYSHNVS SKGEKVQSRK KFMRNLYMSL TSSFMRKRLE APTLKRYLRD NISNILPKEV |
| 541 | PGTSDDSTEE PVMKKRTYCT YCPSKIRRKA NASCKKCKKV ICREHNIDMC QSCF. |

[0262] In certain embodiments of the methods of the disclosure, including those embodiments wherein the transposase comprises the above-described mutations at positions 30, 165, 282 and/or 538, the piggyBac™, Super piggyBac™ or piggyBac-like transposase enzyme may further comprise an amino acid substitution at one or more of positions 3, 46, 82, 103, 119, 125, 177, 180, 185, 187, 200, 207, 209, 226, 235, 240, 241, 243, 258, 296, 298, 311, 315, 319, 327, 328, 340, 421, 436, 456, 470, 486, 503, 552, 570 and 591 of the sequence of SEQ ID NO: 14487 or SEQ ID NO: 14484. In certain embodiments, including those embodiments wherein the transposase comprises the above-described mutations at positions 30, 165, 282 and/or 538, the piggyBac™, Super piggyBac™ or piggyBac-like transposase enzyme may further comprise an amino acid substitution at one or more of positions 46, 119, 125, 177, 180, 185, 187, 200, 207, 209, 226, 235, 240, 241, 243, 296, 298, 311, 315, 319, 327, 328, 340, 421, 436, 456, 470, 485, 503, 552 and 570. In certain embodiments, the amino acid substitution at position 3 of SEQ ID NO: 14487 or SEQ ID NO: 14484 is a substitution of an asparagine (N) for a serine (S). In certain embodiments, the amino acid substitution at position 46 of SEQ ID NO: 14487 or SEQ ID NO: 14484 is a substitution of a serine (S) for an alanine (A). In certain embodiments, the amino acid substitution at position 46 of SEQ ID NO: 14487 or SEQ ID NO: 14484 is a substitution of a threonine (T) for an alanine (A). In certain embodiments, the amino acid substitution at position 82 of SEQ ID NO: 14487 or SEQ ID NO: 14484 is a substitution of a tryptophan (W) for an isoleucine (I). In certain embodiments, the amino acid substitution at position 103 of SEQ ID NO: 14487 or SEQ ID NO: 14484 is a substitution of a proline (P) for a serine (S). In certain embodiments, the amino acid substitution at position 119 of SEQ ID NO: 14487 or SEQ ID NO: 14484 is a substitution of a proline (P) for an arginine (R). In certain embodiments, the amino acid substitution at position 125 of SEQ ID NO: 14487 or SEQ ID NO: 14484 is a substitution of an alanine (A) a cysteine (C). In certain embodiments, the amino acid substitution at position 125 of SEQ ID NO: 14487 or SEQ ID NO: 14484 is a substitution of a leucine (L) for a cysteine (C). In certain embodiments, the amino acid substitution at position 177 of SEQ ID NO: 14487 or SEQ ID NO: 14484 is a substitution of a lysine (K) for a tyrosine (Y). In certain embodiments, the amino acid substitution at position 177 of SEQ ID NO: 14487 or SEQ ID NO: 14484 is a substitution of a histidine (H) for a tyrosine (Y). In certain embodiments, the amino acid substitution at position 180 of SEQ ID NO: 14487 or SEQ ID NO: 14484 is a substitution of a leucine (L) for a phenylalanine (F). In certain embodiments, the amino acid substitution at position 180 of SEQ ID NO: 14487 or SEQ ID NO: 14484 is a substitution of an isoleucine (I) for a phenylalanine (F). In certain embodiments, the amino acid substitution at position 180 of SEQ ID NO: 14487 or SEQ ID NO: 14484 is a substitution of a valine (V) for a phenylalanine (F). In certain embodiments, the amino acid substitution at position 185 of SEQ ID NO: 14487 or SEQ ID NO: 14484 is a substitution of a leucine (L) for a methionine (M). In certain embodiments, the amino acid substitution at position 187 of SEQ ID NO: 14487 or SEQ ID NO: 14484 is a substitution of a glycine (G) for an alanine (A). In certain embodiments, the amino acid substitution at position 200 of SEQ ID NO: 14487 or SEQ ID NO: 14484 is a substitution of a tryptophan (W) for a phenylalanine (F). In certain embodiments, the amino acid substitution at position 207 of SEQ ID NO: 14487 or SEQ ID NO: 14484 is a substitution of a proline (P) for a valine (V). In certain embodiments, the amino acid substitution at position 209 of SEQ ID NO: 14487 or SEQ ID NO: 14484 is a substitution of a phenylalanine (F) for a valine (V). In certain embodiments, the amino acid substitution at position 226 of SEQ ID NO: 14487 or SEQ ID NO: 14484 is a substitution of a phenylalanine (F) for a methionine (M). In certain embodiments, the amino acid substitution at position 235 of SEQ ID NO: 14487 or SEQ ID NO: 14484 is a substitution of an arginine (R) for a leucine (L). In certain embodiments, the amino acid substitution at position 240 of SEQ ID NO: 14487 or SEQ ID NO: 14484 is a substitution of a lysine (K) for a valine (V). In certain embodiments, the amino acid substitution at position 241 of SEQ ID NO: 14487 or SEQ ID NO: 14484 is a substitution of a leucine (L) for a phenylalanine (F). In certain embodiments, the amino acid substitution at position 243 of SEQ ID NO: 14487 or SEQ ID NO: 14484 is a substitution of a lysine (K) for a proline (P). In certain embodiments, the amino acid substitution at position 258 of SEQ ID NO: 14487 or SEQ ID NO: 14484 is a substitution of a serine (S) for an asparagine (N). In certain embodiments, the amino acid substitution at position 296 of SEQ ID NO: 14487 or SEQ ID NO: 14484 is a substitution of a tryptophan (W) for a leucine (L). In certain embodiments, the amino acid substitution at position 296 of SEQ ID NO: 14487 or SEQ ID NO: 14484 is a substitution of a tyrosine (Y) for a leucine (L). In certain embodiments, the amino acid substitution at position 296 of SEQ ID NO: 14487 or SEQ ID NO: 14484 is a substitution of a phenylalanine (F) for a leucine (L). In certain embodiments, the amino acid substitution at position 298 of SEQ ID NO: 14487 or SEQ ID NO: 14484 is a substitution of a leucine (L) for a methionine (M). In certain embodiments, the amino acid substitution at position 298 of SEQ ID NO: 14487 or SEQ ID NO: 14484 is a substitution of an alanine (A) for a methionine (M). In certain embodiments, the amino acid substitution at position 298 of SEQ ID NO: 14487 or SEQ ID NO: 14484 is a substitution of a valine (V) for a methionine (M). In certain embodiments, the amino acid substitution at position 311 of SEQ ID NO: 14487 or SEQ ID NO: 14484 is a substitution of an isoleucine (I) for a proline (P). In certain embodiments, the amino acid substitution at position 311 of SEQ ID NO: 14487 or SEQ ID NO: 14484 is a substitution of a valine for a proline (P). In certain embodiments, the amino acid substitution at position 315 of SEQ ID NO: 14487 or SEQ ID NO: 14484 is a substitution of a lysine (K) for an arginine (R). In certain embodiments, the amino acid substitution at position 319 of SEQ ID NO: 14487 or SEQ ID NO: 14484 is a substitution of a glycine (G) for a threonine (T). In certain embodiments, the amino acid substitution at position 327 of SEQ ID NO: 14487 or SEQ ID NO: 14484 is a substitution of an arginine (R) for a tyrosine (Y). In certain embodiments, the amino acid substitution at position 328 of SEQ ID NO: 14487 or SEQ ID NO: 14484 is a substitution of a valine (V) for a tyrosine (Y). In certain embodiments, the amino acid substitution at position 340 of SEQ ID NO: 14487 or SEQ ID NO: 14484 is a substitution of a glycine (G) for a cysteine (C). In certain embodiments, the amino acid substitution at position 340 of SEQ ID NO: 14487 or SEQ ID NO: 14484 is a substitution of a leucine (L) for a cysteine (C). In certain embodiments, the amino acid substitution at position 421 of SEQ ID NO: 14487 or SEQ ID NO: 14484 is a substitution of a histidine (H) for the aspartic acid (D). In certain embodiments, the amino acid substitution at position 436 of SEQ ID NO: 14487 or SEQ ID NO: 14484 is a substitution of an isoleucine (I) for a valine (V). In certain embodiments, the amino acid substitution at position 456 of SEQ ID NO: 14487 or SEQ ID NO: 14484 is a substitution of a tyrosine (Y) for a methionine (M). In certain embodiments, the amino acid substitution at position 470 of SEQ ID NO: 14487 or SEQ ID NO: 14484 is a substitution of a phenylalanine (F) for a leucine (L). In certain embodiments, the amino acid substitution at position 485 of SEQ ID NO: 14487 or SEQ ID NO: 14484 is a substitution of a lysine (K) for a serine (S). In certain embodiments, the amino acid substitution at position 503 of SEQ ID NO: 14487 or SEQ ID NO: 14484 is a substitution of a leucine (L) for a methionine (M). In certain embodiments, the amino acid substitution at position 503 of SEQ ID NO: 14487 or SEQ ID NO: 14484 is a substitution of an isoleucine (I) for a methionine (M). In certain embodiments, the amino acid substitution at position 552 of SEQ ID NO: 14487 or SEQ ID NO: 14484 is a substitution of a lysine (K) for a valine (V). In certain embodiments, the amino acid substitution at position 570 of SEQ ID NO: 14487 or SEQ ID NO: 14484 is a substitution of a threonine (T) for an alanine (A). In certain embodiments, the amino acid substitution at position 591 of SEQ ID NO: 14487 or SEQ ID NO: 14484 is a substitution of a proline (P) for a glutamine (Q). In certain embodiments, the amino acid substitution at position 591 of SEQ ID NO: 14487 or SEQ ID NO: 14484 is a substitution of an arginine (R) for a glutamine (Q).

[0263] In certain embodiments of the methods of the disclosure, including those embodiments wherein the transposase comprises the above-described mutations at positions 30, 165, 282 and/or 538, the piggyBac™ or piggyBac-like transposase enzyme or may comprise or the Super piggyBac™ transposase enzyme may further comprise an amino acid substitution at one or more of positions 103, 194, 372, 375, 450, 509 and 570 of the sequence of SEQ ID NO: 14487 or SEQ ID NO: 14484. In certain embodiments of the methods of the disclosure, including those embodiments wherein the transposase comprises the above-described mutations at positions 30, 165, 282 and/or 538, the piggyBac™ or piggyBac-like transposase enzyme may comprise or the Super piggyBac™ transposase enzyme may further comprise an amino acid substitution at two, three, four, five, six or more of positions 103, 194, 372, 375, 450, 509 and 570 of the sequence of SEQ ID NO: 14487 or SEQ ID NO: 14484. In certain embodiments, including those embodiments wherein the transposase comprises the above-described mutations at positions 30, 165, 282 and/or 538, the piggyBac™ or piggyBac-like transposase enzyme may comprise or the Super piggyBac™ transposase enzyme may further comprise an amino acid substitution at positions 103, 194, 372, 375, 450, 509 and 570 of the sequence of SEQ ID NO: 14487 or SEQ ID NO: 14484. In certain embodiments, the amino acid substitution at position 103 of SEQ ID NO: 14487 or SEQ ID NO: 14484 is a substitution of a proline (P) for a serine (S). In certain embodiments, the amino acid substitution at position 194 of SEQ ID NO: 14487 or SEQ ID NO: 14484 is a substitution of a valine (V) for a methionine (M). In certain embodiments, the amino acid substitution at position 372 of SEQ ID NO: 14487 or SEQ ID NO: 14484 is a substitution of an alanine (A) for an arginine (R). In certain embodiments, the amino acid substitution at position 375 of SEQ ID NO: 14487 or SEQ ID NO: 14484 is a substitution of an alanine (A) for a lysine (K). In certain embodiments, the amino acid substitution at position 450 of SEQ ID NO: 14487 or SEQ ID NO: 14484 is a substitution of an asparagine (N) for an aspartic acid (D). In certain embodiments, the amino acid substitution at position 509 of SEQ ID NO: 14487 or SEQ ID NO: 14484 is a substitution of a glycine (G) for a serine (S). In certain embodiments, the amino acid substitution at position 570 of SEQ ID NO: 14487 or SEQ ID NO: 14484 is a substitution of a serine (S) for an asparagine (N). In certain embodiments, the piggyBac™ or piggyBac-like transposase enzyme may comprise a substitution of a valine (V) for a methionine (M) at position 194 of SEQ ID NO: 14487. In certain embodiments, including those embodiments wherein the piggyBac™ or piggyBac-like transposase enzyme may comprise a substitution of a valine (V) for a methionine (M) at position 194 of SEQ ID NO: 14487, the piggyBac™ or piggyBac-like transposase enzyme may further comprise an amino acid substitution at positions 372, 375 and 450 of the sequence of SEQ ID NO: 14487 or SEQ ID NO: 14484. In certain embodiments, the piggyBac™ or piggyBac-like transposase enzyme may comprise a substitution of a valine (V) for a methionine (M) at position 194 of SEQ ID NO: 14487, a substitution of an alanine (A) for an arginine (R) at position 372 of SEQ ID NO: 14487, and a substitution of an alanine (A) for a lysine (K) at position 375 of SEQ ID NO: 14487. In certain embodiments, the piggyBac™ or piggyBac-like transposase enzyme may comprise a substitution of a valine (V) for a methionine (M) at position 194 of SEQ ID NO: 14487, a substitution of an alanine (A) for an arginine (R) at position 372 of SEQ ID NO: 14487, a substitution of an alanine (A) for a lysine (K) at position 375 of SEQ ID NO: 14487 and a substitution of an asparagine (N) for an aspartic acid (D) at position 450 of SEQ ID NO: 14487.

[0264] In certain embodiments, the piggyBac or piggyBac-like transposase enzyme is isolated or derived from an insect. In certain embodiments, the insect is Trichoplusia ni (GenBank Accession No. AAA87375; SEQ ID NO: 14666), Argyrogramma agnata (GenBank Accession No. GU477713; SEQ ID NO: 14534, SEQ ID NO: 14667), Anopheles gambiae (GenBank Accession No. XP 312615 (SEQ ID NO: 14668); GenBank Accession No. XP 320414 (SEQ ID NO: 14669); GenBank Accession No. XP 310729 (SEQ ID NO: 14670)), Aphis gossypii (GenBank Accession No. GU329918; SEQ ID NO: 14671, SEQ ID NO: 14672), Acyrthosiphon pisum (GenBank Accession No. XP 001948139; SEQ ID NO: 14673), Agrotis ipsilon (GenBank Accession No. GU477714; SEQ ID NO: 14537, SEQ ID NO: 14674), Bombyx mori (GenBank Accession No. BAD11135; SEQ ID NO: 14505), Chilo suppressalis (GenBank Accession No. JX294476; SEQ ID NO: 14675, SEQ ID NO: 14676), Drosophila melanogaster (GenBank Accession No. AAL39784; SEQ ID NO: 14677), Helicoverpa armigera (GenBank Accession No. ABS18391; SEQ ID NO: 14525), Heliothis virescens (GenBank Accession No. ABD76335; SEQ ID NO: 14678), Macdunnoughia crassisigna (GenBank Accession No. EU287451; SEQ ID NO: 14679, SEQ ID NO: 14680), Pectinophora gossypiella (GenBank Accession No. GU270322; SEQ ID NO: 14530, SEQ ID NO: 14681), Tribolium castaneum (GenBank Accession No. XP 001814566; SEQ ID NO: 14682), Ctenoplusia agnata (also called Argyrogramma agnata), Messour bouvieri, Megachile rotundata, Bombus impatiens, Mamestra brassicae, Mayetiola destructor or Apis mellifera.

[0265] In certain embodiments, the piggyBac or piggyBac-like transposase enzyme is isolated or derived from an insect. In certain embodiments, the insect is Trichoplusia ni (AAA87375).

[0266] In certain embodiments, the piggyBac or piggyBac-like transposase enzyme is isolated or derived from an insect. In certain embodiments, the insect is Bombyx mori (BAD11135).

[0267] In certain embodiments, the piggyBac or piggyBac-like transposase enzyme is isolated or derived from a crustacean. In certain embodiments, the crustacean is Daphnia pulicaria (AAM76342, SEQ ID NO: 14683).

[0268] In certain embodiments, the piggyBac or piggyBac-like transposase enzyme is isolated or derived from a vertebrate. In certain embodiments, the vertebrate is Xenopus tropicalis (GenBank Accession No. BAF82026; SEQ ID NO: 14518), Homo sapiens (GenBank Accession No. NP 689808; SEQ ID NO: 14684), Mus musculus (GenBank Accession No. NP 741958; SEQ ID NO: 14685), Macaca fascicularis (GenBank Accession No. AB179012; SEQ ID NO: 14686, SEQ ID NO: 14687), Rattus norvegicus (GenBank Accession No. XP 220453; SEQ ID NO: 14688) or Myotis lucifugus.

[0269] In certain embodiments, the piggyBac or piggyBac-like transposase enzyme is isolated or derived from a urochordate. In certain embodiments, the urochordate is Ciona intestinalis (GenBank Accession No. XP 002123602; SEQ ID NO: 14689).

[0270] In certain embodiments, the piggyBac or piggyBac-like transposase inserts a transposon at the sequence 5′-TTAT-3′ within a chromosomal site (a TTAT target sequence).

[0271] In certain embodiments, the piggyBac or piggyBac-like transposase inserts a transposon at the sequence 5′-TTAA-3′ within a chromosomal site (a TTAA target sequence).

[0272] In certain embodiments, the target sequence of the piggyBac or piggyBac-like transposon comprises or consists of 5′-CTAA-3′, 5′-TTAG-3′, 5′-ATAA-3′, 5′-TCAA-3′, 5′AGTT-3′, 5′-ATTA-3′, 5′-GTTA-3′, 5′-TTGA-3′, 5′-TTTA-3′, 5′-TTAC-3′, 5′-ACTA-3′, 5′-AGGG-3′, 5′-CTAG-3′, 5′-TGAA-3′, 5′-AGGT-3′, 5′-ATCA-3′, 5′-CTCC-3′, 5′-TAAA-3′, 5′-TCTC-3′, 5′TGAA-3′, 5′-AAAT-3′, 5′-AATC-3′, 5′-ACAA-3′, 5′-ACAT-3′, 5′-ACTC-3′, 5′-AGTG-3′, 5′-ATAG-3′, 5′-CAAA-3′, 5′-CACA-3′, 5′-CATA-3′, 5′-CCAG-3′, 5′-CCCA-3′, 5′-CGTA-3′, 5′-GTCC-3′, 5′-TAAG-3′, 5′-TCTA-3′, 5′-TGAG-3′, 5′-TGTT-3′, 5′-TTCA-3′5′-TTCT-3′ and 5′-TTTT-3′.

[0273] In certain embodiments of the methods of the disclosure, the transposase enzyme is a piggyBac or piggyBac-like transposase enzyme. In certain embodiments, the piggyBac or piggyBac-like transposase enzyme is isolated or derived from Bombyx mori. The piggyBac or piggyBac-like transposase enzyme may comprise or consist of an amino acid sequence at least 5%, 10%, 15%, 20%, 25%, 30%, 35%, 40%, 45%, 50%, 55%, 60%, 65%, 70%, 75%, 80%, 85%, 90%, 95%, 99% or any percentage in between identical to:

| (SEQ ID NO: 14504) | |
|---|---|
| 1 | MDIERQEERI RAMLEEELSD YSDESSSEDE TDHCSEHEVN YDTEEERIDS VDVPSNSRQE |
| 61 | EANAIIANES DSDPDDDLPL SLVRQRASAS RQVSGPFYTS KDGTKWYKNC QRPNVRLRSE |
| 121 | NIVTEQAQVK NIARDASTEY ECWNIFVTSD MLQEILTHTN SSIRHRQTKT AAENSSAETS |
| 181 | FYMQETTLCE LKALIALLYL AGLIKSNRQS LKDLWRTDGT GVDIFRTTMS LQRFQFLQNN |
| 241 | IRFDDKSTRD ERKQTDNMAA FRSIFDQFVQ CCQNAYSPSE FLTIDEMLLS FRGRCLFRVY |
| 301 | IPNKPAKYGI KILALVDAKN FDVVNLEVYA GKQPSGPYAV SNRPFEVVER LIQPVARSHR |
| 361 | NVTFDNWFTG YELMLHLLNE YRLTSVGTVR KNKRQIPESF IRTDRQPNSS VFGFQKDITL |
| 421 | VSYAPKKNKV VVVMSTMHHD NSIDESTGEK QKPEMITFYN STKAGVDVVD ELSANYNVSR |
| 481 | NSKRWPMTLF YGVLNMAAIN ACIIYRANKN VTIKRTEFIR SLGLSMIYEH LHSRNKKKNI |
| 541 | PTYLRQRIEK QLGEPSPRHV NVPGRYVRCQ DCPYKKDRKT KHSCNACAKP ICMEHAKFLC |
| 601 | ENCAELDSSL. |

[0274] The piggyBac (PB) or piggyBac-like transposase enzyme may comprise or consist of an amino acid sequence at least 5%, 10%, 15%, 20%, 25%, 30%, 35%, 40%, 45%, 50%, 55%, 60%, 65%, 70%, 75%, 80%, 85%, 90%, 95%, 99% or any percentage in between identical to:

| (SEQ ID NO: 14505) | |
|---|---|
| 1 | MDIERQEERI RAMLEEELSD YSDESSSEDE TDHCSEHEVN YDTEEERIDS VDVPSNSRQE |
| 61 | EANAIIANES DSDPDDDLPL SLVRQRASAS RQVSGPFYTS KDGTKWYKNC QRPNVRLRSE |
| 121 | NIVTEQAQVK NIARDASTEY ECWNIFVTSD MLQEILTHTN SSIRHRQTKT AAENSSAETS |
| 181 | FYMQETTLCE LKALIALLYL AGLIKSNRQS LKDLWRTDGT GVDIFRTTMS LQRFQFLQNN |
| 241 | IRFDDKSTRD ERKQTDNMAA FRSIFDQFVQ CCQNAYSPSE FLTIDEMLLS FRGRCLFRVY |
| 301 | IPNKPAKYGI KILALVDAKN FYVVNLEVYA GKQPSGPYAV SNRPFEVVER LIQPVARSHR |
| 361 | NVTFDNWFTG YELMLHLLNE YRLTSVGTVR KNKRQIPESF IRTDRQPNSS VFGFQKDITL |
| 421 | VSYAPKKNKV VVVMSTMHHD NSIDESTGEK QKPEMITFYN STKAGVDVVD ELCANYNVSR |
| 481 | NSKRWPMTLF YGVLNMAAIN ACIIYRTNKN VTIKRTEFIR SLGLSMIYEH LHSRNKKKNI |
| 541 | PTYLRQRIEK QLGEPSPRHV NVPGRYVRCQ DCPYKKDRKT KRSCNACAKP ICMEHAKFLC |
| 601 | ENCAELDSSL. |

[0275] In certain embodiments, the piggyBac or piggyBac-like transposase is fused to a nuclear localization signal. In certain embodiments, the amino acid sequence of the piggyBac or piggyBac-like transposase fused to a nuclear localization signal is encoded by a polynucleotide sequence comprising:

| (SEQ ID NO: 14629) | |
|---|---|
| 1 | atggcaccca aaaagaaacg taaagtgatg gacattgaaa gacaggaaga aagaatcagg |
| 61 | gcgatgctcg aagaagaact gagcgactac tccgacgaat cgtcatcaga ggatgaaacc |
| 121 | gaccactgta gcgagcatga ggttaactac gacaccgagg aggagagaat cgactctgtg |
| 181 | gatgtgccct ccaactcacg ccaagaagag gccaatgcaa ttatcgcaaa cgaatcggac |
| 241 | agcgatccag acgatgatct gccactgtcc ctcgtgcgcc agcgggccag cgcttcgaga |
| 301 | caagtgtcag gtccattcta cacttcgaag gacggcacta agtggtacaa gaattgccag |
| 361 | cgacctaacg tcagactccg ctccgagaat atcgtgaccg aacaggctca ggtcaagaat |
| 421 | atcgcccgcg acgcctcgac tgagtacgag tgttggaata tcttcgtgac ttcggacatg |
| 481 | ctgcaagaaa ttctgacgca caccaacagc tcgattaggc atcgccagac caagactgca |
| 541 | gcggagaact catcggccga aacctccttc tatatgcaag agactactct gtgcgaactg |
| 601 | aaggcgctga ttgcactgct gtacttggcc ggcctcatca aatcaaatag gcagagcctc |
| 661 | aaagatctct ggagaacgga tggaactgga gtggatatct ttcggacgac tatgagcttg |
| 721 | cagcggttcc agtttctgca aaacaatatc agattcgacg acaagtccac ccgggacgaa |
| 781 | aggaaacaga ctgacaacat ggctgcgttc cggtcaatat tcgatcagtt tgtgcagtgc |
| 841 | tgccaaaacg cttatagccc atcggaattc ctgaccatcg acgaaatgct tctctccttc |
| 901 | cgggggcgct gcctgttccg agtgtacatc ccgaacaagc cggctaaata cggaatcaaa |
| 961 | atcctggccc tggtggacgc caagaatttc tacgtcgtga atctcgaagt gtacgcagga |
| 1021 | aagcaaccgt cgggaccgta cgctgtttcg aaccgcccgt ttgaagtcgt cgagcggctt |
| 1081 | attcagccgg tggccagatc ccaccgcaat gttaccttcg acaattggtt caccggctac |
| 1141 | gagctgatgc ttcaccttct gaacgagtac cggctcacta gcgtggggac tgtcaggaag |
| 1201 | aacaagcggc agatcccaga atccttcatc cgcaccgacc gccagcctaa ctcgtccgtg |
| 1261 | ttcggatttc aaaaggatat cacgcttgtc tcgtacgccc ccaagaaaaa caaggtcgtg |
| 1321 | gtcgtgatga gcaccatgca tcacgacaac agcatcgacg agtcaaccgg agaaaagcaa |
| 1381 | aagcccgaga tgatcacctt ctacaattca actaaggccg gcgtcgacgt cgtggatgaa |
| 1441 | ctgtgcgcga actataacgt gtcccggaac tctaagcggt ggcctatgac tctcttctac |
| 1501 | ggagtgctga atatggccgc aatcaacgcg tgcatcatct accgcaccaa caagaacgtg |
| 1561 | accatcaagc gcaccgagtt catcagatcg ctgggtttga gcatgatcta cgagcacctc |
| 1621 | cattcacgga acaagaagaa gaatatccct acttacctga ggcagcgtat cgagaagcag |
| 1681 | ttgggagaac caagcccgcg ccacgtgaac gtgccggggc gctacgtgcg gtgccaagat |
| 1741 | tgcccgtaca aaaaggaccg caaaaccaaa agatcgtgta acgcgtgcgc caaacctatc |
| 1801 | tgcatggagc atgccaaatt tctgtgtgaa aattgtgctg aactcgattc ctccctg. |

[0276] In certain embodiments, the piggyBac or piggyBac-like transposase is hyperactive. A hyperactive piggyBac or piggyBac-like transposase is a transposase that is more active than the naturally occurring variant from which it is derived. In certain embodiments, the hyperactive piggyBac or piggyBac-like transposase enzyme is isolated or derived from Bombyx mori. In certain embodiments, the piggyBac or piggyBac-like transposase is a hyperactive variant of SEQ ID NO: 14505. In certain embodiments, the hyperactive piggyBac or piggyBac-like transposase comprises a sequence that is at least 90% identical to:

| (SEQ ID NO: 14576) | |
|---|---|
| 1 | MDIERQEERI RAMLEEELSD YSDESSSEDE TDHCSEHEVN YDTEEERIDS VDVPSNSRQE |
| 61 | EANAIIANES DSDPDDDLPL SLVRQRASAS RQMSGPHYTS KDGTKWYKNC QRPNVRLRSE |
| 121 | NIVTEQAQVK NIARDASTEY ECWNIFVTSD MLQEILTHTN SSIRWRQTKT AAENSSASTS |
| 181 | FYMQETTLCE LKALIGLLYI AGLIKSNRQS LKDLWRTDGT GVDIFRTTMS LQRFQFLQNN |
| 241 | IRFDDKSTRD ERKQTDNMAA FRSIFDQFVQ SCQNAYSPSE FLTIDEMLLS FRGRCLFRVY |
| 301 | IPNKPAKYGI KILALVDAKN FYVKNLEVYA GKQPSGPYAV SNRPFEVVER LIQPVARSHR |
| 361 | NVTFDNWFTG YELMLHLLNE YRLTSVGTVR KNKRQIPESF IRTDRQPNSS VFGFQKDITL |
| 421 | VSYAPKKNKV VVVMSTMHHD NSIDESTGEK QKPEMITFYN STKAGVDVVD ELCANYNVSR |
| 481 | NSKRWPMTLF YGVLNMAAIN ACIIYRTNKN VTIKRTEFIR SLGLSMIYEH LHSRNKKKNI |
| 541 | PTYLRQRIEK QLGEPSPRHV NVPGRYVRCQ DCPYKKDRKT KRSCNACAKP ICMEHAKFLC |
| 601 | ENCAELDSHL. |

[0277] In certain embodiments, the hyperactive piggyBac or piggyBac-like transposase comprises SEQ ID NO: 14576. In certain embodiments, the hyperactive piggyBac or piggyBac-like transposase comprises a sequence of:

| (SEQ ID NO: 14630) | |
|---|---|
| 1 | MDIERQEERI RAMLEEELSD YSDESSSEDE TDHCSEHEVN YDTEEERIDS VDVPSNSRQE |
| 61 | EANAIIANES DSDPDDDLPL SLVRQRASAS RQVSGPFYTS KDGTKWYKNC QRPNVRLRSE |
| 121 | NIVTEQAQVK NIARDASTEY ECWNIFVTSD MLQEILTHTN SSIRWRQTKT AAENSSAETS |
| 181 | FYMQETTLCE LKALIGLLYI AGLIKSNRQS LKDLWRTDGT GVDIFRTTMS LQRFQFLLNN |
| 241 | IRFDDKSTRD ERKQTDNMAA FRSIFDQFVQ SCQNAYSPSE FLTIDEMLLS FRGRCLFRVY |
| 301 | IPNKPAKYGI KILALVDAKN FYVHNLEVYA GKQPSGPYAV SNRPFEVVER LIQPVARSHR |
| 361 | NVTFDNWFTG YEVMLHLLNE YRLTSVGTVR KNKRQIPESF IRTDRQPNSS VFGFQKDITL |
| 421 | VSYAPKKNKV VVVMSTMHHD NSIDESTGEK QKPEMITFYN STKAGVDVVD ELCANYNVSR |
| 481 | NSKRWPMTLF YGVLNMAAIN ACIIYRTNKN VTIKRTEFIR SLGLSMIYEH LHSRNKKKNI |
| 541 | PTYLRQRIEK QLGEPSPRHV NVPGRYVRCQ DCPYKKDRKT KRSCNACAKP ICMEHAKFLC |
| 601 | ENCAHLDS. |

[0278] In certain embodiments, the hyperactive piggyBac or piggyBac-like transposase comprises a sequence of:

| (SEQ ID NO: 14631) | |
|---|---|
| 1 | MDIERQEERI RAMLEEELSD YSDESSSEDE TDHCSEHEVN YDTEEERIDS VDVPSNSRQE |
| 61 | EANAIIANES DSDPDDDLPL SLVRQRASAS RQVSGPFYTS KDGTKWYKNC QRPNVRLRSE |
| 121 | NIVTEQAQVK NIARDASTEY ECWNIFVTSD MLQEILTHTN SSIRWRQTKT AAENSSASTS |
| 181 | FYMQETTLCE LKALIGLLYI AGLIKSNRQS LKDLWRTDGT GVDIFRTTMS LQRFQFLLNN |
| 241 | IRFDDKSTRD ERKQTDNMAA FRSIFDQFVQ SCQNAYSPSE FLTIDEMLLS FRGRCLFRVY |
| 301 | IPNKPAKYGI KILALVDAKN FYVKNLEVYA GKQPSGPYAV SNRPFEVVER LIQPVARSHR |
| 361 | NVTFDNWFTG YELMLHLLNE YRLTSVGTVR KNKRQIPESF IRTDRQPNSS VFGFQKDITL |
| 421 | VSYAPKKNKV VVVMSTMHHD NSIDESTGEK QKPEMITFYN STKAGVDVVD ELCANYNVSR |
| 481 | NSKRWPMTLF YGVLNMAAIN ACIIYRTNKN VTIKRTEFIR SLGLSMIYEH LHSRNKKKNI |
| 541 | PTYLRQRIAM QLGEPSPRHV NVPGRYVRCQ DCPYKKDRKT KRSCNACAKP ICMEHAKFLC |
| 601 | ENCAELDSSL. |

[0279] In certain embodiments, the hyperactive piggyBac or piggyBac-like transposase comprises a sequence of:

| (SEQ ID NO: 14632) | |
|---|---|
| 1 | MDIERQEERI RAMLEEELSD YSDESSSEDE TDHCSEHEVN YDTEEERIDS VDVPSNSRQE |
| 61 | EANAIIANES DSDPDDDLPL SLVRQRASAS RQVSGPFYTS KDGTKWYKNC QRPNVRLRSE |
| 121 | NIVTEQAQVK NIARDASTEY ECWNIFVTSD MLQEILTHTN SSIRWRQTKT AAENSSAETS |
| 181 | FYMQETTLCE LKALIGLLYI AGLIKSNRQS LKDLWRTDGT GVDIFRTTMS LQRFQFLLNN |
| 241 | IRFDDKSTRD ERKQTDNMAA FRSIFDQFVQ SCQNAYSPSE FLTIDEMLLS FRGRCLFRVY |
| 301 | IPNKPAKYGI KILALVDAKN FYVKNLEVYA GKQPSGPYAV SNRPFEVVER LIQPVARSHR |
| 361 | NVTFDNWFTG YELMLHLLNE YRLTSVGTVR KNKTQIPENF IRTDRQPNSS VFGFQKDITL |
| 421 | VSYAPKKNKV VVVMSTMHHD NSIDESTGEK QKPEMITFYN STKAGVDVVD ELQANYNVSR |
| 481 | NSKRWPMTLF YGVLNMAAIN ACIIYRTNKN VTIKRTEFIR SLGLSMIYEH LHSRNKKKNI |
| 541 | PTYLRQRIEK QLGEPSPRHV NVPGRYVRCQ DCPYKKDRKT KRSCNACAKP ICMEHAKFLC |
| 601 | ENCAELDSSL. |

[0280] In certain embodiments, the hyperactive piggyBac or piggyBac-like transposase comprises a sequence of:

| (SEQ ID NO: 14633) | |
|---|---|
| 1 | MDIERQEERI RAMLEEELSD YSDESSSEDE TDHCSEHEVN YDTEEERIDS VDVPSNSRQE |
| 61 | EANAIIANES DSDPDDDLPL SLVRQRASAS RQVSGPFYTS KDGTKWYKNC QRPNVRLRSE |
| 121 | NIVTEQAQVK NIARDASTEY ECWNIFVTSD MLQEILTHTN SSIRWRQTKT AAENSSAETS |
| 181 | FYMQETTLCE LKALIGLLYI AGLIKSNRQS LKDLWRTDGT GVDIFRTTMS LQRFQFLQNN |
| 241 | IRFDDKSTRD ERKQTDNMAA FRSIFDQFVQ SCQNAYSPSE FLTIDEMLLS FRGRCLFRVY |
| 301 | IPNKPAKYGI KILALVDAKN FYVKNLEVYA GKQPSGPYAV SNRPFEVVER LIQPVARSHR |
| 361 | NVTFDNWFTG YELMLHLLNE YRLTSVGTVR KNKRQIPESF IRTDRQPNSS VFGFQKDITL |
| 421 | VSYAPKKNKV VVVMSTMHHD NSIDESTGEK QKPEMITFYN STKAGVDVVD ELCANYNVSR |
| 481 | NSKRWPMTLF YGVLNMAAIN ACIIYRTNKN VTIKRTEFIR SLGLSMIYEH LHSRNKKKNI |
| 541 | PTYLRQRIEK QLGEPSPRHV NVPGRYVRCQ DCPYKKDRKT KRSCNACAKP ICMEHAKFLC |
| 601 | ENCAELDSSL. |

[0281] In certain embodiments, the hyperactive piggyBac or piggyBac-like transposase comprises a sequence of:

| (SEQ ID NO: 14634) | |
|---|---|
| 1 | MDIERQEERI RAMLEEELSD YSDESSSEDE TDHCSEHEVN YDTEEERIDS VDVPSNSRQE |
| 61 | EANAIIANES DSDPDDDLPL SLVRQRASAS RQVSGPFYTS KDGTKWYKNC QRPNVRLRSE |
| 121 | NIVTEQAQVK NIARDASTEY ECWNIFVTSD MLQEILTHTN SSIRHRQTKT AAENSSAETS |
| 181 | FYMQETTLCE LKALIALLYL AGLIKSNRQS LKDLWRTDGT GVDIFRTTMS LQRFQFLQNN |
| 241 | IRFDDKSTRD ERKQTDNMAA FRSIFDQFVQ CCQNAYSPSE FLTIDEMLLS FRGRCLFRVY |
| 301 | IPNKPAKYGI KILALVDAKN DYVVNLEVYA GKQPSGPYAV SNRPFEVVER LIQPVARSHR |
| 361 | NVTFDNWFTG YELMLHLLNE YRLTSVGTVR KNKRQIPESF IRTDRQPNSS VFGFQKDITL |
| 421 | VSYAPKKNKV VVVMSTMHHD NSIDESTGEK QKPEMITFYN STKAGVDVVD ELCANYNVSR |
| 481 | NSKRWPMTLF YGVLNMAAIN ACIIYRTNKN VTIKRTEFIR SLGLSMIYEH LHSRNKKKNI |
| 541 | PTYLRQRIEK QLGEPSSRHV NVKGRYVRCQ DCPYKKDRKT KRSCNACAKP ICMEHAKFLC |
| 601 | ENCAELDSSL. |

[0282] In certain embodiments, the hyperactive piggyBac or piggyBac-like transposase is more active than the transposase of SEQ ID NO: 14505. In certain embodiments, the hyperactive piggyBac or piggyBac-like transposase is at least 90%, at least 95%, at least 96%, at least 97%, at least 98%, or at least 99% or any percentage in between identical to SEQ ID NO: 14505.

[0283] In certain embodiments, the hyperactive piggyBac or piggyBac-like transposase comprises an amino acid substitution at a position selected from 92, 93, 96, 97, 165, 178, 189, 196, 200, 201, 211, 215, 235, 238, 246, 253, 258, 261, 263, 271, 303, 321, 324, 330, 373, 389, 399, 402, 403, 404, 448, 473, 484, 507, 523, 527, 528, 543, 549, 550, 557, 601, 605, 607, 609, 610 or a combination thereof (relative to SEQ ID NO: 14505). In certain embodiments, the hyperactive piggyBac or piggyBac-like transposase comprises an amino acid substitution of Q92A, V93L, V93M, P96G, F97H, F97C, H165E, H165W, E178S, E178H, C189P, A196G, L200I, A201Q, L211A, W215Y, G2195, Q235Y, Q235G, Q238L, K246I, K253V, M258V, F261L, S263K, C271S, N303R, F321W, F321D, V324K, V324H, A330V, L373C, L373V, V389L, S399N, R402K, T403L, D404Q, D404S, D404M, N441R, G448W, E449A, V469T, C473Q, R484K T507C, G523A, I527M, Y528K Y543I, E549A, K550M, P557S, E601V, E605H, E605W, D607H, 5609H, L610I or any combination thereof. In certain embodiments, the hyperactive piggyBac or piggyBac-like transposase comprises an amino acid substitution of Q92A, V93L, V93M, P96G, F97H, F97C, H165E, H165W, E178S, E178H, C189P, A196G, L200I, A201Q, L211A, W215Y, G2195, Q235Y, Q235G, Q238L, K246I, K253V, M258V, F261L, S263K, C271S, N303R, F321W, F321D, V324K, V324H, A330V, L373C, L373V, V389L, S399N, R402K, T403L, D404Q, D404S, D404M, N441R, G448W, E449A, V469T, C473Q, R484K T507C, G523A, I527M, Y528K Y543I, E549A, K550M, P557S, E601V, E605H, E605W, D607H, 5609H and L610I.

[0284] In certain embodiments, the hyperactive piggyBac or piggyBac-like transposase comprises one or more substitutions of an amino acid that is not wild type, wherein the one or more substitutions a for wild type amino acid comprises a substitution of E4X, A12X, M13X, L14X, E15X, D20X, E24X, S25X, S26X, S27X, D32X, H33X, E36X, E44X, E45X, E46X, I48X, D49X, R58X, A62X, N63X, A64X, I65X, I66X, N68X, E69X, D71X, S72X, D76X, P79X, R84X, Q85X, A87X, S88X, Q92X, V93X, S94X, G95X, P96X, F97X, Y98X, T99X, I145X, S149X, D150X, L152X, E154X, T157X, N160X, S161X, S162X, H165X, R166X, T168X, K169X, T170X, A171X, E173X, S175X, S176X, E178X, T179X, M183X, Q184X, T186X, T187X, L188X, C189X, L194X, I195X, A196X, L198X, L200X, A201X, L203X, I204X, K205X, A206X, N207X, Q209X, S210X, L211X, K212X, D213X, L214X, W215X, R216X, T217X, G219X, V222X, D223X, I224X, T227X, M229X, Q235X, L237X, Q238X, N239X, N240X, P302X, N303X, P305X, A306X, K307X, Y308X, I310X, K311X, I312X, L313X, A314X, L315X, V316X, D317X, A318X, K319X, N320X, F321X, Y322X, V323X, V324X, L326X, E327X, V328X, A330X, Q333X, P334X, S335X, G336X, P337X, A339X, V340X, S341X, N342X, R343X, P344X, F345X, E346X, V347X, E349X, I352X, Q353X, V355X, A356X, R357X, N361X, D365X, W367X, T369X, G370X, L373X, M374X, L375X, H376X, N379X, E380X, R382X, V386X, V389X, N392X, R394X, Q395X, S399X, F400X, I401X, R402XT403X, D404X, R405X, Q406X, P407X, N408X, S409X, S410X, V411X, F412X, F414X, Q415X, I418X, T419X, L420X, N428XV432X, M434X, D440X, N441X, S442X, I443X, D444X, E445X, G448X, E449X, Q451X, K452X, M455X, I456X, T457X, F458X, S461X, A464X, V466X, Q468X, V469X, E471X, L472X, C473X, A474X, K483X, W485X, T488X, L489X, Y491X, G492X, V493X, M496X, I499X, C502X, I503X, T507X, K509X, N510X, V511X, T512X, I513X, R515X, E517X, S521X, G523X, L524X, S525X, I527X, Y528X, E529X, H532X, S533X, N535X, K536X, K537X, N539X, I540X, T542X, Y543X, Q546X, E549X, K550X, Q551X, G553X, E554X, P555X, S556X, P557X, R558X, H559X, V560X, N561X, V562X, P563X, G564X, R565X, Y566X, V567X, Q570X, D571X, P573X, Y574X, K576X, K581X, S583X, A586X, A588X, E594X, F598X, L599X, E601X, N602X, C603X, A604X, E605X, L606X, D607X, S608X, S609X or L610X (relative to SEQ ID NO: 14505). A list of hyperactive amino acid substitutions can be found in U.S. Pat. No. 10,041,077, the contents of which are incorporated herein by reference in their entirety.

[0285] In certain embodiments, the piggyBac or piggyBac-like transposase is integration deficient. In certain embodiments, an integration deficient piggyBac or piggyBac-like transposase is a transposase that can excise its corresponding transposon, but that integrates the excised transposon at a lower frequency than a corresponding wild type transposase. In certain embodiments, the piggyBac or piggyBac-like transposase is an integration deficient variant of SEQ ID NO: 14505.

[0286] In certain embodiments, the excision competent, integration deficient piggyBac or piggyBac-like transposase comprises one or more substitutions of an amino acid that is not wild type, wherein the one or more substitutions a for wild type amino acid comprises a substitution of R9X, A12X, M13X, D20X, Y21K, D23X, E24X, 525X, S26X, S27X, E28X, E30X, D32X, H33X, E36X, H37X, A39X, Y41X, D42X, T43X, E44X, E45X, E46X, R47X, D49X, S50X, 555X, A62X, N63X, A64X, I66X, A67X, N68X, E69X, D70X, D71X, S72X, D73X, P74X, D75X, D76X, D77X, I78X, 581X, V83X, R84X, Q85X, A87X, S88X, A89X, 590X, R91X, Q92X, V93X, S94X, G95X, P96X, F97X, Y98X, T99X, W012X, G103X, Y107X, K108X, L117X, I122X, Q128X, I312X, D135X, 5137X, E139X, Y140X, I145X, 5149X, D150X, Q153X, E154X, T157X, 5161X, 5162X, R164X, H165X, R166X, Q167X, T168X, K169X, T170X, A171X, A172X, E173X, R174X, 5175X, 5176X, A177X, E178X, T179X, 5180X, Y182X, Q184X, E185X, T187X, L188X, C189X, L194X, I195X, A196X, L198X, L200X, A201X, L203X, I204X, K205X, N207X, Q209X, L211X, D213X, L214X, W215X, R216X, T217X, G219X, T220X, V222X, D223X, I224X, T227X, T228X, F234X, Q235X, L237X, Q238X, N239X, N240X, N303X, K304X, I310X, I312X, L313X, A314X, L315X, V316X, D317X, A318X, K319X, N320X, F321X, Y322X, V323X, V324X, N325X, L326X, E327X, V328X, A330X, G331X, K332X, Q333X, 5335X, P337X, P344X, F345X, E349X, H359X, N361X, V362X, D365X, F368X, Y371X, E372X, L373X, H376X, E380X, R382X, R382X, V386X, G387X, T388X, V389X, K391X, N392X, R394X, Q395X, E398X, 5399X, F400X, I401X, R402XT403X, D404X, R405X, Q406X, P407X, N408X, 5409X, 5410X, Q415X, K416X, A424X, K426X, N428X, V430X, V432X, V433X, M434X, D436X, D440X, N441X, 5442X, I443X, D444X, E445X, 5446X, T447X, G448X, E449X, K450X, Q451X, E454X, M455X, I456X, T457X, F458X, 5461X, A464X, V466X, Q468X, V469X, C473X, A474X, N475X, N477X, K483X, R484X, P486X, T488X, L489X, G492X, V493X, M496X, I499X, I503X, Y505X, T507X, N510X, V511X, T512X, I513X, K514X, T516X, E517X, 5521X, G523X, L524X, 5525X, I527X, Y528X, L531X, H532X, S533X, N535X, I540X, T542X, Y543X, R545X, Q546X, E549X, L552X, G553X, E554X, P555X, S556X, P557X, R558X, H559X, V560X, N561X, V562X, P563X, G564X, V567X, Q570X, D571X, P573X, Y574X, K575X, K576X, N585X, A586X, M593X, K596X, E601X, N602X, A604X, E605X, L606X, D607X, S608X, S609X or L610X (relative to SEQ ID NO: 14505). A list of integration deficient amino acid substitutions can be found in U.S. Pat. No. 10,041,077, the contents of which are incorporated by reference in their entirety.

[0287] In certain embodiments, the integration deficient piggyBac or piggyBac-like transposase comprises a sequence of:

| (SEQ ID NO: 14606) | |
|---|---|
| 1 | MDIERQEERI RAMLEEELSD YSDESSSEDE TDHCSEHEVN YDTEEERIDS VDVPSNSRQE |
| 61 | EANAIIANES DSDPDDDLPL SLVRQRASAS RQVSGPFYTS KDGTKWYKNC QRPNVRLRSE |
| 121 | NIVTEQAQVK NIARDASTEY ECWNIFVTSD MLQEILTHTN SSIRHRQTKT AAENSSAETS |
| 181 | FYMQETTLCE LKALIALLYL AGLIKSNRQS LKDLWRKDGT GVDIFRTTMS LQRFQFLLNN |
| 241 | IRFDDISTRD ERKQTDNMAA FRSIFDQFVQ CCQNAYSPSE FLTIDEMLLS FRGRCLFRVY |
| 301 | IPNKPAKYGI KILALVDAKN FYVVNLEVYA GKQPSGPYAV SNRPFEVVER LIQPVARSHR |
| 361 | NVTFDNWFTG YELMLHLLNE YRLTSVGTVR KNKRQIPESF IRTDRQPNSS VFGFQKDITL |
| 421 | VSYAPKKNKV VVVMSTMHHD NSIDESTGEK QKPEMITFYN STKAGVDVVD ELCANYNVSR |
| 481 | NSKKWPMTLF YGVLNMAAIN ACIIYRTNKN VTIKRTEFIR SLGLSMMYEH LHSRNKKKNI |
| 541 | PTYLRQRIEK QLGEPVPRHV NVPGRYVRCQ DCPYKKDRKT KRSCNACAKP ICMEHAKFLC |
| 601 | ENCAELDSSL. |

In certain embodiments, the integration deficient piggyBac or piggyBac-like transposase comprises a sequence of:

| (SEQ ID NO: 14607) | |
|---|---|
| 1 | MDIERQEERI RAMLEEELSD YSDESSSEDE TDHCSEHEVN YDTEEERIDS VDVPSNSRQE |
| 61 | EANAIIANES DSDPDDDLPL SLVRQRASAS RQVSGPFYTS KDGTKWYKNC QRPNVRLRSE |
| 121 | NIVTEQAQVK NIARDASTEY ECWNIFVTSD MLQEILTHTN SSIRHRQTKT AAENSSAETS |
| 181 | FYMQETTLCE LKALIGLLYL AGLIKSNRQS LKDLWRTDGT GVDIFRTTMS LQRFYFLQNN |
| 241 | IRFDDKSTLD ERKQTDNMAA FRSIFDQFVQ SCQNAYSPSE FLTIDEMLLS FRGRCLFRVY |
| 301 | IPNKPAKYGI KILALVDAKN FYVVNLEVYA GKQPSGPYAV SNRPFEVVER LIQPVARSHR |
| 361 | NVTFDNWFTG YELMLHLLNE YRLTSVGTVR KNKRQIPESF IRTDRQPNSS VFGFQKDITL |
| 421 | VSYAPKKNKV VVVMSTMHHD NSIDESTGEK QKPEMITFYN STKAGVDVVD ELCANYNVSR |
| 481 | NSKRWPMTLF YGVLNMAAIN ACIIYRTNKN VTIKRTEFIR SLGLSMIYEH LHSRNKKKNI |
| 541 | PTYLRQRIEK QLGEPSPRHV NYPGRYVRCQ DCPYKKDRKT KRSCNACAKP ICMEHAKFLC |
| 601 | VNCAELDSSL. |

In certain embodiments, the piggyBac or piggyBac-like transposase that is is integration deficient comprises a sequence of:

| (SEQ ID NO: 14608) | |
|---|---|
| 1 | MDIERQEERI RAMLEEELSD YSDESSSEDE TDHCSEHEVN YDTEEERIDS VDVPSNSRQE |
| 61 | EANAIIANES DSDPDDDLPL SLVRQRASAS RQVSGPFYTS KDGTKWYKNC QRPNVRLRSE |
| 121 | NIVTEQAQVK NIARDASTEY ECWNIFVTSD MLQEILTHTN SSIRHRQTKT AAENSSAETS |
| 181 | FYMQETTLCE LKALIALLYL AGLIKSNRQS LKDLWRKDGT GVDIFRTTMS LQRFQFLLNN |
| 241 | IRFDDKSTRD ERKQTDNMAA FRSIFDQFVQ CCQNAYSPSE FLTIDEMLLS FRGRCLFRVY |
| 301 | IPNKPAKYGI KILALVDAKN DYVVNLEVYA GKQPSGPYAV SNRPFEVVER LIQPVARSHR |
| 361 | NVTFDNWFTG YECMLHLLNE YRLTSVGTVR KNKRQIPESF IRTDRQPNSS VFGFQKDITL |
| 421 | VSYAPKKNKV VVVMSTMHHD NSIDESTGEK QKPEMITFYN STKAGVDVVD ELCANYNVSR |
| 481 | NSKKWPMTLF YGVLNMAAIN ACIIYRTNKN VTIKRTEFIR SLGLSMIKEH LHSRNKKKNI |
| 541 | PTYLRQRIEK QLGEPSPRHV NVPGRYVRCQ DCPYKKDRKT KRSCNACAKP ICMEHAKFLC |
| 601 | ENCAELDSSL. |

In certain embodiments, the integration deficient transposase comprises a sequence that is at least 90% identical to SEQ ID NO: 14608.

[0288] In certain embodiments, the piggyBac or piggyBac-like transposon is isolated or derived from Bombyx mori. In certain embodiments, the piggyBac or piggyBac-like transposon comprises a sequence of:

| (SEQ ID NO: 14506) | |
|---|---|
| 1 | ttatcccggc gagcatgagg cagggtatct cataccctgg taaaatttta aagttgtgta |
| 61 | ttttataaaa ttttcgtctg acaacactag cgcgctcagt agctggaggc aggagcgtgc |
| 121 | gggaggggat agtggcgtga tcgcagtgtg gcacgggaca ccggcgagat attcgtgtgc |
| 181 | aaacctgttt cgggtatgtt ataccctgcc tcattgttga cgtatttttt ttatgtaatt |
| 241 | tttccgatta ttaatttcaa ctgttttatt ggtattttta tgttatccat tgttcttttt |
| 301 | ttatgattta ctgtatcggt tgtctttcgt tcctttagtt gagttttttt ttattatttt |
| 361 | cagtttttga tcaaa. |

In certain embodiments, the piggyBac or piggyBac-like transposon comprises a sequence of:

| (SEQ ID NO: 14507) | |
|---|---|
| 1 | tcatattttt agtttaaaaa aataattata tgttttataa tgaaaagaat ctcattatct |
| 61 | ttcagtatta ggttgattta tattccaaag aataatattt ttgttaaatt gttgattttt |
| 121 | gtaaacctct aaatgtttgt tgctaaaatt actgtgttta agaaaaagat taataaataa |
| 181 | taataatttc ataattaaaa acttctttca ttgaatgcca ttaaataaac cattatttta |
| 241 | caaaataaga tcaacataat tgagtaaata ataataagaa caatattata gtacaacaaa |
| 301 | atatgggtat gtcataccct gccacattct tgatgtaact ttttttcacc tcatgctcgc |
| 361 | cgggttat. |

In certain embodiments, the piggyBac or piggyBac-like transposon comprises a sequence of:

| (SEQ ID NO: 14508) | |
|---|---|
| 1 | ttatcccggc gagcatgagg cagggtatct cataccctgg taaaatttta aagttgtgta |
| 61 | ttttataaaa ttttcgtctg acaacactag cgcgctcagt agctggaggc aggagcgtgc |
| 121 | gggaggggat agtggcgtga tcgcagtgtg gcacgggaca ccggcgagat attcgtgtgc |
| 181 | aaacctgttt cgggtatgtt ataccctgcc tcat. |

In certain embodiments, the piggyBac™ (PB) or piggyBac-like transposon comprises a sequence of:

| (SEQ ID NO: 14509) | |
|---|---|
| 1 | taaataataa taatttcata attaaaaact tctttcattg aatgccatta aataaaccat |
| 61 | tattttacaa aataagatca acataattga gtaaataata ataagaacaa tattatagta |
| 121 | caacaaaata tgggtatgtc ataccctgcc acattcttga tgtaactttt tttcacctca |
| 181 | tgctcgccgg gttat. |

[0289] In certain embodiments, the piggyBac or piggyBac-like transposon comprises a left sequence corresponding to SEQ ID NO: 14506 and a right sequence corresponding to SEQ ID NO: 14507. In certain embodiments, one piggyBac or piggyBac-like transposon end is at least 85%, at least 90%, at least 95%, at least 98%, at least 99% identical or any percentage in between identical to SEQ ID NO: 14506 and the other piggyBac or piggyBac-like transposon end is at least 85%, at least 90%, at least 95%, at least 98%, at least 99% or any percentage in between identical to SEQ ID NO: 14507. In certain embodiments, the piggyBac or piggyBac-like transposon comprises SEQ ID NO: 14506 and SEQ ID NO: 14507 or SEQ ID NO: 14509. In certain embodiments, the piggyBac or piggyBac-like transposon comprises SEQ ID NO: 14508 and SEQ ID NO: 14507 or SEQ ID NO: 14509. In certain embodiments, the left and right transposon ends share a 16 bp repeat sequence at their ends of CCCGGCGAGCATGAGG (SEQ ID NO: 14510) immediately adjacent to the 5′-TTAT-3 target insertion site, which is inverted in the orientation in the two ends. In certain embodiments, left transposon end begins with a sequence comprising 5′-TTATCCCGGCGAGCATGAGG-3 (SEQ ID NO: 14511), and the right transposon ends with a sequence comprising the reverse complement of this sequence:

(SEQ ID NO: 14512)
5′-CCTCATGCTCGCCGGGTTAT-3′.

[0290] In certain embodiments, the piggyBac or piggyBac-like transposon comprises one end comprising at least 14, 16, 18, 20, 30 or 40 contiguous nucleotides of SEQ ID NO: 14506 or SEQ ID NO: 14508. In certain embodiments, the piggyBac or piggyBac-like transposon comprises one end comprising at least 14, 16, 18, 20, 30 or 40 contiguous nucleotides of SEQ ID NO: 14507 or SEQ ID NO: 14509. In certain embodiments, the piggyBac or piggyBac-like transposon comprises one end with at least 90% identity to SEQ ID NO: 14506 or SEQ ID NO: 14508. In certain embodiments, the piggyBac or piggyBac-like transposon comprises one end with at least 90% identity to SEQ ID NO: 14507 or SEQ ID NO: 14509.

[0291] In certain embodiments, the piggyBac or piggyBac-like transposon comprises a sequence of:

| (SEQ ID NO: 14515) | |
|---|---|
| 1 | ttaacccggc gagcatgagg cagggtatct cataccctgg taaaatttta aagttgtgta |
| 61 | ttttataaaa ttttcgtctg acaacactag cgcgctcagt agctggaggc aggagcgtgc |
| 121 | gggaggggat agtggcgtga tcgcagtgtg gcacgggaca ccggcgagat attcgtgtgc |
| 181 | aaacctgttt cgggtatgtt ataccctgcc tcattgttga cgtatttttt ttatgtaatt |
| 241 | tttccgatta ttaatttcaa ctgttttatt ggtattttta tgttatccat tgttcttttt |
| 301 | ttatgattta ctgtatcggt tgtctttcgt tcctttagtt gagttttttt ttattatttt |
| 361 | cagtttttga tcaaa. |

[0292] In certain embodiments, the piggyBac or piggyBac-like transposon comprises a sequence of:

| (SEQ ID NO: 14516) | |
|---|---|
| 1 | tcatattttt agtttaaaaa aataattata tgttttataa tgaaaagaat ctcattatct |
| 61 | ttcagtatta ggttgattta tattccaaag aataatattt ttgttaaatt gttgattttt |
| 121 | gtaaacctct aaatgtttgt tgctaaaatt actgtgttta agaaaaagat taataaataa |
| 181 | taataatttc ataattaaaa acttctttca ttgaatgcca ttaaataatt cattatttta |
| 241 | caaaataaga tcaacataat tgagtaaata ataataagaa caatattata gtacaacaaa |
| 301 | atatgggtat gtcataccct tttttttttt tttttttttt ttttttcggg tagagggccg |
| 361 | aacctcctac gaggtccccg cgcaaaaggg gcgcgcgggg tatgtgagac tcaacgatct |
| 421 | gcatggtgtt gtgagcagac cgcgggccca aggattttag agcccaccca ctaaacgact |
| 481 | cctctgcact cttacacccg acgtccgatc ccctccgagg tcagaacccg gatgaggtag |
| 541 | gggggctacc gcggtcaaca ctacaaccag acggcgcggc tcaccccaag gacgcccagc |
| 601 | cgacggagcc ttcgaggcga atcgaaggct ctgaaacgtc ggccgtctcg gtacggcagc |
| 661 | ccgtcgggcc gcccagacgg tgccgctggt gtcccggaat accccgctgg accagaacca |
| 721 | gcctgccggg tcgggacgcg atacaccgtc gaccggtcgc tctaatcact ccacggcagc |
| 781 | gcgctagagt gctggta. |

[0293] In certain embodiments, the piggyBac or piggyBac-like transposon comprises a sequence of CCCGGCGAGCATGAGG (SEQ ID NO: 14510). In certain embodiments, the piggyBac or piggyBac-like transposon comprises an ITR sequence of SEQ ID NO: 14510. In certain embodiments, the piggyBac or piggyBac-like transposon comprises a sequence of TTATCCCGGCGAGCATGAGG (SEQ ID NO: 14511). In certain embodiments, the piggyBac or piggyBac-like transposon comprises at least 16 contiguous nucleotides from SEQ ID NO: 14511. In certain embodiments, the piggyBac or piggyBac-like transposon comprises a sequence of CCTCATGCTCGCCGGGTTAT (SEQ ID NO: 14512). In certain embodiments, the piggyBac or piggyBac-like transposon comprises at least 16 contiguous nucleotides from SEQ ID NO: 14512. In certain embodiments, the piggyBac or piggyBac-like transposon comprises one end comprising at least 16 contiguous nucleotides from SEQ ID NO: 14511 and one end comprising at least 16 contiguous nucleotides from SEQ ID NO: 14512. In certain embodiments, the piggyBac or piggyBac-like transposon comprises SEQ ID NO: 14511 and SEQ ID NO: 14512. In certain embodiments, the piggyBac or piggyBac-like transposon comprises a sequence of TTAACCCGGCGAGCATGAGG (SEQ ID NO: 14513). In certain embodiments, the piggyBac or piggyBac-like transposon comprises a sequence of CCTCATGCTCGCCGGGTTAA (SEQ ID NO: 14514).

[0294] In certain embodiments, the piggyBac or piggyBac-like transposon may have ends comprising SEQ ID NO: 14506 and SEQ ID NO: 14507, or a variant of either or both of these having at least 90% sequence identity to SEQ ID NO: 14506 or SEQ ID NO: 14507, and the piggyBac or piggyBac-like transposase has the sequence of SEQ ID NO: 14504 or SEQ ID NO: 14505, or a sequence at least 5%, 10%, 15%, 20%, 25%, 30%, 35%, 40%, 45%, 50%, 55%, 60%, 65%, 70%, 75%, 80%, 85%, 90%, 95%, 99% or any percentage in between identity to SEQ ID NO: 14504 or SEQ ID NO: 14505. In certain embodiments, the piggyBac or piggyBac-like transposon comprises a heterologous polynucleotide inserted between a pair of inverted repeats, where the transposon is capable of transposition by a piggyBac or piggyBac-like transposase having at least 5%, 10%, 15%, 20%, 25%, 30%, 35%, 40%, 45%, 50%, 55%, 60%, 65%, 70%, 75%, 80%, 85%, 90%, 95%, 99% or any percentage in between identity to SEQ ID NO: 14504 or SEQ ID NO: 14505. In certain embodiments, the transposon comprises two transposon ends, each of which comprises SEQ ID NO: 14510 in inverted orientations in the two transposon ends. In certain embodiments, each inverted terminal repeat (ITR) is at least 90% identical to SEQ ID NO: 14510.

[0295] In certain embodiments, the piggyBac or piggyBac-like transposon is capable of insertion by a piggyBac or piggyBac-like transposase at the sequence 5′-TTAT-3 within a target nucleic acid. In certain embodiments, one end of the piggyBac or piggyBac-like transposon comprises at least 16 contiguous nucleotides from SEQ ID NO: 14506 and the other transposon end comprises at least 16 contiguous nucleotides from SEQ ID NO: 14507. In certain embodiments, one end of the piggyBac or piggyBac-like transposon comprises at least 17, at least 18, at least 19, at least 20, at least 22, at least 25, at least 30 contiguous nucleotides from SEQ ID NO: 14506 and the other transposon end comprises at least 17, at least 18, at least 19, at least 20, at least 22, at least 25, at least 30 contiguous nucleotides from SEQ ID NO: 14507.

[0296] In certain embodiments, the piggyBac or piggyBac-like transposon comprises transposon ends (each end comprising an ITR) corresponding to SEQ ID NO: 14506 and SEQ ID NO: 14507, and has a target sequence corresponding to 5′-TTAT3′. In certain embodiments, the piggyBac or piggyBac-like transposon also comprises a sequence encoding a transposase (e.g. SEQ ID NO: 14505). In certain embodiments, the piggyBac or piggyBac-like transposon comprises one transposon end corresponding to SEQ ID NO: 14506 and a second transposon end corresponding to SEQ ID NO: 14516. SEQ ID NO: 14516 is very similar to SEQ ID NO: 14507, but has a large insertion shortly before the ITR. Although the ITR sequences for the two transposon ends are identical (they are both identical to SEQ ID NO: 14510), they have different target sequences: the second transposon has a target sequence corresponding to 5′-TTAA-3′, providing evidence that no change in ITR sequence is necessary to modify the target sequence specificity. The piggyBac or piggyBac-like transposase (SEQ ID NO: 14504), which is associated with the 5′-TTAA-3′ target site differs from the 5′-TTAT-3′-associated transposase (SEQ ID NO: 14505) by only 4 amino acid changes (D322Y, S473C, A507T, H582R). In certain embodiments, the piggyBac or piggyBac-like transposase (SEQ ID NO: 14504), which is associated with the 5′-TTAA-3′ target site is less active than the 5′-TTAT-3′-associated piggyBac or piggyBac-like transposase (SEQ ID NO: 14505) on the transposon with 5′-TTAT-3′ ends. In certain embodiments, piggyBac or piggyBac-like transposons with 5′-TTAA-3′ target sites can be converted to piggyBac or piggyBac-like transposases with 5′-TTAT-3 target sites by replacing 5′-TTAA-3′ target sites with 5′-TTAT-3′. Such transposons can be used either with a piggyBac or piggyBac-like transposase such as SEQ ID NO: 14504 which recognizes the 5′-TTAT-3′ target sequence, or with a variant of a transposase originally associated with the 5′-TTAA-3′ transposon. In certain embodiments, the high similarity between the 5′-TTAA-3′ and 5′-TTAT-3′ piggyBac or piggyBac-like transposases demonstrates that very few changes to the amino acid sequence of a piggyBac or piggyBac-like transposase alter target sequence specificity. In certain embodiments, modification of any piggyBac or piggyBac-like transposon-transposase gene transfer system, in which 5′-TTAA-3′ target sequences are replaced with 5′-TTAT-3′-target sequences, the ITRs remain the same, and the transposase is the original piggyBac or piggyBac-like transposase or a variant thereof resulting from using a low-level mutagenesis to introduce mutations into the transposase. In certain embodiments, piggyBac or piggyBac-like transposon transposase transfer systems can be formed by the modification of a 5′-TTAT-3′-active piggyBac or piggyBac-like transposon-transposase gene transfer systems in which 5′-TTAT-3′ target sequences are replaced with 5′-TTAA-3′-target sequences, the ITRs remain the same, and the piggyBac or piggyBac-like transposase is the original transposase or a variant thereof.

[0297] In certain embodiments, the piggyBac or piggyBac-like transposon is isolated or derived from Bombyx mori. In certain embodiments, the piggyBac or piggyBac-like transposon comprises a sequence of:

| (SEQ ID NO: 14577) | |
|---|---|
| 1 | cccggcgagc atgaggcagg gtatctcata ccctggtaaa attttaaagt tgtgtatttt |
| 61 | ataaaatttt cgtctgacaa cactagcgcg ctcagtagct ggaggcagga gcgtgcggga |
| 121 | ggggatagtg gcgtgatcgc agtgtggcac gggacaccgg cgagatattc gtgtgcaaac |
| 181 | ctgtttcggg tatgttatac cctgcctcat tgttgacgta t. |

In certain embodiments, the piggyBac or piggyBac-like transposon comprises a sequence of:

| (SEQ ID NO: 14578) | |
|---|---|
| 1 | tttaagaaaa agattaataa ataataataa tttcataatt aaaaacttct ttcattgaat |
| 61 | gccattaaat aaaccattat tttacaaaat aagatcaaca taattgagta aataataata |
| 121 | agaacaatat tatagtacaa caaaatatgg gtatgtcata ccctgccaca ttcttgatgt |
| 181 | aacttttttt cacctcatgc tcgccggg. |

In certain embodiments, the transposon comprises at least 16 contiguous bases from SEQ ID NO: 14577 and at least 16 contiguous bases from SEQ ID NO: 14578, and inverted terminal repeats that are at least 87% identical to CCCGGCGAGCATGAGG (SEQ ID NO: 14510). In certain embodiments, the piggyBac or piggyBac-like transposon comprises a sequence of:

| (SEQ ID NO: 14595) | |
|---|---|
| 1 | cccggcgagc atgaggcagg gtatctcata ccctggtaaa attttaaagt tgtgtatttt |
| 61 | ataaaatttt cgtctgacaa cactagcgcg ctcagtagct ggaggcagga gcgtgcggga |
| 121 | ggggatagtg gcgtgatcgc agtgtggcac gggacaccgg cgagatattc gtgtgcaaac |
| 181 | ctgtttcggg tatgttatac cctgcctcat tgttgacgta ttttttttat gtaatttttc |
| 241 | cgattattaa tttcaactgt tttattggta tttttatgtt atccattgtt ctttttttat |
| 301 | gatttactgt atcggttgtc tttcgttcct ttagttgagt ttttttttat tattttcagt |
| 361 | ttttgatcaa a. |

In certain embodiments, the piggyBac or piggyBac-like transposon comprises a sequence of:

| (SEQ ID NO: 14596) | |
|---|---|
| 1 | tcatattttt agtttaaaaa aataattata tgttttataa tgaaaagaat ctcattatct |
| 61 | ttcagtatta ggttgattta tattccaaag aataatattt ttgttaaatt gttgattttt |
| 121 | gtaaacctct aaatgtttgt tgctaaaatt actgtgttta agaaaaagat taataaataa |
| 181 | taataatttc ataattaaaa acttctttca ttgaatgcca ttaaataaac cattatttta |
| 241 | caaaataaga tcaacataat tgagtaaata ataataagaa caatattata gtacaacaaa |
| 301 | atatgggtat gtcataccct gccacattct tgatgtaact ttttttcacc tcatgctcgc |
| 361 | cggg. |

[0298] In certain embodiments, the piggyBac or piggyBac-like transposon comprises SEQ ID NO: 14595 and SEQ ID NO: 14596, and is transposed by the piggyBac or piggyBac-like transposase of SEQ ID NO: 14505. In certain embodiments, the ITRs of SEQ ID NO: 14595 and SEQ ID: 14596 are not flanked by a 5′-TTAA-3′ sequence. In certain embodiments, the ITRs of SEQ ID NO: 14595 and SEQ ID: 14596 are flanked by a 5′-TTAT-3′ sequence.

[0299] In certain embodiments, the piggyBac or piggyBac-like transposon comprises a sequence of:

| (SEQ ID NO: 14597) | |
|---|---|
| 1 | cccggcgagc atgaggcagg gtatctcata ccctggtaaa attttaaagt tgtgtatttt |
| 61 | ataaaatttt cgtctgacaa cactagcgcg ctcagtagct ggaggcagga gcgtgcggga |
| 121 | ggggatagtg gcgtgatcgc agtgtggcac gggacaccgg cgagatattc gtgtgcaaac |
| 181 | ctgtttcggg tatgttatac cctgcctcat tgttgacgta ttttttttat gtaatttttc |
| 241 | cgattattaa tttcaactgt tttattggta tttttatgtt atccattgtt ctttttttat |
| 301 | g. |

In certain embodiments, the piggyBac or piggyBac-like transposon comprises a sequence of:

| (SEQ ID NO: 14598) | |
|---|---|
| 1 | cagggtatct cataccctgg taaaatttta aagttgtgta ttttataaaa ttttcgtctg |
| 61 | acaacactag cgcgctcagt agctggaggc aggagcgtgc gggaggggat agtggcgtga |
| 121 | tcgcagtgtg gcacgggaca ccggcgagat attcgtgtgc aaacctgttt cgggtatgtt |
| 181 | ataccctgcc tcattgttga cgtatttttt ttatgtaatt tttccgatta ttaatttcaa |
| 241 | ctgttttatt ggtattttta tgttatccat tgttcttttt ttatg. |

In certain embodiments, the piggyBac or piggyBac-like transposon comprises a sequence of:

| (SEQ ID NO: 14599) | |
|---|---|
| 1 | cagggtatct cataccctgg taaaatttta aagttgtgta ttttataaaa ttttcgtctg |
| 61 | acaacactag cgcgctcagt agctggaggc aggagcgtgc gggaggggat agtggcgtga |
| 121 | tcgcagtgtg gcacgggaca ccggcgagat attcgtgtgc aaacctgttt cgggtatgtt |
| 181 | ataccctgcc tcattgttga cgtat. |

In certain embodiments, the left end of the piggyBac or piggyBac-like transposon comprises a sequence of SEQ ID NO: 14577, SEQ ID NO: 14595, or SEQ ID NOs: 14597-14599. In certain embodiments, the left end of the piggyBac or piggyBac-like transposon is preceded by a left target sequence.
In certain embodiments, the piggyBac or piggyBac-like transposon comprises a sequence of:

| (SEQ ID NO: 14600) | |
|---|---|
| 1 | tcatattttt agtttaaaaa aataattata tgttttataa tgaaaagaat ctcattatct |
| 61 | ttcagtatta ggttgattta tattccaaag aataatattt ttgttaaatt gttgattttt |
| 121 | gtaaacctct aaatgtttgt tgctaaaatt actgtgttta agaaaaagat taataaataa |
| 181 | taataatttc ataattaaaa acttctttca ttgaatgcca ttaaataaac cattatttta |
| 241 | caaaataaga tcaacataat tgagtaaata ataataagaa caatattata gtacaacaaa |
| 301 | atatgggtat gtcataccct gccacattct tgatgtaact ttttttcacc tcatgctcgc |
| 361 | cggg. |

In certain embodiments, the piggyBac or piggyBac-like transposon comprises a sequence of:

| (SEQ ID NO: 14601) | |
|---|---|
| 1 | tttaagaaaa agattaataa ataataataa tttcataatt aaaaacttct ttcattgaat |
| 61 | gccattaaat aaaccattat tttacaaaat aagatcaaca taattgagta aataataata |
| 121 | agaacaatat tatagtacaa caaaatatgg gtatgtcata ccctgccaca ttcttgatgt |
| 181 | aacttttttt ca. |

In certain embodiments, the piggyBac or piggyBac-like transposon comprises a sequence of:

| (SEQ ID NO: 14602) | |
|---|---|
| 1 | cccggcgagc atgaggcagg gtatctcata ccctggtaaa attttaaagt tgtgtatttt |
| 61 | ataaaatttt cgtctgacaa cactagcgcg ctcagtagct ggaggcagga gcgtgcggga |
| 121 | ggggatagtg gcgtgatcgc agtgtggcac gggacaccgg cgagatattc gtgtgcaaac |
| 181 | ctgtttcggg tatgttatac cctgcctcat tgttgacgta ttttttttat gtaatttttc |
| 241 | cgattattaa tttcaactgt tttattggta tttttatgtt atccattgtt ctttttttat |
| 301 | gatttactgt atcggttgtc tttcgttcct ttagttgagt ttttttttat tattttcagt |
| 361 | ttttgatcaa a. |

[0300] In certain embodiments, the right end of the piggyBac or piggyBac-like transposon comprises a sequence of SEQ ID NO: 14578, SEQ ID NO: 14596, or SEQ ID NOs: 14600-14601. In certain embodiments, the right end of the piggyBac or piggyBac-like transposon is followed by a right target sequence. In certain embodiments, the transposon is transposed by the transposase of SEQ ID NO: 14505. In certain embodiments, the left and right ends of the piggyBac or piggyBac-like transposon share a 16 bp repeat sequence of SEQ ID NO: 14510 in inverted orientation and immediately adjacent to the target sequence. In certain embodiments, the left transposon end begins with SEQ ID NO: 14510, and the right transposon end ends with the reverse complement of SEQ ID NO: 14510, 5′-CCTCATGCTCGCCGGG-3′ (SEQ ID NO: 14603). In certain embodiments, the piggyBac or piggyBac-like transposon comprises an ITR with at least 93%, at least 87%, or at least 81% or any percentage in between identity to SEQ ID NO: 14510 or SEQ ID NO: 14603. In certain embodiments, the piggyBac or piggyBac-like transposon comprises a target sequence followed by a left transposon end comprising a sequence selected from SEQ ID NOs: 88, 105 or 107 and a right transposon end comprising SEQ ID NO: 14578 or 106 followed by a target sequence. in certain embodiments, the piggyBac or piggyBac like transposon comprises one end that comprises a sequence that is at least 90%, at least 95% or at least 99% or any percentage in between identical to SEQ ID NO: 14577 and one end that comprises a sequence that is at least 90%, at least 95% or at least 99% or any percentage in between identical to SEQ ID NO: 14578. In certain embodiments, one transposon end comprises at least 14, at least 16, at least 18 or at least 20 contiguous bases from SEQ ID NO: 14577 and one transposon end comprises at least 14, at least 16, at least 18 or at least 20 contiguous bases from SEQ ID NO: 14578.

[0301] In certain embodiments, the piggyBac or piggyBac-like transposon comprises two transposon ends wherein each transposon ends comprises a sequence that is at least 81% identical, at least 87% identical or at least 93% identical or any percentage in between identical to SEQ ID NO: 14510 in inverted orientation in the two transposon ends. One end may further comprise at least 14, at least 16, at least 18 or at least 20 contiguous bases from SEQ ID NO: 14599, and the other end may further comprise at least 14, at least 16, at least 18 or at least 20 contiguous bases from SEQ ID NO: 14601. The piggyBac or piggyBac-like transposon may be transposed by the transposase of SEQ ID NO: 14505, and the transposase may optionally be fused to a nuclear localization signal.

[0302] In certain embodiments, the piggyBac or piggyBac-like transposon comprises SEQ ID NO: 14595 and SEQ ID NO: 14596 and the piggyBac or piggyBac-like transposase comprises SEQ ID NO: 14504 or SEQ ID NO: 14505. In certain embodiments, the piggyBac or piggyBac-like transposon comprises SEQ ID NO: 14597 and SEQ ID NO: 14596 and the piggyBac or piggyBac-like transposase comprises SEQ ID NO: 14504 or SEQ ID NO: 14505. In certain embodiments, the piggyBac or piggyBac-like transposon comprises SEQ ID NO: 14595 and SEQ ID NO: 14578 and the piggyBac or piggyBac-like transposase comprises SEQ ID NO: 14504 or SEQ ID NO: 14505. In certain embodiments, the piggyBac or piggyBac-like transposon comprises SEQ ID NO: 14602 and SEQ ID NO: 14600 and the piggyBac or piggyBac-like transposase comprises SEQ ID NO: 14504 or SEQ ID NO: 14505.

[0303] In certain embodiments, the piggyBac or piggyBac-like transposon comprises a left end comprising 1, 2, 3, 4, 5, 6, or 7 sequences selected from ATGAGGCAGGGTAT (SEQ ID NO: 14614), ATACCCTGCCTCAT (SEQ ID NO: 14615), GGCAGGGTAT (SEQ ID NO: 14616), ATACCCTGCC (SEQ ID NO: 14617), TAAAATTTTA (SEQ ID NO: 14618), ATTTTATAAAAT (SEQ ID NO: 14619), TCATACCCTG (SEQ ID NO: 14620) and TAAATAATAATAA (SEQ ID NO: 14621). In certain embodiments, the piggyBac or piggyBac-like transposon comprises a right end comprising 1, 2 or 3 sequences selected from SEQ ID NO: 14617, SEQ ID NO: 14620 and SEQ ID NO: 14621.

[0304] In certain embodiments of the methods of the disclosure, the transposase enzyme is a piggyBac or piggyBac-like transposase enzyme. In certain embodiments, the piggyBac or piggyBac-like transposase enzyme is isolated or derived from Xenopus tropicalis. The piggyBac or piggyBac-like transposase enzyme may comprise or consist of an amino acid sequence at least 5%, 10%, 15%, 20%, 25%, 30%, 35%, 40%, 45%, 50%, 55%, 60%, 65%, 70%, 75%, 80%, 85%, 90%, 95%, 99% or any percentage in between identical to:

| (SEQ ID NO: 14517) | |
|---|---|
| 1 | MAKRFYSAEE AAAHCMASSS EEFSGSDSEY VPPASESDSS TEESWCSSST VSALEEPMEV |
| 61 | DEDVDDLEDQ EAGDRADAAA GGEPAWGPPC NFPPEIPPFT TVPGVKVDTS NFEPINFFQL |
| 121 | FMTEAILQDM VLYTNVYAEQ YLTQNPLPRY ARAHAWHPTD IAEMKRFVGL TLAMGLIKAN |
| 181 | SLESYWDTTT VLSIPVFSAT MSRNRYQLLL RFLHFNNNAT AVPPDQPGHD RLHKLRPLID |
| 241 | SLSERFAAVY TPCQNICIDE SLLLFKGRLQ FRQYIPSKRA RYGIKFYKLC ESSSGYTSYF |
| 301 | LIYEGKDSKL DPPGCPPDLT VSGKIVWELI SPLLGQGFHL YVDNFYSSIP LFTALYCLDT |
| 361 | PACGTINRNR KGLPRALLDK KLNRGETYAL RKNELLAIKF FDKKNVFMLT SIHDESVIRE |
| 421 | QRVGRPPKNK PLCSKEYSKY MGGVDRTDQL QHYYNATRKT RAWYKKVGIY LIQMALRNSY |
| 481 | IVYKAAVPGP KLSYYKYQLQ ILPALLFGGV EEQTVPEMPP SDNVARLIGK HFIDTLPPTP |
| 541 | GKQRPQKGCK VCRKRGIRRD TRYYCPKCPR NPGLCFKPCF EIYHTQLHY. |

[0305] In some embodiments, the piggyBac or piggyBac-like transposase is a hyperactive variant of SEQ ID NO: 14517. In certain embodiments, the piggyBac or piggyBac-like transposase is an integration defective variant of SEQ ID NO: 14517. The piggyBac or piggyBac-like transposase enzyme may comprise or consist of an amino acid sequence at least 5%, 10%, 15%, 20%, 25%, 30%, 35%, 40%, 45%, 50%, 55%, 60%, 65%, 70%, 75%, 80%, 85%, 90%, 95%, 99% or any percentage in between identical to:

| (SEQ ID NO: 14518) | |
|---|---|
| 1 | MAKRFYSAEE AAAHCMAPSS EEFSGSDSEY VPPASESDSS TEESWCSSST VSALEEPMEV |
| 61 | DEDVDDLEDQ EAGDRADAAA GGEPAWGPPC NFPPEIPPFT TVPGVKVDTS NFEPINFFQL |
| 121 | FMTEAILQDM VLYTNVYAEQ YLTQNPLPRY ARAHAWHPTD IAEMKRFVGL TLAMGLIKAN |
| 181 | SLESYWNTTT VLSIPVFSAT MSRNRYQLLL RFLHFNNNAT AVPPDQPDHD RLHKLRPLID |
| 241 | SLSERFAAVY TPCQNICIDE SLLLFKGRLR FRQYIPSKRA RYGIKFYKLC ESSSGYTSYF |
| 301 | LIYEGKDSKL DPPGCPPDLT VSGKIVWELI SPLLGQGFHL YVDNFYSSIP LFTALYCLDT |
| 361 | PACGTINRTR KGLPRALLDK KLNRGETYAL RKNELLAIKF FDKKNVFMLT SIHDESVIRE |
| 421 | QRVGRPPKNK PLCSKEYSKY MGGVDRTDQL QHYYNATRKT SAWYKKVGIY LIQMALRNSY |
| 481 | IVYKAAVPGP KLSYYKYQLQ ILPALLFGGV EEQTVPEMLP SDNVARLIGK HFIDTLPPTP |
| 541 | GKQRPQKGCK VCRKRGIRRD TRYYCPKCPR NPGLCFKPCF EIYHTQLHY. |

[0306] In certain embodiments, the piggyBac or piggyBac-like transposase is isolated or derived from Xenopus tropicalis. In certain embodiments, the piggyBac or piggyBac-like transposase is a hyperactive piggyBac or piggyBac-like transposase. In certain embodiments, the hyperactive piggyBac or piggyBac-like transposase comprises a sequence at least 90% identical to:

| (SEQ ID NO: 14572) | |
|---|---|
| 1 | MAKRFYSAEE AAAHCSASSS EEFSGSDSEY VPPASESDSS TEESWCSSST VSALEEPMEV |
| 61 | DEDVDDLEDQ EAGDRADAAA GGEPAWGPPC NFPPEIPPFT TVPGVKVDTS NFEPINFFQL |
| 121 | FMTEAILQDM VLYTNVYAEQ YLTQNPLTRG ARAHAWHPTD IAEMKRFVGL TLAMGLIKAN |
| 181 | SIESYWDTTT VLSIPVFGAT MSRNRYQLLL RFLHFNNNAT AVPPDQPGHD RLHKLRPLID |
| 241 | SLSERFANVY TPCQNICIDE SLMLFKGRLQ FRQYIPSKRA RYGIKFYKLC ESSTGYTSYF |
| 301 | LIYEGKDSKL DPPGCPPDLT VSGKIVWELI SPLLGQGFHL YVDNFYSSIP LFTALYCLNT |
| 361 | PACGTINRNR KGLPRALLDK KLNRGETYAL RKNELLAIKF FDKKNVFMLT SIHDESVIRE |
| 421 | QRVGRPPKNK PLCSKEYSKY MGGVDRTDQL QHYYNATRKT RHWYKKVGIY LIQMALRNSY |
| 481 | IVYKAAVPGP KLSYYKYQLQ ILPALLFGGV EEQTVPEMPD SDNVARLIGK HFIDTLPPTP |
| 541 | GKQRPQKGCK VCRKRGIRRD TRYYCPKCPR NPGLCRKPCF EIYHTQLHY. |

[0307] In certain embodiments, piggyBac or piggyBac-like transposase is a hyperactive piggyBac or piggyBac-like transposase. A hyperactive piggyBac or piggyBac-like transposase is a transposase that is more active than the naturally occurring variant from which it is derived. In certain embodiments, a hyperactive piggyBac or piggyBac-like transposase is more active than the transposase of SEQ ID NO: 14517. In certain embodiments, the hyperactive piggyBac or piggyBac-like transposase comprises a sequence of:

| (SEQ ID NO: 14572) | |
|---|---|
| 1 | MAKRFYSAEE AAAHCSASSS EEFSGSDSEY VPPASESDSS TEESWCSSST VSALEEPMEV |
| 61 | DEDVDDLEDQ EAGDRADAAA GGEPAWGPPC NFPPEIPPFT TVPGVKVDTS NFEPINFFQL |
| 121 | FMTEAILQDM VLYTNVYAEQ YLTQNPLTRG ARAHAWHPTD IAEMKRFVGL TLAMGLIKAN |
| 181 | SIESYWDTTT VLSIPVFGAT MSRNRYQLLL RFLHFNNNAT AVPPDQPGHD RLHKLRPLID |
| 241 | SLSERFANVY TPCQNICIDE SLMLFKGRLQ FRQYIPSKRA RYGIKFYKLC ESSTGYTSYF |
| 301 | LIYEGKDSKL DPPGCPPDLT VSGKIVWELI SPLLGQGFHL YVDNFYSSIP LFTALYCLNT |
| 361 | PACGTINRNR KGLPRALLDK KLNRGETYAL RKNELLAIKF FDKKNVFMLT SIHDESVIRE |
| 421 | QRVGRPPKNK PLCSKEYSKY MGGVDRTDQL QHYYNATRKT RHWYKKVGIY LIQMALRNSY |
| 481 | IVYKAAVPGP KLSYYKYQLQ ILPALLFGGV EEQTVPEMPD SDNVARLIGK HFIDTLPPTP |
| 541 | GKQRPQKGCK VCRKRGIRRD TRYYCPKCPR NPGLCRKPCF EIYHTQLHY. |

[0308] In certain embodiments, the hyperactive piggyBac or piggyBac-like transposase comprises a sequence of:

| (SEQ ID NO: 14624) | |
|---|---|
| 1 | MAKRFYSAEE AAAHCMASSS EEFSGSDSEY VPPASESDSS TEESWCSSST VSALEEPMEV |
| 61 | DEDVDDLEDQ EAGDRADAAA GGEPAWGPPC NFPPEIPPFT TVPGVKVDTS NFEPINFFQL |
| 121 | FMTEAILQDM VLYTNVYAEQ YLTQNPLTRY ARAHAWHPTD IAEMKRFVGL TLAMGLIKAN |
| 181 | SLESYWDTTT VLSIPVFSAT MSRNRYQLLL RFLHFNNNAT AVPPDQPGHD RLHKLRPLID |
| 241 | SLSERFAAVY TPCQNICIDE SLLLFKGRLQ FRQYIPSKRA RYGIKFYKLC ESSSGYTSYF |
| 301 | LIYEGKDSKL DPPGCPPDLT VSGKIVWELI SPLLGQGFHL YVDNFYSSIP LFTALYCLNT |
| 361 | PACGTINRNR KGLPRALLDK KLNRGETYAL RKNELLAIKF FDKKNVFMLT SIHDESVIRE |
| 421 | QRVGRPPKNK PLCSKEYSKY MGGVDRTDQL QHYYNATRKT RHWYKKVGIY LIQMALRNSY |
| 481 | IVYKAAVPGP KLSYYKYQLQ ILPALLFGGV EEQTVPEMPP SDNVARLIGK HFIDTLPPTP |
| 541 | GKQRPQKGCK VCRKRGIRRD TRYYCPKCPR NPGLCRKPCF EIYHTQLHY. |

[0309] In certain embodiments, the hyperactive piggyBac or piggyBac-like transposase comprises a sequence of:

| (SEQ ID NO: 14625) | |
|---|---|
| 1 | MAKRFYSAEE AAAHCMASSS EEFSGSDSEY VPPASESDSS TEESWCSSST VSALEEPMEV |
| 61 | DEDVDDLEDQ EAGDRADAAA GGEPAWGPPC NFPPEIPPFT TVPGVKVDTS NFEPINFFQL |
| 121 | FMTEAILQDM VLYTNVYAEQ YLTQNPLPRY ARAHAWHPTD IAEMKRFVGL TLAMGLIKAN |
| 181 | SLESYWDTTT VLKIPVFSAT MSRNRYQLLL RFLHFNNNAT AVPPDQPGHD RLHKLRPLID |
| 241 | SLSERFAAVY TPCQNICIDE SLLLFKGRLQ FRQYIPSKRA RYGIKFYKLC ESSSGYTSYF |
| 301 | LIYEGKDSKL DPPGCPPDLT VSGKIVWELI SPLLGQGFHL YVDNFYSSIP LFTALYCLNT |
| 361 | PACGTINRNR KGLPRALLDK KLNRGETYAL RKNELLAIKF FDKKNVFMLT SIHDESVIRE |
| 421 | QRVGRPPKNK PLCSKEYSKY MGGVDRTDQL QHYYNATRKT RHWYKKVGIY LIQMALRNSY |
| 481 | IVYKAAVPGP KLSYYKYQLQ ILPALLFGGV EEQTVPEMPP SDNVARLIGK HFIDTLPPTP |
| 541 | GKQRPQKGCK VCRKRGIRRD TRYYCPKCPR NPGLCFKPCF EIYHTQLHY. |

[0310] In certain embodiments, the hyperactive piggyBac or piggyBac-like transposase comprises a sequence of:

| (SEQ ID NO: 14627) | |
|---|---|
| 1 | MAKRFYSAEE AAAHCMASSS EQTSGSDSEY VPPASESDSS TEESWCSSST VSALEEPMEV |
| 61 | DEDVDDLEDQ EAGDRADAAA GGEPAWGPPC NFPPEIPPFT TVPGVKVDTS NFEPINFFQL |
| 121 | FMTEAILQDM VLYTNVYAEQ YLTQNPLTRY ARAHAWHPTD IAEMKRFVGL TLAMGLIKAN |
| 181 | SIESYWDTTT VLSIPVFGAT MSRNRYQLLL RFLHFNNNAT AVPPDQPGHD RLHKLRPLID |
| 241 | SLSERFANVY TPCQNICIDE SLLLFKGRLQ FRQYIPSKRA RYGIKFYKLC ESSSGYTSYF |
| 301 | LIYEGKDSKL DPPGCPPDLT VSGKIVWELI SPLLGQGFHL YVDNFYSSIP LFTALYCLNT |
| 361 | PACGTINRNR KGLPRALLDK KLNRGETYAL RKNELLAIKF FDKKNVFMLT SIHDESVIRE |
| 421 | QRVGRKPKNK PLCSKEYSKY MGGVDRTDQL QHYYNATRKT RHWYKKVGIY LIQMALRNSY |
| 481 | IVYKAAVPGP KLSYYKYQLQ ILPALLFGGV EEQTVPEMPP SDNVARLIGK HFIDTLPPTP |
| 541 | GKQRPQKGCK VCRKRGIRRD TRYYCPKCPR NPGLCRKPCF EIYHTQLHY. |

[0311] In certain embodiments, the hyperactive piggyBac or piggyBac-like transposase comprises a sequence of:

| (SEQ ID NO: 14628) | |
|---|---|
| 1 | MAKRFYSAEE AAAHCSASSS EEFSGSDSEY VPPASESDSS TEESWCSSST VSALEEPMEV |
| 61 | DEDVDDLEDQ EAGDRADAAA GGEPAWGPPC NFPPEIPPFT TVPGVKVDTS NFEPINFFQL |
| 121 | FMTEAILQDM VLYTNVYAEQ YLTQNPLTRG ARAHAWHPTD IAEMKRFVGL TLAMGLIKAN |
| 181 | SLESYWDTTT VLSIPVFGAT MSRNRYQLLL RFLHFNNNAT AVPPDQPGHD RLHKLRPLID |
| 241 | SLSERFANVY TPCQNICIDE SLMLFKGRLQ FRQYIPSKRA RYGIKFYKLC ESSTGYTSYF |
| 301 | LIYEGKDSKL DPPGCPPDLT VSGKIVWELI SPLLGQGFHL YVDNFYSSIP LFTALYCLNT |
| 361 | PACGTINRNR KGLPRALLDK KLNRGETYAL RKNELLAIKF FDKKNVFMLT SIHDESVIRE |
| 421 | QRVGRPPKNK PLCSKEYSKY MGGVDRTDQL QHYYNATRKT RHWYKKVGIY LIQMALRNSY |
| 481 | IVYKAAVPGP KLSYYKYQLQ ILPALLFGGV EEQTVPEMPP SDNVARLIGK HFIDTLPPTP |
| 541 | GKQRPQKGCK VCRKRGIRRD TRYYCPKCPR NPGLCRKPCF EIYHTQLHY. |

[0312] In certain embodiments, the hyperactive piggyBac or piggyBac-like transposase comprises a sequence of:

| (SEQ ID NO: 149) | |
|---|---|
| 1 | MAKRFYSAEE AAAHCMASSS EEFSGSDSEY VPPASESDSS TEESWCSSST VSALEEPMEV |
| 61 | DEDVDDLEDQ EAGDRADAAA GGEPAWGPPC NFPPEIPPFT TVPGVKVDTS NFEPINFFQL |
| 121 | FMTEAILQDM VLYTNVYAEQ YLTQNPLTRY ARAHAWHPTD IAEMKRFVGL TLAMGLIKAN |
| 181 | SLESYWDTTT VLSIPVFGAT MSRNRYQLLL RFLHFNNNAT AVPPDQPGHD RLHKLRPLID |
| 241 | SLSERFANVY TPCQNICIDE SLLLFKGRLQ FRQYIPSKRA RYGIKFYKLC ESSSGYTSYF |
| 301 | LIYEGKDSKL DPPGCPPDLT VSGKIVWELI SPLLGQGFHL YVDNFYSSIP LFTALYCLNT |
| 361 | PACGTINRNR KGLPRALLDK KLNRGETYAL RKNELLAIKF FDKKNVFMLT SIHDESVIRE |
| 421 | QRVGRPPKNK PLCSKEYSKY MGGVDRTDQL QHYYNATRKT RHWYKKVGIY LIQMALRNSY |
| 481 | IVYKAAVPGP KLSYYKYQLQ ILPALLFGGV EEQTVPEMPP SDNVARLIGK HFIDTLPPTP |
| 541 | GKQRPQKGCK VCRKRGIRRD TRYYCPKCPR NPGLCRKPCF EIYHTQLHY. |

[0313] In certain embodiments, the hyperactive piggyBac or piggyBac-like transposase comprises an amino acid substitution at a position selected from amino acid 6, 7, 16, 19, 20, 21, 22, 23, 24, 26, 28, 31, 34, 67, 73, 76, 77, 88, 91, 141, 145, 146, 148, 150, 157, 162, 179, 182, 189, 192, 193, 196, 198, 200, 210, 212, 218, 248, 263, 270, 294, 297, 308, 310, 333, 336, 354, 357, 358, 359, 377, 423, 426, 428, 438, 447, 450, 462, 469, 472, 498, 502, 517, 520, 523, 533, 534, 576, 577, 582, 583 or 587 (relative to SEQ ID NO: 14517). In certain embodiments, the hyperactive piggyBac or piggyBac-like transposase comprises an amino acid substitution of Y6C, S7G, M165, S19G, 520Q, 520G, 520D, E21D, E22Q, F23T, F23P, S24Y, S26V, S28Q, V31K, A34E, L67A, G73H, A76V, D77N, P88A, N91D, Y141Q, Y141A, N145E, N145V, P146T, P146V, P146K, P148T, P148H, Y150G, Y1505, Y150C, H157Y, A162C, A179K, L182I, L182V, T189G, L192H, S193N, S193K, V196I, S198G, T200W, L210H, F212N, N218E, A248N, L263M, Q270L, S294T, T297M, 5308R, L310R, L333M, Q336M, A354H, C357V, L358F, D359N, L377I, V423H, P426K, K428R, S438A, T447G, T447A, L450V, A462H, A462Q, I469V, I472L, Q498M, L502V, E5171, P520D, P520G, N523S, 1533E, D534A, F576R, F576E, K5771, I582R, Y583F, L587Y or L587W, or any combination thereof including at least 1, 2, 3, 4, 5, 6, 7, 8, 9, 10 or all of these mutations (relative to SEQ ID NO: 14517).

[0314] In certain embodiments, the hyperactive piggyBac or piggyBac-like transposase comprises one or more substitutions of an amino acid that is not wild type, wherein the one or more substitutions a for wild type amino acid comprises a substitution of A2X, K3X, R4X, FSX, Y6X, S7X, A11X, A13X, C15X, M16X, A17X, 518X, 519X, 520X, E21X, E22X, F23X, S24X, G25X, 26X, D27X, S28X, E29X, E42X, E43X, S44X, C46X, S47X, S48X, S49X, T50X, V51X, S52X, A53X, L54X, E55X, E56X, P57X, M58X, E59X, E62X, D63X, V64X, D65X, D66X, L67X, E68X, D69X, Q70X, E71X, A72X, G73X, D74X, R75X, A76X, D77X, A78X, A79X, A80X, G81X, G82X, E83X, P84X, A85X, W86X, G87X, P88X, P89X, C90X, N91X, F92X, P93X, E95X, I96X, P97X, P98X, F99X, T100X, T101X, P103X, G104X, V105X, K106X, V107X, D108X, T109X, N111X, P114X, Il 15X, N116X, F117X, F118X, Q119X, M122X, T123X, E124X, A125X, I126X, L127X, Q128X, D129X, M130X, L132X, Y133X, V126X, Y127X, A138X, E139X, Q140X, Y141X, L142X, Q144X, N145X, P146X, L147X, P148X, Y150X, A151X, A155X, H157X, P158X, I161X, A162X, V168X, T171X, L172X, A173X, M174X, I177X, A179X, L182X, D187X, T188X, T189X, T190X, L192X, S193X, I194X, P195X, V196X, S198X, A199X, T200X, S202X, L208X, L209X, L210X, R211X, F212X, F215X, N217X, N218X, A219X, T220X, A221X, V222X, P224X, D225X, Q226X, P227X, H229X, R231X, H233X, L235X, P237X, I239X, D240X, L242X, S243X, E244X, R244X, F246X, A247X, A248X, V249X, Y250X, T251X, P252X, C253X, Q254X, I256X, C257X, I258X, D259X, E260X, S261X, L262X, L263X, L264X, F265X, K266X, G267X, R268X, L269X, Q270X, F271X, R272X, Q273X, Y274X, I275X, P276X, S277X, K278X, R279X, A280X, R281X, Y282X, G283X, I284X, K285X, F286X, Y287X, K288X, L289X, C290X, E291X, S292X, S293XS294X, G295X, Y296X, T297X, S298X, Y299X, F300X, E304X, L310X, P313X, G314X, P316X, P317X, D318X, L319X, T320X, V321X, K324X, E328X, I330X, S331X, P332X, L333X, L334X, G335X, Q336X, F338X, L340X, D343X, N344X, F345X, Y346X, S347X, L351X, F352X, A354X, L355X, Y356X, C357X, L358X, D359X, T360X, R422X, Y423X, G424X, P426X, K428X, N429X, K430X, P431X, L432X, S434X, K435X, E436X, S438X, K439X, Y440X, G443X, R446X, T447X, L450X, Q451X, N455X, T460X, R461X, A462X, K465X, V467X, G468X, I469X, Y470X, L471X, I472X, M474X, A475X, L476X, R477X, S479X, Y480X, V482XY483X, K484X, A485X, A486X, V487X, P488X, P490X, K491X, S493X, Y494X, Y495X, K496X, Y497T, Q498X, L499X, Q500X, I501X, L502X, P503X, A504X, L505X, L506X, F507X, G508X, G509X, V510X, E511X, E512X, Q513X, T514X, V515X, E517X, M518X, P519X, P520X, S521X, D522X, N523X, V524X, A525X, L527X, I528X, K530X, H531X, F532X, I533X, D534X, T535X, L536X, T539X, P540X, Q546X, K550X, R553X, K554X, R555X, G556X, I557X, R558X, R559X, D560X, T561X, Y564X, P566X, K567X, P569X, R570X, N571X, L574X, C575X, F576X, K577X, P578X, F580X, E581X, I582X, Y583X, T585X, Q586X, L587X, H588X or Y589X (relative to SEQ ID NO: 14517). A list of hyperactive amino acid substitutions can be found in U.S. Pat. No. 10,041,077, the contents of which are incorporated by reference in their entirety.

[0315] In certain embodiments, the piggyBac or piggyBac-like transposase is integration deficient. In certain embodiments, an integration deficient piggyBac or piggyBac-like transposase is a transposase that can excise its corresponding transposon, but that integrates the excised transposon at a lower frequency than a corresponding naturally occurring transposase. In certain embodiments, the piggyBac or piggyBac-like transposase is an integration deficient variant of SEQ ID NO: 14517. In certain embodiments, the integration deficient piggyBac or piggyBac-like transposase is deficient relative to SEQ ID NO: 14517.

[0316] In certain embodiments, the piggyBac or piggyBac-like transposase is active for excision but deficient in integration. In certain embodiments, the integration deficient piggyBac or piggyBac-like transposase comprises a sequence that is at least 90% identical to a sequence of:

| (SEQ ID NO: 14605) | |
|---|---|
| 1 | MAKRFYSAEE AAAHCMASSS EEFSGSDSEY VPPASESDSS TEESWCSSST VSALEEPMEV |
| 61 | DEDVDDLEDQ EAGDRVDAAA GGEPAWGPPC NFPPEIPPFT TVPGVKVDTS NFEPINFFQL |
| 121 | FMTEAILQDM VLYTNVYAEQ YLTQNPLPRY ARAHAWHPTD IAEMKRFVGL TLAMGLIKAN |
| 181 | SLESYWDTTT VLSIPVFSAT MSRNRYQLLL KFLHFNNEAT AVPPDQPGHD RLHKLRPLID |
| 241 | SLSERFAAVY TPCQNICIDE SLLLFKGRLQ FRQYIPSKRA RYGIKFYKLC ESSSGYTSYF |
| 301 | LIYEGKDSKL DPPGCPPDLT VSGKIVWELI SPLLGQGFHL YVDNFYSSIP LFTALYCLDT |
| 361 | PACGTINRNR KGLPRALLDK KLNRGETYAL RKNELLAIKF FDKKNVFMLT SIHDESVIRE |
| 421 | QRVGRPPKNK PLCSKEYSKY MGGVDRTDQL QHYYNATRKT RAWYKKVGIY LIQMALRNSY |
| 481 | IVYKAAVPGP KLSYYKYQLQ ILPALLFGGV EEQTVPEMPP SDNVARLIGK HFIDTLPPTP |
| 541 | GKQRPQKGCK VCRKRGIRRD TRYYCPKCPR NPGLCFKPCF EIYHTQLHYG RR. |

[0317] In certain embodiments, the integration deficient piggyBac or piggyBac-like transposase comprises a sequence that is at least 90% identical to a sequence of:

| (SEQ ID NO: 14604) | |
|---|---|
| 1 | MAKRFYSAEE AAAHCMASSS EEFSGSDSEY VPPASESDSS TEESWCSSST VSALEEPMEV |
| 61 | DEDVDDLEDQ EAGDRADAAA GGEPAWGPPC NFPPEIPPFT TVPGVKVDTS NFEPINFFQL |
| 121 | FMTEAILQDM VLYTNVYAEQ YLTQVPLPRY ARAHAWHPTD IAEMKRFVGL TLAMGLIKAN |
| 181 | SLESYWDTTT VLNIPVFSAT MSRNRYQLLL RFLEFNNEAT AVPPDQPGHD RLHKLRPLID |
| 241 | SLSERFAAVY TPCQNICIDE SLLLFKGRLQ FRQYIPSKRA RYGIKFYKLC ESSSGYTSYF |
| 301 | LIYEGKDSKL DPPGCPPDLT VSGKIVWELI SPLLGQGFHL YVDNFYSSIP LFTALYCLDT |
| 361 | PACGTINRNR KGLPRALLDK KLNRGETYAL RKNELLAIKF FDKKNVFMLT SIHDESVIRE |
| 421 | QRVGRPPKNK PLCSKEYSKY MGGVDRTDQL QHYYNATRKT RAWYKKVGIY LIQMALRNSY |
| 481 | IVYKAAVPGP KLSYYKYQLQ ILPALLFGGV EEQTVPEMPP SDNVARLIGK HFIDTLPPTP |
| 541 | GKQRPQKGCK VCRKRGIRRD TRYYCPKCPR NPGLCFKPCF EIYHTQLHY. |

[0318] In certain embodiments, the integration deficient piggyBac or piggyBac-like transposase comprises a sequence that is at least 90% identical to a sequence of:

| (SEQ ID NO: 14611) | |
|---|---|
| 1 | MAKRFYSAEE AAAHCMASSS EEFSGSDSEY VPPASESDSS TEESWCSSST VSALEEPMEV |
| 61 | DEDVDDLEDQ EAGDRADAAA GGEPAWGPPC NFPPEIPPFT TVPGVKVDTS NFEPINFFQL |
| 121 | FMTEAILQDM VLYTNVYAEQ YLTQNVLPRY ARAHAWHPTD IAEMKRFVGL TLAMGLIKAN |
| 181 | SLESYWDTTT VLSIPVFSAT MSRNRYQLLL RFLHFNNDAT AVPPDQPGHD RLHKLRPLID |
| 241 | SLTERFAAVY TPCQNICIDE SLLLFKGRLQ FRQYIPSKRA RYGIKFYKLC ESSSGYTSYF |
| 301 | LIYEGKDSKL DPPGCPPDLT VSGKIVWELI SPLLGQGFHL YVDNFYSSIP LFTALYCLDT |
| 361 | PACGTINRNR KGLPRALLDK KLNRGETYAL RKNELLAIKF FDKKNVFMLT SIHDESVIRE |
| 421 | QRVGRPPKNK PLCSKEYSKY MGGVDRTDQL QHYYNATRKT RAWYKKVGIY LIQMALRNSY |
| 481 | IVYKAAVPGP KLSYYKYQLQ ILPALLFGGV EEQTVPEMPP SDNVARLIGK HFIDTLPPTP |
| 541 | GKQRPQKGCK VCRKRGIRRD TRYYCPKCPR NPGLCFKPCF EIYHTQLHYG RR. |

[0319] In certain embodiments, the integration deficient piggyBac or piggyBac-like transposase comprises SEQ ID NO: 14611. In certain embodiments, the integration deficient piggyBac or piggyBac-like transposase comprises a sequence that is at least 90% identical to a sequence of:

| (SEQ ID NO: 14612) | |
|---|---|
| 1 | MAKRFYSAEE AAAHCMASSS EEFSGSDSEY VPPASESDSS TEESWCSSST VSALEEPMEV |
| 61 | DEDVDDLEDQ EAGDRADAAP GGEPAWGPPC NFPPEIPPFT TVPGVKVDTS NFEPINFFQL |
| 121 | FMTEAILQDM VLYTNVYAEQ YLTQVPLPRY ARAHAWHPTD IAEMKRFVGL TLAMGLIKAN |
| 181 | SLESYWDTTT VLSIPVFSAT MSRNRYQLLL RFLHFNNEAT AVPPDQPGHD RLHKLRPLID |
| 241 | SLSERFAAVY TPCQNICIDE SLLLFKGRLQ FRQYIPSKRA RYGIKFYKLC ESSSGYTSYF |
| 301 | LIYEGKDSKL DPPGCPPDLT VSGKIVWELI SPLLGQGFHL YVDNFYSSIP LFTALYCLDT |
| 361 | PACGTINRNR KGLPRALLDK KLNRGETYAL RKNELLAIKF FDKKNVFMLT SIHDESVIRE |
| 421 | QRVGRPPKNK PLCSKEYSKY MGGVDRTDQL QHYYNATRKT RAWYKKVGIY LIQMALRNSY |
| 481 | IVYKAAVPGP KLSYYKYQLQ ILPALLFGGV EEQTVPEMPP SDNVARLIGK HFIDTLPPTP |
| 541 | GKQRPQKGCK VCRKRGIRRD TRYYCPKCPR NPGLCFKPCF EIYHTQLHYG RR. |

[0320] In certain embodiments, the integration deficient piggyBac or piggyBac-like transposase comprises SEQ ID NO: 14612. In certain embodiments, the integration deficient piggyBac or piggyBac-like transposase comprises a sequence that is at least 90% identical to a sequence of:

| (SEQ ID NO: 14613) | |
|---|---|
| 1 | MAKRFYSAEE AAAHCMASSS EEFSGSDSEY VPPASESDSS TEESWCSSST VSALEEPMEV |
| 61 | DEDVDDLEDQ EAGDRADAAA GGEPAWGPPC NFPPEIPPFT TVPGVKVDTS NFEPINFFQL |
| 121 | FMTEAILQDM VLYTNVYAEQ YLTQVPLPRY ARAHAWHPTD IAEMKRFVGL TLAMGLIKAN |
| 181 | SLESYWDTTT VLNIPVFSAT MSRNRYQLLL RFLEFNNNAT AVPPDQPGHD RLHKLRPLID |
| 241 | SLSERFAAVY TPCQNICIDE SLLLFKGRLQ FRQYIPSKRA RYGIKFYKLC ESSSGYTSYF |
| 301 | LIYEGKDSKL DPPGCPPDLT VSGKIVWELI SPLLGQGFHL YVDNFYSSIP LFTALYCLDT |
| 361 | PACGTINRNR KGLPRALLDK KLNRGETYAL RKNELLAIKF FDKKNVFMLT SIHDESVIRE |
| 421 | QRVGRPPKNK PLCSKEYSKY MGGVDRTDQL QHYYNATRKT RAWYKKVGIY LIQMALRNSY |
| 481 | IVYKAAVPGP KLSYYKYQLQ ILPALLFGGV EEQTVPEMPP SDNVARLIGK HFIDTLPPTP |
| 541 | GKQRPQKGCK VCRKRGIRRD TRYYCPKCPR NPGLCFKPCF EIYHTQLHYG RR. |

[0321] In certain embodiments, the integration deficient piggyBac or piggyBac-like transposase comprises SEQ ID NO: 14613. In certain embodiments, the integration deficient piggyBac or piggyBac-like transposase comprises an amino acid substitution wherein the Asn at position 218 is replaced by a Glu or an Asp (N218D or N218E) (relative to SEQ ID NO: 14517).

[0322] In certain embodiments, the excision competent, integration deficient piggyBac or piggyBac-like transposase comprises one or more substitutions of an amino acid that is not wild type, wherein the one or more substitutions a for wild type amino acid comprises a substitution of A2X, K3X, R4X, FSX, Y6X, S7X, ABX, E9X, E10X, A11X, A12X, A13X, H14X, C15X, M16X, A17X, 518X, 519X, 520X, E21X, E22X, F23X, S24X, G25X, 26X, D27X, S28X, E29X, V31X, P32X, P33X, A34X, 535X, E36X, S37X, D38X, S39X, 540X, T41X, E42X, E43X, S44X, W45X, C46X, S47X, S48X, S49X, T50X, V51X, S52X, A53X, L54X, E55X, E56X, P57X, M58X, E59X, V60X, M122X, T123X, E124X, A125X, L127X, Q128X, D129X, L132X, Y133X, V126X, Y127X, E139X, Q140X, Y141X, L142X, T143X, Q144X, N145X, P146X, L147X, P148X, R149X, Y150X, A151X, H154X, H157X, P158X, T159X, D160X, I161X, A162X, E163X, M164X, K165X, R166X, F167X, V168X, G169X, L170X, T171X, L172X, A173X, M174X, G175X, L176X, I177X, K178X, A179X, N180X, 5181X, L182X, 5184X, Y185X, D187X, T188X, T189X, T190X, V191X, L192X, 5193X, I194X, P195X, V196X, F197X, 5198X, A199X, T200X, M201X, 5202X, R203X, N204X, R205X, Y206X, Q207X, L208X, L209X, L210X, R211X, F212X, L213X, H241X, F215X, N216X, N217X, N218X, A219X, T220X, A221X, V222X, P223X, P224X, D225X, Q226X, P227X, G228X, H229X, D230X, R231X, H233X, K234X, L235X, R236X, L238X, I239X, D240X, L242X, S243X, E244X, R244X, F246X, A247X, A248X, V249X, Y250X, T251X, P252X, C253X, Q254X, N255X, I256X, C257X, I258X, D259X, E260X, S261X, L262X, L263X, L264X, F265X, K266X, G267X, R268X, L269X, Q270X, F271X, R272X, Q273X, Y274X, I275X, P276X, S277X, K278X, R279X, A280X, R281X, Y282X, G283X, I284X, K285X, F286X, Y287X, K288X, L289X, C290X, E291X, S292X, S293X, S294X, G295X, Y296X, T297X, S298X, Y299X, F300X, I302X, E304X, G305X, K306X, D307X, S308X, K309X, L310X, D311X, P312X, P313X, G314X, C315X, P316X, P317X, D318X, L319X, T320X, V321X, S322X, G323X, K324X, I325X, V326X, W327X, E328X, L329X, 1330X, S331X, P332X, L333X, L334X, G335X, Q336X, F338X, H339X, L340X, V342X, N344X, F345X, Y346X, S347X, S348X, I349X, L351X, T353X, A354X, Y356X, C357X, L358X, D359X, T360X, P361X, A362X, C363X, G364X, I366X, N367X, R368X, D369X, K371X, G372X, L373X, R375X, A376X, L377X, L378X, D379X, K380X, K381X, L382X, N383X, R384XG385X, T387X, Y388X, A389X, L390X, K392X, N393X, E394X, A397X, K399X, F400X, F401X, D402X, N405X, L406X, L409X, R422X, Y423X, G424X, E425X, P426X, K428X, N429X, K430X, P431X, L432X, S434X, K435X, E436X, S438X, K439X, Y440X, G442X, G443X, V444X, R446X, T447X, L450X, Q451X, H452X, N455X, T457X, R458X, T460X, R461X, A462X, Y464X, K465X, V467X, G468X, I469X, L471X, I472X, Q473X, M474X, L476X, R477X, N478X, S479X, Y480X, V482XY483X, K484X, A485X, A486X, V487X, P488X, G489X, P490X, K491X, L492X, S493X, Y494X, Y495X, K496X, Q498X, L499X, Q500X, I501X, L502X, P503X, A504X, L505X, L506X, F507X, G508X, G509X, V510X, E511X, E512X, Q513X, T514X, V515X, E517X, M518X, P519X, P520X, S521X, D522X, N523X, V524X, A525X, L527X, I528X, G529X, K530X, F532X, I533X, D534X, T535X, L536X, P537X, P538X, T539X, P540X, G541X, F542X, Q543X, R544X, P545X, Q546X, K547X, G548X, C549X, K550X, V551X, C552X, R553X, K554X, R555X, G556X, I557X, R558X, R559X, D560X, T561X, R562X, Y563X, Y564X, C565X, P566X, K567X, C568X, P569X, R570X, N571X, P572X, G573X, L574X, C575X, F576X, K577X, P578X, C579X, F580X, E581X, I582X, Y583X, H584X, T585X, Q586X, L587X, H588X or Y589X (relative to SEQ ID NO: 14517). A list of excision competent, integration deficient amino acid substitutions can be found in U.S. Pat. No. 10,041,077, the contents of which are incorporated by reference in their entirety.

[0323] In certain embodiments, the piggyBac or piggyBac-like transposase is fused to a nuclear localization signal. In certain embodiments, SEQ ID NO: 14517 or SEQ ID NO: 14518 is fused to a nuclear localization signal. In certain embodiments, the amino acid sequence of the piggyBac or piggyBac like transposase fused to a nuclear localization signal is encoded by a polynucleotide sequence comprising:

| (SEQ ID NO: 14626) | |
|---|---|
| 1 | atggcaccca aaaagaaacg taaagtgatg gccaaaagat tttacagcgc cgaagaagca |
| 61 | gcagcacatt gcatggcatc gtcatccgaa gaattctcgg ggagcgattc cgaatatgtc |
| 121 | ccaccggcct cggaaagcga ttcgagcact gaggagtcgt ggtgttcctc ctcaactgtc |
| 181 | tcggctcttg aggagccgat ggaagtggat gaggatgtgg acgacttgga ggaccaggaa |
| 241 | gccggagaca gggccgacgc tgccgcggga ggggagccgg cgtggggacc tccatgcaat |
| 301 | tttcctcccg aaatcccacc gttcactact gtgccgggag tgaaggtcga cacgtccaac |
| 361 | ttcgaaccga tcaatttctt tcaactcttc atgactgaag cgatcctgca agatatggtg |
| 421 | ctctacacta atgtgtacgc cgagcagtac ctgactcaaa acccgctgcc tcgctacgcg |
| 481 | agagcgcatg cgtggcaccc gaccgatatc gcggagatga agcggttcgt gggactgacc |
| 541 | ctcgcaatgg gcctgatcaa ggccaacagc ctcgagtcat actgggatac cacgactgtg |
| 601 | cttagcattc cggtgttctc cgctaccatg tcccgtaacc gctaccaact cctgctgcgg |
| 661 | ttcctccact tcaacaacaa tgcgaccgct gtgccacctg accagccagg acacgacaga |
| 721 | ctccacaagc tgcggccatt gatcgactcg ctgagcgagc gattcgccgc ggtgtacacc |
| 781 | ccttgccaaa acatttgcat cgacgagtcg cttctgctgt ttaaaggccg gcttcagttc |
| 841 | cgccagtaca tcccatcgaa gcgcgctcgc tatggtatca aattctacaa actctgcgag |
| 901 | tcgtccagcg gctacacgtc atacttcttg atctacgagg ggaaggactc taagctggac |
| 961 | ccaccggggt gtccaccgga tcttactgtc tccggaaaaa tcgtgtggga actcatctca |
| 1021 | cctctcctcg gacaaggctt tcatctctac gtcgacaatt tctactcatc gatccctctg |
| 1081 | ttcaccgccc tctactgcct ggatactcca gcctgtggga ccattaacag aaaccggaag |
| 1141 | ggtctgccga gagcactgct ggataagaag ttgaacaggg gagagactta cgcgctgaga |
| 1201 | aagaacgaac tcctcgccat caaattcttc gacaagaaaa atgtgtttat gctcacctcc |
| 1261 | atccacgacg aatccgtcat ccgggagcag cgcgtgggca ggccgccgaa aaacaagccg |
| 1321 | ctgtgctcta aggaatactc caagtacatg gggggtgtcg accggaccga tcagctgcag |
| 1381 | cattactaca acgccactag aaagacccgg gcctggtaca agaaagtcgg catctacctg |
| 1441 | atccaaatgg cactgaggaa ttcgtatatt gtctacaagg ctgccgttcc gggcccgaaa |
| 1501 | ctgtcatact acaagtacca gcttcaaatc ctgccggcgc tgctgttcgg tggagtggaa |
| 1561 | gaacagactg tgcccgagat gccgccatcc gacaacgtgg cccggttgat cggaaagcac |
| 1621 | ttcattgata ccctgcctcc gacgcctgga aagcagcggc cacagaaggg atgcaaagtt |
| 1681 | tgccgcaagc gcggaatacg gcgcgatacc cgctactatt gcccgaagtg cccccgcaat |
| 1741 | cccggactgt gtttcaagcc ctgttttgaa atctaccaca cccagttgca ttac. |

[0324] In certain embodiments, the piggyBac or piggyBac-like transposon is isolated or derived from Xenopus tropicalis. In certain embodiments, the piggyBac or piggyBac-like transposon comprises a sequence of:

| (SEQ ID NO: 14519) | |
|---|---|
| 1 | ttaacctttt tactgccaat gacgcatggg atacgtcgtg gcagtaaaag ggcttaaatg |
| 61 | ccaacgacgc gtcccatacg ttgttggcat tttaagtctt ctctctgcag cggcagcatg |
| 121 | tgccgccgct gcagagagtt tctagcgatg acagcccctc tgggcaacga gccggggggg |
| 181 | ctgtc. |

[0325] In certain embodiments, the piggyBac or piggyBac-like transposon comprises a sequence of:

| (SEQ ID NO: 14520) | |
|---|---|
| 1 | tttgcatttt tagacattta gaagcctata tcttgttaca gaattggaat tacacaaaaa |
| 61 | ttctaccata ttttgaaagc ttaggttgtt ctgaaaaaaa caatatattg ttttcctggg |
| 121 | taaactaaaa gtcccctcga ggaaaggccc ctaaagtgaa acagtgcaaa acgttcaaaa |
| 181 | actgtctggc aatacaagtt ccactttgac caaaacggct ggcagtaaaa gggttaa. |

[0326] In certain embodiments, the piggyBac or piggyBac-like transposon comprises SEQ ID NO: 14519 and SEQ ID NO: 14520. In certain embodiments, the piggyBac or piggyBac-like transposon comprises a sequence of:

| (SEQ ID NO: 14521) | |
|---|---|
| 1 | ttaacccttt gcctgccaat cacgcatggg atacgtcgtg gcagtaaaag ggcttaaatg |
| 61 | ccaacgacgc gtcccatacg ttgttggcat tttaagtctt ctctctgcag cggcagcatg |
| 121 | tgccgccgct gcagagagtt tctagcgatg acagcccctc tgggcaacga gccggggggg |
| 181 | ctgtc. |

[0327] In certain embodiments, the piggyBac or piggyBac-like transposon comprises a sequence of:

| (SEQ ID NO: 14522) | |
|---|---|
| 1 | tttgcatttt tagacattta gaagcctata tcttgttaca gaattggaat tacacaaaaa |
| 61 | ttctaccata ttttgaaagc ttaggttgtt ctgaaaaaaa caatatattg ttttcctggg |
| 121 | taaactaaaa gtcccctcga ggaaaggccc ctaaagtgaa acagtgcaaa acgttcaaaa |
| 181 | actgtctggc aatacaagtt ccactttggg acaaatcggc tggcagtgaa agggttaa. |

[0328] In certain embodiments, the piggyBac or piggyBac-like transposon comprises a sequence of:

| (SEQ ID NO: 14523) | |
|---|---|
| 1 | ttaacctttt tactgccaat gacgcatggg atacgtcgtg gcagtaaaag ggcttaaatg |
| 61 | ccaacgacgc gtcccatacg ttgttggcat tttaattctt ctctctgcag cggcagcatg |
| 121 | tgccgccgct gcagagagtt tctagcgatg acagcccctc tgggcaacga gccggggggg |
| 181 | ctgtc. |

[0329] In certain embodiments, the piggyBac or piggyBac-like transposon comprises SEQ ID NO: 14520 and SEQ ID NO: 14519, SEQ ID NO: 14521 or SEQ ID NO: 14523. In certain embodiments, the piggyBac or piggyBac-like transposon comprises SEQ ID NO: 14522 and SEQ ID NO: 14519, SEQ ID NO: 14521 or SEQ ID NO: 14523. In certain embodiments, the piggyBac or piggyBac-like transposon comprises one end comprising at least 14, 16, 18, 20, 30 or 40 contiguous nucleotides from SEQ ID NO: 14519, SEQ ID NO: 14521 or SEQ ID NO: 14523. In certain embodiments, the piggyBac or piggyBac-like transposon comprises one end comprising at least 14, 16, 18, 20, 30 or 40 contiguous nucleotides from SEQ ID NO: 14520 or SEQ ID NO: 14522. In certain embodiments, the piggyBac or piggyBac-like transposon comprises one end with at least 90% identity to SEQ ID NO: 14519, SEQ ID NO: 14521 or SEQ ID NO: 14523. In certain embodiments, the piggyBac or piggyBac-like transposon comprises one end with at least 90% identity to SEQ ID NO: 14520 or SEQ ID NO: 14522. In one embodiment, one transposon end is at least 90% identical to SEQ ID NO: 14519 and the other transposon end is at least 90% identical to SEQ ID NO: 14520.

[0330] In certain embodiments, the piggyBac or piggyBac-like transposon comprises a sequence of TTAACCTTTTTACTGCCA (SEQ ID NO: 14524). In certain embodiments, the piggyBac or piggyBac-like transposon comprises a sequence of TTAACCCTTTGCCTGCCA (SEQ ID NO: 14526). In certain embodiments, the piggyBac or piggyBac-like transposon comprises a sequence of TTAACCYTTTTACTGCCA (SEQ ID NO: 14527). In certain embodiments, the piggyBac or piggyBac-like transposon comprises a sequence of TGGCAGTAAAAGGGTTAA (SEQ ID NO: 14529). In certain embodiments, the piggyBac or piggyBac-like transposon comprises a sequence of TGGCAGTGAAAGGGTTAA (SEQ ID NO: 14531). In certain embodiments, the piggyBac or piggyBac-like transposon comprises a sequence of TTAACCYTTTKMCTGCCA (SEQ ID NO: 14533). In certain embodiments, one end of the piggyBac or piggyBac-like transposon comprises a sequence selected from SEQ ID NO: 14524, SEQ ID NO: 14526 and SEQ ID NO: 14527. In certain embodiments, one end of the piggyBac™ (PB) or piggyBac-like transposon comprises a sequence selected from SEQ ID NO: 14529 and SEQ ID NO: 14531. In certain embodiments, each inverted terminal repeat of the piggyBac or piggyBac-like transposon comprises a sequence of ITR sequence of CCYTTTKMCTGCCA (SEQ ID NO: 14563). In certain embodiments, each end of the piggyBac™ (PB) or piggyBac-like transposon comprises SEQ ID NO: 14563 in inverted orientations. In certain embodiments, one ITR of the piggyBac or piggyBac-like transposon comprises a sequence selected from SEQ ID NO: 14524, SEQ ID NO: 14526 and SEQ ID NO: 14527. In certain embodiments, one ITR of the piggyBac or piggyBac-like transposon comprises a sequence selected from SEQ ID NO: 14529 and SEQ ID NO: 14531. In certain embodiments, the piggyBac or piggyBac like transposon comprises SEQ ID NO: 14533 in inverted orientation in the two transposon ends.

[0331] In certain embodiments, The piggyBac or piggyBac-like transposon may have ends comprising SEQ ID NO: 14519 and SEQ ID NO: 14520 or a variant of either or both of these having at least 90% sequence identity to SEQ ID NO: 14519 or SEQ ID NO: 14520, and the piggyBac or piggyBac-like transposase has the sequence of SEQ ID NO: 14517 or a variant showing at least %, 10%, 15%, 20%, 25%, 30%, 35%, 40%, 45%, 50%, 55%, 60%, 65%, 70%, 75%, 80%, 85%, 90%, 95%, 99% or any percentage in between sequence identity to SEQ ID NO: 14517 or SEQ ID NO: 14518. In certain embodiments, one piggyBac or piggyBac-like transposon end comprises at least 14 contiguous nucleotides from SEQ ID NO: 14519, SEQ ID NO: 14521 or SEQ ID NO: 14523, and the other transposon end comprises at least 14 contiguous nucleotides from SEQ ID NO: 14520 or SEQ ID NO: 14522. In certain embodiments, one transposon end comprises at least 15, at least 16, at least 17, at least 18, at least 19, at least 20, at least 22, at least 25, at least 30 contiguous nucleotides from SEQ ID NO: 14519, SEQ ID NO: 14521 or SEQ ID NO: 14523, and the other transposon end comprises at least 15, at least 16, at least 17, at least 18, at least 19, at least 20, at least 22, at least 25 or at least 30 contiguous nucleotides from SEQ ID NO: 14520 or SEQ ID NO: 14522.

[0332] In certain embodiments, the piggyBac or piggyBac-like transposase recognizes a transposon end with a left sequence corresponding to SEQ ID NO: 14519, and a right sequence corresponding to SEQ ID NO: 14520. It will excise the transposon from one DNA molecule by cutting the DNA at the 5′-TTAA-3′ sequence at the left end of one transposon end to the 5′-TTAA-3′ at the right end of the second transposon end, including any heterologous DNA that is placed between them, and insert the excised sequence into a second DNA molecule. In certain embodiments, truncated and modified versions of the left and right transposon ends will also function as part of a transposon that can be transposed by the piggyBac or piggyBac-like transposase. For example, the left transposon end can be replaced by a sequence corresponding to SEQ ID NO: 14521 or SEQ ID NO: 14523, the right transposon end can be replaced by a shorter sequence corresponding to SEQ ID NO: 14522. In certain embodiments, the left and right transposon ends share an 18 bp almost perfectly repeated sequence at their ends (5′-TTAACCYTTTKMCTGCCA: SEQ ID NO: 14533) that includes the 5′-TTAA-3′ insertion site, which sequence is inverted in the orientation in the two ends. That is in SEQ ID NO: 14519 and SEQ ID NO: 14523 the left transposon end begins with the sequence 5′-TTAACCTTTTTACTGCCA-3′ (SEQ ID NO: 14524), or in SEQ ID NO: 14521 the left transposon end begins with the sequence 5′-TTAACCCTTTGCCTGCCA-3′ (SEQ ID NO: 14526); the right transposon ends with approximately the reverse complement of this sequence: in SEQ ID NO: 14520 it ends 5′ TGGCAGTAAAAGGGTTAA-3′ (SEQ ID NO: 14529), in SEQ ID NO: 14522 it ends 5′-TGGCAGTGAAAGGGTTAA-3′ (SEQ ID NO: 14531.) One embodiment of the invention is a transposon that comprises a heterologous polynucleotide inserted between two transposon ends each comprising SEQ ID NO: 14533 in inverted orientations in the two transposon ends. In certain embodiments, one transposon end comprises a sequence selected from SEQ ID NOS: 14524, SEQ ID NO: 14526 and SEQ ID NO: 14527. In some embodiments, one transposon end comprises a sequence selected from SEQ ID NO: 14529 and SEQ ID NO: 14531.

[0333] In certain embodiments, the piggyBac™ (PB) or piggyBac-like transposon is isolated or derived from Xenopus tropicalis. In certain embodiments, the piggyBac or piggyBac-like transposon comprises at a sequence of:

| (SEQ ID NO: 14573) | |
|---|---|
| 1 | ccctttgcct gccaatcacg catgggatac gtcgtggcag taaaagggct taaatgccaa |
| 61 | cgacgcgtcc catacgtt. |

[0334] In certain embodiments, the piggyBac or piggyBac-like transposon comprises at a sequence of:

| (SEQ ID NO: 14574) | |
|---|---|
| 1 | cctgggtaaa ctaaaagtcc cctcgaggaa aggcccctaa agtgaaacag tgcaaaacgt |
| 61 | tcaaaaactg tctggcaata caagttccac tttgggacaa atcggctggc agtgaaaggg. |

[0335] In certain embodiments, the piggyBac or piggyBac-like transposon comprises at least 16 contiguous bases from SEQ ID NO: 14573 or SEQ ID NO: 14574, and inverted terminal repeat of CCYTTTBMCTGCCA (SEQ ID NO: 14575).

[0336] In certain embodiments, the piggyBac or piggyBac-like transposon comprises at a sequence of:

| (SEQ ID NO: 14579) | |
|---|---|
| 1 | ccctttgcct gccaatcacg catgggatac gtcgtggcag taaaagggct taaatgccaa |
| 61 | cgacgcgtcc catacgttgt tggcatttta agtcttctct ctgcagcggc agcatgtgcc |
| 121 | gccgctgcag agagtttcta gcgatgacag cccctctggg caacgagccg ggggggctgt |
| 181 | c. |

[0337] In certain embodiments, the piggyBac or piggyBac-like transposon comprises at a sequence of:

| (SEQ ID NO: 14580) | |
|---|---|
| 1 | cctttttact gccaatgacg catgggatac gtcgtggcag taaaagggct taaatgccaa |
| 61 | cgacgcgtcc catacgttgt tggcatttta attcttctct ctgcagcggc agcatgtgcc |
| 121 | gccgctgcag agagtttcta gcgatgacag cccctctggg caacgagccg ggggggctgt |
| 181 | c. |

[0338] In certain embodiments, the piggyBac or piggyBac-like transposon comprises at a sequence of:

| (SEQ ID NO: 14581) | |
|---|---|
| 1 | cctttttact gccaatgacg catgggatac gtcgtggcag taaaagggct taaatgccaa |
| 61 | cgacgcgtcc catacgttgt tggcatttta agtcttctct ctgcagcggc agcatgtgcc |
| 121 | gccgctgcag agagtttcta gcgatgacag cccctctggg caacgagccg ggggggctgt |
| 181 | c. |

[0339] In certain embodiments, the piggyBac or piggyBac-like transposon comprises at a sequence of:

| (SEQ ID NO: 14582) | |
|---|---|
| 1 | cctttttact gccaatgacg catgggatac gtcgtggcag taaaagggct taaatgccaa |
| 61 | cgacgcgtcc catacgttgt tggcatttta agtcttctct ctgcagcggc agcatgtgcc |
| 121 | gccgctgcag agag. |

[0340] In certain embodiments, the piggyBac or piggyBac-like transposon comprises at a sequence of:

| (SEQ ID NO: 14583) | |
|---|---|
| 1 | cctttttact gccaatgacg catgggatac gtcgtggcag taaaagggct taaatgccaa |
| 61 | cgacgcgtcc catacgttgt tggcatttta agtctt. |

[0341] In certain embodiments, the piggyBac or piggyBac-like transposon comprises at a sequence of:

| (SEQ ID NO: 14584) | |
|---|---|
| 1 | ccctttgcct gccaatcacg catgggatac gtcgtggcag taaaagggct taaatgccaa |
| 61 | cgacgcgtcc catacgttgt tggcatttta agtctt . |

[0342] In certain embodiments, the piggyBac or piggyBac-like transposon comprises at a sequence of:

| (SEQ ID NO: 14585) | |
|---|---|
| 1 | ttatcctttt tactgccaat gacgcatggg atacgtcgtg gcagtaaaag ggcttaaatg |
| 61 | ccaacgacgc gtcccatacg ttgttggcat tttaagtctt ctctctgcag cggcagcatg |
| 121 | tgccgccgct gcagagagtt tctagcgatg acagcccctc tgggcaacga gccggggggg |
| 181 | ctgtc. |

[0343] In certain embodiments, the piggyBac or piggyBac-like transposon comprises at a sequence of:

| (SEQ ID NO: 14586) | |
|---|---|
| 1 | tttgcatttt tagacattta gaagcctata tcttgttaca gaattggaat tacacaaaaa |
| 61 | ttctaccata ttttgaaagc ttaggttgtt ctgaaaaaaa caatatattg ttttcctggg |
| 121 | taaactaaaa gtcccctcga ggaaaggccc ctaaagtgaa acagtgcaaa acgttcaaaa |
| 181 | actgtctggc aatacaagtt ccactttggg acaaatcggc tggcagtgaa aggg. |

[0344] In certain embodiments, the piggyBac or piggyBac-like transposon comprises a left transposon end sequence selected from SEQ ID NO: 14573 and SEQ ID NOs: 14579-14585. In certain embodiments, the left transposon end sequence is preceded by a left target sequence. In certain embodiments, the piggyBac or piggyBac-like transposon comprises at a sequence of:

| (SEQ ID NO: 14587) | |
|---|---|
| 1 | tttgcatttt tagacattta gaagcctata tcttgttaca gaattggaat tacacaaaaa |
| 61 | ttctaccata ttttgaaagc ttaggttgtt ctgaaaaaaa caatatattg ttttcctggg |
| 121 | taaactaaaa gtcccctcga ggaaaggccc ctaaagtgaa acagtgcaaa acgttcaaaa |
| 181 | actgtctggc aatacaagtt ccactttgac caaaacggct ggcagtaaaa ggg. |

[0345] In certain embodiments, the piggyBac or piggyBac-like transposon comprises at a sequence of:

| (SEQ ID NO: 14588) | |
|---|---|
| 1 | ttgttctgaa aaaaacaata tattgttttc ctgggtaaac taaaagtccc ctcgaggaaa |
| 61 | ggcccctaaa gtgaaacagt gcaaaacgtt caaaaactgt ctggcaatac aagttccact |
| 121 | ttgaccaaaa cggctggcag taaaaggg. |

[0346] In certain embodiments, the piggyBac or piggyBac-like transposon comprises at a sequence of:

| (SEQ ID NO: 14589) | |
|---|---|
| 1 | tttgcatttt tagacattta gaagcctata tcttgttaca gaattggaat tacacaaaaa |
| 61 | ttctaccata ttttgaaagc ttaggttgtt ctgaaaaaaa caatatattg ttttcctggg |
| 121 | taaactaaaa gtcccctcga ggaaaggccc ctaaagtgaa acagtgcaaa acgttcaaaa |
| 181 | actgtctggc aatacaagtt ccactttgac caaaacggct ggcagtaaaa gggttat. |

[0347] In certain embodiments, the piggyBac or piggyBac-like transposon comprises at a sequence of:

| (SEQ ID NO: 14590) | |
|---|---|
| 1 | ttgttctgaa aaaaacaata tattgttttc ctgggtaaac taaaagtccc ctcgaggaaa |
| 61 | ggcccctaaa gtgaaacagt gcaaaacgtt caaaaactgt ctggcaatac aagttccact |
| 121 | ttgggacaaa tcggctggca gtgaaaggg. |

[0348] In certain embodiments, the piggyBac or piggyBac-like transposon comprises a right transposon end sequence selected from SEQ ID NO: 14574 and SEQ ID NOs: 14587-14590. In certain embodiments, the right transposon end sequence is followed by a right target sequence. In certain embodiments, the left and right transposon ends share a 14 repeated sequence inverted in orientation in the two ends (SEQ ID NO: 14575) adjacent to the target sequence. In certain embodiments, the piggyBac or piggyBac-like transposon comprises a left transposon end comprising a target sequence and a sequence that is selected from SEQ ID NOs: 14582-14584 and 14573, and a right transposon end comprising a sequence selected from SEQ ID NOs: 14588-14590 and 14574 followed by a right target sequence.

[0349] In certain embodiments, the left transposon end of the piggyBac or piggyBac-like transposon comprises

| | |
|---|---|
| 1 | atcacgcatg ggatacgtcg tggcagtaaa agggcttaaa tgccaacgac gcgtcccata |
| 61 | cgtt |

(SEQ ID NO: 14591), and an ITR. In certain embodiments, the left transposon end comprises

| | |
|---|---|
| 1 | atgacgcatg ggatacgtcg tggcagtaaa agggcttaaa tgccaacgac gcgtcccata |
| 61 | cgttgttggc attttaagtc tt |

(SEQ ID NO: 14592) and an ITR. In certain embodiments, the right transposon end of the piggyBac or piggyBac-like transposon comprises

| | |
|---|---|
| 1 | cctgggtaaa ctaaaagtcc cctcgaggaa aggcccctaa agtgaaacag tgcaaaacgt |
| 61 | tcaaaaactg tctggcaata caagttccac tttgggacaa atcggc |

(SEQ ID NO: 14593) and an ITR. In certain embodiments, the right transposon end comprises

| | |
|---|---|
| 1 | ttgttctgaa aaaaacaata tattgttttc ctgggtaaac taaaagtccc ctcgaggaaa |
| 61 | ggcccctaaa gtgaaacagt gcaaaacgtt caaaaactgt ctggcaatac aagttccact |
| 121 | ttgaccaaaa cggc |

### (SEQ ID NO: 14594) and an ITR.

[0350] In certain embodiments, one transposon end comprises a sequence that is at least 90%, at least 95%, at least 99% or any percentage in between identical to SEQ ID NO: 14573 and the other transposon end comprises a sequence that is at least 90%, at least 95%, at least 99% or any percentage in between identical to SEQ ID NO: 14574. In certain embodiments, one transposon end comprises at least 14, at least 16, at least 18, at least 20 or at least 25 contiguous nucleotides from SEQ ID NO: 14573 and one transposon end comprises at least 14, at least 16, at least 18, at least 20 or at least 25 contiguous nucleotides from SEQ ID NO: 14574. In certain embodiments, one transposon end comprises at least 14, at least 16, at least 18, at least 20 from SEQ ID NO: 14591, and the other end comprises at least 14, at least 16, at least 18, at least 20 from SEQ ID NO: 14593. In certain embodiments, each transposon end comprises SEQ ID NO: 14575 in inverted orientations.

[0351] In certain embodiments, the piggyBac or piggyBac-like transposon comprises a sequence selected from of SEQ ID NO: 14573, SEQ ID NO: 14579, SEQ ID NO: 14581, SEQ ID NO: 14582, SEQ ID NO: 14583, and SEQ ID NO: 14588, and a sequence selected from SEQ ID NO: 14587, SEQ ID NO: 14588, SEQ ID NO: 14589 and SEQ ID NO: 14586 and the piggyBac or piggyBac-like transposase comprises SEQ ID NO: 14517 or SEQ ID NO: 14518.

[0352] In certain embodiments, the piggyBac or piggyBac-like transposon comprises ITRs of CCCTTTGCCTGCCA (SEQ ID NO: 14622) (left ITR) and TGGCAGTGAAAGGG (SEQ ID NO: 14623) (right ITR) adjacent to the target sequences.

[0353] In certain embodiments of the methods of the disclosure, the transposase enzyme is a piggyBac or piggyBac-like transposase enzyme. In certain embodiments, the piggyBac or piggyBac-like transposase enzyme is isolated or derived from Helicoverpa armigera. The piggyBac or piggyBac-like transposase enzyme may comprise or consist of an amino acid sequence at least 5%, 10%, 15%, 20%, 25%, 30%, 35%, 40%, 45%, 50%, 55%, 60%, 65%, 70%, 75%, 80%, 85%, 90%, 95%, 99% or any percentage in between identical to:

| (SEQ ID NO: 14525) | |
|---|---|
| 1 | MASRQRLNHD EIATILENDD DYSPLDSESE KEDCVVEDDV WSDNEDAIVD FVEDTSAQED |
| 61 | PDNNIASRES PNLEVTSLTS HRIITLPQRS IRGKNNHVWS TTKGRTTGRT SAINIIRTNR |
| 121 | GPTRMCRNIV DPLLCFQLFI TDEIIHEIVK WTNVEIIVKR QNLKDISASY RDINTMEIWA |
| 181 | LVGILTLTAV MKDNHLSTDE LFDATFSGTR YVSVMSRERF EFLIRCIRMD DKTLRPTLRS |
| 241 | DDAFLPVRKI WEIFINQCRQ NHVPGSNLTV DEQLLGFRGR CPFRMYIPNK PDKYGIKFPM |
| 301 | MCAAATKYMI DAIPYLGKST KTNGLPLGEF YVKDLTKTVH GTNRNITCDN WFTSIPLAKN |
| 361 | MLQAPYNLTI VGTIRSNKRE MPEEIKNSRS RPVGSSMFCF DGPLTLVSYK PKPSKMVFLL |
| 421 | SSCDENAVIN ESNGKPDMIL FYNQTKGGVD SFDQMCKSMS ANRKTNRWPM AVFYGMLNMA |
| 481 | FVNSYIIYCH NKINKQEKPI SRKEFMKKLS IQLTTPWMQE RLQAPTLKRT LRDNITNVLK |
| 541 | NVVPASSENI SNEPEPKKRR YCGVCSYKKR RMTKAQCCKC KKAICGEHNI DVCQDCI. |

[0354] In certain embodiments, the piggyBac or piggyBac-like transposon is isolated or derived from Helicoverpa armigera. In certain embodiments, the piggyBac or piggyBac-like transposon comprises a sequence of:

| (SEQ ID NO: 14570) | |
|---|---|
| 1 | ttaaccctag aagcccaatc tacgtaaatt tgacgtatac cgcggcgaaa tatctctgtc |
| 61 | tctttcatgt ttaccgtcgg atcgccgcta acttctgaac caactcagta gccattggga |
| 121 | cctcgcagga cacagttgcg tcatctcggt aagtgccgcc attttgttgt actctctatt |
| 181 | acaacacacg tcacgtcacg tcgttgcacg tcattttgac gtataattgg gctttgtgta |
| 241 | acttttgaat ttgtttcaaa ttttttatgt ttgtgattta tttgagttaa tcgtattgtt |
| 301 | tcgttacatt tttcatataa taataatatt ttcaggttga gtacaaa. |

[0355] 14570). In certain embodiments, the piggyBac or piggyBac-like transposon comprises a sequence of:

| (SEQ ID NO: 14528) | |
|---|---|
| 1 | agactgtttt tttctaagag acttctaaaa tattattacg agttgattta attttatgaa |
| 61 | aacatttaaa actagttgat tttttttata attacataat tttaagaaaa agtgttagag |
| 121 | gcttgatttt tttgttgatt ttttctaaga tttgattaaa gtgccataat agtattaata |
| 181 | aagagtattt tttaacttaa aatgtatttt atttattaat taaaacttca attatgataa |
| 241 | ctcatgcaaa aatatagttc attaacagaa aaaaatagga aaactttgaa gttttgtttt |
| 301 | tacacgtcat ttttacgtat gattgggctt tatagctagt taaatatgat tgggcttcta |
| 361 | gggttaa . |

[0356] in certain embodiments of the methods of the disclosure, the transposase enzyme is a piggyBac or piggyBac-like transposase enzyme. In certain embodiments, the piggyBac or piggyBac-like transposase enzyme is isolated or derived from Pectinophora gossypiella. The piggyBac or piggyBac-like transposase enzyme may comprise or consist of an amino acid sequence at least 5%, 10%, 15%, 20%, 25%, 30%, 35%, 40%, 45%, 50%, 55%, 60%, 65%, 70%, 75%, 80%, 85%, 90%, 95%, 99% or any percentage in between identical to:

| (SEQ ID NO: 14530) | |
|---|---|
| 1 | MDLRKQDEKI RQWLEQDIEE DSKGESDNSS SETEDIVEME VHKNTSSESE VSSESDYEPV |
| 61 | CPSKRQRTQI IESEESDNSE SIRPSRRQTS RVIDSDETDE DVMSSTPQNI PRNPNVIQPS |
| 121 | SRFLYGKNKH KWSSAAKPSS VRTSRRNIIH FIPGPKERAR EVSEPIDIFS LFISEDMLQQ |
| 181 | VVTFTNAEML IRKNKYKTET FTVSPTNLEE IRALLGLLFN AAAMKSNHLP TRMLFNTHRS |
| 241 | GTIFKACMSA ERLNFLIKCL RFDDKLTRNV RQRDDRFAPI RDLWQALISN FQKWYTPGSY |
| 301 | ITVDEQLVGF RGRCSFRMYI PNKPNKYGIK LVMAADVNSK YIVNAIPYLG KGTDPQNQPL |
| 361 | ATFFIKEITS TLHGTNRNIT MDNWFTSVPL ANELLMAPYN LTLVGTLRSN KREIPEKLKN |
| 421 | SKSRAIGTSM FCYDGDKTLV SYKAKSNKVV FILSTIHDQP DINQETGKPE MIHFYNSTKG |
| 481 | AVDTVDQMCS SISTNRKTQR WPLCVFYNML NLSIINAYVV YVYNNVRNNK KPMSRRDFVI |
| 541 | KLGDQLMEPW LRQRLQTVTL RRDIKVMIQD ILGESSDLEA PVPSVSNVRK IYYLCPSKAR |
| 601 | RMTKHRCIKC KQAICGPHNI DICSRCIE. |

[0357] In certain embodiments, the piggyBac or piggyBac-like transposon is isolated or derived from Pectinophora gossypiella. In certain embodiments, the piggyBac or piggyBac-like transposon comprises a sequence of:

| (SEQ ID NO: 14532) | |
|---|---|
| 1 | ttaaccctag ataactaaac attcgtccgc tcgacgacgc gctatgccgc gaaattgaag |
| 61 | tttacctatt attccgcgtc ccccgccccc gccgcttttt ctagcttcct gatttgcaaa |
| 121 | atagtgcatc gcgtgacacg ctcgaggtca cacgacaatt aggtcgaaag ttacaggaat |
| 181 | ttcgtcgtcc gctcgacgaa agtttagtaa ttacgtaagt ttggcaaagg taagtgaatg |
| 241 | aagtattttt ttataattat tttttaattc tttatagtga taacgtaagg tttatttaaa |
| 301 | tttattactt ttatagttat ttagccaatt gttataaatt ccttgttatt gctgaaaaat |
| 361 | ttgcctgttt tagtcaaaat ttattaactt ttcgatcgtt ttttag. |

[0358] In certain embodiments, the piggyBac or piggyBac-like transposon comprises a sequence of:

| (SEQ ID NO: 14571) | |
|---|---|
| 1 | tttcactaag taattttgtt cctatttagt agataagtaa cacataatta ttgtgatatt |
| 61 | caaaacttaa gaggtttaat aaataataat aaaaaaaaaa tggtttttat ttcgtagtct |
| 121 | gctcgacgaa tgtttagtta ttacgtaacc gtgaatatag tttagtagtc tagggttaa. |

[0359] In certain embodiments of the methods of the disclosure, the transposase enzyme is a piggyBac or piggyBac-like transposase enzyme. In certain embodiments, the piggyBac or piggyBac-like transposase enzyme is isolated or derived from Ctenoplusia agnata. The piggyBac or piggyBac-like transposase enzyme may comprise or consist of an amino acid sequence at least 5%, 10%, 15%, 20%, 25%, 30%, 35%, 40%, 45%, 50%, 55%, 60%, 65%, 70%, 75%, 80%, 85%, 90%, 95%, 99% or any percentage in between identical to:

| (SEQ ID NO: 14534) | |
|---|---|
| 1 | MASRQHLYQD EIAAILENED DYSPHDTDSE MEDCVTQDDV RSDVEDEMVD NIGNGTSPAS |
| 61 | RHEDPETPDP SSEASNLEVT LSSHRIIILP QRSIREKNNH IWSTTKGQSS GRTAAINIVR |
| 121 | TNRGPTRMCR NIVDPLLCFQ LFIKEEIVEE IVKWTNVEMV QKRVNLKDIS ASYRDTNEME |
| 181 | IWAIISMLTL SAVMKDNHLS TDELFNVSYG TRYVSVMSRE RFEFLLRLLR MGDKLLRPNL |
| 241 | RQEDAFTPVR KIWEIFINQC RLNYVPGTNL TVDEQLLGFR GRCPFRMYIP NKPDKYGIKF |
| 301 | PMVCDAATKY MVDAIPYLGK STKTQGLPLG EFYVKELTQT VHGTNRNVTC DNWFTSVPLA |
| 361 | KSLLNSPYNL TLVGTIRSNK REIPEEVKNS RSRQVGSSMF CFDGPLTLVS YKPKPSKMVF |
| 421 | LLSSCNEDAV VNQSNGKPDM ILFYNQTKGG VDSFDQMCSS MSTNRKTNRW PMAVFYGMLN |
| 481 | MAFVNSYIIY CHNMLAKKEK PLSRKDFMKK LSTDLTTPSM QKRLEAPTLK RSLRDNITNV |
| 541 | LKIVPQAAID TSFDEPEPKK RRYCGFCSYK KKRMTKTQCF KCKKPVCGEH NIDVCQDCI. |

[0360] In certain embodiments, the piggyBac or piggyBac-like transposon is isolated or derived from Ctenoplusia agnata. In certain embodiments, the piggyBac or piggyBac-like transposon comprises a sequence of:

| (SEQ ID NO: 14535) | |
|---|---|
| 1 | ttaaccctag aagcccaatc tacgtcattc tgacgtgtat gtcgccgaaa atactctgtc |
| 61 | tctttctcct gcacgatcgg attgccgcga acgctcgatt caacccagtt ggcgccgaga |
| 121 | tctattggag gactgcggcg ttgattcggt aagtcccgcc attttgtcat agtaacagta |
| 181 | ttgcacgtca gcttgacgta tatttgggct ttgtgttatt tttgtaaatt ttcaacgtta |
| 241 | gtttattatt gcatcttttt gttacattac tggtttattt gcatgtatta ctcaaatatt |
| 301 | atttttattt tagcgtagaa aataca. |

[0361] In certain embodiments, the piggyBac or piggyBac-like transposon comprises a sequence of:

```
(SEQ ID NO: 14536)
    1 agactgtttt ttttgtattt gcattatata
        ttatattcta aagttgattt aattctaaga
  61 aaaacattaa aataagtttc tttttgtaaa
        atttaattaa ttataagaaa aagtttaagt
121 tgatctcatt ttttataaaa atttgcaatg
        tttccaaagt tattattgta aaagaataaa
181 taaaagtaaa ctgagtttta attgatgttt
        tattatatca ttatactata tattacttaa
241 ataaaacaat aactgaatgt atttctaaaa
        ggaatcacta gaaaatatag tgatcaaaaa
301 tttacacgtc atttttgcgt atgattgggc
        tttataggtt ctaaaaatat gattgggcct
361 ctagggttaa.
```

[0362] In certain embodiments, the piggyBac or piggyBac-like transposon comprises an ITR sequence of CCCTAGAAGCCCAATC (SEQ ID NO: 14564).

[0363] In certain embodiments of the methods of the disclosure, the transposase enzyme is a piggyBac or piggyBac-like transposase enzyme. In certain embodiments, the piggyBac or piggyBac-like transposase enzyme is isolated or derived from Agrotis ipsilon. The piggyBac (PB) or piggyBac-like transposase enzyme may comprise or consist of an amino acid sequence at least 5%, 10%, 15%, 20%, 25%, 30%, 35%, 40%, 45%, 50%, 55%, 60%, 65%, 70%, 75%, 80%, 85%, 90%, 95%, 99% or any percentage in between identical to:

```
(SEQ ID NO: 14537)
    1 MESRQRLNQD EIATILENDD DYSPLDSDSE
        AEDRVVEDDV WSDNEDAMID YVEDTSRQED
  61 PDNNIASQES ANLEVTSLTS HRIISLPQRS
        ICGKNNHVWS TTKGRTTGRT SAINIIRTNR
121 GPTRMCRNIV DPLLCFQLFI TDEIIHEIVK
        WTNVEMIVKR QNLIDISASY RDTNTMEMWA
181 LVGILTLTAV MKDNHLSTDE LFDATFSGTR
        YVSVMSRERF EFLIRCMRMD DKTLRPTLRS
241 DDAFIPVRKL WEIFINQCRL NYVPGGNLTV
        DEQLLGFRGR CPFRMYIPNK PDKYGIRFPM
301 MCDAATKYMI DAIPYLGKST KTNGLPLGEF
        YVKELTKTVH GTNRNVTCDN WFTSIPLAKN
361 MLQAPYNLTI VGTIRSNKRE IPEEIKNSRS
        RPVGSSMFCF DGPLTLVSYK PKPSRMVFLL
421 SSCDENAVIN ESNGKPDMIL FYNQTKGGVD
        SFDQMCKSMS ANRKTNRWPM AVFYGMLNMA
481 FVNSYIIYCH NKINKQKKPI NRKEFMKNLS
        TDLTTPWMQE RLKAPTLKRT LRDNITNVLK
541 NVVPPSPANN SEEPGPKKRS YCGFCSYKKR
        RMTKTQFYKC KKAICGEHNI DVCQDCV.
```

[0364] In certain embodiments, the piggyBac or piggyBac-like transposon is isolated or derived from Agrotis ipsilon. In certain embodiments, the piggyBac or piggyBac-like transposon comprises a sequence of:

```
(SEQ ID NO: 14538)
    1 ttaaccctag aagcccaatc tacgtaaatt
        tgacgtatac cgcggcgaaa tatatctgtc
  61 tctttcacgt ttaccgtcgg attcccgcta
        acttcggaac caactcagta gccattgaga
121 actcccagga cacagttgcg tcatctcggt
        aagtgccgcc attttgttgt aatagacagg
181 ttgcacgtca ttttgacgta taattgggct
        ttgtgtaact tttgaaatta tttataattt
241 ttattgatgt gatttatttg agttaatcgt
        attgtttcgt tacatttttc atatgatatt
301 aatattttca gattgaatat aaa.
```

[0365] In certain embodiments, the piggyBac or piggyBac-like transposon comprises a sequence of:

```
(SEQ ID NO: 14539)
    1 agactgtttt ttttaaaagg cttataaagt
        attactattg cgtgatttaa ttttataaaa
  61 atatttaaaa ccagttgatt tttttaataa
        ttacctaatt ttaagaaaaa atgttagaag
121 cttgatattt ttgttgattt ttttctaaga
        tttgattaaa aggccataat tgtattaata
181 aagagtattt ttaacttcaa atttatttta
        tttattaatt aaaacttcaa ttatgataat
241 acatgcaaaa atatagttca tcaacagaaa
        aatataggaa aactctaata gttttatttt
301 tacacgtcat ttttacgtat gattgggctt
        tatagctagt caaatatgat tgggcttcta
361 gggttaa.
```

[0366] In certain embodiments of the methods of the disclosure, the transposase enzyme is a piggyBac or piggyBac-like transposase enzyme. In certain embodiments, the piggyBac or piggyBac-like transposase enzyme is isolated or derived from Megachile rotundata. The piggyBac (PB) or piggyBac-like transposase enzyme may comprise or consist of an amino acid sequence at least 5%, 10%, 15%, 20%, 25%, 30%, 35%, 40%, 45%, 50%, 55%, 60%, 65%, 70%, 75%, 80%, 85%, 90%, 95%, 99% or any percentage in between identical to:

```
(SEQ ID NO: 14540)
    1 MNGKDSLGEF YLDDLSDCLD CRSASSTDDE
        SDSSNIAIRK RCPIPLIYSD SEDEDMNNNV
  61 EDNNHFVKES NRYHYQIVEK YKITSKTKKW
        KDVTVTEMKK FLGLIILMGQ VKKDVLYDYW
121 STDPSIETPF FSKVMSRNRF LQIMQSWHFY
        NNNDISPNSH RLVKIQPVID YFKEKFNNVY
181 KSDQQLSLDE CLIPWRGRLS IKTYNPAKIT
        KYGILVRVLS EARTGYVSNF CVYAADGKKI
241 EETVLSVIGP YKNMWHHVYQ DNYYNSVNIA
        KIFLKNKLRV CGTIRKNRSL PQILQTVKLS
301 RGQHQFLRNG HTLLEVWNNG KRNVNMISTI
        HSAQMAESRN RSRTSDCPIQ KPISIIDYNK
361 YMKGVDRADQ YLSYYSIFRK TKKWTKRVVM
        FFINCALFNS FKVYTTLNGQ KITYKNFLHK
421 AALSLIEDCG TEEQGTDLPN SEPTTTRTTS
        RVDHPGRLEN FGKHKLVNIV TSGQCKKPLR
481 QCRVCASKKK LSRTGFACKY CNVPLHKGDC
        FERYHSLKKY.
```

[0367] In certain embodiments, the piggyBac or piggyBac-like transposon is isolated or derived from Megachile rotundata. In certain embodiments, the piggyBac or piggyBac-like transposon comprises a sequence of:

```
(SEQ ID NO: 14541)
    1 ttaaataatg cccactctag atgaacttaa
        cactttaccg accggccgtc gattattcga
  61 cgtttgctcc ccagcgctta ccgaccggcc
        atcgattatt cgacgtttgc ttcccagcgc
121 ttaccgaccg gtcatcgact tttgatcttt
        ccgttagatt tggttaggtc agattgacaa
181 gtagcaagca tttcgcattc tttattcaaa
        taatcggtgc ttttttctaa gctttagccc
241 ttagaa.
```

[0368] In certain embodiments, the the piggyBac or piggyBac-like transposon comprises a sequence of:

```
(SEQ ID NO: 14542)
    1 acaacttctt ttttcaacaa atattgttat
        atggattatt tatttattta tttatttatg
  61 gtatatttta tgtttattta tttatggtta
        ttatggtata ttttatgtaa ataataaact
121 gaaaacgatt gtaatagatg aaataaatat
        tgttttaaca ctaatataat taaagtaaaa
181 gattttaata aatttcgtta ccctacaata
        acacgaagcg tacaatttta ccagagttta
241 ttaa.
```

[0369] In certain embodiments of the methods of the disclosure, the transposase enzyme is a piggyBac or piggyBac-like transposase enzyme. In certain embodiments, the piggyBac or piggyBac-like transposase enzyme is isolated or derived from Bombus impatiens. The piggyBac (PB) or piggyBac-like transposase enzyme may comprise or consist of an amino acid sequence at least 5%, 10%, 15%, 20%, 25%, 30%, 35%, 40%, 45%, 50%, 55%, 60%, 65%, 70%, 75%, 80%, 85%, 90%, 95%, 99% or any percentage in between identical to:

```
(SEQ ID NO: 14543)
    1 MNEKNGIGEF YLDDLSDCPD SYSRSNSGDE
        SDGSDTIIRK RGSVLPPRYS DSEDDEINNV
  61 EDNANNVENN DDIWSTNDEA IILEPFEGSP
        GLKIMPSSAE SVTDNVNLFF GDDFFEHLVR
121 ESNRYHYQVM EKYKIPSKAK KWTDITVPEM
        KKFLGLIVLM GQIKKDVLYD YWSTDPSIET
181 PFFSQVMSRN RFVQIMQSWH FCNNDNIPHD
        SHRLAKIQPV IDYFRRKFND VYKPCQQLSL
241 DESIIPWRGR LSIKTYNPAK ITKYGILVRV
        LSEAVTGYVC NFDVYAADGK KLEDTAVIEP
301 YKNIWHQIYQ DNYYNSVKMA RILLKNKVRV
        CGTIRKNRGL PRSLKTIQLS RGQYEFRRNH
361 QILLEVWNNG RRNVNMISTI HSAQLMESRS
        KSKRSDVPIQ KPNSIIDYNK YMKGVDRADQ
421 YLAYYSIFRK TKKWTKRVVM FFINCALFNS
        FRVYTILNGK NITYKNFLHK VAVSWIEDGE
481 TNCTEQDDNL PNSEPTRRAP RLDHPGRLSN
        YGKHKLINIV TSGRSLKPQR QCRVCAVQKK
541 RSRTCFVCKF CNVPLHKGDC FERYHTLKKY.
```

[0370] In certain embodiments, the piggyBac or piggyBac-like transposon is isolated or derived from Bombus impatiens. In certain embodiments, the piggyBac or piggyBac-like transposon comprises a sequence of:

```
(SEQ ID NO: 14544)
    1 ttaatttttt aacattttac cgaccgatag
        ccgattaatc gggtttttgc cgctgacgct
  61 taccgaccga taacctatta atcggctttt
        tgtcgtcgaa gcttaccaac ctatagccta
121 cctatagtta atcggttgcc atggcgataa
        acaatctttc tcattatatg agcagtaatt
181 tgttatttag tactaaggta ccttgctcag
        ttgcgtcagt tgcgttgctt tgtaagctcc
241 cacagtttta taccaattcg aaaaacttac
        cgttcgcg.
```

[0371] In certain embodiments, the piggyBac or piggyBac-like transposon comprises a sequence of:

```
(SEQ ID NO: 14545)
    1 actatttcac atttgaacta aaaaccgttg
        taatagataa aataaatata atttagtatt
  61 aatattatgg aaacaaaaga ttttattcaa
        tttaattatc ctatagtaac aaaaagcggc
121 caattttatc tgagcatacg aaaagcacag
        atactcccgc ccgacagtct aaaccgaaac
181 agagccggcg ccagggagaa tctgcgcctg
        agcagccggt cggacgtgcg tttgctgttg
241 aaccgctagt ggtcagtaaa ccagaaccag
        tcagtaagcc agtaactgat cagttaacta
301 gattgtatag ttcaaattga acttaatcta
        gtttttaagc gtttgaatgt tgtctaactt
361 cgttatatat tatattcttt ttaa.
```

[0372] In certain embodiments of the methods of the disclosure, the transposase enzyme is a piggyBac or piggyBac-like transposase enzyme. In certain embodiments, the piggyBac or piggyBac-like transposase enzyme is isolated or derived from Mamestra brassicae. The piggyBac (PB) or piggyBac-like transposase enzyme may comprise or consist of an amino acid sequence at least 5%, 10%, 15%, 20%, 25%, 30%, 35%, 40%, 45%, 50%, 55%, 60%, 65%, 70%, 75%, 80%, 85%, 90%, 95%, 99% or any percentage in between identical to:

```
(SEQ ID NO: 14546)
    1 MFSFVPNKEQ TRTVLIFCFH LKTTAAESHR
        PLVEAFGEQV PTVKTCERWF QRFKSGDFDV
  61 DDKEHGKPPK RYEDAELQAL LDEDDAQTQK
        QLAEQLEVSQ QAVSNRLREG GKIQKVGRWV
121 PHELNERQRE RRKNTCEILL SRYKRKSFLH
        RIVTGEEKWI FFVNPKRKKS YVDPGQPATS
181 TARPNRFGKK TRLCVWWDQS GVIYYELLKP
        GETVNTARYQ QQLINLNRAL QRKRPEYQKR
241 QHRVIFLHDN APSHTARAVR DTLETLNWEV
        LPHAAYSPDL APSDYHLFAS MGHALAEQRF
301 DSYESVEEWL DEWFAAKDDE FYWRGIHKLP
        ERWDNCVASD GKYFE.
```

[0373] In certain embodiments, the piggyBac or piggyBac-like transposon is isolated or derived from Mamestra brassicae. In certain embodiments, the piggyBac or piggyBac-like transposon comprises a sequence of:

```
(SEQ ID NO: 14547)
    1 ttattgggtt gcccaaaaag taattgcgga
        tttttcatat acctgtcttt taaacgtaca
  61 tagggatcga actcagtaaa actttgacct
        tgtgaaataa caaacttgac tgtccaacca
121 ccatagtttg gcgcgaattg agcgtcataa
        ttgttttgac tttttgcagt caac.
```

[0374] In certain embodiments, the piggyBac or piggyBac-like transposon comprises a sequence of:

```
(SEQ ID NO: 14548)
  1 atgatttttt ctttttaaac caattttaat
      tagttaattg atataaaaat ccgcaattac
61 tttttgggca acccaataa.
```

[0375] In certain embodiments of the methods of the disclosure, the transposase enzyme is a piggyBac or piggyBac-like transposase enzyme. In certain embodiments, the piggyBac or piggyBac-like transposase enzyme is isolated or derived from Mayetiola destructor. The piggyBac (PB) or piggyBac-like transposase enzyme may comprise or consist of an amino acid sequence at least 5%, 10%, 15%, 20%, 25%, 30%, 35%, 40%, 45%, 50%, 55%, 60%, 65%, 70%, 75%, 80%, 85%, 90%, 95%, 99% or any percentage in between identical to:

```
(SEQ ID NO: 14549)
    1 MENFENWRKR RHLREVLLGH FFAKKTAAES
        HRLLVEVYGE HALAKTQCFE WFQRFKSGDF
  61 DTEDKERPGQ PKKFEDEELE ALLDEDCCQT
        QEELAKSLGV TQQAISKRLK AAGYIQKQGN
121 WVPHELKPRD VERRFCMSEM LLQRHKKKSF
        LSRIITGDEK WIHYDNSKRK KSYVKRGGRA
181 KSTPKSNLHG AKVMLCIWWD QRGVLYYELL
        EPGQTITGDL YRTQLIRLKQ ALAEKRPEYA
241 KRHGAVIFHH DNARPHVALP VKNYLENSGW
        EVLPHPPYSP DLAPSDYHLF RSMQNDLAGK
301 RFTSEQGIRK WLDSFLAAKP AKFFEKGIHE
        LSERWEKVIA SDGQYFE.
```

[0376] In certain embodiments, the piggyBac or piggyBac-like transposon is isolated or derived from Mayetiola destructor. In certain embodiments, the piggyBac or piggyBac-like transposon comprises a sequence of:

```
(SEQ ID NO: 14550)
    1 taagacttcc aaaatttcca cccgaacttt
        accttccccg cgcattatgt ctctcttttc
  61 accctctgat ccctggtatt gttgtcgagc
        acgatttata ttgggtgtac aacttaaaaa
121 ccggaattgg acgctagatg tccacactaa
        cgaatagtgt aaaagcacaa atttcatata
181 tacgtcattt tgaaggtaca tttgacagct
        atcaaaatca gtcaataaaa ctattctatc
241 tgtgtgcatc atattttttt attaact.
```

[0377] In certain embodiments, the piggyBac or piggyBac-like transposon comprises a sequence of:

| (SEQ ID NO: 14551) | |
|---|---|
| 1 | tgcattcatt cattttgtta tcgaaataaa gcattaattt tcactaaaaa attccggttt |
| 61 | ttaagttgta cacccaatat catccttagt gacaattttc aaatggcttt cccattgagc |
| 121 | tgaaaccgtg gctctagtaa gaaaaacgcc caacccgtca tcatatgcct tttttttctc |
| 181 | aacatccg. |

[0378] In certain embodiments of the methods of the disclosure, the transposase enzyme is a piggyBac or piggyBac-like transposase enzyme. In certain embodiments, the piggyBac or piggyBac-like transposase enzyme is isolated or derived from Apis mellifera. The piggyBac (PB) or piggyBac-like transposase enzyme may comprise or consist of an amino acid sequence at least 5%, 10%, 15%, 20%, 25%, 30%, 35%, 40%, 45%, 50%, 55%, 60%, 65%, 70%, 75%, 80%, 85%, 90%, 95%, 99% or any percentage in between identical to:

| (SEQ ID NO: 14552) | |
|---|---|
| 1 | MENQKEHYRH ILLFYFRKGK NASQAHKKLC AVYGDEALKE RQCQNWFDKF RSGDFSLKDE |
| 61 | KRSGRPVEVD DDLIKAIIDS DRHSTTREIA EKLHVSHTCI ENHLKQLGYV QKLDTWVPHE |
| 121 | LKEKHLTQRI NSCDLLKKRN ENDPFLKRLI TGDEKWVVYN NIKRKRSWSR PREPAQTTSK |
| 181 | AGIHRKKVLL SVWWDYKGIV YFELLPPNRT INSVVYIEQL TKLNNAVEEK RPELTNRKGV |
| 241 | VFHHDNARPH TSLVTRQKLL ELGWDVLPHP PYSPDLAPSD YFLFRSLQNS LNGKNFNNDD |
| 301 | DIKSYLIQFF ANKNQKFYER GIMMLPERWQ KVIDQNGQHI TE. |

[0379] In certain embodiments, the piggyBac or piggyBac-like transposon is isolated or derived from Apis mellifera. In certain embodiments, the piggyBac or piggyBac-like transposon comprises a sequence of:

| (SEQ ID NO: 14553) | |
|---|---|
| 1 | ttgggttggc aactaagtaa ttgcggattt cactcataga tggcttcagt tgaattttta |
| 61 | ggtttgctgg cgtagtccaa atgtaaaaca cattttgtta tttgatagtt ggcaattcag |
| 121 | ctgtcaatca gtaaaaaaag ttttttgatc ggttgcgtag ttttcgtttg gcgttcgttg |
| 181 | aaaa. |

[0380] In certain embodiments, the piggyBac or piggyBac-like transposon comprises a sequence of:

| (SEQ ID NO: 14554) | |
|---|---|
| 1 | agttatttag ttccatgaaa aaattgtctt tgattttcta aaaaaaatcc gcaattactt |
| 61 | agttgccaat ccaa. |

[0381] In certain embodiments of the methods of the disclosure, the transposase enzyme is a piggyBac or piggyBac-like transposase enzyme. In certain embodiments, the piggyBac or piggyBac-like transposase enzyme is isolated or derived from Messor bouvieri. The piggyBac (PB) or piggyBac-like transposase enzyme may comprise or consist of an amino acid sequence at least 5%, 10%, 15%, 20%, 25%, 30%, 35%, 40%, 45%, 50%, 55%, 60%, 65%, 70%, 75%, 80%, 85%, 90%, 95%, 99% or any percentage in between identical to:

| (SEQ ID NO: 14555) | |
|---|---|
| 1 | MSSFVPENVH LRHALLFLFH QKKRAAESHR LLVETYGEHA PTIRTCETWF RQFKCGDFNV |
| 61 | QDKERPGRPK TFEDAELQEL LDEDSTQTQK QLAEKLNVSR VAICERLQAM GKIQKMGRWV |
| 121 | PHELNDRQME NRKIVSEMLL QRYERKSFLH RIVTGDEKWI YFENPKRKKS WLSPGEAGPS |
| 181 | TARPNRFGRK TMLCVWWDQI GVVYYELLKP GETVNTDRYR QQMINLNCAL IEKRPQYAQR |
| 241 | HDKVILQHDN APSHTAKPVK EMLKSLGWEV LSHPPYSPDL APSDYHLFAS MGHALAEQHF |
| 301 | ADFEEVKKWL DEWFSSKEKL FFWNGIHKLS ERWTKCIESN GQYFE. |

[0382] In certain embodiments, the piggyBac or piggyBac-like transposon is isolated or derived from Messor bouvieri. In certain embodiments, the piggyBac or piggyBac-like transposon comprises a sequence of:

| (SEQ ID NO: 14556) | |
|---|---|
| 1 | agtcagaaat gacacctcga tcgacgacta atcgacgtct aatcgacgtc gattttatgt |
| 61 | caacatgtta ccaggtgtgt cggtaattcc tttccggttt ttccggcaga tgtcactagc |
| 121 | cataagtatg aaatgttatg atttgataca tatgtcattt tattctactg acattaacct |
| 181 | taaaactaca caagttacgt tccgccaaaa taacagcgtt atagatttat aattttttga |
| 241 | aa. |

[0383] In certain embodiments, the piggyBac or piggyBac-like transposon comprises a sequence of:

| (SEQ ID NO: 14557) | |
|---|---|
| 1 | ataaatttga actatccatt ctaagtaacg tgttttcttt aacgaaaaaa ccggaaaaga |
| 61 | attaccgaca ctcctggtat gtcaacatgt tattttcgac attgaatcgc gtcgattcga |
| 121 | agtcgatcga ggtgtcattt ctgact. |

[0384] In certain embodiments of the methods of the disclosure, the transposase enzyme is a piggyBac or piggyBac-like transposase enzyme. In certain embodiments, the piggyBac or piggyBac-like transposase enzyme is isolated or derived from Trichoplusia ni. The piggyBac (PB) or piggyBac-like transposase enzyme may comprise or consist of an amino acid sequence at least 5%, 10%, 15%, 20%, 25%, 30%, 35%, 40%, 45%, 50%, 55%, 60%, 65%, 70%, 75%, 80%, 85%, 90%, 95%, 99% or any percentage in between identical to:

| (SEQ ID NO: 14558) | |
|---|---|
| 1 | MGSSLDDEHI LSALLQSDDE LVGEDSDSEV SDHVSEDDVQ SDTEEAFIDE VHEVQPTSSG |
| 61 | SEILDEQNVI EQPGSSLASN RILTLPQRTI RGKNKHCWST SKSTRRSRVS ALNIVRSQRG |
| 121 | PTRMCRNIYD PLLCFKLFFT DEIISEIVKW TNAEISLKRR ESMTSATFRD TNEDEIYAFF |
| 181 | GILVMTAVRK DNHMSTDDLF DRSLSMVYVS VMSRDRFDFL IRCLRMDDKS IRPTLRENDV |
| 241 | FTPVRKIWDL FIHQCIQNYT PGAHLTIDEQ LLGFRGRCPF RVYIPNKPSK YGIKILMMCD |
| 301 | SGTKYMINGM PYLGRGTQTN GVPLGEYYVK ELSKPVHGSC RNITCDNWFT SIPLAKNLLQ |
| 361 | EPYKLTIVGT VRSNKREIPE VLKNSRSRPV GTSMFCFDGP LTLVSYKPKP AKMVYLLSSC |
| 421 | DEDASINEST GKPQMVMYYN QTKGGVDTLD QMCSVMTCSR KTNRWPMALL YGMINIACIN |
| 481 | SFIIYSHNVS SKGEKVQSRK KFMRNLYMSL TSSFMRKRLE APTLKRYLRD NISNILPKEV |
| 541 | PGTSDDSTEE PVMKKRTYCT YCPSKIRRKA NASCKKCKKV ICREHNIDMC QSCF. |

[0385] In certain embodiments, the piggyBac or piggyBac-like transposon is isolated or derived from Trichoplusia ni. In certain embodiments, the piggyBac or piggyBac-like transposon comprises a sequence of:

| (SEQ ID NO: 14559) | |
|---|---|
| 1 | ttaaccctag aaagatagtc tgcgtaaaat tgacgcatgc attcttgaaa tattgctctc |
| 61 | tctttctaaa tagcgcgaat ccgtcgctgt gcatttagga catctcagtc gccgcttgga |
| 121 | gctcccgtga ggcgtgcttg tcaatgcggt aagtgtcact gattttgaac tataacgacc |
| 181 | gcgtgagtca aaatgacgca tgattatctt ttacgtgact tttaagattt aactcatacg |
| 241 | ataattatat tgttatttca tgttctactt acgtgataac ttattatata tatattttct |
| 301 | tgttatagat atc. |

[0386] In certain embodiments, the piggyBac or piggyBac-like transposon comprises a sequence of:

| (SEQ ID NO: 14560) | |
|---|---|
| 1 | tttgttactt tatagaagaa attttgagtt tttgtttttt tttaataaat aaataaacat |
| 61 | aaataaattg tttgttgaat ttattattag tatgtaagtg taaatataat aaaacttaat |
| 121 | atctattcaa attaataaat aaacctcgat atacagaccg ataaaacaca tgcgtcaatt |
| 181 | ttacgcatga ttatctttaa cgtacgtcac aatatgatta tctttctagg gttaa. |

[0387] In certain embodiments, the piggyBac or piggyBac-like transposon comprises a sequence of:

| (SEQ ID NO: 14561) | |
|---|---|
| 1 | ccctagaaag atagtctgcg taaaattgac gcatgcattc ttgaaatatt gctctctctt |
| 61 | tctaaatagc gcgaatccgt cgctgtgcat ttaggacatc tcagtcgccg cttggagctc |
| 121 | ccgtgaggcg tgcttgtcaa tgcggtaagt gtcactgatt ttgaactata acgaccgcgt |
| 181 | gagtcaaaat gacgcatgat tatcttttac gtgactttta agatttaact catacgataa |
| 241 | ttatattgtt atttcatgtt ctacttacgt gataacttat tatatatata ttttcttgtt |
| 301 | atagatatc. |

[0388] In certain embodiments, the piggyBac or piggyBac-like transposon comprises a sequence of:

| (SEQ ID NO: 14562) | |
|---|---|
| 1 | tttgttactt tatagaagaa attttgagtt tttgtttttt tttaataaat aaataaacat |
| 61 | aaataaattg tttgttgaat ttattattag tatgtaagtg taaatataat aaaacttaat |
| 121 | atctattcaa attaataaat aaacctcgat atacagaccg ataaaacaca tgcgtcaatt |
| 181 | ttacgcatga ttatctttaa cgtacgtcac aatatgatta tctttctagg g. |

[0389] In certain embodiments, the piggyBac or piggyBac-like transposon comprises a sequence of:

| (SEQ ID NO: 14609) | |
|---|---|
| 1 | tctaaatagc gcgaatccgt cgctgtgcat ttaggacatc tcagtcgccg cttggagctc |
| 61 | ccgtgaggcg tgcttgtcaa tgcggtaagt gtcactgatt ttgaactata acgaccgcgt |
| 121 | gagtcaaaat gacgcatgat tatcttttac gtgactttta agatttaact catacgataa |
| 181 | ttatattgtt atttcatgtt ctacttacgt gataacttat tatatatata ttttcttgtt |
| 241 | atagatatc. |

[0390] In certain embodiments, the piggyBac or piggyBac-like transposon comprises a sequence of:

| (SEQ ID NO: 14610) | |
|---|---|
| 1 | tttgttactt tatagaagaa attttgagtt tttgtttttt tttaataaat aaataaacat |
| 61 | aaataaattg tttgttgaat ttattattag tatgtaagtg taaatataat aaaacttaat |
| 121 | atctattcaa attaataaat aaacctcgat atacagaccg ataaaacaca tgcgtcaatt |
| 181 | ttacgcatga ttatctttaa cgtacgtcac aatatgatta tctttctagg g. |

[0391] In certain embodiments, the piggyBac or piggyBac-like transposon comprises SEQ ID NO: 14561 and SEQ ID NO: 14562, and the piggyBac or piggyBac-like transposase comprises SEQ ID NO: 14558. In certain embodiments, the piggyBac or piggyBac-like transposon comprises SEQ ID NO: 14609 and SEQ ID NO: 14610, and the piggyBac or piggyBac-like transposase comprises SEQ ID NO: 14558.

[0392] In certain embodiments, the piggyBac or piggyBac-like transposon is isolated or derived from Aphis gossypii. In certain embodiments, the piggyBac or piggyBac-like transposon comprises an ITR sequence of CCTTCCAGCGGGCGCGC (SEQ ID NO: 14565).

[0393] In certain embodiments, the piggyBac or piggyBac-like transposon is isolated or derived from Chilo suppressalis. In certain embodiments, the piggyBac or piggyBac-like transposon comprises an ITR sequence of CCCAGATTAGCCT (SEQ ID NO: 14566).

[0394] In certain embodiments, the piggyBac or piggyBac-like transposon is isolated or derived from Heliothis virescens. In certain embodiments, the piggyBac or piggyBac-like transposon comprises an ITR sequence of CCCTTAATTACTCGCG (SEQ ID NO: 14567).

[0395] In certain embodiments, the piggyBac or piggyBac-like transposon is isolated or derived from Pectinophora gossypiella. In certain embodiments, the piggyBac or piggyBac-like transposon comprises an ITR sequence of CCCTAGATAACTAAAC (SEQ ID NO: 14568).

[0396] In certain embodiments, the piggyBac or piggyBac-like transposon is isolated or derived from Anopheles stephensi. In certain embodiments, the piggyBac or piggyBac-like transposon comprises an ITR sequence of CCCTAGAAAGATA (SEQ ID NO: 14569).

### Gene Editing

[0397] In various embodiments, nucleases that may be used as cutting enzymes include, but are not limited to, Cas9, transcription activator-like effector nucleases (TALENs) and zinc finger nucleases. In certain embodiments, the Cas9 is a catalytically inactive or “inactivated” Cas9 (dCas9). In certain embodiments, the Cas9 is a catalytically inactive or “inactivated” nuclease domain of Cas9. In certain embodiments, the dCas9 is encoded by a shorter sequence that is derived from a full length, catalytically inactivated, Cas9, referred to herein as a “small” dCas9 or dSaCas9.

[0398] In certain embodiments, the inactivated, small, Cas9 (dSaCas9) operatively-linked to an active nuclease. In certain embodiments, the disclosure provides a fusion protein comprising, consisting essentially of or consisting of a DNA binding domain and molecule nuclease, wherein the nuclease comprises a small, inactivated Cas9 (dSaCas9). In certain embodiments, the dSaCas9 of the disclosure comprises the mutations D10A and N580A (underlined and bolded) which inactivate the catalytic site. In certain embodiments, the dSaCas9 (isolated or derived from Staphylococcus aureus) of the disclosure comprises the amino acid sequence of:

| (SEQ ID NO: 14497) | |
|---|---|
| 1 | MKRNYILGLA IGITSVGYGI IDYETRDVID AGVRLFKEAN VENNEGRRSK RGARRLKRRR |
| 61 | RHRIQRVKKL LFDYNLLTDH SELSGINPYE ARVKGLSQKL SEEEFSAALL HLAKRRGVHN |
| 121 | VNEVEEDTGN ELSTKEQISR NSKALEEKYV AELQLERLKK DGEVRGSINR FKTSDYVKEA |
| 181 | KQLLKVQKAY HQLDQSFIDT YIDLLETRRT YYEGPGEGSP FGWKDIKEWY EMLMGHCTYF |
| 241 | PEELRSVKYA YNADLYNALN DLNNLVITRD ENEKLEYYEK FQIIENVFKQ KKKPTLKQIA |
| 301 | KEILVNEEDI KGYRVTSTGK PEFTNLKVYH DIKDITARKE IIENAELLDQ IAKILTIYQS |
| 361 | SEDIQEELTN LNSELTQEEI EQISNLKGYT GTHNLSLKAI NLILDELWHT NDNQIAIFNR |
| 421 | LKLVPKKVDL SQQKEIPTTL VDDFILSPVV KRSFIQSIKV INAIIKKYGL PNDIIIELAR |
| 481 | EKNSKDAQKM INEMQKRNRQ TNERIEEIIR TTGKENAKYL IEKIKLHDMQ EGKCLYSLEA |
| 541 | IPLEDLLNNP FNYEVDHIIP RSVSFDNSFN NKVLVKQEEA SKKGNRTPFQ YLSSSDSKIS |
| 601 | YETFKKHILN LAKGKGRISK TKKEYLLEER DINRFSVQKD FINRNLVDTR YATRGLMNLL |
| 661 | RSYFRVNNLD VKVKSINGGF TSFLRRKWKF KKERNKGYKH HAEDALIIAN ADFIFKEWKK |
| 721 | LDKAKKVMEN QMFEEKQAES MPEIETEQEY KEIFITPHQI KHIKDFKDYK YSHRVDKKPN |
| 781 | RELINDTLYS TRKDDKGNTL IVNNLNGLYD KDNDKLKKLI NKSPEKLLMY HHDPQTYQKL |
| 841 | KLIMEQYGDE KNPLYKYYEE TGNYLTKYSK KDNGPVIKKI KYYGNKLNAH LDITDDYPNS |
| 901 | RNKVVKLSLK PYRFDVYLDN GVYKFVTVKN LDVIKKENYY EVNSKCYEEA KKLKKISNQA |
| 961 | EFIASFYNND LIKINGELYR VIGVNNDLLN RIEVNMIDIT YREYLENMND KRPPRIIKTI |
| 1021 | ASKTQSIKKY STDILGNLYE VKSKKHPQII KKG. |

[0399] In certain embodiments of the gene editing systems of the disclosure, the dCas9 of the disclosure comprises a dCas9 isolated or derived from Streptococcus pyogenes. In certain embodiments, the dCas9 comprises a dCas9 with substitutions at positions 10 and 840 of the amino acid sequence of the dCas9 which inactivate the catalytic site. In certain embodiments, these substitutions are D10A and H840A. In certain embodiments, the amino acid sequence of the dCas9 (isolated or derived from Streptococcus pyogenes) comprises the sequence of:

```
(SEQ ID NO: 14498)
      1 XDKKYSIGLA IGTNSVGWAV ITDEYKVPSK KFKVLGNTDR HSIKKNLIGA LLFDSGETAE
    61 ATRLKRTARR RYTRRKNRIC YLQEIFSNEM AKVDDSFFHR LEESFLVEED KKHERHPIFG
  121 NIVDEVAYHE KYPTIYHLRK KLVDSTDKAD LRLIYLALAH MIKFRGHFLI EGDLNPDNSD
  181 VDKLFIQLVQ TYNQLFEENP INASGVDAKA ILSARLSKSR RLENLIAQLP GEKKNGLFGN
  241 LIALSLGLTP NFKSNFDLAE DAKLQLSKDT YDDDLDNLLA QIGDQYADLF LAAKNLSDAI
  301 LLSDILRVNT EITKAPLSAS MIKRYDEHHQ DLTLLKALVR QQLPEKYKEI FFDQSKNGYA
  361 GYIDGGASQE EFYKFIKPIL EKMDGTEELL VKLNREDLLR KQRTFDNGSI PHQIHLGELH
  421 AILRRQEDFY PFLKDNREKI EKILTFRIPY YVGPLARGNS RFAWMTRKSE ETITPWNFEE
  481 VVDKGASAQS FIERMTNFDK NLPNEKVLPK HSLLYEYFTV YNELTKVKYV TEGMRKPAFL
  541 SGEQKKAIVD LLFKTNRKVT VKQLKEDYFK KIECFDSVEI SGVEDRFNAS LGTYHDLLKI
  601 IKDKDFLDNE ENEDILEDIV LTLTLFEDRE MIEERLKTYA HLFDDKVMKQ LKRRRYTGWG
  661 RLSRKLINGI RDKQSGKTIL DFLKSDGFAN RNFMQLIHDD SLTFKEDIQK AQVSGQGDSL
  721 HEHIANLAGS PAIKKGILQT VKVVDELVKV MGRHKPENIV IEMARENQTT QKGQKNSRER
  781 MKRIEEGIKE LGSQILKEHP VENTQLQNEK LYLYYLQNGR DMYVDQELDI NRLSDYDVDA
  841 IVPQSFLKDD SIDNKVLTRS DKNRGKSDNV PSEEVVKKMK NYWRQLLNAK LITQRKFDNL
  901 TKAERGGLSE LDKAGFIKRQ LVETRQITKH VAQILDSRMN TKYDENDKLI REVKVITLKS
  961 KLVSDFRKDF QFYKVREINN YHHAHDAYLN AVVGTALIKK YPKLESEFVY GDYKVYDVRK
1021 MIAKSEQEIG KATAKYFFYS NIMNFFKTEI TLANGEIRKR PLIETNGETG EIVWDKGRDF
1081 ATVRKVLSMP QVNIVKKTEV QTGGFSKESI LPKRNSDKLI ARKKDWDPKK YGGFDSPTVA
1141 YSVLVVAKVE KGKSKKLKSV KELLGITIME RSSFEKNPID FLEAKGYKEV KKDLIIKLPK
1201 YSLFELENGR KRMLASAGEL QKGNELALPS KYVNFLYLAS HYEKLKGSPE DNEQKQLFVE
1261 QHKHYLDEII EQISEFSKRV ILADANLDKV LSAYNKHRDK PIREQAENII HLFTLTNLGA
1321 PAAFKYFDTT IDRKRYTSTK EVLDATLIHQ SITGLYETRI DLSQLGGD.
```

[0400] In certain embodiments of the gene editing systems of the disclosure, the nuclease domain may comprise, consist essentially of or consist of a dCas9 or a dSaCas9 and a type IIS endonuclease. In certain embodiments of the disclosure, the nuclease domain may comprise, consist essentially of or consist of a dSaCas9 and a type IIS endonuclease, including, but not limited to, AciI, Mn1I, AlwI, BbvI, BccI, BceAI, BsmAI, BsmFI, BspCNI, BsrI, BtsCI, HgaI, HphI, HpyAV, MbolI, My1I, PleI, SfaNI, AcuI, BciVI, BfuAI, BmgBI, BmrI, BpmI, BpuEI, BsaI, BseRI, BsgI, BsmI, BspMI, BsrBI, BsrBI, BsrDI, BtgZI, BtsI, EarI, EciI, MmeI, NmeAIII, BbvCI, Bpu10I, BspQI, SapI, BaeI, BsaXI, CspCI, BfiI, MboII, Acc36I, FokI or Clo051. In certain embodiments of the disclosure, the nuclease domain may comprise, consist essentially of or consist of a dSaCas9 and Clo051. An exemplary Clo051 nuclease domain may comprise, consist essentially of or consist of, the amino acid sequence of:

(SEQ ID NO: 14503)
EGIKSNISLLKDELRGQISHISHEYLSLIDLAFDSKQNRLFEMKVLELLV
NEYGFKGRHLGGSRKPDGIVYSTTLEDNFGIIVDTKAYSEGYSLPISQAD
EMERYVRENSNRDEEVNPNKWWENFSEEVKKYYFVFISGSFKGKFEEQLR
RLSMTTGVNGSAVNVVNLLLGAEKIRSGEMTIEELERAMFNNSEFILKY.

[0401] An exemplary dCas9-Clo051 nuclease domain may comprise, consist essentially of or consist of, the amino acid sequence of (Clo051 sequence underlined, linker bold italics, dCas9 (Staphylococcus pyogenes) sequence in italics):

(SEQ ID NO: 14654)
MAPKKKRKVEGIKSNISLLKDELRGQISHISHEYLSLIDLAFDSKQNRLF
EMKVLELLVNEYGFKGRHLGGSRKPDGIVYSTTLEDNFGIIVDTKAYSEG
YSLPISQADEMERYVRENSNRDEEVNPNKWWENFSEEVKKYYFVFISGSF
KGKFEEQLRRLSMTTGVNGSAVNVVNLLLGAEKIRSGEMTIEELERAMFN
NSEFILKY [symbol] DKKYSIGLAIGTNSVGWAVITDEYKVPSKKFKVLGNT
DRHSIKKNLIGALLFDSGETAEATRLKRTARRRYTRRKNRICYLQEIFSN
EIVIAKVDDSFFHRLEESFLVEEDKKHERHPIFGNIVDEVAYHEKYPTIY
HLRKKLVDSTDKADLRLIYLALAHMIKFRGHFLIEGDLNPDNSDVDKLFI
QLVQTYNQLFEENPINASGVDAICAILSARLSKSRRLENLIAQLPGEKKN
GLFGNLIALSLGLTPNFKSNFDLAEDAKLQLSKDTYDDDLDNLLAQIGDQ
YADLFLAAKNLSDAILLSDILRVNTEITKAPLSASMIKRYDEHHQDLTLL
KALVRQQLPEKYKEIFFDQSKNGYAGYIDGGASQEEFYKFIKPILEICMD
GTEELLVKLNREDLLRKQRTFDNGSIPHQIHLGELHAILRRQEDFYPFLK
DNREKIEKILTFRIPYYVGPLARGNSRFAWMTRKSEETITPWNFEEVVDK
GASAQSFIERMTNFDKNLPNEKVLPKHSLLYEYFTVYNELTKVKYVTEGM
RKPAFLSGEQKKAIVDLLFKTNRKVTVKQLKEDYFKKIECFDSVEISGVE
DRFNASLGTYHDLLKIIKDKDFLDNEENEDILEDIVLTLTLFEDREAKEE
RLKTYAHLFDDKVMKQLKRRRYTGWGRLSRKLINGIRDKQSGKTILDFLK
SDGFANRNFMQLIHDDSLTFKEDIQKAQVSGQGDSLHEHIANLAGSPAIK
KGILQTVKVVDELVKVMGRHKPENIVIEIVIARENQTTQKGQKNSRERMI
CRIEEGIKELGSQILKEHPVENTQLQNEKLYLYYLQNGRDMYVDQELDIN
RLSDYDVDAIVPQSFLKDDSIDNKVLTRSDKNRGKSDNVPSEEVVKKMKN
YWRQLLNAKLITQRKFDNLTKAERGGLSELDKAGFIKRQLVETRQITKHV
AQILDSRMNTKYDENDKLIREVKVITLKSKLVSDFRKDFQFYKVREINNY
HHAHDAYLNAVVGTALIKKYPKLESEFVYGDYKVYDVRICAKAKSEQEIG
KATAKYFFYSNIMNFFKTEITLANGEIRKRPLIETNGETGEIVWDKGRDF
ATVRKVLSMPQVNIVKKTEVQTGGFSKESILPKRNSDKLIARKKDWDPKK
YGGFDSPTVAYSVLVVAKVEKGKSKKLKSVKELLGITIMERSSFEKNPID
FLEAKGYKEVKKDLIIKLPKYSLFELENGRKRMLASAGELQKGNELALPS
KYVNFLYLASHYEKLKGSPEDNEQKQLFVEQHKHYLDEHEQISEFSKRVI
LADANLDKVLSAYNKHRDKPIREQAENIHILFTLTNLGAPAAFKYFDTTI
DRKRYTSTKEVLDATLIHQSITGLYETRIDLSQLGGDGSPKKKRKVSS.

[0402] Gene editing compositions of the disclosure may comprise a nuclease protein or a nuclease domain thereof. In certain embodiments, the gene editing composition comprises a sequence encoding a nuclease protein or a sequence encoding a nuclease domain thereof. In certain embodiments, the sequence encoding a nuclease protein or the sequence encoding a nuclease domain thereof comprises a DNA sequence, an RNA sequence, or a combination thereof. In certain embodiments, the nuclease or the nuclease domain thereof comprises one or more of a CRISPR/Cas protein, a Transcription Activator-Like Effector Nuclease (TALEN), a Zinc Finger Nuclease (ZFN), and an endonuclease. In certain embodiments, the nuclease or the nuclease domain thereof comprises one or more of a nuclease-inactivated Cas (dCas) protein, a Transcription Activator-Like Effector Nuclease (TALEN), a Zinc Finger Nuclease (ZFN), and an endonuclease. In certain embodiments, the nuclease or the nuclease domain thereof comprises a nuclease-inactivated Cas (dCas) protein and an endonuclease. In certain embodiments, the nuclease or the nuclease domain thereof comprises a nuclease-inactivated Cas9 (dCas9) protein and an endonuclease, wherein the endonuclease comprises a Clo051 nuclease or a nuclease domain thereof. In certain embodiments, the gene editing composition comprises a fusion protein. In certain embodiments, the fusion protein comprises a nuclease-inactivated Cas9 (dCas9) protein and a Clo051 nuclease or a Clo051 nuclease domain. In certain embodiments, the gene editing composition further comprises a guide sequence. In certain embodiments, the guide sequence comprises an RNA sequence.

[0403] In certain embodiments, the gene editing composition comprises a fusion protein. In certain embodiments, the fusion protein comprises a nuclease-inactivated Cas9 (dCas9) protein and a Clo051 nuclease or a Clo051 nuclease domain. In certain embodiments, the gene editing composition further comprises a guide sequence. In certain embodiments, the guide sequence comprises an RNA sequence. In certain embodiments, the fusion protein comprises or consists of the amino acid sequence:

(SEQ ID NO: 14654)
MAPKKKRKVEGIKSNISLLKDELRGQISHISHEYLSLIDLAFDSKQNRLF
EMKVLELLVNEYGFKGRHLGGSRKPDGIVYSTTLEDNEGIIVDTKAYSEG
YSLPISQADEMERYVRENSNRDEEVNPNKWWENFSEEVKKYYFVFISGSF
KGKFEEQLRRLSMTTGVNGSAVNVVNLLLGAEKIRSGEMTIEELERAMEN
NSEFILKYGGGGSDKKYSIGLAIGTNSVGWAVITDEYKVPSKKEKVLGNT
DRHSIKKNLIGALLEDSGETAEATRLKRTARRRYTRRKNRICYLQEIFSN
EMAKVDDSFFHRLEESFLVEEDKKHERHPIFGNIVDEVAYHEKYPTIYHL
RKKLVDSTDKADLRLIYLALAHMIKFRGHFLIEGDLNPDNSDVDKLFIQL
VQTYNQLFEENPINASGVDAKAILSARLSKSRRLENLIAQLPGEKKNGLF
GNLIALSLGLIPNEKSNEDLAEDAKLQLSKDTYDDDLDNLLAQIGDQYAD
LFLAAKNLSDAILLSDILRVNTEITKAPLSASMIKRYDEHHQDLTLLKAL
VRQQLPEKYKEIFFDQSKNGYAGYIDGGASQEEFYKFIKPILEKMDGTEE
LLVKLNREDLLRKQRTFDNGSIPHQIHLGELHAILRRQEDFYPFLKDNRE
KIEKILTERIPYYVGPLARGNSRFAWMTRKSEETITPWNFEEVVDKGASA
QSFIERMTNEDKNLPNEKVLPKHSLLYEYFTVYNELTKVKYVTEGMRKPA
FLSGEQKKAIVDLLEKTNRKVIVKQLKEDYFKKIECEDSVEISGVEDRFN
ASLGTYHDLLKIIKDKDFLDNEENEDILEDIVLTLTLFEDREMIEERLKT
YAHLFDDKVMKQLKRRRYTGWGRLSRKLINGIRDKQSGKTILDFLKSDGF
ANRNFMQLIHDDSLTFKEDIQKAQVSGQGDSLHEHIANLAGSPAIKKGIL
QTVKVVDELVKVMGRHKPENIVIEMARENQTTQKGQKNSRERMKRIEEGI
KELGSQILKEHPVENTQLQNEKLYLYYLQNGRDMYVDQELDINRLSDYDV
DAIVPQSFLKDDSIDNKVLTRSDKNRGKSDNVPSEEVVKKMKNYWRQLLN
AKLITQRKFDNLTKAERGGLSELDKAGFIKRQLVETRQITKHVAQILDSR
MNTKYDENDKLIREVKVITLKSKLVSDFRKDFQFYKVREINNYHHAHDAY
LNAVVGTALIKKYPKLESEFVYGDYKVYDVRKMIAKSEQEIGKATAKYFF
YSNIMNFEKTEITLANGEIRKRPLIETNGETGEIVWDKGRDFATVRKVLS
MPQVNIVKKTEVQTGGFSKESILPKRNSDKLIARKKDWDPKKYGGFDSPT
VAYSVLVVAKVEKGKSKKLKSVKELLGITIMERSSFEKNPIDFLEAKGYK
EVKKDLIIKLPKYSLFELENGRKRMLASAGELQKGNELALPSKYVNFLYL
ASHYEKLKGSPEDNEQKQLFVEQHKHYLDEIIEQISEFSKRVILADANLD
KVLSAYNKHRDKPIREQAENIIHLFTLTNLGAPAAFKYFDTTIDRKRYTS
TKEVLDATLIHQSITGLYETRIDLSQLGGDGSPKKKRKVSS.

In certain embodiments, the fusion protein is encoded by a nucleic acid comprising or consisting of the sequence:

```
(SEQ ID NO: 14655)
      1 atggcaccaa agaagaaaag aaaagtggag ggcatcaagt caaacatcag cctgctgaaa
    61 gacgaactgc ggggacagat tagtcacatc agtcacgagt acctgtcact gattgatctg
  121 gccttcgaca gcaagcagaa tagactgttt gagatgaaag tgctggaact gctggtcaac
  181 gagtatggct tcaagggcag acatctgggc gggtctagga aacctgacgg catcgtgtac
  241 agtaccacac tggaagacaa cttcggaatc attgtcgata ccaaggctta ttccgagggc
  301 tactctctgc caattagtca ggcagatgag atggaaaggt acgtgcgcga aaactcaaat
  361 agggacgagg aagtcaaccc caataagtgg tgggagaatt tcagcgagga agtgaagaaa
  421 tactacttcg tctttatctc aggcagcttc aaagggaagt ttgaggaaca gctgcggaga
  481 ctgtccatga ctaccggggt gaacggatct gctgtcaacg tggtcaatct gctgctgggc
  541 gcagaaaaga tcaggtccgg ggagatgaca attgaggaac tggaacgcgc catgttcaac
  601 aattctgagt ttatcctgaa gtatggaggc gggggaagcg ataagaaata ctccatcgga
  661 ctggccattg gcaccaattc cgtgggctgg gctgtcatca cagacgagta caaggtgcca
  721 agcaagaagt tcaaggtcct ggggaacacc gatcgccaca gtatcaagaa aaatctgatt
  781 ggagccctgc tgttcgactc aggcgagact gctgaagcaa cccgactgaa gcggactgct
  841 aggcgccgat atacccggag aaaaaatcgg atctgctacc tgcaggaaat tttcagcaac
  901 gagatggcca aggtggacga tagtttcttt caccgcctgg aggaatcatt cctggtggag
  961 gaagataaga aacacgagcg gcatcccatc tttggcaaca ttgtggacga agtcgcttat
1021 cacgagaagt accctactat ctatcatctg aggaagaaac tggtggactc caccgataag
1081 gcagacctgc gcctgatcta tctggccctg gctcacatga tcaagttccg ggggcatttt
1141 ctgatcgagg gagatctgaa ccctgacaat tctgatgtgg acaagctgtt catccagctg
1201 gtccagacat acaatcagct gtttgaggaa aacccaatta atgcctcagg cgtggacgca
1261 aaggccatcc tgagcgccag actgtccaaa tctaggcgcc tggaaaacct gatcgctcag
1321 ctgccaggag agaagaaaaa cggcctgttt gggaatctga ttgcactgtc cctgggcctg
1381 acacccaact tcaagtctaa ttttgatctg gccgaggacg ctaagctgca gctgtccaaa
1441 gacacttatg acgatgacct ggataacctg ctggctcaga tcggcgatca gtacgcagac
1501 ctgttcctgg ccgctaagaa tctgagtgac gccatcctgc tgtcagatat tctgcgcgtg
1561 aacacagaga ttactaaggc cccactgagt gcttcaatga tcaaaagata tgacgagcac
1621 catcaggatc tgaccctgct gaaggctctg gtgaggcagc agctgcccga gaaatacaag
1681 gaaatcttct ttgatcagag caagaatgga tacgccggct atattgacgg cggggcttcc
1741 caggaggagt tctacaagtt catcaagccc attctggaaa agatggacgg caccgaggaa
1801 ctgctggtga agctgaatcg ggaggacctg ctgagaaaac agaggacatt tgataacgga
1861 agcatccctc accagattca tctgggcgaa ctgcacgcca tcctgcgacg gcaggaggac
1921 ttctacccat ttctgaagga taaccgcgag aaaatcgaaa agatcctgac cttcagaatc
1981 ccctactatg tggggcctct ggcacgggga aatagtagat ttgcctggat gacaagaaag
2041 tcagaggaaa ctatcacccc ctggaacttc gaggaagtgg tcgataaagg cgctagcgca
2101 cagtccttca ttgaaaggat gacaaatttt gacaagaacc tgccaaatga gaaggtgctg
2161 cccaaacaca gcctgctgta cgaatatttc acagtgtata acgagctgac taaagtgaag
2221 tacgtcaccg aagggatgcg caagcccgca ttcctgtccg gagagcagaa gaaagccatc
2281 gtggacctgc tgtttaagac aaatcggaaa gtgactgtca aacagctgaa ggaagactat
2341 ttcaagaaaa ttgagtgttt cgattcagtg gaaatcagcg gcgtcgagga caggtttaac
2401 gcctccctgg ggacctacca cgatctgctg aagatcatca aggataagga cttcctggac
2461 aacgaggaaa atgaggacat cctggaggac attgtgctga cactgactct gtttgaggat
2521 cgcgaaatga tcgaggaacg actgaagact tatgcccatc tgttcgatga caaagtgatg
2581 aagcagctga aaagaaggcg ctacaccgga tggggacgcc tgagccgaaa actgatcaat
2641 gggattagag acaagcagag cggaaaaact atcctggact ttctgaagtc cgatggcttc
2701 gccaacagga acttcatgca gctgattcac gatgactctc tgaccttcaa ggaggacatc
2761 cagaaagcac aggtgtctgg ccagggggac agtctgcacg agcatatcgc aaacctggcc
2821 ggcagccccg ccatcaagaa agggattctg cagaccgtga aggtggtgga cgaactggtc
2881 aaggtcatgg gacgacacaa acctgagaac atcgtgattg agatggcccg cgaaaatcag
2941 acaactcaga agggccagaa aaacagtcga gaacggatga agagaatcga ggaaggcatc
3001 aaggagctgg ggtcacagat cctgaaggag catcctgtgg aaaacactca gctgcagaat
3061 gagaaactgt atctgtacta tctgcagaat ggacgggata tgtacgtgga ccaggagctg
3121 gatattaaca gactgagtga ttatgacgtg gatgccatcg tccctcagag cttcctgaag
3181 gatgactcca ttgacaacaa ggtgctgacc aggtccgaca agaaccgcgg caaatcagat
3241 aatgtgccaa gcgaggaagt ggtcaagaaa atgaagaact actggaggca gctgctgaat
3301 gccaagctga tcacacagcg gaaatttgat aacctgacta aggcagaaag aggaggcctg
3361 tctgagctgg acaaggccgg cttcatcaag cggcagctgg tggagacaag acagatcact
3421 aagcacgtcg ctcagattct ggatagcaga atgaacacaa agtacgatga aaacgacaag
3481 ctgatcaggg aggtgaaagt cattactctg aaatccaagc tggtgtctga ctttagaaag
3541 gatttccagt tttataaagt cagggagatc aacaactacc accatgctca tgacgcatac
3601 ctgaacgcag tggtcgggac cgccctgatt aagaaatacc ccaagctgga gtccgagttc
3661 gtgtacggag actataaagt gtacgatgtc cggaagatga tcgccaaatc tgagcaggaa
3721 attggcaagg ccaccgctaa gtatttcttt tacagtaaca tcatgaattt ctttaagacc
3781 gaaatcacac tggcaaatgg ggagatcaga aaaaggcctc tgattgagac caacggggag
3841 acaggagaaa tcgtgtggga caagggaagg gattttgcta ccgtgcgcaa agtcctgtcc
3901 atgccccaag tgaatattgt caagaaaact gaagtgcaga ccgggggatt ctctaaggag
3961 agtattctgc ctaagcgaaa ctctgataaa ctgatcgccc ggaagaaaga ctgggacccc
4021 aagaagtatg gcgggttcga ctctccaaca gtggcttaca gtgtcctggt ggtcgcaaag
4081 gtggaaaagg ggaagtccaa gaaactgaag tctgtcaaag agctgctggg aatcactatt
4141 atggaacgca gctccttcga gaagaatcct atcgattttc tggaagccaa gggctataaa
4201 gaggtgaaga aagacctgat cattaagctg ccaaaatact cactgtttga gctggaaaac
4261 ggacgaaagc gaatgctggc aagcgccgga gaactgcaga agggcaatga gctggccctg
4321 ccctccaaat acgtgaactt cctgtatctg gctagccact acgagaaact gaaggggtcc
4381 cctgaggata acgaacagaa gcagctgttt gtggagcagc acaaacatta tctggacgag
4441 atcattgaac agatttcaga gttcagcaag agagtgatcc tggctgacgc aaatctggat
4501 aaagtcctga gcgcatacaa caagcaccga gacaaaccaa tccgggagca ggccgaaaat
4561 atcattcatc tgttcaccct gacaaacctg ggcgcccctg cagccttcaa gtattttgac
4621 accacaatcg atcggaagag atacacttct accaaagagg tgctggatgc taccctgatc
4681 caccagagta ttaccggcct gtatgagaca cgcatcgacc tgtcacagct gggaggcgat
4741 gggagcccca agaaaaagcg gaaggtgtct agttaa.
```

[0404] In certain embodiments, the gene editing composition comprises a fusion protein. In certain embodiments, the fusion protein comprises a nuclease-inactivated Cas9 (dCas9) protein and a Clo051 nuclease or a Clo051 nuclease domain. In certain embodiments, the gene editing composition further comprises a guide sequence. In certain embodiments, the guide sequence comprises an RNA sequence. In certain embodiments, the fusion protein comprises or consists of the amino acid sequence:

```
(SEQ ID NO: 14656)
      1 MPKKKRKVEG IKSNISLLKD ELRGQISHIS HEYLSLIDLA FDSKQNRLFE MKVLELLVNE
    61 YGFKGRHLGG SRKPDGIVYS TTLEDNFGII VDTKAYSEGY SLPISQADEM ERYVRENSNR
  121 DEEVNPNKWW ENFSEEVKKY YFVFISGSFK GKFEEQLRRL SMTTGVNGSA VNVVNLLLGA
  181 EKIRSGEMTI EELERAMFNN SEFILKYGGG GSDKKYSIGL AIGTNSVGWA VITDEYKVPS
  241 KKFKVLGNTD RHSIKKNLIG ALLFDSGETA EATRLKRTAR RRYTRRKNRI CYLQEIFSNE
  301 MAKVDDSFFH RLEESFLVEE DKKHERHPIF GNIVDEVAYH EKYPTIYHLR KKLVDSTDKA
  361 DLRLIYLALA HMIKFRGHFL IEGDLNPDNS DVDKLFIQLV QTYNQLFEEN PINASGVDAK
  421 AILSARLSKS RRLENLIAQL PGEKKNGLFG NLIALSLGLT PNFKSNFDLA EDAKLQLSKD
  481 TYDDDLDNLL AQIGDQYADL FLAAKNLSDA ILLSDILRVN TEITKAPLSA SMIKRYDEHH
  541 QDLTLLKALV RQQLPEKYKE IFFDQSKNGY AGYIDGGASQ EEFYKFIKPI LEKMDGTEEL
  601 LVKLNREDLL RKQRTFDNGS IPHQIHLGEL HAILRRQEDF YPFLKDNREK IEKILTFRIP
  661 YYVGPLARGN SRFAWMTRKS EETITPWNFE EVVDKGASAQ SFIERMTNFD KNLPNEKVLP
  721 KHSLLYEYFT VYNELTKVKY VTEGMRKPAF LSGEQKKAIV DLLFKTNRKV TVKQLKEDYF
  781 KKIECFDSVE ISGVEDRFNA SLGTYHDLLK IIKDKDFLDN EENEDILEDI VLTLTLFEDR
  841 EMIEERLKTY AHLFDDKVMK QLKRRRYTGW GRLSRKLING IRDKQSGKTI LDFLKSDGFA
  901 NRNFMQLIHD DSLTFKEDIQ KAQVSGQGDS LHEHIANLAG SPAIKKGILQ TVKVVDELVK
  961 VMGRHKPENI VIEMARENQT TQKGQKNSRE RMKRIEEGIK ELGSQILKEH PVENTQLQNE
1021 KLYLYYLQNG RDMYVDQELD INRLSDYDVD AIVPQSFLKD DSIDNKVLTR SDKNRGKSDN
1081 VPSEEVVKKM KNYWRQLLNA KLITQRKFDN LTKAERGGLS ELDKAGFIKR QLVETRQITK
1141 HVAQILDSRM NTKYDENDKL IREVKVITLK SKLVSDFRKD FQFYKVREIN NYHHAHDAYL
1201 NAVVGTALIK KYPKLESEFV YGDYKVYDVR KMIAKSEQEI GKATAKYFFY SNIMNFFKTE
1261 ITLANGEIRK RPLIETNGET GEIVWDKGRD FATVRKVLSM PQVNIVKKTE VQTGGFSKES
1321 ILPKRNSDKL IARKKDWDPK KYGGFDSPTV AYSVLVVAKV EKGKSKKLKS VKELLGITIM
1381 ERSSFEKNPI DFLEAKGYKE VKKDLIIKLP KYSLFELENG RKRMLASAGE LQKGNELALP
1441 SKYVNFLYLA SHYEKLKGSP EDNEQKQLFV EQHKHYLDEI IEQISEFSKR VILADANLDK
1501 VLSAYNKHRD KPIREQAENI IHLFTLINLG APAAFKYFDT TIDRKRYTST KEVLDATLIH
1561 QSITGLYETR IDLSQLGGDG SPKKKRKV.
```

In certain embodiments, the fusion protein is encoded by a nucleic acid comprising or consisting of the sequence:

```
(SEQ ID NO: 14657)
      1 atgcctaaga agaagcggaa ggtggaaggc atcaaaagca acatctccct cctgaaagac
    61 gaactccggg ggcagattag ccacattagt cacgaatacc tctccctcat cgacctggct
  121 ttcgatagca agcagaacag gctctttgag atgaaagtgc tggaactgct cgtcaatgag
  181 tacgggttca agggtcgaca cctcggcgga tctaggaaac cagacggcat cgtgtatagt
  241 accacactgg aagacaactt tgggatcatt gtggatacca aggcatactc tgagggttat
  301 agtctgccca tttcacaggc cgacgagatg gaacggtacg tgcgcgagaa ctcaaataga
  361 gatgaggaag tcaaccctaa caagtggtgg gagaacttct ctgaggaagt gaagaaatac
  421 tacttcgtct ttatcagcgg gtccttcaag ggtaaatttg aggaacagct caggagactg
  481 agcatgacta ccggcgtgaa tggcagcgcc gtcaacgtgg tcaatctgct cctgggcgct
  541 gaaaagattc ggagcggaga gatgaccatc gaagagctgg agagggcaat gtttaataat
  601 agcgagttta tcctgaaata cggtggcggt ggatccgata aaaagtattc tattggttta
  661 gccatcggca ctaattccgt tggatgggct gtcataaccg atgaatacaa agtaccttca
  721 aagaaattta aggtgttggg gaacacagac cgtcattcga ttaaaaagaa tcttatcggt
  781 gccctcctat tcgatagtgg cgaaacggca gaggcgactc gcctgaaacg aaccgctcgg
  841 agaaggtata cacgtcgcaa gaaccgaata tgttacttac aagaaatttt tagcaatgag
  901 atggccaaag ttgacgattc tttctttcac cgtttggaag agtccttcct tgtcgaagag
  961 gacaagaaac atgaacggca ccccatcttt ggaaacatag tagatgaggt ggcatatcat
1021 gaaaagtacc caacgattta tcacctcaga aaaaagctag ttgactcaac tgataaagcg
1081 gacctgaggt taatctactt ggctcttgcc catatgataa agttccgtgg gcactttctc
1141 attgagggtg atctaaatcc ggacaactcg gatgtcgaca aactgttcat ccagttagta
1201 caaacctata atcagttgtt tgaagagaac cctataaatg caagtggcgt ggatgcgaag
1261 gctattctta gcgcccgcct ctctaaatcc cgacggctag aaaacctgat cgcacaatta
1321 cccggagaga agaaaaatgg gttgttcggt aaccttatag cgctctcact aggcctgaca
1381 ccaaatttta agtcgaactt cgacttagct gaagatgcca aattgcagct tagtaaggac
1441 acgtacgatg acgatctcga caatctactg gcacaaattg gagatcagta tgcggactta
1501 tttttggctg ccaaaaacct tagcgatgca atcctcctat ctgacatact gagagttaat
1561 actgagatta ccaaggcgcc gttatccgct tcaatgatca aaaggtacga tgaacatcac
1621 caagacttga cacttctcaa ggccctagtc cgtcagcaac tgcctgagaa atataaggaa
1681 atattctttg atcagtcgaa aaacgggtac gcaggttata ttgacggcgg agcgagtcaa
1741 gaggaattct acaagtttat caaacccata ttagagaaga tggatgggac ggaagagttg
1801 cttgtaaaac tcaatcgcga agatctactg cgaaagcagc ggactttcga caacggtagc
1861 attccacatc aaatccactt aggcgaattg catgctatac ttagaaggca ggaggatttt
1921 tatccgttcc tcaaagacaa tcgtgaaaag attgagaaaa tcctaacctt tcgcatacct
1981 tactatgtgg gacccctggc ccgagggaac tctcggttcg catggatgac aagaaagtcc
2041 gaagaaacga ttactccatg gaattttgag gaagttgtcg ataaaggtgc gtcagctcaa
2101 tcgttcatcg agaggatgac caactttgac aagaatttac cgaacgaaaa agtattgcct
2161 aagcacagtt tactttacga gtatttcaca gtgtacaatg aactcacgaa agttaagtat
2221 gtcactgagg gcatgcgtaa acccgccttt ctaagcggag aacagaagaa agcaatagta
2281 gatctgttat tcaagaccaa ccgcaaagtg acagttaagc aattgaaaga ggactacttt
2341 aagaaaattg aatgcttcga ttctgtcgag atctccgggg tagaagatcg atttaatgcg
2401 tcacttggta cgtatcatga cctcctaaag ataattaaag ataaggactt cctggataac
2461 gaagagaatg aagatatctt agaagatata gtgttgactc ttaccctctt tgaagatcgg
2521 gaaatgattg aggaaagact aaaaacatac gctcacctgt tcgacgataa ggttatgaaa
2581 cagttaaaga ggcgtcgcta tacgggctgg ggacgattgt cgcggaaact tatcaacggg
2641 ataagagaca agcaaagtgg taaaactatt ctcgattttc taaagagcga cggcttcgcc
2701 aataggaact ttatgcagct gatccatgat gactctttaa ccttcaaaga ggatatacaa
2761 aaggcacagg tttccggaca aggggactca ttgcacgaac atattgcgaa tcttgctggt
2821 tcgccagcca tcaaaaaggg catactccag acagtcaaag tagtggatga gctagttaag
2881 gtcatgggac gtcacaaacc ggaaaacatt gtaatcgaga tggcacgcga aaatcaaacg
2941 actcagaagg ggcaaaaaaa cagtcgagag cggatgaaga gaatagaaga gggtattaaa
3001 gaactgggca gccagatctt aaaggagcat cctgtggaaa atacccaatt gcagaacgag
3061 aaactttacc tctattacct acaaaatgga agggacatgt atgttgatca ggaactggac
3121 ataaaccgtt tatctgatta cgacgtcgat gccattgtac cccaatcctt tttgaaggac
3181 gattcaatcg acaataaagt gcttacacgc tcggataaga accgagggaa aagtgacaat
3241 gttccaagcg aggaagtcgt aaagaaaatg aagaactatt ggcggcagct cctaaatgcg
3301 aaactgataa cgcaaagaaa gttcgataac ttaactaaag ctgagagggg tggcttgtct
3361 gaacttgaca aggccggatt tattaaacgt cagctcgtgg aaacccgcca aatcacaaag
3421 catgttgcac agatactaga ttcccgaatg aatacgaaat acgacgagaa cgataagctg
3481 attcgggaag tcaaagtaat cactttaaag tcaaaattgg tgtcggactt cagaaaggat
3541 tttcaattct ataaagttag ggagataaat aactaccacc atgcgcacga cgcttatctt
3601 aatgccgtcg tagggaccgc actcattaag aaatacccga agctagaaag tgagtttgtg
3661 tatggtgatt acaaagttta tgacgtccgt aagatgatcg cgaaaagcga acaggagata
3721 ggcaaggcta cagccaaata cttcttttat tctaacatta tgaatttctt taagacggaa
3781 atcactctgg caaacggaga gatacgcaaa cgacctttaa ttgaaaccaa tggggagaca
3841 ggtgaaatcg tatgggataa gggccgggac ttcgcgacgg tgagaaaagt tttgtccatg
3901 ccccaagtca acatagtaaa gaaaactgag gtgcagaccg gagggttttc aaaggaatcg
3961 attcttccaa aaaggaatag tgataagctc atcgctcgta aaaaggactg ggacccgaaa
4021 aagtacggtg gcttcgatag ccctacagtt gcctattctg tcctagtagt ggcaaaagtt
4081 gagaagggaa aatccaagaa actgaagtca gtcaaagaat tattggggat aacgattatg
4141 gagcgctcgt cttttgaaaa gaaccccatc gacttccttg aggcgaaagg ttacaaggaa
4201 gtaaaaaagg atctcataat taaactacca aagtatagtc tgtttgagtt agaaaatggc
4261 cgaaaacgga tgttggctag cgccggagag cttcaaaagg ggaacgaact cgcactaccg
4321 tctaaatacg tgaatttcct gtatttagcg tcccattacg agaagttgaa aggttcacct
4381 gaagataacg aacagaagca actttttgtt gagcagcaca aacattatct cgacgaaatc
4441 atagagcaaa tttcggaatt cagtaagaga gtcatcctag ctgatgccaa tctggacaaa
4501 gtattaagcg catacaacaa gcacagggat aaacccatac gtgagcaggc ggaaaatatt
4561 atccatttgt ttactcttac caacctcggc gctccagccg cattcaagta ttttgacaca
4621 acgatagatc gcaaacgata cacttctacc aaggaggtgc tagacgcgac actgattcac
4681 caatccatca cgggattata tgaaactcgg atagatttgt cacagcttgg gggtgacgga
4741 tcccccaaga agaagaggaa agtctga.
```

[0405] In certain embodiments, the dCas9 of the disclosure comprises a dCas9 isolated or derived from Staphyloccocus pyogenes. In certain embodiments, the dCas9 comprises a dCas9 with substitutions at positions 10 and 840 of the amino acid sequence of the dCas9, which inactivate the catalytic site. In certain embodiments, these substitutions are D10A and H840A. In certain embodiments, the “X” residue at position 1 of the dCas9 sequence is a methionine (M). In certain embodiments, the amino acid sequence of the dCas9 comprises the sequence of:

```
(SEQ ID NO: 14498)
      1 XDKKYSIGLA IGTNSVGWAV ITDEYKVPSK KFKVLGNTDR HSIKKNLIGA LLFDSGETAE
    61 ATRLKRTARR RYTRRKNRIC YLQEIFSNEM AKVDDSFFHR LEESFLVEED KKHERHPIFG
  121 NIVDEVAYHE KYPTIYHLRK KLVDSTDKAD LRLIYLALAH MIKFRGHFLI EGDLNPDNSD
  181 VDKLFIQLVQ TYNQLFEENP INASGVDAKA ILSARLSKSR RLENLIAQLP GEKKNGLFGN
  241 LIALSLGLTP NFKSNFDLAE DAKLQLSKDT YDDDLDNLLA QIGDQYADLF LAAKNLSDAI
  301 LLSDILRVNT EITKAPLSAS MIKRYDEHHQ DLTLLKALVR QQLPEKYKEI FFDQSKNGYA
  361 GYIDGGASQE EFYKFIKPIL EKMDGTEELL VKLNREDLLR KQRTFDNGSI PHQIHLGELH
  421 AILRRQEDFY PFLKDNREKI EKILTFRIPY YVGPLARGNS RFAWMTRKSE ETITPWNFEE
  481 VVDKGASAQS FIERMTNFDK NLPNEKVLPK HSLLYEYFTV YNELTKVKYV TEGMRKPAFL
  541 SGEQKKAIVD LLFKTNRKVT VKQLKEDYFK KIECFDSVEI SGVEDRFNAS LGTYHDLLKI
  601 IKDKDFLDNE ENEDILEDIV LTLTLFEDRE MIEERLKTYA HLFDDKVMKQ LKRRRYTGWG
  661 RLSRKLINGI RDKQSGKTIL DFLKSDGFAN RNFMQLIHDD SLTFKEDIQK AQVSGQGDSL
  721 HEHIANLAGS PAIKKGILQT VKVVDELVKV MGRHKPENIV IEMARENQTT QKGQKNSRER
  781 MKRIEEGIKE LGSQILKEHP VENTQLQNEK LYLYYLQNGR DMYVDQELDI NRLSDYDVDA
  841 IVPQSFLKDD SIDNKVLTRS DKNRGKSDNV PSEEVVKKMK NYWRQLLNAK LITQRKFDNL
  901 TKAERGGLSE LDKAGFIKRQ LVETRQITKH VAQILDSRMN TKYDENDKLI REVKVITLKS
  961 KLVSDFRKDF QFYKVREINN YHHAHDAYLN AVVGTALIKK YPKLESEFVY GDYKVYDVRK
1021 MIAKSEQEIG KATAKYFFYS NIMNFFKTEI TLANGEIRKR PLIETNGETG EIVWDKGRDF
1081 ATVRKVLSMP QVNIVKKTEV QTGGFSKESI LPKRNSDKLI ARKKDWDPKK YGGFDSPTVA
1141 YSVLVVAKVE KGKSKKLKSV KELLGITIME RSSFEKNPID FLEAKGYKEV KKDLIIKLPK
1201 YSLFELENGR KRMLASAGEL QKGNELALPS KYVNFLYLAS HYEKLKGSPE DNEQKQLFVE
1261 QHKHYLDEII EQISEFSKRV ILADANLDKV LSAYNKHRDK PIREQAENII HLFTLTNLGA
1321 PAAFKYFDTT IDRKRYTSTK EVLDATLIHQ SITGLYETRI DLSQLGGD.
```

[0406] In certain embodiments, the dCas9 of the disclosure comprises a dCas9 isolated or derived from Staphylococcus aureus. In certain embodiments, the dCas9 comprises a dCas9 with substitutions at positions 10 and 580 of the amino acid sequence of the dCas9 which inactivate the catalytic site. In certain embodiments, these substitutions are D10A and N580A. In certain embodiments, the dCas9 is a small and inactive Cas9 (dSaCas9). In certain embodiments, the amino acid sequence of the dSaCas9 comprises the sequence of:

```
(SEQ ID NO: 14658)
      1 mkrnyilglA igitsvgygi idyetrdvid agvrlfkean vennegrrsk rgarrlkrrr
    61 rhriqrvkkl lfdynlltdh selsginpye arvkglsqkl seeefsaall hlakrrgvhn
  121 vneveedtgn elstkeqisr nskaleekyv aelqlerlkk dgevrgsinr fktsdyvkea
  181 kqllkvqkay hqldqsfidt yidlletrrt yyegpgegsp fgwkdikewy emlmghctyf
  241 peelrsvkya ynadlynaln dlnnlvitrd enekleyyek fqiienvfkq kkkptlkqia
  301 keilvneedi kgyrvtstgk peftnlkvyh dikditarke iienaelldq iakiltiyqs
  361 sediqeeltn lnseltqeei eqisnlkgyt gthnlslkai nlildelwht ndnqiaifnr
  421 lklvpkkvd1 sqqkeipttl vddfilspvv krsfiqsikv inaiikkygl pndiiielar
  481 eknskdaqkm inemqkrnrq tnerieeiir ttgkenakyl iekiklhdmq egkclyslea
  541 ipledllnnp fnyevdhiip rsysfdnsfn nkvlvkqeeA skkgnrtpfq ylsssdskis
  601 yetfkkhiln lakgkgrisk tkkeylleer dinrfsvqkd finrnlvdtr yatrglmnll
  661 rsyfrvnnld vkvksinggf tsflrrkwkf kkernkgykh haedaliian adfifkewkk
  721 ldkakkvmen qmfeekqaes mpeieteqey keifitphqi khikdfkdyk yshrvdkkpn
  781 relindtlys trkddkgntl ivnnlnglyd kdndklkkli nkspekllmy hhdpqtyqkl
  841 klimeqygde knplykyyee tgnyltkysk kdngpvikki kyygnklnah lditddypns
  901 rnkvvklslk pyrfdvyldn gvykfvtvkn ldvikkenyy evnskcyeea kklkkisnqa
  961 efiasfynnd likingelyr vigvnndlln rievnmidit yreylenmnd krppriikti
1021 asktqsikky stdilgnlye vkskkhpqii kkg.
```

[0407] In certain embodiments of the gene editing systems described herein, the nuclease may comprise, consist essentially of or consist of, a homodimer or a heterodimer. Nuclease domains of the disclosure may comprise, consist essentially of or consist of a nuclease domain isolated, derived or recombined from a transcription-activator-like effector nuclease (TALEN). TALENs are transcription factors with programmable DNA binding domains that provide a means to create designer proteins that bind to pre-determined DNA sequences or individual nucleic acids. Modular DNA binding domains have been identified in transcriptional activator-like (TAL) proteins, or, more specifically, transcriptional activator-like effector nucleases (TALENs), thereby allowing for the de novo creation of synthetic transcription factors that bind to DNA sequences of interest and, if desirable, also allowing a second domain present on the protein or polypeptide to perform an activity related to DNA. TAL proteins have been derived from the organisms Xanthomonas and Ralstonia.

[0408] In certain embodiments of the gene editing systems described herein, the nuclease domain may comprise, consist essentially of or consist of a nuclease domain isolated, derived or recombined from a TALEN and a type IIS endonuclease. In certain embodiments of the disclosure, the type IIS endonuclease may comprise, consist essentially of or consist of AciI, Mn1I, AlwI, BbvI, BccI, BceAI, BsmAI, BsmFI, BspCNI, BsrI, BtsCI, HgaI, HphI, HpyAV, MbolI, My1I, PleI, SfaNI, AcuI, BciVI, BfuAI, BmgBI, BmrI, BpmI, BpuEI, BsaI, BseRI, BsgI, BsmI, BspMI, BsrBI, BsrBI, BsrDI, BtgZI, BtsI, EarI, EciI, MmeI, NmeAIII, BbvCI, Bpu10I, BspQI, SapI, BaeI, BsaXI, CspCI, BfiI, MboII, Acc36I, FokI or Clo051. In certain embodiments of the disclosure, the type IIS endonuclease may comprise, consist essentially of or consist of Clo051 (SEQ ID NO: 14503).

[0409] In certain embodiments of the gene editing systems described herein, the nuclease domain of may comprise, consist essentially of or consist of a nuclease domain isolated, derived or recombined from a zinc finger nuclease (ZFN) and a type IIS endonuclease. In certain embodiments of the disclosure, the type IIS endonuclease may comprise, consist essentially of or consist of AciI, Mn1I, AlwI, BbvI, BccI, BceAI, BsmAI, BsmFI, BspCNI, BsrI, BtsCI, HgaI, HphI, HpyAV, Mbo1I, My1I, PleI, SfaNI, AcuI, BciVI, BfuAI, BmgBI, BmrI, BpmI, BpuEI, BsaI, BseRI, BsgI, BsmI, BspMI, BsrBI, BsrBI, BsrDI, BtgZI, BtsI, EarI, EciI, MmeI, NmeAIII, BbvCI, Bpu10I, BspQI, SapI, BaeI, BsaXI, CspCI, BfiI, MboII, Acc36I, FokI or Clo051. In certain embodiments of the disclosure, the type IIS endonuclease may comprise, consist essentially of or consist of Clo051 (SEQ ID NO: 14503).

[0410] In certain embodiments of the gene editing systems described herein, the DNA binding domain and the nuclease domain may be covalently linked. For example, a fusion protein may comprise the DNA binding domain and the nuclease domain. In certain embodiments of the genomic editing compositions or constructs of the disclosure, the DNA binding domain and the nuclease domain may be operably linked through a non-covalent linkage.

### Therapeutic Proteins

[0411] In certain embodiments of the composition and methods of the disclosure, modified immune or immune precursor cells express therapeutic proteins. Therapeutic proteins of the disclosure include secreted proteins. Preferably, in a therapeutic context, the therapeutic protein is a human protein, including a secreted human protein. When expressed or secreted by immune or immune precursor cells of the disclosure, the combination comprising the immune or immune precursor cell and the therapeutic protein secreted therefrom may be considered a monotherapy. However, the immune or immune precursor cells of the disclosure may be administered as a combination therapy with a second agent. Human therapeutic proteins of the disclosure include, but are not limited to, those provided at Table 1.

TABLE 1
Exemplary Human Secreted Proteins

| Gene Name | Gene Description | Protein SEQ ID NO |
|---|---|---|
| A1BG | Alpha-1-B glycoprotein | SEQ ID NOS: 1-2 |
| A2M | Alpha-2-macroglobulin | SEQ ID NOS: 3-6 |
| A2ML1 | Alpha-2-macroglobulin-like 1 | SEQ ID NOS: 7-12 |
| A4GNT | Alpha-1,4-N-acetylglucosaminyltransferase | SEQ ID NO: 13 |
| AADACL2 | Arylacetamide deacetylase-like 2 | SEQ ID NOS: 14-15 |
| AANAT | Aralkylamine N-acetyltransferase | SEQ ID NOS: 16-19 |
| ABCG1 | ATP-binding cassette, sub-family G (WHITE), | SEQ ID NOS: 20-26 |
| | member 1 | |
| ABHD1 | Abhydrolase domain containing 1 | SEQ ID NOS: 27-31 |
| ABHD10 | Abhydrolase domain containing 10 | SEQ ID NOS: 32-35 |
| ABHD14A | Abhydrolase domain containing 14A | SEQ ID NOS: 36-40 |
| ABHD15 | Abhydrolase domain containing 15 | SEQ ID NO: 41 |
| ABI3BP | ABI family, member 3 (NESH) binding protein | SEQ ID NOS: 42-63 |
| FAM175A | Family with sequence similarity 175, member A | SEQ ID NOS: 64-71 |
| LA16c- | | SEQ ID NO: 72 |
| 380H5.3 | | |
| AC008641.1 | | SEQ ID NO: 73 |
| CTB- | | SEQ ID NOS: 74-75 |
| 601318.6 | | |
| AC009133.22 | | SEQ ID NO: 76 |
| AC009491.2 | | SEQ ID NO: 77 |
| RP11- | | SEQ ID NOS: 78-80 |
| 977G19.10 | | |
| CTD- | | SEQ ID NOS: 81-84 |
| 2370N5.3 | | |
| RP11- | | SEQ ID NOS: 85-87 |
| 196G11.1 | | |
| AC136352.5 | | SEQ ID NO: 88 |
| RP11- | | SEQ ID NO: 89 |
| 812E19.9 | | |
| AC145212.4 | MaFF-interacting protein | SEQ ID NO: 90 |
| AC233755.1 | | SEQ ID NO: 91 |
| AC011513.3 | | SEQ ID NOS: 92-93 |
| ACACB | Acetyl-CoA carboxylase beta | SEQ ID NOS: 94-100 |
| ACAN | Aggrecan | SEQ ID NOS: 101-108 |
| ACE | Angiotensin I converting enzyme | SEQ ID NOS: 109-121 |
| ACHE | Acetylcholinesterase (Yt blood group) | SEQ ID NOS: 122-134 |
| ACP2 | Acid phosphatase 2, lysosomal | SEQ ID NOS: 135-142 |
| ACP5 | Acid phosphatase 5, tartrate resistant | SEQ ID NOS: 143-151 |
| ACP6 | Acid phosphatase 6, lysophosphatidic | SEQ ID NOS: 152-158 |
| PAPL | Iron/zinc purple acid phosphatase-like protein | SEQ ID NOS: 159-162 |
| ACPP | Acid phosphatase, prostate | SEQ ID NOS: 163-167 |
| ACR | Acrosin | SEQ ID NOS: 168-169 |
| ACRBP | Acrosin binding protein | SEQ ID NOS: 170-174 |
| ACRV1 | Acrosomal vesicle protein 1 | SEQ ID NOS: 175-178 |
| ACSF2 | Acyl-CoA synthetase family member 2 | SEQ ID NOS: 179-187 |
| ACTL10 | Actin-like 10 | SEQ ID NO: 188 |
| ACVR1 | Activin A receptor, type I | SEQ ID NOS: 189-197 |
| ACVR1C | Activin A receptor, type IC | SEQ ID NOS: 198-201 |
| ACVRL1 | Activin A receptor type II-like 1 | SEQ ID NOS: 202-207 |
| ACYP1 | Acylphosphatase 1, erythrocyte (common) type | SEQ ID NOS: 208-213 |
| ACYP2 | Acylphosphatase 2, muscle type | SEQ ID NOS: 214-221 |
| CECR1 | Cat eye syndrome chromosome region, candidate 1 | SEQ ID NOS: 222-229 |
| ADAM10 | ADAM metallopeptidase domain 10 | SEQ ID NOS: 230-237 |
| ADAM12 | ADAM metallopeptidase domain 12 | SEQ ID NOS: 238-240 |
| ADAM15 | ADAM metallopeptidase domain 15 | SEQ ID NOS: 241-252 |
| ADAM17 | ADAM metallopeptidase domain 17 | SEQ ID NOS: 253-255 |
| ADAM18 | ADAM metallopeptidase domain 18 | SEQ ID NOS: 256-260 |
| ADAM22 | ADAM metallopeptidase domain 22 | SEQ ID NOS: 261-269 |
| ADAM28 | ADAM metallopeptidase domain 28 | SEQ ID NOS: 270-275 |
| ADAM29 | ADAM metallopeptidase domain 29 | SEQ ID NOS: 276-284 |
| ADAM32 | ADAM metallopeptidase domain 32 | SEQ ID NOS: 285-291 |
| ADAM33 | ADAM metallopeptidase domain 33 | SEQ ID NOS: 292-296 |
| ADAM7 | ADAM metallopeptidase domain 7 | SEQ ID NOS: 297-300 |
| ADAM8 | ADAM metallopeptidase domain 8 | SEQ ID NOS: 301-305 |
| ADAM9 | ADAM metallopeptidase domain 9 | SEQ ID NOS: 306-311 |
| ADAMDEC1 | ADAM-like, decysin 1 | SEQ ID NOS: 312-314 |
| ADAMTS1 | ADAM metallopeptidase with thrombospondin type | SEQ ID NOS: 315-318 |
| | 1 motif, 1 | |
| ADAMTS10 | ADAM metallopeptidase with thrombospondin type | SEQ ID NOS: 319-324 |
| | 1 motif, 10 | |
| ADAMTS12 | ADAM metallopeptidase with thrombospondin type | SEQ ID NOS: 325-327 |
| | 1 motif, 12 | |
| ADAMTS13 | ADAM metallopeptidase with thrombospondin type | SEQ ID NOS: 328-335 |
| | 1 motif, 13 | |
| ADAMTS14 | ADAM metallopeptidase with thrombospondin type | SEQ ID NOS: 336-337 |
| | 1 motif, 14 | |
| ADAMTS15 | ADAM metallopeptidase with thrombospondin type | SEQ ID NO: 338 |
| | 1 motif, 15 | |
| ADAMTS16 | ADAM metallopeptidase with thrombospondin type | SEQ ID NOS: 339-340 |
| | 1 motif, 16 | |
| ADAMTS17 | ADAM metallopeptidase with thrombospondin type | SEQ ID NOS: 341-344 |
| | 1 motif, 17 | |
| ADAMTS18 | ADAM metallopeptidase with thrombospondin type | SEQ ID NOS: 345-348 |
| | 1 motif, 18 | |
| ADAMTS19 | ADAM metallopeptidase with thrombospondin type | SEQ ID NOS: 349-352 |
| | 1 motif, 19 | |
| ADAMTS2 | ADAM metallopeptidase with thrombospondin type | SEQ ID NOS: 353-355 |
| | 1 motif, 2 | |
| ADAMTS20 | ADAM metallopeptidase with thrombospondin type | SEQ ID NOS: 356-359 |
| | 1 motif, 20 | |
| ADAMTS3 | ADAM metallopeptidase with thrombospondin type | SEQ ID NOS: 360-361 |
| | 1 motif, 3 | |
| ADAMTS5 | ADAM metallopeptidase with thrombospondin type | SEQ ID NO: 362 |
| | 1 motif, 5 | |
| ADAMTS6 | ADAM metallopeptidase with thrombospondin type | SEQ ID NOS: 363-364 |
| | 1 motif, 6 | |
| ADAMTS7 | ADAM metallopeptidase with thrombospondin type | SEQ ID NO: 365 |
| | 1 motif, 7 | |
| ADAMTS8 | ADAM metallopeptidase with thrombospondin type | SEQ ID NO: 366 |
| | 1 motif, 8 | |
| ADAMTS9 | ADAM metallopeptidase with thrombospondin type | SEQ ID NOS: 367-371 |
| | 1 motif, 9 | |
| ADAMTSL1 | ADAMTS-like 1 | SEQ ID NOS: 372-382 |
| ADAMTSL2 | ADAMTS-like 2 | SEQ ID NOS: 383-385 |
| ADAMTSL3 | ADAMTS-like 3 | SEQ ID NOS: 386-387 |
| ADAMTSL4 | ADAMTS-like 4 | SEQ ID NOS: 388-391 |
| ADAMTSL5 | ADAMTS-like 5 | SEQ ID NOS: 392-397 |
| ADCK1 | AarF domain containing kinase 1 | SEQ ID NOS: 398-402 |
| ADCYAP1 | Adenylate cyclase activating polypeptide 1 | SEQ ID NOS: 403-404 |
| | (pituitary) | |
| ADCYAP1R1 | Adenylate cyclase activating polypeptide 1 | SEQ ID NOS: 405-411 |
| | (pituitary) receptor type I | |
| ADGRA3 | Adhesion G protein-coupled receptor A3 | SEQ ID NOS: 412-416 |
| ADGRB2 | Adhesion G protein-coupled receptor B2 | SEQ ID NOS: 417-425 |
| ADGRD1 | Adhesion G protein-coupled receptor D1 | SEQ ID NOS: 426-431 |
| ADGRE3 | Adhesion G protein-coupled receptor E3 | SEQ ID NOS: 432-436 |
| ADGRE5 | Adhesion G protein-coupled receptor E5 | SEQ ID NOS: 437-442 |
| ADGRF1 | Adhesion G protein-coupled receptor F1 | SEQ ID NOS: 443-447 |
| ADGRG1 | Adhesion G protein-coupled receptor G1 | SEQ ID NOS: 448-512 |
| ADGRG5 | Adhesion G protein-coupled receptor G5 | SEQ ID NOS: 513-515 |
| ADGRG6 | Adhesion G protein-coupled receptor G6 | SEQ ID NOS: 516-523 |
| ADGRV1 | Adhesion G protein-coupled receptor V1 | SEQ ID NOS: 524-540 |
| ADI1 | Acireductone dioxygenase 1 | SEQ ID NOS: 541-543 |
| ADIG | Adipogenin | SEQ ID NOS: 544-547 |
| ADIPOQ | Adiponectin, C1Q and collagen domain containing | SEQ ID NOS: 548-549 |
| ADM | Adrenomedullin | SEQ ID NOS: 550-557 |
| ADM2 | Adrenomedullin 2 | SEQ ID NOS: 558-559 |
| ADM5 | Adrenomedullin 5 (putative) | SEQ ID NO: 560 |
| ADPGK | ADP-dependent glucokinase | SEQ ID NOS: 561-570 |
| ADPRHL2 | ADP-ribosylhydrolase like 2 | SEQ ID NO: 571 |
| AEBP1 | AE binding protein 1 | SEQ ID NOS: 572-579 |
| LACE1 | Lactation elevated 1 | SEQ ID NOS: 580-583 |
| AFM | Afamin | SEQ ID NO: 584 |
| AFP | Alpha-fetoprotein | SEQ ID NOS: 585-586 |
| AGA | Aspartylglucosaminidase | SEQ ID NOS: 587-589 |
| AGER | Advanced glycosylation end product-specific | SEQ ID NOS: 590-600 |
| | receptor | |
| AGK | Acylglycerol kinase | SEQ ID NOS: 601-606 |
| AGPS | Alkylglycerone phosphate synthase | SEQ ID NOS: 607-610 |
| AGR2 | Anterior gradient 2, protein disulphide isomerase | SEQ ID NOS: 611-614 |
| | family member | |
| AGR3 | Anterior gradient 3, protein disulphide isomerase | SEQ ID NOS: 615-617 |
| | family member | |
| AGRN | Agrin | SEQ ID NOS: 618-621 |
| AGRP | Agouti related neuropeptide | SEQ ID NO: 622 |
| AGT | Angiotensinogen (serpin peptidase inhibitor, clade A, | SEQ ID NO: 623 |
| | member 8) | |
| AGTPBP1 | ATP/GTP binding protein 1 | SEQ ID NOS: 624-627 |
| AGTRAP | Angiotensin 11 receptor-associated protein | SEQ ID NOS: 628-635 |
| AHCYL2 | Adenosylhomocysteinase-like 2 | SEQ ID NOS: 636-642 |
| AHSG | Alpha-2-HS-glycoprotein | SEQ ID NOS: 643-644 |
| AIG1 | Androgen-induced 1 | SEQ ID NOS: 645-653 |
| AK4 | Adenylate kinase 4 | SEQ ID NOS: 654-657 |
| AKAP10 | A kinase (PRKA) anchor protein 10 | SEQ ID NOS: 658-666 |
| AKR1C1 | Aldo-keto reductase family 1, member C1 | SEQ ID NOS: 667-669 |
| RP4- | | SEQ ID NOS: 670-672 |
| 576H24.4 | | |
| SERPINA3 | Serpin peptidase inhibitor, clade A (alpha-1 | SEQ ID NO: 673 |
| | antiproteinase, antitrypsin), member 3 | |
| RP11-14J7.7 | | SEQ ID NOS: 674-675 |
| RP11- | | SEQ ID NO: 676 |
| 903H12.5 | | |
| AL356289.1 | | SEQ ID NO: 677 |
| AL589743.1 | | SEQ ID NO: 678 |
| XXbac- | | SEQ ID NOS: 679-680 |
| BPG116M5.17 | | |
| XXbac- | | SEQ ID NO: 681 |
| BPG181M17.5 | | |
| XXbac- | | SEQ ID NO: 682 |
| BPG32J3.20 | | |
| RP11- | | SEQ ID NO: 683 |
| 350O14.18 | | |
| ALAS2 | 5′-aminolevulinate synthase 2 | SEQ ID NOS: 684-691 |
| ALB | Albumin | SEQ ID NOS: 692-701 |
| ALDH9A1 | Aldehyde dehydrogenase 9 family, member A1 | SEQ ID NO: 702 |
| ALDOA | Aldolase A, fructose-bisphosphate | SEQ ID NOS: 703-717 |
| ALG1 | ALG1, chitobiosyldiphosphodolichol beta- | SEQ ID NOS: 718-723 |
| | mannosyltransferase | |
| ALG5 | ALG5, dolichyl-phosphate beta-glucosyltransferase | SEQ ID NOS: 724-725 |
| ALG9 | ALG9, alpha-1,2-mannosyltransferase | SEQ ID NOS: 726-736 |
| FAM150A | Family with sequence similarity 150, member A | SEQ ID NOS: 737-738 |
| FAM150B | Family with sequence similarity 150, member B | SEQ ID NOS: 739-745 |
| ALKBH1 | AlkB homolog 1, histone H2A dioxygenase | SEQ ID NOS: 746-748 |
| ALKBH5 | AlkB homolog 5, RNA demethylase | SEQ ID NOS: 749-750 |
| ALPI | Alkaline phosphatase, intestinal | SEQ ID NOS: 751-752 |
| ALPL | Alkaline phosphatase, liver/bone/kidney | SEQ ID NOS: 753-757 |
| ALPP | Alkaline phosphatase, placental | SEQ ID NO: 758 |
| ALPPL2 | Alkaline phosphatase, placental-like 2 | SEQ ID NO: 759 |
| AMBN | Ameloblastin (enamel matrix protein) | SEQ ID NOS: 760-762 |
| AMBP | Alpha-1-microglobulin/bikunin precursor | SEQ ID NOS: 763-765 |
| AMELX | Amelogenin, X-linked | SEQ ID NOS: 766-768 |
| AMELY | Amelogenin, Y-linked | SEQ ID NOS: 769-770 |
| AMH | Anti-Mullerian hormone | SEQ ID NO: 771 |
| AMPD1 | Adenosine monophosphate deaminase 1 | SEQ ID NOS: 772-774 |
| AMTN | Amelotin | SEQ ID NOS: 775-776 |
| AMY1A | Amylase, alpha 1A (salivary) | SEQ ID NOS: 777-779 |
| AMY1B | Amylase, alpha 1B (salivary) | SEQ ID NOS: 780-783 |
| AMY1C | Amylase, alpha 1C (salivary) | SEQ ID NO: 784 |
| AMY2A | Amylase, alpha 2A (pancreatic) | SEQ ID NOS: 785-787 |
| AMY2B | Amylase, alpha 2B (pancreatic) | SEQ ID NOS: 788-792 |
| ANG | Angiogenin, ribonuclease, RNase A family, 5 | SEQ ID NOS: 793-794 |
| ANGEL1 | Angel homolog 1 (Drosophila) | SEQ ID NOS: 795-798 |
| ANGPT1 | Angiopoietin 1 | SEQ ID NOS: 799-803 |
| ANGPT2 | Angiopoietin 2 | SEQ ID NOS: 804-807 |
| ANGPT4 | Angiopoietin 4 | SEQ ID NO: 808 |
| ANGPTL1 | Angiopoietin-like 1 | SEQ ID NOS: 809-811 |
| ANGPTL2 | Angiopoietin-like 2 | SEQ ID NOS: 812-813 |
| ANGPTL3 | Angiopoietin-like 3 | SEQ ID NO: 814 |
| ANGPTL4 | Angiopoietin-like 4 | SEQ ID NOS: 815-822 |
| ANGPTL5 | Angiopoietin-like 5 | SEQ ID NOS: 823-824 |
| ANGPTL6 | Angiopoietin-like 6 | SEQ ID NOS: 825-827 |
| ANGPTL7 | Angiopoietin-like 7 | SEQ ID NO: 828 |
| C19orf80 | Chromosome 19 open reading frame 80 | SEQ ID NOS: 829-832 |
| ANK1 | Ankyrin 1, erythrocytic | SEQ ID NOS: 833-843 |
| ANKDD1A | Ankyrin repeat and death domain containing 1A | SEQ ID NOS: 844-850 |
| ANKRD54 | Ankyrin repeat domain 54 | SEQ ID NOS: 851-859 |
| ANKRD60 | Ankyrin repeat domain 60 | SEQ ID NO: 860 |
| ANO7 | Anoctamin 7 | SEQ ID NOS: 861-864 |
| ANOS1 | Anosmin 1 | SEQ ID NO: 865 |
| ANTXR1 | Anthrax toxin receptor 1 | SEQ ID NOS: 866-869 |
| AOAH | Acyloxyacyl hydrolase (neutrophil) | SEQ ID NOS: 870-874 |
| AOC1 | Amine oxidase, copper containing 1 | SEQ ID NOS: 875-880 |
| AOC2 | Amine oxidase, copper containing 2 (retina-specific) | SEQ ID NOS: 881-882 |
| AOC3 | Amine oxidase, copper containing 3 | SEQ ID NOS: 883-889 |
| AP000721.4 | | SEQ ID NO: 890 |
| APBB1 | Amyloid beta (A4) precursor protein-binding, family | SEQ ID NOS: 891-907 |
| | B, member 1 (Fe65) | |
| APCDD1 | Adenomatosis polyposis coli down-regulated 1 | SEQ ID NOS: 908-913 |
| APCS | Amyloid P component, serum | SEQ ID NO: 914 |
| APELA | Apelin receptor early endogenous ligand | SEQ ID NOS: 915-917 |
| APLN | Apelin | SEQ ID NO: 918 |
| APLP2 | Amyloid beta (A4) precursor-like protein 2 | SEQ ID NOS: 919-928 |
| APOA1 | Apolipoprotein A-I | SEQ ID NOS: 929-933 |
| APOA2 | Apolipoprotein A-II | SEQ ID NOS: 934-942 |
| APOA4 | Apolipoprotein A-IV | SEQ ID NO: 943 |
| APOA5 | Apolipoprotein A-V | SEQ ID NOS: 944-946 |
| APOB | Apolipoprotein B | SEQ ID NOS: 947-948 |
| APOC1 | Apolipoprotein C-I | SEQ ID NOS: 949-957 |
| APOC2 | Apolipoprotein C-II | SEQ ID NOS: 958-962 |
| APOC3 | Apolipoprotein C-III | SEQ ID NOS: 963-966 |
| APOC4 | Apolipoprotein C-IV | SEQ ID NOS: 967-968 |
| APOC4- | APOC4-APOC2 readthrough (NMD candidate) | SEQ ID NOS: 969-970 |
| APOC2 | | |
| APOD | Apolipoprotein D | SEQ ID NOS: 971-974 |
| APOE | Apolipoprotein E | SEQ ID NOS: 975-978 |
| APOF | Apolipoprotein F | SEQ ID NO: 979 |
| APOH | Apolipoprotein H (beta-2-glycoprotein I) | SEQ ID NOS: 980-983 |
| APOL1 | Apolipoprotein L, 1 | SEQ ID NOS: 984-994 |
| APOL3 | Apolipoprotein L, 3 | SEQ ID NOS: 995-1009 |
| APOM | Apolipoprotein M | SEQ ID NOS: 1010-1012 |
| APOOL | Apolipoprotein O-like | SEQ ID NOS: 1013-1015 |
| ARCN1 | Archain 1 | SEQ ID NOS: 1016-1020 |
| ARFIP2 | ADP-ribosylation factor interacting protein 2 | SEQ ID NOS: 1021-1027 |
| ARHGAP36 | Rho GTPase activating protein 36 | SEQ ID NOS: 1028-1033 |
| HMHA1 | Histocompatibility (minor) HA-1 | SEQ ID NOS: 1034-1042 |
| ARHGAP6 | Rho GTPase activating protein 6 | SEQ ID NOS: 1043-1048 |
| ARHGEF4 | Rho guanine nucleotide exchange factor (GEF) 4 | SEQ ID NOS: 1049-1059 |
| ARL16 | ADP-ribosylation factor-like 16 | SEQ ID NOS: 1060-1068 |
| ARMC5 | Armadillo repeat containing 5 | SEQ ID NOS: 1069-1075 |
| ARNTL | Aryl hydrocarbon receptor nuclear translocator-like | SEQ ID NOS: 1076-1090 |
| ARSA | Arylsulfatase A | SEQ ID NOS: 1091-1096 |
| ARSB | Arylsulfatase B | SEQ ID NOS: 1097-1100 |
| ARSE | Arylsulfatase E (chondrodysplasia punctata 1) | SEQ ID NOS: 1101-1104 |
| ARSG | Arylsulfatase G | SEQ ID NOS: 1105-1108 |
| ARSI | Arylsulfatase family, member I | SEQ ID NOS: 1109-1111 |
| ARSK | Arylsulfatase family, member K | SEQ ID NOS: 1112-1116 |
| ART3 | ADP-ribosyltransferase 3 | SEQ ID NOS: 1117-1124 |
| ART4 | ADP-ribosyltransferase 4 (Dombrock blood group) | SEQ ID NOS: 1125-1128 |
| ART5 | ADP-ribosyltransferase 5 | SEQ ID NOS: 1129-1133 |
| ARTN | Artemin | SEQ ID NOS: 1134-1144 |
| ASAH1 | N-acylsphingosine amidohydrolase (acid | SEQ ID NOS: 1145-1195 |
| | ceramidase) 1 | |
| ASAH2 | N-acylsphingosine amidohydrolase (non-lysosomal | SEQ ID NOS: 1196-1201 |
| | ceramidase) 2 | |
| ASCL1 | Achaete-scute family bHLH transcription factor 1 | SEQ ID NO: 1202 |
| ASIP | Agouti signaling protein | SEQ ID NOS: 1203-1204 |
| ASPN | Asporin | SEQ ID NOS: 1205-1206 |
| ASTL | Astacin-like metallo-endopeptidase (M12 family) | SEQ ID NO: 1207 |
| ATAD5 | ATPase family, AAA domain containing 5 | SEQ ID NOS: 1208-1209 |
| ATAT1 | Alpha tubulin acetyltransferase 1 | SEQ ID NOS: 1210-1215 |
| ATG2A | Autophagy related 2A | SEQ ID NOS: 1216-1218 |
| ATG5 | Autophagy related 5 | SEQ ID NOS: 1219-1227 |
| ATMIN | ATM interactor | SEQ ID NOS: 1228-1231 |
| ATP13A1 | ATPase type 13A1 | SEQ ID NOS: 1232-1234 |
| ATP5F1 | ATP synthase, H+ transporting, mitochondrial Fo | SEQ ID NOS: 1235-1236 |
| | complex, subunit B1 | |
| ATP6AP1 | ATPase, H+ transporting, lysosomal accessory | SEQ ID NOS: 1237-1244 |
| | protein 1 | |
| ATP6AP2 | ATPase, H+ transporting, lysosomal accessory | SEQ ID NOS: 1245-1267 |
| | protein 2 | |
| ATPAF1 | ATP synthase mitochondrial F1 complex assembly | SEQ ID NOS: 1268-1278 |
| | factor 1 | |
| AUH | AU RNA binding protein/enoyl-CoA hydratase | SEQ ID NOS: 1279-1280 |
| AVP | Arginine vasopressin | SEQ ID NO: 1281 |
| AXIN2 | Axin 2 | SEQ ID NOS: 1282-1289 |
| AZGP1 | Alpha-2-glycoprotein 1, zinc-binding | SEQ ID NOS: 1290-1292 |
| AZU1 | Azurocidin 1 | SEQ ID NOS: 1293-1294 |
| B2M | Beta-2-microglobulin | SEQ ID NOS: 1295-1301 |
| B3GALNT1 | Beta-1,3-N-acetylgalactosaminyltransferase 1 | SEQ ID NOS: 1302-1314 |
| | (globoside blood group) | |
| B3GALNT2 | Beta-1,3-N-acetylgalactosaminyltransferase 2 | SEQ ID NOS: 1315-1317 |
| B3GALT1 | UDP-Gal:betaGlcNAc beta 1,3-galactosyltransferase, | SEQ ID NO: 1318 |
| | polypeptide 1 | |
| B3GALT4 | UDP-Gal:betaGlcNAc beta 1,3-galactosyltransferase, | SEQ ID NO: 1319 |
| | polypeptide 4 | |
| B3GALT5 | UDP-Gal:betaGlcNAc beta 1,3-galactosyltransferase, | SEQ ID NOS: 1320-1324 |
| | polypeptide 5 | |
| B3GALT6 | UDP-Gal:betaGal beta 1,3-galactosyltransferase | SEQ ID NO: 1325 |
| | polypeptide 6 | |
| B3GAT3 | Beta-1,3-glucuronyltransferase 3 | SEQ ID NOS: 1326-1330 |
| B3GLCT | Beta 3-glucosyltransferase | SEQ ID NO: 1331 |
| B3GNT3 | UDP-GlcNAc:betaGal beta-1,3-N- | SEQ ID NOS: 1332-1335 |
| | acetylglucosaminyltransferase 3 | |
| B3GNT4 | UDP-GlcNAc:betaGal beta-1,3-N- | SEQ ID NOS: 1336-1339 |
| | acetylglucosaminyltransferase 4 | |
| B3GNT6 | UDP-GlcNAc:betaGal beta-1,3-N- | SEQ ID NOS: 1340-1341 |
| | acetylglucosaminyltransferase 6 | |
| B3GNT7 | UDP-GlcNAc:betaGal beta-1,3-N- | SEQ ID NO: 1342 |
| | acetylglucosaminyltransferase 7 | |
| B3GNT8 | UDP-GlcNAc:betaGal beta-1,3-N- | SEQ ID NO: 1343 |
| | acetylglucosaminyltransferase 8 | |
| B3GNT9 | UDP-GlcNAc:betaGal beta-1,3-N- | SEQ ID NO: 1344 |
| | acetylglucosaminyltransferase 9 | |
| B4GALNT1 | Beta-1,4-N-acetyl-galactosaminyl transferase 1 | SEQ ID NOS: 1345-1356 |
| B4GALNT3 | Beta-1,4-N-acetyl-galactosaminyl transferase 3 | SEQ ID NOS: 1357-1358 |
| B4GALNT4 | Beta-1,4-N-acetyl-galactosaminyl transferase 4 | SEQ ID NOS: 1359-1361 |
| B4GALT4 | UDP-Gal:betaGlcNAc beta 1,4-galactosyltransferase, | SEQ ID NOS: 1362-1375 |
| | polypeptide 4 | |
| B4GALT5 | UDP-Gal:betaGlcNAc beta 1,4-galactosyltransferase, | SEQ ID NO: 1376 |
| | polypeptide 5 | |
| B4GALT6 | UDP-Gal:betaGlcNAc beta 1,4-galactosyltransferase, | SEQ ID NOS: 1377-1380 |
| | polypeptide 6 | |
| B4GAT1 | Beta-1,4-glucuronyltransferase 1 | SEQ ID NO: 1381 |
| B9D1 | B9 protein domain 1 | SEQ ID NOS: 1382-1398 |
| BACE2 | Beta-site APP-cleaving enzyme 2 | SEQ ID NOS: 1399-1401 |
| BAGE5 | B melanoma antigen family, member 5 | SEQ ID NO: 1402 |
| BCAM | Basal cell adhesion molecule (Lutheran blood group) | SEQ ID NOS: 1403-1406 |
| BCAN | Brevican | SEQ ID NOS: 1407-1413 |
| BCAP29 | B-cell receptor-associated protein 29 | SEQ ID NOS: 1414-1426 |
| BCAR1 | Breast cancer anti-estrogen resistance 1 | SEQ ID NOS: 1427-1444 |
| BCHE | Butyrylcholinesterase | SEQ ID NOS: 1445-1449 |
| BCKDHB | Branched chain keto acid dehydrogenase E1, beta | SEQ ID NOS: 1450-1452 |
| | polypeptide | |
| BDNF | Brain-derived neurotrophic factor | SEQ ID NOS: 1453-1470 |
| BGLAP | Bone gamma-carboxyglutamate (gla) protein | SEQ ID NO: 1471 |
| BGN | Biglycan | SEQ ID NOS: 1472-1473 |
| BLVRB | Biliverdin reductase B | SEQ ID NOS: 1474-1478 |
| BMP1 | Bone morphogenetic protein 1 | SEQ ID NOS: 1479-1490 |
| BMP10 | Bone morphogenetic protein 10 | SEQ ID NO: 1491 |
| BMP15 | Bone morphogenetic protein 15 | SEQ ID NO: 1492 |
| BMP2 | Bone morphogenetic protein 2 | SEQ ID NO: 1493 |
| BMP3 | Bone morphogenetic protein 3 | SEQ ID NO: 1494 |
| BMP4 | Bone morphogenetic protein 4 | SEQ ID NOS: 1495-1502 |
| BMP6 | Bone morphogenetic protein 6 | SEQ ID NO: 1503 |
| BMP7 | Bone morphogenetic protein 7 | SEQ ID NOS: 1504-1507 |
| BMP8A | Bone morphogenetic protein 8a | SEQ ID NO: 1508 |
| BMP8B | Bone morphogenetic protein 8b | SEQ ID NO: 1509 |
| BMPER | BMP binding endothelial regulator | SEQ ID NOS: 1510-1513 |
| BNC1 | Basonuclin 1 | SEQ ID NOS: 1514-1515 |
| BOC | BOC cell adhesion associated, oncogene regulated | SEQ ID NOS: 1516-1526 |
| BOD1 | Biorientation of chromosomes in cell division 1 | SEQ ID NOS: 1527-1531 |
| BOLA1 | BolA family member 1 | SEQ ID NOS: 1532-1534 |
| BPI | Bactericidal/permeability-increasing protein | SEQ ID NOS: 1535-1538 |
| BPIFA1 | BPI fold containing family A, member 1 | SEQ ID NOS: 1539-1542 |
| BPIFA2 | BPI fold containing family A, member 2 | SEQ ID NOS: 1543-1544 |
| BPIFA3 | BPI fold containing family A, member 3 | SEQ ID NOS: 1545-1546 |
| BPIFB1 | BPI fold containing family B, member 1 | SEQ ID NOS: 1547-1548 |
| BPIFB2 | BPI fold containing family B, member 2 | SEQ ID NO: 1549 |
| BPIFB3 | BPI fold containing family B, member 3 | SEQ ID NO: 1550 |
| BPIFB4 | BPI fold containing family B, member 4 | SEQ ID NOS: 1551-1552 |
| BPIFB6 | BPI fold containing family B, member 6 | SEQ ID NOS: 1553-1554 |
| BPIFC | BPI fold containing family C | SEQ ID NOS: 1555-1558 |
| BRF1 | BRF1, RNA polymerase III transcription initiation | SEQ ID NOS: 1559-1574 |
| | factor 90 kDa subunit | |
| BRINP1 | Bone morphogenetic protein/retinoic acid inducible | SEQ ID NOS: 1575-1576 |
| | neural-specific 1 | |
| BRINP2 | Bone morphogenetic protein/retinoic acid inducible | SEQ ID NO: 1577 |
| | neural-specific 2 | |
| BRINP3 | Bone morphogenetic protein/retinoic acid inducible | SEQ ID NOS: 1578-1580 |
| | neural-specific 3 | |
| BSG | Basigin (Ok blood group) | SEQ ID NOS: 1581-1591 |
| BSPH1 | Binder of sperm protein homolog 1 | SEQ ID NO: 1592 |
| BST1 | Bone marrow stromal cell antigen 1 | SEQ ID NOS: 1593-1597 |
| BTBD17 | BTB (POZ) domain containing 17 | SEQ ID NO: 1598 |
| BTD | Biotinidase | SEQ ID NOS: 1599-1608 |
| BTN2A2 | Butyrophilin, subfamily 2, member A2 | SEQ ID NOS: 1609-1622 |
| BTN3A1 | Butyrophilin, subfamily 3, member A1 | SEQ ID NOS: 1623-1629 |
| BTN3A2 | Butyrophilin, subfamily 3, member A2 | SEQ ID NOS: 1630-1640 |
| BTN3A3 | Butyrophilin, subfamily 3, member A3 | SEQ ID NOS: 1641-1649 |
| RP4- | Complement factor H-related protein 2 | SEQ ID NO: 1650 |
| 608O15.3 | | |
| C10orf99 | Chromosome 10 open reading frame 99 | SEQ ID NO: 1651 |
| C11orf1 | Chromosome 11 open reading frame 1 | SEQ ID NOS: 1652-1656 |
| C11orf24 | Chromosome 11 open reading frame 24 | SEQ ID NOS: 1657-1659 |
| C11orf45 | Chromosome 11 open reading frame 45 | SEQ ID NOS: 1660-1661 |
| C11orf94 | Chromosome 11 open reading frame 94 | SEQ ID NO: 1662 |
| C12orf10 | Chromosome 12 open reading frame 10 | SEQ ID NOS: 1663-1666 |
| C12orf49 | Chromosome 12 open reading frame 49 | SEQ ID NOS: 1667-1670 |
| C12orf73 | Chromosome 12 open reading frame 73 | SEQ ID NOS: 1671-1680 |
| C12orf76 | Chromosome 12 open reading frame 76 | SEQ ID NOS: 1681-1688 |
| C14orf93 | Chromosome 14 open reading frame 93 | SEQ ID NOS: 1689-1704 |
| C16orf89 | Chromosome 16 open reading frame 89 | SEQ ID NOS: 1705-1707 |
| C16orf90 | Chromosome 16 open reading frame 90 | SEQ ID NOS: 1708-1709 |
| C17orf67 | Chromosome 17 open reading frame 67 | SEQ ID NO: 1710 |
| C17orf75 | Chromosome 17 open reading frame 75 | SEQ ID NOS: 1711-1719 |
| C17orf99 | Chromosome 17 open reading frame 99 | SEQ ID NOS: 1720-1722 |
| C18orf54 | Chromosome 18 open reading frame 54 | SEQ ID NOS: 1723-1727 |
| C19orf47 | Chromosome 19 open reading frame 47 | SEQ ID NOS: 1728-1735 |
| C19orf70 | Chromosome 19 open reading frame 70 | SEQ ID NOS: 1736-1739 |
| C1GALT1 | Core 1 synthase, glycoprotein-N- | SEQ ID NOS: 1740-1744 |
| | acetylgalactosamine 3-beta-galactosyltransferase 1 | |
| C1orf127 | Chromosome 1 open reading frame 127 | SEQ ID NOS: 1745-1748 |
| C1orf159 | Chromosome 1 open reading frame 159 | SEQ ID NOS: 1749-1761 |
| C1orf198 | Chromosome 1 open reading frame 198 | SEQ ID NOS: 1762-1766 |
| C1orf54 | Chromosome 1 open reading frame 54 | SEQ ID NOS: 1767-1769 |
| C1orf56 | Chromosome 1 open reading frame 56 | SEQ ID NO: 1770 |
| C1QA | Complement component 1, q subcomponent, A | SEQ ID NOS: 1771-1773 |
| | chain | |
| C1QB | Complement component 1, q subcomponent, B | SEQ ID NOS: 1774-1777 |
| | chain | |
| C1QC | Complement component 1, q subcomponent, C | SEQ ID NOS: 1778-1780 |
| | chain | |
| C1QL1 | Complement component 1, q subcomponent-like 1 | SEQ ID NO: 1781 |
| C1QL2 | Complement component 1, q subcomponent-like 2 | SEQ ID NO: 1782 |
| C1QL3 | Complement component 1, q subcomponent-like 3 | SEQ ID NOS: 1783-1784 |
| C1QL4 | Complement component 1, q subcomponent-like 4 | SEQ ID NO: 1785 |
| C1QTNF1 | C1q and tumor necrosis factor related protein 1 | SEQ ID NOS: 1786-1795 |
| FAM132A | Family with sequence similarity 132, member A | SEQ ID NO: 1796 |
| C1QTNF2 | C1q and tumor necrosis factor related protein 2 | SEQ ID NO: 1797 |
| C1QTNF3 | C1q and tumor necrosis factor related protein 3 | SEQ ID NOS: 1798-1799 |
| C1QTNF4 | C1q and tumor necrosis factor related protein 4 | SEQ ID NOS: 1800-1801 |
| C1QTNF5 | C1q and tumor necrosis factor related protein 5 | SEQ ID NOS: 1802-1804 |
| C1QTNF7 | C1q and tumor necrosis factor related protein 7 | SEQ ID NOS: 1805-1809 |
| C1QTNF8 | C1q and tumor necrosis factor related protein 8 | SEQ ID NOS: 1810-1811 |
| C1QTNF9 | C1q and tumor necrosis factor related protein 9 | SEQ ID NOS: 1812-1813 |
| C1QTNF9B | C1q and tumor necrosis factor related protein 9B | SEQ ID NOS: 1814-1816 |
| C1R | Complement component 1, r subcomponent | SEQ ID NOS: 1817-1825 |
| C1RL | Complement component 1, r subcomponent-like | SEQ ID NOS: 1826-1834 |
| C1S | Complement component 1, s subcomponent | SEQ ID NOS: 1835-1844 |
| C2 | Complement component 2 | SEQ ID NOS: 1845-1859 |
| C21orf33 | Chromosome 21 open reading frame 33 | SEQ ID NOS: 1860-1868 |
| C21orf62 | Chromosome 21 open reading frame 62 | SEQ ID NOS: 1869-1872 |
| C22orf15 | Chromosome 22 open reading frame 15 | SEQ ID NOS: 1873-1875 |
| C22orf46 | Chromosome 22 open reading frame 46 | SEQ ID NO: 1876 |
| C2CD2 | C2 calcium-dependent domain containing 2 | SEQ ID NOS: 1877-1879 |
| C2orf40 | Chromosome 2 open reading frame 40 | SEQ ID NOS: 1880-1882 |
| C2orf66 | Chromosome 2 open reading frame 66 | SEQ ID NO: 1883 |
| C2orf69 | Chromosome 2 open reading frame 69 | SEQ ID NO: 1884 |
| C2orf78 | Chromosome 2 open reading frame 78 | SEQ ID NO: 1885 |
| C3 | Complement component 3 | SEQ ID NOS: 1886-1890 |
| C3orf33 | Chromosome 3 open reading frame 33 | SEQ ID NOS: 1891-1895 |
| C3orf58 | Chromosome 3 open reading frame 58 | SEQ ID NOS: 1896-1899 |
| C4A | Complement component 4A (Rodgers blood group) | SEQ ID NOS: 1900-1901 |
| C4B | Complement component 4B (Chido blood group) | SEQ ID NOS: 1902-1903 |
| C4BPA | Complement component 4 binding protein, alpha | SEQ ID NOS: 1904-1906 |
| C4BPB | Complement component 4 binding protein, beta | SEQ ID NOS: 1907-1911 |
| C4orf48 | Chromosome 4 open reading frame 48 | SEQ ID NOS: 1912-1913 |
| C5 | Complement component 5 | SEQ ID NO: 1914 |
| C5orf46 | Chromosome 5 open reading frame 46 | SEQ ID NOS: 1915-1916 |
| C6 | Complement component 6 | SEQ ID NOS: 1917-1920 |
| C6orf120 | Chromosome 6 open reading frame 120 | SEQ ID NO: 1921 |
| C6orf15 | Chromosome 6 open reading frame 15 | SEQ ID NO: 1922 |
| C6orf58 | Chromosome 6 open reading frame 58 | SEQ ID NO: 1923 |
| C7 | Complement component 7 | SEQ ID NO: 1924 |
| C7orf57 | Chromosome 7 open reading frame 57 | SEQ ID NOS: 1925-1929 |
| C8A | Complement component 8, alpha polypeptide | SEQ ID NO: 1930 |
| C8B | Complement component 8, beta polypeptide | SEQ ID NOS: 1931-1933 |
| C8G | Complement component 8, gamma polypeptide | SEQ ID NOS: 1934-1935 |
| C9 | Complement component 9 | SEQ ID NO: 1936 |
| C9orf47 | Chromosome 9 open reading frame 47 | SEQ ID NOS: 1937-1939 |
| CA10 | Carbonic anhydrase X | SEQ ID NOS: 1940-1946 |
| CA11 | Carbonic anhydrase XI | SEQ ID NOS: 1947-1948 |
| CA6 | Carbonic anhydrase VI | SEQ ID NOS: 1949-1953 |
| CA9 | Carbonic anhydrase IX | SEQ ID NOS: 1954-1955 |
| CABLES1 | Cdk5 and Abl enzyme substrate 1 | SEQ ID NOS: 1956-1961 |
| CABP1 | Calcium binding protein 1 | SEQ ID NOS: 1962-1965 |
| CACNA2D1 | Calcium channel, voltage-dependent, alpha 2/delta | SEQ ID NOS: 1966-1969 |
| | subunit 1 | |
| CACNA2D4 | Calcium channel, voltage-dependent, alpha 2/delta | SEQ ID NOS: 1970-1983 |
| | subunit 4 | |
| CADM3 | Cell adhesion molecule 3 | SEQ ID NOS: 1984-1986 |
| CALCA | Calcitonin-related polypeptide alpha | SEQ ID NOS: 1987-1991 |
| CALCB | Calcitonin-related polypeptide beta | SEQ ID NOS: 1992-1994 |
| CALCR | Calcitonin receptor | SEQ ID NOS: 1995-2001 |
| CALCRL | Calcitonin receptor-like | SEQ ID NOS: 2002-2006 |
| FAM26D | Family with sequence similarity 26, member D | SEQ ID NOS: 2007-2011 |
| CALR | Calreticulin | SEQ ID NOS: 2012-2015 |
| CALR3 | Calreticulin 3 | SEQ ID NOS: 2016-2017 |
| CALU | Calumenin | SEQ ID NOS: 2018-2023 |
| CAMK2D | Calcium/calmodulin-dependent protein kinase II | SEQ ID NOS: 2024-2035 |
| | delta | |
| CAMP | Cathelicidin antimicrobial peptide | SEQ ID NO: 2036 |
| CANX | Calnexin | SEQ ID NOS: 2037-2051 |
| CARM1 | Coactivator-associated arginine methyltransferase 1 | SEQ ID NOS: 2052-2059 |
| CARNS1 | Carnosine synthase 1 | SEQ ID NOS: 2060-2062 |
| CARTPT | CART prepropeptide | SEQ ID NO: 2063 |
| CASQ1 | Calsequestrin 1 (fast-twitch, skeletal muscle) | SEQ ID NOS: 2064-2065 |
| CASQ2 | Calsequestrin 2 (cardiac muscle) | SEQ ID NO: 2066 |
| CATSPERG | Catsper channel auxiliary subunit gamma | SEQ ID NOS: 2067-2074 |
| CBLN1 | Cerebellin 1 precursor | SEQ ID NOS: 2075-2077 |
| CBLN2 | Cerebellin 2 precursor | SEQ ID NOS: 2078-2081 |
| CBLN3 | Cerebellin 3 precursor | SEQ ID NOS: 2082-2083 |
| CBLN4 | Cerebellin 4 precursor | SEQ ID NO: 2084 |
| CCBE1 | Collagen and calcium binding EGF domains 1 | SEQ ID NOS: 2085-2087 |
| CCDC112 | Coiled-coil domain containing 112 | SEQ ID NOS: 2088-2091 |
| CCDC129 | Coiled-coil domain containing 129 | SEQ ID NOS: 2092-2099 |
| CCDC134 | Coiled-coil domain containing 134 | SEQ ID NOS: 2100-2101 |
| CCDC149 | Coiled-coil domain containing 149 | SEQ ID NOS: 2102-2105 |
| CCDC3 | Coiled-coil domain containing 3 | SEQ ID NOS: 2106-2107 |
| CCDC80 | Coiled-coil domain containing 80 | SEQ ID NOS: 2108-2111 |
| CCDC85A | Coiled-coil domain containing 85A | SEQ ID NO: 2112 |
| CCDC88B | Coiled-coil domain containing 88B | SEQ ID NOS: 2113-2115 |
| CCER2 | Coiled-coil glutamate-rich protein 2 | SEQ ID NOS: 2116-2117 |
| CCK | Cholecystokinin | SEQ ID NOS: 2118-2120 |
| CCL1 | Chemokine (C-C motif) ligand 1 | SEQ ID NO: 2121 |
| CCL11 | Chemokine (C-C motif) ligand 11 | SEQ ID NO: 2122 |
| CCL13 | Chemokine (C-C motif) ligand 13 | SEQ ID NOS: 2123-2124 |
| CCL14 | Chemokine (C-C motif) ligand 14 | SEQ ID NOS: 2125-2128 |
| CCL15 | Chemokine (C-C motif) ligand 15 | SEQ ID NOS: 2129-2130 |
| CCL16 | Chemokine (C-C motif) ligand 16 | SEQ ID NOS: 2131-2133 |
| CCL17 | Chemokine (C-C motif) ligand 17 | SEQ ID NOS: 2134-2135 |
| CCL18 | Chemokine (C-C motif) ligand 18 (pulmonary and | SEQ ID NO: 2136 |
| | activation-regulated) | |
| CCL19 | Chemokine (C-C motif) ligand 19 | SEQ ID NOS: 2137-2138 |
| CCL2 | Chemokine (C-C motif) ligand 2 | SEQ ID NOS: 2139-2140 |
| CCL20 | Chemokine (C-C motif) ligand 20 | SEQ ID NOS: 2141-2143 |
| CCL21 | Chemokine (C-C motif) ligand 21 | SEQ ID NOS: 2144-2145 |
| CCL22 | Chemokine (C-C motif) ligand 22 | SEQ ID NO: 2146 |
| CCL23 | Chemokine (C-C motif) ligand 23 | SEQ ID NOS: 2147-2149 |
| CCL24 | Chemokine (C-C motif) ligand 24 | SEQ ID NOS: 2150-2151 |
| CCL25 | Chemokine (C-C motif) ligand 25 | SEQ ID NOS: 2152-2155 |
| CCL26 | Chemokine (C-C motif) ligand 26 | SEQ ID NOS: 2156-2157 |
| CCL27 | Chemokine (C-C motif) ligand 27 | SEQ ID NO: 2158 |
| CCL28 | Chemokine (C-C motif) ligand 28 | SEQ ID NOS: 2159-2161 |
| CCL3 | Chemokine (C-C motif) ligand 3 | SEQ ID NO: 2162 |
| CCL3L3 | Chemokine (C-C motif) ligand 3-like 3 | SEQ ID NO: 2163 |
| CCL4 | Chemokine (C-C motif) ligand 4 | SEQ ID NOS: 2164-2165 |
| CCL4L2 | Chemokine (C-C motif) ligand 4-like 2 | SEQ ID NOS: 2166-2175 |
| CCL5 | Chemokine (C-C motif) ligand 5 | SEQ ID NOS: 2176-2178 |
| CCL7 | Chemokine (C-C motif) ligand 7 | SEQ ID NOS: 2179-2181 |
| CCL8 | Chemokine (C-C motif) ligand 8 | SEQ ID NO: 2182 |
| CCNB1IP1 | Cyclin B1 interacting protein 1, E3 ubiquitin protein | SEQ ID NOS: 2183-2194 |
| | ligase | |
| CCNL1 | Cyclin L1 | SEQ ID NOS: 2195-2203 |
| CCNL2 | Cyclin L2 | SEQ ID NOS: 2204-2211 |
| CD14 | CD14 molecule | SEQ ID NOS: 2212-2216 |
| CD160 | CD160 molecule | SEQ ID NOS: 2217-2221 |
| CD164 | CD164 molecule, sialomucin | SEQ ID NOS: 2222-2227 |
| CD177 | CD177 molecule | SEQ ID NOS: 2228-2230 |
| CD1E | CD1e molecule | SEQ ID NOS: 2231-2244 |
| CD2 | CD2 molecule | SEQ ID NOS: 2245-2246 |
| CD200 | CD200 molecule | SEQ ID NOS: 2247-2253 |
| CD200R1 | CD200 receptor 1 | SEQ ID NOS: 2254-2258 |
| CD22 | CD22 molecule | SEQ ID NOS: 2259-2276 |
| CD226 | CD226 molecule | SEQ ID NOS: 2277-2284 |
| CD24 | CD24 molecule | SEQ ID NOS: 2285-2291 |
| CD276 | CD276 molecule | SEQ ID NOS: 2292-2307 |
| CD300A | CD300a molecule | SEQ ID NOS: 2308-2312 |
| CD300LB | CD300 molecule-like family member b | SEQ ID NOS: 2313-2314 |
| CD300LF | CD300 molecule-like family member f | SEQ ID NOS: 2315-2323 |
| CD300LG | CD300 molecule-like family member g | SEQ ID NOS: 2324-2329 |
| CD3D | CD3d molecule, delta (CD3-TCR complex) | SEQ ID NOS: 2330-2333 |
| CD4 | CD4 molecule | SEQ ID NOS: 2334-2336 |
| CD40 | CD40 molecule, TNF receptor superfamily member 5 | SEQ ID NOS: 2337-2340 |
| CD44 | CD44 molecule (Indian blood group) | SEQ ID NOS: 2341-2367 |
| CD48 | CD48 molecule | SEQ ID NOS: 2368-2370 |
| CD5 | CD5 molecule | SEQ ID NOS: 2371-2372 |
| CD55 | CD55 molecule, decay accelerating factor for | SEQ ID NOS: 2373-2383 |
| | complement (Cromer blood group) | |
| CD59 | CD59 molecule, complement regulatory protein | SEQ ID NOS: 2384-2394 |
| CD5L | CD5 molecule-like | SEQ ID NO: 2395 |
| CD6 | CD6 molecule | SEQ ID NOS: 2396-2403 |
| CD68 | CD68 molecule | SEQ ID NOS: 2404-2407 |
| CD7 | CD7 molecule | SEQ ID NOS: 2408-2413 |
| CD79A | CD79a molecule, immunoglobulin-associated alpha | SEQ ID NOS: 2414-2416 |
| CD80 | CD80 molecule | SEQ ID NOS: 2417-2419 |
| CD86 | CD86 molecule | SEQ ID NOS: 2420-2426 |
| CD8A | CD8a molecule | SEQ ID NOS: 2427-2430 |
| CD8B | CD8b molecule | SEQ ID NOS: 2431-2436 |
| CD99 | CD99 molecule | SEQ ID NOS: 2437-2445 |
| CDC23 | Cell division cycle 23 | SEQ ID NOS: 2446-2450 |
| CDC40 | Cell division cycle 40 | SEQ ID NOS: 2451-2453 |
| CDC45 | Cell division cycle 45 | SEQ ID NOS: 2454-2460 |
| CDCP1 | CUB domain containing protein 1 | SEQ ID NOS: 2461-2462 |
| CDCP2 | CUB domain containing protein 2 | SEQ ID NOS: 2463-2464 |
| CDH1 | Cadherin 1, type 1 | SEQ ID NOS: 2465-2472 |
| CDH11 | Cadherin 11, type 2, OB-cadherin (osteoblast) | SEQ ID NOS: 2473-2482 |
| CDH13 | Cadherin 13 | SEQ ID NOS: 2483-2492 |
| CDH17 | Cadherin 17, LI cadherin (liver-intestine) | SEQ ID NOS: 2493-2497 |
| CDH18 | Cadherin 18, type 2 | SEQ ID NOS: 2498-2504 |
| CDH19 | Cadherin 19, type 2 | SEQ ID NOS: 2505-2509 |
| CDH23 | Cadherin-related 23 | SEQ ID NOS: 2510-2525 |
| CDH5 | Cadherin 5, type 2 (vascular endothelium) | SEQ ID NOS: 2526-2533 |
| CDHR1 | Cadherin-related family member 1 | SEQ ID NOS: 2534-2539 |
| CDHR4 | Cadherin-related family member 4 | SEQ ID NOS: 2540-2544 |
| CDHR5 | Cadherin-related family member 5 | SEQ ID NOS: 2545-2551 |
| CDKN2A | Cyclin-dependent kinase inhibitor 2A | SEQ ID NOS: 2552-2562 |
| CDNF | Cerebral dopamine neurotrophic factor | SEQ ID NOS: 2563-2564 |
| CDON | Cell adhesion associated, oncogene regulated | SEQ ID NOS: 2565-2572 |
| CDSN | Corneodesmosin | SEQ ID NO: 2573 |
| CEACAM16 | Carcinoembryonic antigen-related cell adhesion | SEQ ID NOS: 2574-2575 |
| | molecule 16 | |
| CEACAM18 | Carcinoembryonic antigen-related cell adhesion | SEQ ID NO: 2576 |
| | molecule 18 | |
| CEACAM19 | Carcinoembryonic antigen-related cell adhesion | SEQ ID NOS: 2577-2583 |
| | molecule 19 | |
| CEACAM5 | Carcinoembryonic antigen-related cell adhesion | SEQ ID NOS: 2584-2591 |
| | molecule 5 | |
| CEACAM7 | Carcinoembryonic antigen-related cell adhesion | SEQ ID NOS: 2592-2594 |
| | molecule 7 | |
| CEACAM8 | Carcinoembryonic antigen-related cell adhesion | SEQ ID NOS: 2595-2596 |
| | molecule 8 | |
| CEL | Carboxyl ester lipase | SEQ ID NO: 2597 |
| CELA2A | Chymotrypsin-like elastase family, member 2A | SEQ ID NO: 2598 |
| CELA2B | Chymotrypsin-like elastase family, member 2B | SEQ ID NOS: 2599-2600 |
| CELA3A | Chymotrypsin-like elastase family, member 3A | SEQ ID NOS: 2601-2603 |
| CELA3B | Chymotrypsin-like elastase family, member 3B | SEQ ID NOS: 2604-2606 |
| CEMIP | Cell migration inducing protein, hyaluronan binding | SEQ ID NOS: 2607-2611 |
| CEP89 | Centrosomal protein 89 kDa | SEQ ID NOS: 2612-2617 |
| CER1 | Cerberus 1, DAN family BMP antagonist | SEQ ID NO: 2618 |
| CERCAM | Cerebral endothelial cell adhesion molecule | SEQ ID NOS: 2619-2626 |
| CERS1 | Ceramide synthase 1 | SEQ ID NOS: 2627-2631 |
| CES1 | Carboxylesterase 1 | SEQ ID NOS: 2632-2637 |
| CES3 | Carboxylesterase 3 | SEQ ID NOS: 2638-2642 |
| CES4A | Carboxylesterase 4A | SEQ ID NOS: 2643-2648 |
| CES5A | Carboxylesterase 5A | SEQ ID NOS: 2649-2656 |
| CETP | Cholesteryl ester transfer protein, plasma | SEQ ID NOS: 2657-2659 |
| CCDC108 | Coiled-coil domain containing 108 | SEQ ID NOS: 2660-2669 |
| CFB | Complement factor B | SEQ ID NOS: 2670-2674 |
| CFC1 | Cripto, FRL-1, cryptic family 1 | SEQ ID NOS: 2675-2677 |
| CFC1B | Cripto, FRL-1, cryptic family 1B | SEQ ID NOS: 2678-2680 |
| CFD | Complement factor D (adipsin) | SEQ ID NOS: 2681-2682 |
| CFDP1 | Craniofacial development protein 1 | SEQ ID NOS: 2683-2686 |
| CFH | Complement factor H | SEQ ID NOS: 2687-2689 |
| CFHR1 | Complement factor H-related 1 | SEQ ID NOS: 2690-2691 |
| CFHR2 | Complement factor H-related 2 | SEQ ID NOS: 2692-2693 |
| CFHR3 | Complement factor H-related 3 | SEQ ID NOS: 2694-2698 |
| CFHR4 | Complement factor H-related 4 | SEQ ID NOS: 2699-2702 |
| CFHR5 | Complement factor H-related 5 | SEQ ID NO: 2703 |
| CFI | Complement factor I | SEQ ID NOS: 2704-2708 |
| CFP | Complement factor properdin | SEQ ID NOS: 2709-2712 |
| CGA | Glycoprotein hormones, alpha polypeptide | SEQ ID NOS: 2713-2717 |
| CGB1 | Chorionic gonadotropin, beta polypeptide 1 | SEQ ID NOS: 2718-2719 |
| CGB2 | Chorionic gonadotropin, beta polypeptide 2 | SEQ ID NOS: 2720-2721 |
| CGB | Chorionic gonadotropin, beta polypeptide | SEQ ID NO: 2722 |
| CGB5 | Chorionic gonadotropin, beta polypeptide 5 | SEQ ID NO: 2723 |
| CGB7 | Chorionic gonadotropin, beta polypeptide 7 | SEQ ID NOS: 2724-2726 |
| CGB8 | Chorionic gonadotropin, beta polypeptide 8 | SEQ ID NO: 2727 |
| CGREF1 | Cell growth regulator with EF-hand domain 1 | SEQ ID NOS: 2728-2735 |
| CHAD | Chondroadherin | SEQ ID NOS: 2736-2738 |
| CHADL | Chondroadherin-like | SEQ ID NOS: 2739-2741 |
| CHEK2 | Checkpoint kinase 2 | SEQ ID NOS: 2742-2763 |
| CHGA | Chromogranin A | SEQ ID NOS: 2764-2766 |
| CHGB | Chromogranin B | SEQ ID NOS: 2767-2768 |
| CHI3L1 | Chitinase 3-like 1 (cartilage glycoprotein-39) | SEQ ID NOS: 2769-2770 |
| CHI3L2 | Chitinase 3-like 2 | SEQ ID NOS: 2771-2784 |
| CHIA | Chitinase, acidic | SEQ ID NOS: 2785-2793 |
| CHID1 | Chitinase domain containing 1 | SEQ ID NOS: 2794-2812 |
| CHIT1 | Chitinase 1 (chitotriosidase) | SEQ ID NOS: 2813-2816 |
| CHL1 | Cell adhesion molecule L1-like | SEQ ID NOS: 2817-2825 |
| CHN1 | Chimerin 1 | SEQ ID NOS: 2826-2836 |
| CHPF | Chondroitin polymerizing factor | SEQ ID NOS: 2837-2839 |
| CHPF2 | Chondroitin polymerizing factor 2 | SEQ ID NOS: 2840-2843 |
| CHRD | Chordin | SEQ ID NOS: 2844-2849 |
| CHRDL1 | Chordin-like 1 | SEQ ID NOS: 2850-2854 |
| CHRDL2 | Chordin-like 2 | SEQ ID NOS: 2855-2863 |
| CHRNA2 | Cholinergic receptor, nicotinic, alpha 2 (neuronal) | SEQ ID NOS: 2864-2872 |
| CHRNA5 | Cholinergic receptor, nicotinic, alpha 5 (neuronal) | SEQ ID NOS: 2873-2876 |
| CHRNB1 | Cholinergic receptor, nicotinic, beta 1 (muscle) | SEQ ID NOS: 2877-2882 |
| CHRND | Cholinergic receptor, nicotinic, delta (muscle) | SEQ ID NOS: 2883-2888 |
| CHST1 | Carbohydrate (keratan sulfate Gal-6) | SEQ ID NO: 2889 |
| | sulfotransferase 1 | |
| CHST10 | Carbohydrate sulfotransferase 10 | SEQ ID NOS: 2890-2897 |
| CHST11 | Carbohydrate (chondroitin 4) sulfotransferase 11 | SEQ ID NOS: 2898-2902 |
| CHST13 | Carbohydrate (chondroitin 4) sulfotransferase 13 | SEQ ID NOS: 2903-2904 |
| CHST4 | Carbohydrate (N-acetylglucosamine 6-O) | SEQ ID NOS: 2905-2906 |
| | sulfotransferase 4 | |
| CHST5 | Carbohydrate (N-acetylglucosamine 6-O) | SEQ ID NOS: 2907-2908 |
| | sulfotransferase 5 | |
| CHST6 | Carbohydrate (N-acetylglucosamine 6-O) | SEQ ID NOS: 2909-2910 |
| | sulfotransferase 6 | |
| CHST7 | Carbohydrate (N-acetylglucosamine 6-O) | SEQ ID NO: 2911 |
| | sulfotransferase 7 | |
| CHST8 | Carbohydrate (N-acetylgalactosamine 4-0) | SEQ ID NOS: 2912-2915 |
| | sulfotransferase 8 | |
| CHSY1 | Chondroitin sulfate synthase 1 | SEQ ID NOS: 2916-2917 |
| CHSY3 | Chondroitin sulfate synthase 3 | SEQ ID NO: 2918 |
| CHTF8 | Chromosome transmission fidelity factor 8 | SEQ ID NOS: 2919-2929 |
| CILP | Cartilage intermediate layer protein, nucleotide | SEQ ID NO: 2930 |
| | pyrophosphohydrolase | |
| CILP2 | Cartilage intermediate layer protein 2 | SEQ ID NOS: 2931-2932 |
| CKLF | Chemokine-like factor | SEQ ID NOS: 2933-2938 |
| CKMT1A | Creatine kinase, mitochondrial 1A | SEQ ID NOS: 2939-2944 |
| CKMT1B | Creatine kinase, mitochondrial 1B | SEQ ID NOS: 2945-2954 |
| CLCA1 | Chloride channel accessory 1 | SEQ ID NOS: 2955-2956 |
| CLCF1 | Cardiotrophin-like cytokine factor 1 | SEQ ID NOS: 2957-2958 |
| CLDN15 | Claudin 15 | SEQ ID NOS: 2959-2964 |
| CLDN7 | Claudin 7 | SEQ ID NOS: 2965-2971 |
| CLDND1 | Claudin domain containing 1 | SEQ ID NOS: 2972-2997 |
| CLEC11A | C-type lectin domain family 11, member A | SEQ ID NOS: 2998-3000 |
| CLEC16A | C-type lectin domain family 16, member A | SEQ ID NOS: 3001-3006 |
| CLEC18A | C-type lectin domain family 18, member A | SEQ ID NOS: 3007-3012 |
| CLEC18B | C-type lectin domain family 18, member B | SEQ ID NOS: 3013-3016 |
| CLEC18C | C-type lectin domain family 18, member C | SEQ ID NOS: 3017-3023 |
| CLEC19A | C-type lectin domain family 19, member A | SEQ ID NOS: 3024-3027 |
| CLEC2B | C-type lectin domain family 2, member B | SEQ ID NOS: 3028-3029 |
| CLEC3A | C-type lectin domain family 3, member A | SEQ ID NOS: 3030-3031 |
| CLEC3B | C-type lectin domain family 3, member B | SEQ ID NOS: 3032-3033 |
| CLGN | Calmegin | SEQ ID NOS: 3034-3036 |
| CLN5 | Ceroid-lipofuscinosis, neuronal 5 | SEQ ID NOS: 3037-3048 |
| CLPS | Colipase, pancreatic | SEQ ID NOS: 3049-3051 |
| CLPSL1 | Colipase-like 1 | SEQ ID NOS: 3052-3053 |
| CLPSL2 | Colipase-like 2 | SEQ ID NOS: 3054-3055 |
| CLPX | Caseinolytic mitochondrial matrix peptidase | SEQ ID NOS: 3056-3058 |
| | chaperone subunit | |
| CLSTN3 | Calsyntenin 3 | SEQ ID NOS: 3059-3065 |
| CLU | Clusterin | SEQ ID NOS: 3066-3079 |
| CLUL1 | Clusterin-like 1 (retinal) | SEQ ID NOS: 3080-3087 |
| CMA1 | Chymase 1, mast cell | SEQ ID NOS: 3088-3089 |
| CMPK1 | Cytidine monophosphate (UMP-CMP) kinase 1, | SEQ ID NOS: 3090-3093 |
| | cytosolic | |
| CNBD1 | Cyclic nucleotide binding domain containing 1 | SEQ ID NOS: 3094-3097 |
| CNDP1 | Carnosine dipeptidase 1 (metallopeptidase M20 | SEQ ID NOS: 3098-3100 |
| | family) | |
| RQCD1 | RCD1 required for cell differentiation1 homolog (S. | SEQ ID NOS: 3101-3107 |
| | pombe) | |
| CNPY2 | Canopy FGF signaling regulator 2 | SEQ ID NOS: 3108-3112 |
| CNPY3 | Canopy FGF signaling regulator 3 | SEQ ID NOS: 3113-3114 |
| CNPY4 | Canopy FGF signaling regulator 4 | SEQ ID NOS: 3115-3117 |
| CNTFR | Ciliary neurotrophic factor receptor | SEQ ID NOS: 3118-3121 |
| CNTN1 | Contactin 1 | SEQ ID NOS: 3122-3131 |
| CNTN2 | Contactin 2 (axonal) | SEQ ID NOS: 3132-3143 |
| CNTN3 | Contactin 3 (plasmacytoma associated) | SEQ ID NO: 3144 |
| CNTN4 | Contactin 4 | SEQ ID NOS: 3145-3153 |
| CNTN5 | Contactin 5 | SEQ ID NOS: 3154-3159 |
| CNTNAP2 | Contactin associated protein-like 2 | SEQ ID NOS: 3160-3163 |
| CNTNAP3 | Contactin associated protein-like 3 | SEQ ID NOS: 3164-3168 |
| CNTNAP3B | Contactin associated protein-like 3B | SEQ ID NOS: 3169-3177 |
| COASY | CoA synthase | SEQ ID NOS: 3178-3187 |
| COCH | Cochlin | SEQ ID NOS: 3188-3199 |
| COG3 | Component of oligomeric golgi complex 3 | SEQ ID NOS: 3200-3203 |
| COL10A1 | Collagen, type X, alpha 1 | SEQ ID NOS: 3204-3207 |
| COL11A1 | Collagen, type XI, alpha 1 | SEQ ID NOS: 3208-3218 |
| COL11A2 | Collagen, type XI, alpha 2 | SEQ ID NOS: 3219-3223 |
| COL12A1 | Collagen, type XII, alpha 1 | SEQ ID NOS: 3224-3231 |
| COL14A1 | Collagen, type XIV, alpha 1 | SEQ ID NOS: 3232-3239 |
| COL15A1 | Collagen, type XV, alpha 1 | SEQ ID NOS: 3240-3241 |
| COL16A1 | Collagen, type XVI, alpha 1 | SEQ ID NOS: 3242-3246 |
| COL18A1 | Collagen, type XVIII, alpha 1 | SEQ ID NOS: 3247-3251 |
| COL19A1 | Collagen, type XIX, alpha 1 | SEQ ID NOS: 3252-3254 |
| COL1A1 | Collagen, type I, alpha 1 | SEQ ID NOS: 3255-3256 |
| COL1A2 | Collagen, type I, alpha 2 | SEQ ID NOS: 3257-3258 |
| COL20A1 | Collagen, type XX, alpha 1 | SEQ ID NOS: 3259-3262 |
| COL21A1 | Collagen, type XXI, alpha 1 | SEQ ID NOS: 3263-3268 |
| COL22A1 | Collagen, type XXII, alpha 1 | SEQ ID NOS: 3269-3271 |
| COL24A1 | Collagen, type XXIV, alpha 1 | SEQ ID NOS: 3272-3275 |
| COL26A1 | Collagen, type XXVI, alpha 1 | SEQ ID NOS: 3276-3277 |
| COL27A1 | Collagen, type XXVII, alpha 1 | SEQ ID NOS: 3278-3280 |
| COL28A1 | Collagen, type XXVIII, alpha 1 | SEQ ID NOS: 3281-3285 |
| COL2A1 | Collagen, type II, alpha 1 | SEQ ID NOS: 3286-3287 |
| COL3A1 | Collagen, type III, alpha 1 | SEQ ID NOS: 3288-3290 |
| COL4A1 | Collagen, type IV, alpha 1 | SEQ ID NOS: 3291-3293 |
| COL4A2 | Collagen, type IV, alpha 2 | SEQ ID NOS: 3294-3296 |
| COL4A3 | Collagen, type IV, alpha 3 (Goodpasture antigen) | SEQ ID NOS: 3297-3300 |
| COL4A4 | Collagen, type IV, alpha 4 | SEQ ID NOS: 3301-3302 |
| COL4A5 | Collagen, type IV, alpha 5 | SEQ ID NOS: 3303-3309 |
| COL4A6 | Collagen, type IV, alpha 6 | SEQ ID NOS: 3310-3315 |
| COL5A1 | Collagen, type V, alpha 1 | SEQ ID NOS: 3316-3318 |
| COL5A2 | Collagen, type V, alpha 2 | SEQ ID NOS: 3319-3320 |
| COL5A3 | Collagen, type V, alpha 3 | SEQ ID NO: 3321 |
| COL6A1 | Collagen, type VI, alpha 1 | SEQ ID NOS: 3322-3323 |
| COL6A2 | Collagen, type VI, alpha 2 | SEQ ID NOS: 3324-3329 |
| COL6A3 | Collagen, type VI, alpha 3 | SEQ ID NOS: 3330-3338 |
| COL6A5 | Collagen, type VI, alpha 5 | SEQ ID NOS: 3339-3343 |
| COL6A6 | Collagen, type VI, alpha 6 | SEQ ID NOS: 3344-3346 |
| COL7A1 | Collagen, type VII, alpha 1 | SEQ ID NOS: 3347-3348 |
| COL8A1 | Collagen, type VIII, alpha 1 | SEQ ID NOS: 3349-3352 |
| COL8A2 | Collagen, type VIII, alpha 2 | SEQ ID NOS: 3353-3355 |
| COL9A1 | Collagen, type IX, alpha 1 | SEQ ID NOS: 3356-3359 |
| COL9A2 | Collagen, type IX, alpha 2 | SEQ ID NOS: 3360-3363 |
| COL9A3 | Collagen, type IX, alpha 3 | SEQ ID NOS: 3364-3365 |
| COLEC10 | Collectin sub-family member 10 (C-type lectin) | SEQ ID NO: 3366 |
| COLEC11 | Collectin sub-family member 11 | SEQ ID NOS: 3367-3376 |
| COLGALT1 | Collagen beta(1-O)galactosyltransferase 1 | SEQ ID NOS: 3377-3379 |
| COLGALT2 | Collagen beta(1-O)galactosyltransferase 2 | SEQ ID NOS: 3380-3382 |
| COLQ | Collagen-like tail subunit (single strand of | SEQ ID NOS: 3383-3387 |
| | homotrimer) of asymmetric acetylcholinesterase | |
| COMP | Cartilage oligomeric matrix protein | SEQ ID NOS: 3388-3390 |
| COPS6 | COP9 signalosome subunit 6 | SEQ ID NOS: 3391-3394 |
| COQ6 | Coenzyme Q6 monooxygenase | SEQ ID NOS: 3395-3402 |
| CORT | Cortistatin | SEQ ID NO: 3403 |
| CP | Ceruloplasmin (ferroxidase) | SEQ ID NOS: 3404-3408 |
| CPA1 | Carboxypeptidase A1 (pancreatic) | SEQ ID NOS: 3409-3413 |
| CPA2 | Carboxypeptidase A2 (pancreatic) | SEQ ID NOS: 3414-3415 |
| CPA3 | Carboxypeptidase A3 (mast cell) | SEQ ID NO: 3416 |
| CPA4 | Carboxypeptidase A4 | SEQ ID NOS: 3417-3422 |
| CPA6 | Carboxypeptidase A6 | SEQ ID NOS: 3423-3425 |
| CPAMD8 | C3 and PZP-like, alpha-2-macroglobulin domain | SEQ ID NOS: 3426-3431 |
| | containing 8 | |
| CPB1 | Carboxypeptidase B1 (tissue) | SEQ ID NOS: 3432-3436 |
| CPB2 | Carboxypeptidase B2 (plasma) | SEQ ID NOS: 3437-3439 |
| CPE | Carboxypeptidase E | SEQ ID NOS: 3440-3444 |
| CPM | Carboxypeptidase M | SEQ ID NOS: 3445-3454 |
| CPN1 | Carboxypeptidase N, polypeptide 1 | SEQ ID NOS: 3455-3456 |
| CPN2 | Carboxypeptidase N, polypeptide 2 | SEQ ID NOS: 3457-3458 |
| CPO | Carboxypeptidase O | SEQ ID NO: 3459 |
| CPQ | Carboxypeptidase Q | SEQ ID NOS: 3460-3465 |
| CPVL | Carboxypeptidase, vitellogenic-like | SEQ ID NOS: 3466-3476 |
| CPXM1 | Carboxypeptidase X (M14 family), member 1 | SEQ ID NO: 3477 |
| CPXM2 | Carboxypeptidase X (M14 family), member 2 | SEQ ID NOS: 3478-3479 |
| CPZ | Carboxypeptidase Z | SEQ ID NOS: 3480-3483 |
| CR1L | Complement component (3b/4b) receptor 1-like | SEQ ID NOS: 3484-3485 |
| CRB2 | Crumbs family member 2 | SEQ ID NOS: 3486-3488 |
| CREG1 | Cellular repressor of E1A-stimulated genes 1 | SEQ ID NO: 3489 |
| CREG2 | Cellular repressor of E1A-stimulated genes 2 | SEQ ID NO: 3490 |
| CRELD1 | Cysteine-rich with EGF-like domains 1 | SEQ ID NOS: 3491-3496 |
| CRELD2 | Cysteine-rich with EGF-like domains 2 | SEQ ID NOS: 3497-3501 |
| CRH | Corticotropin releasing hormone | SEQ ID NO: 3502 |
| CRHBP | Corticotropin releasing hormone binding protein | SEQ ID NOS: 3503-3504 |
| CRHR1 | Corticotropin releasing hormone receptor 1 | SEQ ID NOS: 3505-3516 |
| CRHR2 | Corticotropin releasing hormone receptor 2 | SEQ ID NOS: 3517-3523 |
| CRISP1 | Cysteine-rich secretory protein 1 | SEQ ID NOS: 3524-3527 |
| CRISP2 | Cysteine-rich secretory protein 2 | SEQ ID NOS: 3528-3530 |
| CRISP3 | Cysteine-rich secretory protein 3 | SEQ ID NOS: 3531-3534 |
| CRISPLD2 | Cysteine-rich secretory protein LCCL domain | SEQ ID NOS: 3535-3542 |
| | containing 2 | |
| CRLF1 | Cytokine receptor-like factor 1 | SEQ ID NOS: 3543-3544 |
| CRP | C-reactive protein, pentraxin-related | SEQ ID NOS: 3545-3549 |
| CRTAC1 | Cartilage acidic protein 1 | SEQ ID NOS: 3550-3554 |
| CRTAP | Cartilage associated protein | SEQ ID NOS: 3555-3556 |
| CRY2 | Cryptochrome circadian clock 2 | SEQ ID NOS: 3557-3560 |
| CSAD | Cysteine sulfinic acid decarboxylase | SEQ ID NOS: 3561-3573 |
| CSF1 | Colony stimulating factor 1 (macrophage) | SEQ ID NOS: 3574-3581 |
| CSF1R | Colony stimulating factor 1 receptor | SEQ ID NOS: 3582-3586 |
| CSF2 | Colony stimulating factor 2 (granulocyte- | SEQ ID NO: 3587 |
| | macrophage) | |
| CSF2RA | Colony stimulating factor 2 receptor, alpha, low- | SEQ ID NOS: 3588-3599 |
| | affinity (granulocyte-macrophage) | |
| CSF3 | Colony stimulating factor 3 (granulocyte) | SEQ ID NOS: 3600-3606 |
| CSGALNACT | Chondroitin sulfate N- | SEQ ID NOS: 3607-3615 |
| 1 | acetylgalactosaminyltransferase 1 | |
| CSH1 | Chorionic somatomammotropin hormone 1 | SEQ ID NOS: 3616-3619 |
| | (placental lactogen) | |
| CSH2 | Chorionic somatomammotropin hormone 2 | SEQ ID NOS: 3620-3624 |
| CSHL1 | Chorionic somatomammotropin hormone-like 1 | SEQ ID NOS: 3625-3631 |
| CSN1S1 | Casein alpha s1 | SEQ ID NOS: 3632-3637 |
| CSN2 | Casein beta | SEQ ID NO: 3638 |
| CSN3 | Casein kappa | SEQ ID NO: 3639 |
| CST1 | Cystatin SN | SEQ ID NOS: 3640-3641 |
| CST11 | Cystatin 11 | SEQ ID NOS: 3642-3643 |
| CST2 | Cystatin SA | SEQ ID NO: 3644 |
| CST3 | Cystatin C | SEQ ID NOS: 3645-3647 |
| CST4 | Cystatin S | SEQ ID NO: 3648 |
| CST5 | Cystatin D | SEQ ID NO: 3649 |
| CST6 | Cystatin E/M | SEQ ID NO: 3650 |
| CST7 | Cystatin F (leukocystatin) | SEQ ID NO: 3651 |
| CST8 | Cystatin 8 (cystatin-related epididymal specific) | SEQ ID NOS: 3652-3653 |
| CST9 | Cystatin 9 (testatin) | SEQ ID NO: 3654 |
| CST9L | Cystatin 9-like | SEQ ID NO: 3655 |
| CSTL1 | Cystatin-like 1 | SEQ ID NOS: 3656-3658 |
| CT55 | Cancer/testis antigen 55 | SEQ ID NOS: 3659-3660 |
| CTBS | Chitobiase, di-N-acetyl- | SEQ ID NOS: 3661-3663 |
| CTGF | Connective tissue growth factor | SEQ ID NO: 3664 |
| CTHRC1 | Collagen triple helix repeat containing 1 | SEQ ID NOS: 3665-3668 |
| CTLA4 | Cytotoxic T-lymphocyte-associated protein 4 | SEQ ID NOS: 3669-3672 |
| CTNS | Cystinosin, lysosomal cystine transporter | SEQ ID NOS: 3673-3680 |
| CTRB1 | Chymotrypsinogen B1 | SEQ ID NOS: 3681-3683 |
| CTRB2 | Chymotrypsinogen B2 | SEQ ID NOS: 3684-3687 |
| CTRC | Chymotrypsin C (caldecrin) | SEQ ID NOS: 3688-3689 |
| CTRL | Chymotrypsin-like | SEQ ID NOS: 3690-3692 |
| CTSA | Cathepsin A | SEQ ID NOS: 3693-3701 |
| CTSB | Cathepsin B | SEQ ID NOS: 3702-3726 |
| CTSC | Cathepsin C | SEQ ID NOS: 3727-3731 |
| CTSD | Cathepsin D | SEQ ID NOS: 3732-3742 |
| CTSE | Cathepsin E | SEQ ID NOS: 3743-3744 |
| CTSF | Cathepsin F | SEQ ID NOS: 3745-3748 |
| CTSG | Cathepsin G | SEQ ID NO: 3749 |
| CTSH | Cathepsin H | SEQ ID NOS: 3750-3755 |
| CTSK | Cathepsin K | SEQ ID NOS: 3756-3757 |
| CTSL | Cathepsin L | SEQ ID NOS: 3758-3760 |
| CTSO | Cathepsin O | SEQ ID NO: 3761 |
| CTSS | Cathepsin S | SEQ ID NOS: 3762-3766 |
| CTSV | Cathepsin V | SEQ ID NOS: 3767-3768 |
| CTSW | Cathepsin W | SEQ ID NOS: 3769-3771 |
| CTSZ | Cathepsin Z | SEQ ID NO: 3772 |
| CUBN | Cubilin (intrinsic factor-cobalamin receptor) | SEQ ID NOS: 3773-3776 |
| CUTA | CutA divalent cation tolerance homolog (E. coli) | SEQ ID NOS: 3777-3786 |
| CX3CL1 | Chemokine (C-X3-C motif) ligand 1 | SEQ ID NOS: 3787-3790 |
| CXADR | Coxsackie virus and adenovirus receptor | SEQ ID NOS: 3791-3795 |
| CXCL1 | Chemokine (C-X-C motif) ligand 1 (melanoma growth | SEQ ID NO: 3796 |
| | stimulating activity, alpha) | |
| CXCL10 | Chemokine (C-X-C motif) ligand 10 | SEQ ID NO: 3797 |
| CXCL11 | Chemokine (C-X-C motif) ligand 11 | SEQ ID NOS: 3798-3799 |
| CXCL12 | Chemokine (C-X-C motif) ligand 12 | SEQ ID NOS: 3800-3805 |
| CXCL13 | Chemokine (C-X-C motif) ligand 13 | SEQ ID NO: 3806 |
| CXCL14 | Chemokine (C-X-C motif) ligand 14 | SEQ ID NOS: 3807-3808 |
| CXCL17 | Chemokine (C-X-C motif) ligand 17 | SEQ ID NOS: 3809-3810 |
| CXCL2 | Chemokine (C-X-C motif) ligand 2 | SEQ ID NO: 3811 |
| CXCL3 | Chemokine (C-X-C motif) ligand 3 | SEQ ID NO: 3812 |
| CXCL5 | Chemokine (C-X-C motif) ligand 5 | SEQ ID NO: 3813 |
| CXCL6 | Chemokine (C-X-C motif) ligand 6 | SEQ ID NOS: 3814-3815 |
| CXCL8 | Chemokine (C-X-C motif) ligand 8 | SEQ ID NOS: 3816-3817 |
| CXCL9 | Chemokine (C-X-C motif) ligand 9 | SEQ ID NO: 3818 |
| CXorf36 | Chromosome X open reading frame 36 | SEQ ID NOS: 3819-3820 |
| CYB5D2 | Cytochrome b5 domain containing 2 | SEQ ID NOS: 3821-3824 |
| CYHR1 | Cysteine/histidine-rich 1 | SEQ ID NOS: 3825-3832 |
| CYP17A1 | Cytochrome P450, family 17, subfamily A, | SEQ ID NOS: 3833-3837 |
| | polypeptide 1 | |
| CYP20A1 | Cytochrome P450, family 20, subfamily A, | SEQ ID NOS: 3838-3844 |
| | polypeptide 1 | |
| CYP21A2 | Cytochrome P450, family 21, subfamily A, | SEQ ID NOS: 3845-3852 |
| | polypeptide 2 | |
| CYP26B1 | Cytochrome P450, family 26, subfamily B, | SEQ ID NOS: 3853-3857 |
| | polypeptide 1 | |
| CYP2A6 | Cytochrome P450, family 2, subfamily A, | SEQ ID NOS: 3858-3859 |
| | polypeptide 6 | |
| CYP2A7 | Cytochrome P450, family 2, subfamily A, | SEQ ID NOS: 3860-3862 |
| | polypeptide 7 | |
| CYP2B6 | Cytochrome P450, family 2, subfamily B, | SEQ ID NOS: 3863-3866 |
| | polypeptide 6 | |
| CYP2C18 | Cytochrome P450, family 2, subfamily C, | SEQ ID NOS: 3867-3868 |
| | polypeptide 18 | |
| CYP2C19 | Cytochrome P450, family 2, subfamily C, | SEQ ID NOS: 3869-3870 |
| | polypeptide 19 | |
| CYP2C8 | Cytochrome P450, family 2, subfamily C, | SEQ ID NOS: 3871-3878 |
| | polypeptide 8 | |
| CYP2C9 | Cytochrome P450, family 2, subfamily C, | SEQ ID NOS: 3879-3881 |
| | polypeptide 9 | |
| CYP2E1 | Cytochrome P450, family 2, subfamily E, | SEQ ID NOS: 3882-3887 |
| | polypeptide 1 | |
| CYP2F1 | Cytochrome P450, family 2, subfamily F, | SEQ ID NOS: 3888-3891 |
| | polypeptide 1 | |
| CYP2J2 | Cytochrome P450, family 2, subfamily J, | SEQ ID NO: 3892 |
| | polypeptide 2 | |
| CYP2R1 | Cytochrome P450, family 2, subfamily R, | SEQ ID NOS: 3893-3898 |
| | polypeptide 1 | |
| CYP2S1 | Cytochrome P450, family 2, subfamily S, | SEQ ID NOS: 3899-3904 |
| | polypeptide 1 | |
| CYP2W1 | Cytochrome P450, family 2, subfamily W, | SEQ ID NOS: 3905-3907 |
| | polypeptide 1 | |
| CYP46A1 | Cytochrome P450, family 46, subfamily A, | SEQ ID NOS: 3908-3912 |
| | polypeptide 1 | |
| CYP4F11 | Cytochrome P450, family 4, subfamily F, | SEQ ID NOS: 3913-3917 |
| | polypeptide 11 | |
| CYP4F2 | Cytochrome P450, family 4, subfamily F, | SEQ ID NOS: 3918-3922 |
| | polypeptide 2 | |
| CYR61 | Cysteine-rich, angiogenic inducer, 61 | SEQ ID NO: 3923 |
| CYTL1 | Cytokine-like 1 | SEQ ID NOS: 3924-3926 |
| D2HGDH | D-2-hydroxyglutarate dehydrogenase | SEQ ID NOS: 3927-3935 |
| DAG1 | Dystroglycan 1 (dystrophin-associated glycoprotein | SEQ ID NOS: 3936-3950 |
| | 1) | |
| DAND5 | DAN domain family member 5, BMP antagonist | SEQ ID NOS: 3951-3952 |
| DAO | D-amino-acid oxidase | SEQ ID NOS: 3953-3958 |
| DAZAP2 | DAZ associated protein 2 | SEQ ID NOS: 3959-3967 |
| DBH | Dopamine beta-hydroxylase (dopamine beta- | SEQ ID NOS: 3968-3969 |
| | monooxygenase) | |
| DBNL | Drebrin-like | SEQ ID NOS: 3970-3987 |
| DCD | Dermcidin | SEQ ID NOS: 3988-3990 |
| DCN | Decorin | SEQ ID NOS: 3991-4009 |
| DDIAS | DNA damage-induced apoptosis suppressor | SEQ ID NOS: 4010-4019 |
| DDOST | Dolichyl-diphosphooligosaccharide-protein | SEQ ID NOS: 4020-4023 |
| | glycosyltransferase subunit (non-catalytic) | |
| DDR1 | Discoidin domain receptor tyrosine kinase 1 | SEQ ID NOS: 4024-4069 |
| DDR2 | Discoidin domain receptor tyrosine kinase 2 | SEQ ID NOS: 4070-4075 |
| DDT | D-dopachrome tautomerase | SEQ ID NOS: 4076-4081 |
| DDX17 | DEAD (Asp-Glu-Ala-Asp) box helicase 17 | SEQ ID NOS: 4082-4086 |
| DDX20 | DEAD (Asp-Glu-Ala-Asp) box polypeptide 20 | SEQ ID NOS: 4087-4089 |
| DDX25 | DEAD (Asp-Glu-Ala-Asp) box helicase 25 | SEQ ID NOS: 4090-4096 |
| DDX28 | DEAD (Asp-Glu-Ala-Asp) box polypeptide 28 | SEQ ID NO: 4097 |
| DEAF1 | DEAF1 transcription factor | SEQ ID NOS: 4098-4100 |
| DEF8 | Differentially expressed in FDCP 8 homolog (mouse) | SEQ ID NOS: 4101-4120 |
| DEFA1 | Defensin, alpha 1 | SEQ ID NOS: 4121-4122 |
| DEFA1B | Defensin, alpha 1B | SEQ ID NO: 4123 |
| DEFA3 | Defensin, alpha 3, neutrophil-specific | SEQ ID NO: 4124 |
| DEFA4 | Defensin, alpha 4, corticostatin | SEQ ID NO: 4125 |
| DEFA5 | Defensin, alpha 5, Paneth cell-specific | SEQ ID NO: 4126 |
| DEFA6 | Defensin, alpha 6, Paneth cell-specific | SEQ ID NO: 4127 |
| DEFB1 | Defensin, beta 1 | SEQ ID NO: 4128 |
| DEFB103A | Defensin, beta 103A | SEQ ID NO: 4129 |
| DEFB103B | Defensin, beta 103B | SEQ ID NO: 4130 |
| DEFB104A | Defensin, beta 104A | SEQ ID NO: 4131 |
| DEFB104B | Defensin, beta 104B | SEQ ID NO: 4132 |
| DEFB105A | Defensin, beta 105A | SEQ ID NO: 4133 |
| DEFB105B | Defensin, beta 105B | SEQ ID NO: 4134 |
| DEFB106A | Defensin, beta 106A | SEQ ID NO: 4135 |
| DEFB106B | Defensin, beta 106B | SEQ ID NO: 4136 |
| DEFB107A | Defensin, beta 107A | SEQ ID NO: 4137 |
| DEFB107B | Defensin, beta 107B | SEQ ID NO: 4138 |
| DEFB108B | Defensin, beta 108B | SEQ ID NO: 4139 |
| DEFB110 | Defensin, beta 110 | SEQ ID NOS: 4140-4141 |
| DEFB113 | Defensin, beta 113 | SEQ ID NO: 4142 |
| DEFB114 | Defensin, beta 114 | SEQ ID NO: 4143 |
| DEFB115 | Defensin, beta 115 | SEQ ID NO: 4144 |
| DEFB116 | Defensin, beta 116 | SEQ ID NO: 4145 |
| DEFB118 | Defensin, beta 118 | SEQ ID NO: 4146 |
| DEFB119 | Defensin, beta 119 | SEQ ID NOS: 4147-4149 |
| DEFB121 | Defensin, beta 121 | SEQ ID NO: 4150 |
| DEFB123 | Defensin, beta 123 | SEQ ID NO: 4151 |
| DEFB124 | Defensin, beta 124 | SEQ ID NO: 4152 |
| DEFB125 | Defensin, beta 125 | SEQ ID NO: 4153 |
| DEFB126 | Defensin, beta 126 | SEQ ID NO: 4154 |
| DEFB127 | Defensin, beta 127 | SEQ ID NO: 4155 |
| DEFB128 | Defensin, beta 128 | SEQ ID NO: 4156 |
| DEFB129 | Defensin, beta 129 | SEQ ID NO: 4157 |
| DEFB130 | Defensin, beta 130 | SEQ ID NO: 4158 |
| RP11- | | SEQ ID NO: 4159 |
| 1236K1.1 | | |
| DEFB131 | Defensin, beta 131 | SEQ ID NO: 4160 |
| CTD- | | SEQ ID NO: 4161 |
| 2313N18.7 | | |
| DEFB132 | Defensin, beta 132 | SEQ ID NO: 4162 |
| DEFB133 | Defensin, beta 133 | SEQ ID NO: 4163 |
| DEFB134 | Defensin, beta 134 | SEQ ID NOS: 4164-4165 |
| DEFB135 | Defensin, beta 135 | SEQ ID NO: 4166 |
| DEFB136 | Defensin, beta 136 | SEQ ID NO: 4167 |
| DEFB4A | Defensin, beta 4A | SEQ ID NO: 4168 |
| DEFB4B | Defensin, beta 4B | SEQ ID NO: 4169 |
| C10orf10 | Chromosome 10 open reading frame 10 | SEQ ID NOS: 4170-4171 |
| DGCR2 | DiGeorge syndrome critical region gene 2 | SEQ ID NOS: 4172-4175 |
| DHH | Desert hedgehog | SEQ ID NO: 4176 |
| DHRS4 | Dehydrogenase/reductase (SDR family) member 4 | SEQ ID NOS: 4177-4184 |
| DHRS4L2 | Dehydrogenase/reductase (SDR family) member 4 | SEQ ID NOS: 4185-4194 |
| | like 2 | |
| DHRS7 | Dehydrogenase/reductase (SDR family) member 7 | SEQ ID NOS: 4195-4202 |
| DHRS7C | Dehydrogenase/reductase (SDR family) member 7C | SEQ ID NOS: 4203-4205 |
| DHRS9 | Dehydrogenase/reductase (SDR family) member 9 | SEQ ID NOS: 4206-4213 |
| DHRSX | Dehydrogenase/reductase (SDR family) X-linked | SEQ ID NOS: 4214-4218 |
| DHX29 | DEAH (Asp-Glu-Ala-His) box polypeptide 29 | SEQ ID NOS: 4219-4221 |
| DHX30 | DEAH (Asp-Glu-Ala-His) box helicase 30 | SEQ ID NOS: 4222-4229 |
| DHX8 | DEAH (Asp-Glu-Ala-His) box polypeptide 8 | SEQ ID NOS: 4230-4234 |
| DIO2 | Deiodinase, iodothyronine, type II | SEQ ID NOS: 4235-4244 |
| DIXDC1 | DIX domain containing 1 | SEQ ID NOS: 4245-4248 |
| DKK1 | Dickkopf WNT signaling pathway inhibitor 1 | SEQ ID NO: 4249 |
| DKK2 | Dickkopf WNT signaling pathway inhibitor 2 | SEQ ID NOS: 4250-4252 |
| DKK3 | Dickkopf WNT signaling pathway inhibitor 3 | SEQ ID NOS: 4253-4258 |
| DKK4 | Dickkopf WNT signaling pathway inhibitor 4 | SEQ ID NO: 4259 |
| DKKL1 | Dickkopf-like 1 | SEQ ID NOS: 4260-4265 |
| DLG4 | Discs, large homolog 4 (Drosophila) | SEQ ID NOS: 4266-4274 |
| DLK1 | Delta-like 1 homolog (Drosophila) | SEQ ID NOS: 4275-4278 |
| DLL1 | Delta-like 1 (Drosophila) | SEQ ID NOS: 4279-4280 |
| DLL3 | Delta-like 3 (Drosophila) | SEQ ID NOS: 4281-4283 |
| DMBT1 | Deleted in malignant brain tumors 1 | SEQ ID NOS: 4284-4290 |
| DMKN | Dermokine | SEQ ID NOS: 4291-4337 |
| DMP1 | Dentin matrix acidic phosphoprotein 1 | SEQ ID NOS: 4338-4339 |
| DMRTA2 | DMRT-like family A2 | SEQ ID NOS: 4340-4341 |
| DNAAF5 | Dynein, axonemal, assembly factor 5 | SEQ ID NOS: 4342-4345 |
| DNAH14 | Dynein, axonemal, heavy chain 14 | SEQ ID NOS: 4346-4360 |
| DNAJB11 | DnaJ (Hsp40) homolog, subfamily B, member 11 | SEQ ID NOS: 4361-4362 |
| DNAJB9 | DnaJ (Hsp40) homolog, subfamily B, member 9 | SEQ ID NO: 4363 |
| DNAJC25- | DNAJC25-GNG10 readthrough | SEQ ID NO: 4364 |
| GNG10 | | |
| DNAJC3 | DnaJ (Hsp40) homolog, subfamily C, member 3 | SEQ ID NOS: 4365-4366 |
| DNASE1 | Deoxyribonuclease I | SEQ ID NOS: 4367-4377 |
| DNASE1L1 | Deoxyribonuclease I-like 1 | SEQ ID NOS: 4378-4388 |
| DNASE1L2 | Deoxyribonuclease I-like 2 | SEQ ID NOS: 4389-4394 |
| DNASE1L3 | Deoxyribonuclease I-like 3 | SEQ ID NOS: 4395-4400 |
| DNASE2 | Deoxyribonuclease II, lysosomal | SEQ ID NOS: 4401-4402 |
| DNASE2B | Deoxyribonuclease II beta | SEQ ID NOS: 4403-4404 |
| DPEP1 | Dipeptidase 1 (renal) | SEQ ID NOS: 4405-4409 |
| DPEP2 | Dipeptidase 2 | SEQ ID NOS: 4410-4416 |
| DPEP3 | Dipeptidase 3 | SEQ ID NO: 4417 |
| DPF3 | D4, zinc and double PHD fingers, family 3 | SEQ ID NOS: 4418-4424 |
| DPP4 | Dipeptidyl-peptidase 4 | SEQ ID NOS: 4425-4429 |
| DPP7 | Dipeptidyl-peptidase 7 | SEQ ID NOS: 4430-4435 |
| DPT | Dermatopontin | SEQ ID NO: 4436 |
| DRAXIN | Dorsal inhibitory axon guidance protein | SEQ ID NO: 4437 |
| DSE | Dermatan sulfate epimerase | SEQ ID NOS: 4438-4446 |
| DSG2 | Desmoglein 2 | SEQ ID NOS: 4447-4448 |
| DSPP | Dentin sialophosphoprotein | SEQ ID NOS: 4449-4450 |
| DST | Dystonin | SEQ ID NOS: 4451-4469 |
| DUOX1 | Dual oxidase 1 | SEQ ID NOS: 4470-4474 |
| DYNLT3 | Dynein, light chain, Tctex-type 3 | SEQ ID NOS: 4475-4477 |
| E2F5 | E2F transcription factor 5, p130-binding | SEQ ID NOS: 4478-4484 |
| EBAG9 | Estrogen receptor binding site associated, antigen, 9 | SEQ ID NOS: 4485-4493 |
| EBI3 | Epstein-Barr virus induced 3 | SEQ ID NO: 4494 |
| ECHDC1 | Ethylmalonyl-CoA decarboxylase 1 | SEQ ID NOS: 4495-4513 |
| ECM1 | Extracellular matrix protein 1 | SEQ ID NOS: 4514-4516 |
| ECM2 | Extracellular matrix protein 2, female organ and | SEQ ID NOS: 4517-4520 |
| | adipocyte specific | |
| ECSIT | ECSIT signalling integrator | SEQ ID NOS: 4521-4532 |
| EDDM3A | Epididymal protein 3A | SEQ ID NO: 4533 |
| EDDM3B | Epididymal protein 3B | SEQ ID NO: 4534 |
| EDEM2 | ER degradation enhancer, mannosidase alpha-like 2 | SEQ ID NOS: 4535-4536 |
| EDEM3 | ER degradation enhancer, mannosidase alpha-like 3 | SEQ ID NOS: 4537-4539 |
| EDIL3 | EGF-like repeats and discoidin I-like domains 3 | SEQ ID NOS: 4540-4541 |
| EDN1 | Endothelin 1 | SEQ ID NO: 4542 |
| EDN2 | Endothelin 2 | SEQ ID NO: 4543 |
| EDN3 | Endothelin 3 | SEQ ID NOS: 4544-4549 |
| EDNRB | Endothelin receptor type B | SEQ ID NOS: 4550-4558 |
| EFEMP1 | EGF containing fibulin-like extracellular matrix | SEQ ID NOS: 4559-4569 |
| | protein 1 | |
| EFEMP2 | EGF containing fibulin-like extracellular matrix | SEQ ID NOS: 4570-4581 |
| | protein 2 | |
| EFNA1 | Ephrin-A1 | SEQ ID NOS: 4582-4583 |
| EFNA2 | Ephrin-A2 | SEQ ID NO: 4584 |
| EFNA4 | Ephrin-A4 | SEQ ID NOS: 4585-4587 |
| EGFL6 | EGF-like-domain, multiple 6 | SEQ ID NOS: 4588-4589 |
| EGFL7 | EGF-like-domain, multiple 7 | SEQ ID NOS: 4590-4594 |
| EGFL8 | EGF-like-domain, multiple 8 | SEQ ID NOS: 4595-4597 |
| EGFLAM | EGF-like, fibronectin type III and laminin G domains | SEQ ID NOS: 4598-4606 |
| EGFR | Epidermal growth factor receptor | SEQ ID NOS: 4607-4614 |
| EHBP1 | EH domain binding protein 1 | SEQ ID NOS: 4615-4626 |
| EHF | Ets homologous factor | SEQ ID NOS: 4627-4636 |
| EHMT1 | Euchromatic histone-lysine N-methyltransferase 1 | SEQ ID NOS: 4637-4662 |
| EHMT2 | Euchromatic histone-lysine N-methyltransferase 2 | SEQ ID NOS: 4663-4667 |
| EIF2AK1 | Eukaryotic translation initiation factor 2-alpha | SEQ ID NOS: 4668-4671 |
| | kinase 1 | |
| ELANE | Elastase, neutrophil expressed | SEQ ID NOS: 4672-4673 |
| ELN | Elastin | SEQ ID NOS: 4674-4696 |
| ELP2 | Elongator acetyltransferase complex subunit 2 | SEQ ID NOS: 4697-4709 |
| ELSPBP1 | Epididymal sperm binding protein 1 | SEQ ID NOS: 4710-4715 |
| EMC1 | ER membrane protein complex subunit 1 | SEQ ID NOS: 4716-4722 |
| EMC10 | ER membrane protein complex subunit 10 | SEQ ID NOS: 4723-4729 |
| EMC9 | ER membrane protein complex subunit 9 | SEQ ID NOS: 4730-4733 |
| EMCN | Endomucin | SEQ ID NOS: 4734-4738 |
| EMID1 | EMI domain containing 1 | SEQ ID NOS: 4739-4745 |
| EMILIN1 | Elastin microfibril interfacer 1 | SEQ ID NOS: 4746-4747 |
| EMILIN2 | Elastin microfibril interfacer 2 | SEQ ID NO: 4748 |
| EMILIN3 | Elastin microfibril interfacer 3 | SEQ ID NO: 4749 |
| ENAM | Enamelin | SEQ ID NO: 4750 |
| ENDOG | Endonuclease G | SEQ ID NO: 4751 |
| ENDOU | Endonuclease, polyU-specific | SEQ ID NOS: 4752-4754 |
| ENHO | Energy homeostasis associated | SEQ ID NO: 4755 |
| ENO4 | Enolase family member 4 | SEQ ID NOS: 4756-4760 |
| ENPP6 | Ectonucleotide pyrophosphatase/ | SEQ ID NOS: 4761-4762 |
| | phosphodiesterase 6 | |
| ENPP7 | Ectonucleotide pyrophosphatase/ | SEQ ID NOS: 4763-4764 |
| | phosphodiesterase 7 | |
| ENTPD5 | Ectonucleoside triphosphate diphosphohydrolase 5 | SEQ ID NOS: 4765-4769 |
| ENTPD8 | Ectonucleoside triphosphate diphosphohydrolase 8 | SEQ ID NOS: 4770-4773 |
| EOGT | EGF domain-specific O-linked N-acetylglucosamine | SEQ ID NOS: 4774-4781 |
| | (GlcNAc) transferase | |
| EPCAM | Epithelial cell adhesion molecule | SEQ ID NOS: 4782-4785 |
| EPDR1 | Ependymin related 1 | SEQ ID NOS: 4786-4789 |
| EPGN | Epithelial mitogen | SEQ ID NOS: 4790-4798 |
| EPHA10 | EPH receptor A10 | SEQ ID NOS: 4799-4806 |
| EPHA3 | EPH receptor A3 | SEQ ID NOS: 4807-4809 |
| EPHA4 | EPH receptor A4 | SEQ ID NOS: 4810-4819 |
| EPHA7 | EPH receptor A7 | SEQ ID NOS: 4820-4821 |
| EPHA8 | EPH receptor A8 | SEQ ID NOS: 4822-4823 |
| EPHB2 | EPH receptor B2 | SEQ ID NOS: 4824-4828 |
| EPHB4 | EPH receptor B4 | SEQ ID NOS: 4829-4831 |
| EPHX3 | Epoxide hydrolase 3 | SEQ ID NOS: 4832-4835 |
| EPO | Erythropoietin | SEQ ID NO: 4836 |
| EPPIN | Epididymal peptidase inhibitor | SEQ ID NOS: 4837-4839 |
| EPPIN- | EPPIN-WFDC6 readthrough | SEQ ID NO: 4840 |
| WFDC6 | | |
| EPS15 | Epidermal growth factor receptor pathway | SEQ ID NOS: 4841-4843 |
| | substrate 15 | |
| EPS8L1 | EPS8-like 1 | SEQ ID NOS: 4844-4849 |
| EPX | Eosinophil peroxidase | SEQ ID NO: 4850 |
| EPYC | Epiphycan | SEQ ID NOS: 4851-4852 |
| EQTN | Equatorin, sperm acrosome associated | SEQ ID NOS: 4853-4855 |
| ERAP1 | Endoplasmic reticulum aminopeptidase 1 | SEQ ID NOS: 4856-4861 |
| ERAP2 | Endoplasmic reticulum aminopeptidase 2 | SEQ ID NOS: 4862-4869 |
| ERBB3 | Erb-b2 receptor tyrosine kinase 3 | SEQ ID NOS: 4870-4883 |
| FAM132B | Family with sequence similarity 132, member B | SEQ ID NOS: 4884-4886 |
| ERLIN1 | ER lipid raft associated 1 | SEQ ID NOS: 4887-4889 |
| ERLIN2 | ER lipid raft associated 2 | SEQ ID NOS: 4890-4898 |
| ERN1 | Endoplasmic reticulum to nucleus signaling 1 | SEQ ID NOS: 4899-4900 |
| ERN2 | Endoplasmic reticulum to nucleus signaling 2 | SEQ ID NOS: 4901-4905 |
| ERO1A | Endoplasmic reticulum oxidoreductase alpha | SEQ ID NOS: 4906-4912 |
| ERO1B | Endoplasmic reticulum oxidoreductase beta | SEQ ID NOS: 4913-4915 |
| ERP27 | Endoplasmic reticulum protein 27 | SEQ ID NOS: 4916-4917 |
| ERP29 | Endoplasmic reticulum protein 29 | SEQ ID NOS: 4918-4921 |
| ERP44 | Endoplasmic reticulum protein 44 | SEQ ID NO: 4922 |
| ERV3-1 | Endogenous retrovirus group 3, member 1 | SEQ ID NO: 4923 |
| ESM1 | Endothelial cell-specific molecule 1 | SEQ ID NOS: 4924-4926 |
| ESRP1 | Epithelial splicing regulatory protein 1 | SEQ ID NOS: 4927-4935 |
| EXOG | Endo/exonuclease (5′-3′), endonuclease G-like | SEQ ID NOS: 4936-4949 |
| EXTL1 | Exostosin-like glycosyltransferase 1 | SEQ ID NO: 4950 |
| EXTL2 | Exostosin-like glycosyltransferase 2 | SEQ ID NOS: 4951-4955 |
| F10 | Coagulation factor X | SEQ ID NOS: 4956-4959 |
| F11 | Coagulation factor XI | SEQ ID NOS: 4960-4964 |
| F12 | Coagulation factor XII (Hageman factor) | SEQ ID NO: 4965 |
| F13B | Coagulation factor XIII, B polypeptide | SEQ ID NO: 4966 |
| F2 | Coagulation factor II (thrombin) | SEQ ID NOS: 4967-4969 |
| F2R | Coagulation factor II (thrombin) receptor | SEQ ID NOS: 4970-4971 |
| F2RL3 | Coagulation factor II (thrombin) receptor-like 3 | SEQ ID NOS: 4972-4973 |
| F5 | Coagulation factor V (proaccelerin, labile factor) | SEQ ID NOS: 4974-4975 |
| F7 | Coagulation factor VII (serum prothrombin | SEQ ID NOS: 4976-4979 |
| | conversion accelerator) | |
| F8 | Coagulation factor VIII, procoagulant component | SEQ ID NOS: 4980-4985 |
| F9 | Coagulation factor IX | SEQ ID NOS: 4986-4987 |
| FABP6 | Fatty acid binding protein 6, ileal | SEQ ID NOS: 4988-4990 |
| FAM107B | Family with sequence similarity 107, member B | SEQ ID NOS: 4991-5012 |
| FAM131A | Family with sequence similarity 131, member A | SEQ ID NOS: 5013-5021 |
| FAM171A1 | Family with sequence similarity 171, member A1 | SEQ ID NOS: 5022-5023 |
| FAM171B | Family with sequence similarity 171, member B | SEQ ID NOS: 5024-5025 |
| FAM172A | Family with sequence similarity 172, member A | SEQ ID NOS: 5026-5030 |
| FAM177A1 | Family with sequence similarity 177, member A1 | SEQ ID NOS: 5031-5040 |
| FAM180A | Family with sequence similarity 180, member A | SEQ ID NOS: 5041-5043 |
| FAM189A1 | Family with sequence similarity 189, member A1 | SEQ ID NOS: 5044-5045 |
| FAM198A | Family with sequence similarity 198, member A | SEQ ID NOS: 5046-5048 |
| FAM19A1 | Family with sequence similarity 19 (chemokine (C-C | SEQ ID NOS: 5049-5051 |
| | motif)-like), member A1 | |
| FAM19A2 | Family with sequence similarity 19 (chemokine (C-C | SEQ ID NOS: 5052-5059 |
| | motif)-like), member A2 | |
| FAM19A3 | Family with sequence similarity 19 (chemokine (C-C | SEQ ID NOS: 5060-5061 |
| | motif)-like), member A3 | |
| FAM19A4 | Family with sequence similarity 19 (chemokine (C-C | SEQ ID NOS: 5062-5064 |
| | motif)-like), member A4 | |
| FAM19A5 | Family with sequence similarity 19 (chemokine (C-C | SEQ ID NOS: 5065-5068 |
| | motif)-like), member A5 | |
| FAM20A | Family with sequence similarity 20, member A | SEQ ID NOS: 5069-5072 |
| FAM20C | Family with sequence similarity 20, member C | SEQ ID NO: 5073 |
| FAM213A | Family with sequence similarity 213, member A | SEQ ID NOS: 5074-5079 |
| FAM46B | Family with sequence similarity 46, member B | SEQ ID NO: 5080 |
| FAM57A | Family with sequence similarity 57, member A | SEQ ID NOS: 5081-5086 |
| FAM78A | Family with sequence similarity 78, member A | SEQ ID NOS: 5087-5089 |
| FAM96A | Family with sequence similarity 96, member A | SEQ ID NOS: 5090-5094 |
| FAM9B | Family with sequence similarity 9, member B | SEQ ID NOS: 5095-5098 |
| FAP | Fibroblast activation protein, alpha | SEQ ID NOS: 5099-5105 |
| FAS | Fas cell surface death receptor | SEQ ID NOS: 5106-5115 |
| FAT1 | FAT atypical cadherin 1 | SEQ ID NOS: 5116-5122 |
| FBLN1 | Fibulin 1 | SEQ ID NOS: 5123-5135 |
| FBLN2 | Fibulin 2 | SEQ ID NOS: 5136-5141 |
| FBLN5 | Fibulin 5 | SEQ ID NOS: 5142-5147 |
| FBLN7 | Fibulin 7 | SEQ ID NOS: 5148-5153 |
| FBN1 | Fibrillin 1 | SEQ ID NOS: 5154-5157 |
| FBN2 | Fibrillin 2 | SEQ ID NOS: 5158-5163 |
| FBN3 | Fibrillin 3 | SEQ ID NOS: 5164-5168 |
| FBXW7 | F-box and WD repeat domain containing 7, E3 | SEQ ID NOS: 5169-5179 |
| | ubiquitin protein ligase | |
| FCAR | Fc fragment of IgA receptor | SEQ ID NOS: 5180-5189 |
| FCGBP | Fc fragment of IgG binding protein | SEQ ID NOS: 5190-5192 |
| FCGR1B | Fc fragment of IgG, high affinity Ib, receptor (CD64) | SEQ ID NOS: 5193-5198 |
| FCGR3A | Fc fragment of IgG, low affinity IIIa, receptor (CD16a) | SEQ ID NOS: 5199-5205 |
| FCGRT | Fc fragment of IgG, receptor, transporter, alpha | SEQ ID NOS: 5206-5216 |
| FCMR | Fc fragment of IgM receptor | SEQ ID NOS: 5217-5223 |
| FCN1 | Ficolin (collagen/fibrinogen domain containing) 1 | SEQ ID NOS: 5224-5225 |
| FCN2 | Ficolin (collagen/fibrinogen domain containing | SEQ ID NOS: 5226-5227 |
| | lectin) 2 | |
| FCN3 | Ficolin (collagen/fibrinogen domain containing) 3 | SEQ ID NOS: 5228-5229 |
| FCRL1 | Fc receptor-like 1 | SEQ ID NOS: 5230-5232 |
| FCRL3 | Fc receptor-like 3 | SEQ ID NOS: 5233-5238 |
| FCRL5 | Fc receptor-like 5 | SEQ ID NOS: 5239-5241 |
| FCRLA | Fc receptor-like A | SEQ ID NOS: 5242-5253 |
| FCRLB | Fc receptor-like B | SEQ ID NOS: 5254-5258 |
| FDCSP | Follicular dendritic cell secreted protein | SEQ ID NO: 5259 |
| FETUB | Fetuin B | SEQ ID NOS: 5260-5266 |
| FGA | Fibrinogen alpha chain | SEQ ID NOS: 5267-5269 |
| FGB | Fibrinogen beta chain | SEQ ID NOS: 5270-5272 |
| FGF10 | Fibroblast growth factor 10 | SEQ ID NOS: 5273-5274 |
| FGF17 | Fibroblast growth factor 17 | SEQ ID NOS: 5275-5276 |
| FGF18 | Fibroblast growth factor 18 | SEQ ID NO: 5277 |
| FGF19 | Fibroblast growth factor 19 | SEQ ID NO: 5278 |
| FGF21 | Fibroblast growth factor 21 | SEQ ID NOS: 5279-5280 |
| FGF22 | Fibroblast growth factor 22 | SEQ ID NOS: 5281-5282 |
| FGF23 | Fibroblast growth factor 23 | SEQ ID NO: 5283 |
| FGF3 | Fibroblast growth factor 3 | SEQ ID NO: 5284 |
| FGF4 | Fibroblast growth factor 4 | SEQ ID NO: 5285 |
| FGF5 | Fibroblast growth factor 5 | SEQ ID NOS: 5286-5288 |
| FGF7 | Fibroblast growth factor 7 | SEQ ID NOS: 5289-5293 |
| FGF8 | Fibroblast growth factor 8 (androgen-induced) | SEQ ID NOS: 5294-5299 |
| FGFBP1 | Fibroblast growth factor binding protein 1 | SEQ ID NO: 5300 |
| FGFBP2 | Fibroblast growth factor binding protein 2 | SEQ ID NO: 5301 |
| FGFBP3 | Fibroblast growth factor binding protein 3 | SEQ ID NO: 5302 |
| FGFR1 | Fibroblast growth factor receptor 1 | SEQ ID NOS: 5303-5325 |
| FGFR2 | Fibroblast growth factor receptor 2 | SEQ ID NOS: 5326-5347 |
| FGFR3 | Fibroblast growth factor receptor 3 | SEQ ID NOS: 5348-5355 |
| FGFR4 | Fibroblast growth factor receptor 4 | SEQ ID NOS: 5356-5365 |
| FGFRL1 | Fibroblast growth factor receptor-like 1 | SEQ ID NOS: 5366-5371 |
| FGG | Fibrinogen gamma chain | SEQ ID NOS: 5372-5377 |
| FGL1 | Fibrinogen-like 1 | SEQ ID NOS: 5378-5384 |
| FGL2 | Fibrinogen-like 2 | SEQ ID NOS: 5385-5386 |
| FHL1 | Four and a half LIM domains 1 | SEQ ID NOS: 5387-5414 |
| FHOD3 | Formin homology 2 domain containing 3 | SEQ ID NOS: 5415-5421 |
| FIBIN | Fin bud initiation factor homolog (zebrafish) | SEQ ID NO: 5422 |
| FICD | FIC domain containing | SEQ ID NOS: 5423-5426 |
| FJX1 | Four jointed box 1 | SEQ ID NO: 5427 |
| FKBP10 | FK506 binding protein 10, 65 kDa | SEQ ID NOS: 5428-5433 |
| FKBP11 | FK506 binding protein 11, 19 kDa | SEQ ID NOS: 5434-5440 |
| FKBP14 | FK506 binding protein 14, 22 kDa | SEQ ID NOS: 5441-5443 |
| FKBP2 | FK506 binding protein 2, 13 kDa | SEQ ID NOS: 5444-5447 |
| FKBP7 | FK506 binding protein 7 | SEQ ID NOS: 5448-5453 |
| FKBP9 | FK506 binding protein 9, 63 kDa | SEQ ID NOS: 5454-5457 |
| FLT1 | Fms-related tyrosine kinase 1 | SEQ ID NOS: 5458-5466 |
| FLT4 | Fms-related tyrosine kinase 4 | SEQ ID NOS: 5467-5471 |
| FMO1 | Flavin containing monooxygenase 1 | SEQ ID NOS: 5472-5476 |
| FMO2 | Flavin containing monooxygenase 2 (non-functional) | SEQ ID NOS: 5477-5479 |
| FMO3 | Flavin containing monooxygenase 3 | SEQ ID NOS: 5480-5482 |
| FMO5 | Flavin containing monooxygenase 5 | SEQ ID NOS: 5483-5489 |
| FMOD | Fibromodulin | SEQ ID NO: 5490 |
| FN1 | Fibronectin 1 | SEQ ID NOS: 5491-5503 |
| FNDC1 | Fibronectin type III domain containing 1 | SEQ ID NOS: 5504-5505 |
| FNDC7 | Fibronectin type III domain containing 7 | SEQ ID NOS: 5506-5507 |
| FOCAD | Focadhesin | SEQ ID NOS: 5508-5514 |
| FOLR2 | Folate receptor 2 (fetal) | SEQ ID NOS: 5515-5524 |
| FOLR3 | Folate receptor 3 (gamma) | SEQ ID NOS: 5525-5529 |
| FOXRED2 | FAD-dependent oxidoreductase domain containing 2 | SEQ ID NOS: 5530-5533 |
| FP325331.1 | Uncharacterized protein UNQ6126/PRO20091 | SEQ ID NO: 5534 |
| CH507- | | SEQ ID NOS: 5535-5541 |
| 9B2.3 | | |
| FPGS | Folylpolyglutamate synthase | SEQ ID NOS: 5542-5548 |
| FRAS1 | Fraser extracellular matrix complex subunit 1 | SEQ ID NOS: 5549-5554 |
| FREM1 | FRAS1 related extracellular matrix 1 | SEQ ID NOS: 5555-5559 |
| FREM3 | FRAS1 related extracellular matrix 3 | SEQ ID NO: 5560 |
| FRMPD2 | FERM and PDZ domain containing 2 | SEQ ID NOS: 5561-5564 |
| FRZB | Frizzled-related protein | SEQ ID NO: 5565 |
| FSHB | Follicle stimulating hormone, beta polypeptide | SEQ ID NOS: 5566-5568 |
| FSHR | Follicle stimulating hormone receptor | SEQ ID NOS: 5569-5572 |
| FST | Follistatin | SEQ ID NOS: 5573-5576 |
| FSTL1 | Follistatin-like 1 | SEQ ID NOS: 5577-5580 |
| FSTL3 | Follistatin-like 3 (secreted glycoprotein) | SEQ ID NOS: 5581-5586 |
| FSTL4 | Follistatin-like 4 | SEQ ID NOS: 5587-5589 |
| FSTL5 | Follistatin-like 5 | SEQ ID NOS: 5590-5592 |
| FTCDNL1 | Formiminotransferase cyclodeaminase N-terminal | SEQ ID NOS: 5593-5596 |
| | like | |
| FUCA1 | Fucosidase, alpha-L-1, tissue | SEQ ID NO: 5597 |
| FUCA2 | Fucosidase, alpha-L-2, plasma | SEQ ID NOS: 5598-5599 |
| FURIN | Furin (paired basic amino acid cleaving enzyme) | SEQ ID NOS: 5600-5606 |
| FUT10 | Fucosyltransferase 10 (alpha (1,3) | SEQ ID NOS: 5607-5609 |
| | fucosyltransferase) | |
| FUT11 | Fucosyltransferase 11 (alpha (1,3) | SEQ ID NOS: 5610-5611 |
| | fucosyltransferase) | |
| FXN | Frataxin | SEQ ID NOS: 5612-5619 |
| FXR1 | Fragile X mental retardation, autosomal homolog 1 | SEQ ID NOS: 5620-5632 |
| FXYD3 | FXYD domain containing ion transport regulator 3 | SEQ ID NOS: 5633-5645 |
| GABBR1 | Gamma-aminobutyric acid (GABA) B receptor, 1 | SEQ ID NOS: 5646-5657 |
| GABRA1 | Gamma-aminobutyric acid (GABA) A receptor, | SEQ ID NOS: 5658-5673 |
| | alpha 1 | |
| GABRA2 | Gamma-aminobutyric acid (GABA) A receptor, | SEQ ID NOS: 5674-5688 |
| | alpha 2 | |
| GABRA5 | Gamma-aminobutyric acid (GABA) A receptor, | SEQ ID NOS: 5689-5697 |
| | alpha 5 | |
| GABRG3 | Gamma-aminobutyric acid (GABA) A receptor, | SEQ ID NOS: 5698-5703 |
| | gamma 3 | |
| GABRP | Gamma-aminobutyric acid (GABA) A receptor, pi | SEQ ID NOS: 5704-5712 |
| GAL | Galanin/GMAP prepropeptide | SEQ ID NO: 5713 |
| GAL3ST1 | Galactose-3-O-sulfotransferase 1 | SEQ ID NOS: 5714-5735 |
| GAL3ST2 | Galactose-3-O-sulfotransferase 2 | SEQ ID NO: 5736 |
| GAL3ST3 | Galactose-3-O-sulfotransferase 3 | SEQ ID NOS: 5737-5738 |
| GALC | Galactosylceramidase | SEQ ID NOS: 5739-5748 |
| GALNS | Galactosamine (N-acetyl)-6-sulfatase | SEQ ID NOS: 5749-5754 |
| GALNT10 | Polypeptide N-acetylgalactosaminyltransferase 10 | SEQ ID NOS: 5755-5758 |
| GALNT12 | Polypeptide N-acetylgalactosaminyltransferase 12 | SEQ ID NOS: 5759-5760 |
| GALNT15 | Polypeptide N-acetylgalactosaminyltransferase 15 | SEQ ID NOS: 5761-5764 |
| GALNT2 | Polypeptide N-acetylgalactosaminyltransferase 2 | SEQ ID NO: 5765 |
| GALNT6 | Polypeptide N-acetylgalactosaminyltransferase 6 | SEQ ID NOS: 5766-5777 |
| GALNT8 | Polypeptide N-acetylgalactosaminyltransferase 8 | SEQ ID NOS: 5778-5781 |
| GALNTL6 | Polypeptide N-acetylgalactosaminyltransferase- | SEQ ID NOS: 5782-5785 |
| | like 6 | |
| GALP | Galanin-like peptide | SEQ ID NOS: 5786-5788 |
| GANAB | Glucosidase, alpha; neutral AB | SEQ ID NOS: 5789-5797 |
| GARS | Glycyl-tRNA synthetase | SEQ ID NOS: 5798-5801 |
| GAS1 | Growth arrest-specific 1 | SEQ ID NO: 5802 |
| GAS6 | Growth arrest-specific 6 | SEQ ID NO: 5803 |
| GAST | Gastrin | SEQ ID NO: 5804 |
| PDDC1 | Parkinson disease 7 domain containing 1 | SEQ ID NOS: 5805-5813 |
| GBA | Glucosidase, beta, acid | SEQ ID NOS: 5814-5817 |
| GBGT1 | Globoside alpha-1,3-N- | SEQ ID NOS: 5818-5826 |
| | acetylgalactosaminyltransferase 1 | |
| GC | Group-specific component (vitamin D binding | SEQ ID NOS: 5827-5831 |
| | protein) | |
| GCG | Glucagon | SEQ ID NOS: 5832-5833 |
| GCGR | Glucagon receptor | SEQ ID NOS: 5834-5836 |
| GCNT7 | Glucosaminyl (N-acetyl) transferase family | SEQ ID NOS: 5837-5838 |
| | member 7 | |
| GCSH | Glycine cleavage system protein H (aminomethyl | SEQ ID NOS: 5839-5847 |
| | carrier) | |
| GDF1 | Growth differentiation factor 1 | SEQ ID NO: 5848 |
| GDF10 | Growth differentiation factor 10 | SEQ ID NO: 5849 |
| GDF11 | Growth differentiation factor 11 | SEQ ID NOS: 5850-5851 |
| GDF15 | Growth differentiation factor 15 | SEQ ID NOS: 5852-5854 |
| GDF2 | Growth differentiation factor 2 | SEQ ID NO: 5855 |
| GDF3 | Growth differentiation factor 3 | SEQ ID NO: 5856 |
| GDF5 | Growth differentiation factor 5 | SEQ ID NOS: 5857-5858 |
| GDF6 | Growth differentiation factor 6 | SEQ ID NOS: 5859-5861 |
| GDF7 | Growth differentiation factor 7 | SEQ ID NO: 5862 |
| GDF9 | Growth differentiation factor 9 | SEQ ID NOS: 5863-5867 |
| GDNF | Glial cell derived neurotrophic factor | SEQ ID NOS: 5868-5875 |
| GFOD2 | Glucose-fructose oxidoreductase domain | SEQ ID NOS: 5876-5881 |
| | containing 2 | |
| GFPT2 | Glutamine-fructose-6-phosphate transaminase 2 | SEQ ID NOS: 5882-5884 |
| GFRA2 | GDNF family receptor alpha 2 | SEQ ID NOS: 5885-5891 |
| GFRA4 | GDNF family receptor alpha 4 | SEQ ID NOS: 5892-5894 |
| GGA2 | Golgi-associated, gamma adaptin ear containing, | SEQ ID NOS: 5895-5903 |
| | ARF binding protein 2 | |
| GGH | Gamma-glutamyl hydrolase (conjugase, | SEQ ID NO: 5904 |
| | folylpolygammaglutamyl hydrolase) | |
| GGT1 | Gamma-glutamyltransferase 1 | SEQ ID NOS: 5905-5927 |
| GGT5 | Gamma-glutamyltransferase 5 | SEQ ID NOS: 5928-5932 |
| GH1 | Growth hormone 1 | SEQ ID NOS: 5933-5937 |
| GH2 | Growth hormone 2 | SEQ ID NOS: 5938-5942 |
| GHDC | GH3 domain containing | SEQ ID NOS: 5943-5950 |
| GHRH | Growth hormone releasing hormone | SEQ ID NOS: 5951-5953 |
| GHRHR | Growth hormone releasing hormone receptor | SEQ ID NOS: 5954-5959 |
| GHRL | Ghrelin/obestatin prepropeptide | SEQ ID NOS: 5960-5970 |
| GIF | Gastric intrinsic factor (vitamin B synthesis) | SEQ ID NOS: 5971-5972 |
| GIP | Gastric inhibitory polypeptide | SEQ ID NO: 5973 |
| GKN1 | Gastrokine 1 | SEQ ID NO: 5974 |
| GKN2 | Gastrokine 2 | SEQ ID NOS: 5975-5976 |
| GLA | Galactosidase, alpha | SEQ ID NOS: 5977-5978 |
| GLB1 | Galactosidase, beta 1 | SEQ ID NOS: 5979-5987 |
| GLB1L | Galactosidase, beta 1-like | SEQ ID NOS: 5988-5995 |
| GLB1L2 | Galactosidase, beta 1-like 2 | SEQ ID NOS: 5996-5997 |
| GLCE | Glucuronic acid epimerase | SEQ ID NOS: 5998-5999 |
| GLG1 | Golgi glycoprotein 1 | SEQ ID NOS: 6000-6007 |
| GLIPR1 | GLI pathogenesis-related 1 | SEQ ID NOS: 6008-6011 |
| GLIPR1L1 | GLI pathogenesis-related 1 like 1 | SEQ ID NOS: 6012-6015 |
| GLIS3 | GLIS family zinc finger 3 | SEQ ID NOS: 6016-6024 |
| GLMP | Glycosylated lysosomal membrane protein | SEQ ID NOS: 6025-6033 |
| GLRB | Glycine receptor, beta | SEQ ID NOS: 6034-6039 |
| GLS | Glutaminase | SEQ ID NOS: 6040-6047 |
| GLT6D1 | Glycosyltransferase 6 domain containing 1 | SEQ ID NOS: 6048-6049 |
| GLTPD2 | Glycolipid transfer protein domain containing 2 | SEQ ID NO: 6050 |
| GLUD1 | Glutamate dehydrogenase 1 | SEQ ID NO: 6051 |
| GM2A | GM2 ganglioside activator | SEQ ID NOS: 6052-6054 |
| GML | Glycosylphosphatidylinositol anchored molecule like | SEQ ID NOS: 6055-6056 |
| GNAS | GNAS complex locus | SEQ ID NOS: 6057-6078 |
| GNLY | Granulysin | SEQ ID NOS: 6079-6082 |
| GNPTG | N-acetylglucosamine-1-phosphate transferase, | SEQ ID NOS: 6083-6087 |
| | gamma subunit | |
| GNRH1 | Gonadotropin-releasing hormone 1 (luteinizing- | SEQ ID NOS: 6088-6089 |
| | releasing hormone) | |
| GNRH2 | Gonadotropin-releasing hormone 2 | SEQ ID NOS: 6090-6093 |
| GNS | Glucosamine (N-acetyl)-6-sulfatase | SEQ ID NOS: 6094-6099 |
| GOLM1 | Golgi membrane protein 1 | SEQ ID NOS: 6100-6104 |
| GORAB | Golgin, RAB6-interacting | SEQ ID NOS: 6105-6107 |
| GOT2 | Glutamic-oxaloacetic transaminase 2, mitochondrial | SEQ ID NOS: 6108-6110 |
| GP2 | Glycoprotein 2 (zymogen granule membrane) | SEQ ID NOS: 6111-6119 |
| GP6 | Glycoprotein VI (platelet) | SEQ ID NOS: 6120-6123 |
| GPC2 | Glypican 2 | SEQ ID NOS: 6124-6125 |
| GPC5 | Glypican 5 | SEQ ID NOS: 6126-6128 |
| GPC6 | Glypican 6 | SEQ ID NOS: 6129-6130 |
| GPD2 | Glycerol-3-phosphate dehydrogenase 2 | SEQ ID NOS: 6131-6139 |
| | (mitochondrial) | |
| GPER1 | G protein-coupled estrogen receptor 1 | SEQ ID NOS: 6140-6146 |
| GPHA2 | Glycoprotein hormone alpha 2 | SEQ ID NOS: 6147-6149 |
| GPHB5 | Glycoprotein hormone beta 5 | SEQ ID NOS: 6150-6151 |
| GPIHBP1 | Glycosylphosphatidylinositol anchored high density | SEQ ID NO: 6152 |
| | lipoprotein binding protein 1 | |
| GPLD1 | Glycosylphosphatidylinositol specific phospholipase | SEQ ID NO: 6153 |
| | D1 | |
| GPNMB | Glycoprotein (transmembrane) nmb | SEQ ID NOS: 6154-6156 |
| GPR162 | G protein-coupled receptor 162 | SEQ ID NOS: 6157-6160 |
| GPX3 | Glutathione peroxidase 3 | SEQ ID NOS: 6161-6168 |
| GPX4 | Glutathione peroxidase 4 | SEQ ID NOS: 6169-6179 |
| GPX5 | Glutathione peroxidase 5 | SEQ ID NOS: 6180-6181 |
| GPX6 | Glutathione peroxidase 6 | SEQ ID NOS: 6182-6184 |
| GPX7 | Glutathione peroxidase 7 | SEQ ID NO: 6185 |
| GREM1 | Gremlin 1, DAN family BMP antagonist | SEQ ID NOS: 6186-6188 |
| GREM2 | Gremlin 2, DAN family BMP antagonist | SEQ ID NO: 6189 |
| GRHL3 | Grainyhead-like transcription factor 3 | SEQ ID NOS: 6190-6195 |
| GRIA2 | Glutamate receptor, ionotropic, AMPA 2 | SEQ ID NOS: 6196-6207 |
| GRIA3 | Glutamate receptor, ionotropic, AMPA 3 | SEQ ID NOS: 6208-6213 |
| GRIA4 | Glutamate receptor, ionotropic, AMPA 4 | SEQ ID NOS: 6214-6225 |
| GRIK2 | Glutamate receptor, ionotropic, kainate 2 | SEQ ID NOS: 6226-6234 |
| GRIN2B | Glutamate receptor, ionotropic, N-methyl D- | SEQ ID NOS: 6235-6238 |
| | aspartate 2B | |
| GRM2 | Glutamate receptor, metabotropic 2 | SEQ ID NOS: 6239-6242 |
| GRM3 | Glutamate receptor, metabotropic 3 | SEQ ID NOS: 6243-6247 |
| GRM5 | Glutamate receptor, metabotropic 5 | SEQ ID NOS: 6248-6252 |
| GRN | Granulin | SEQ ID NOS: 6253-6268 |
| GRP | Gastrin-releasing peptide | SEQ ID NOS: 6269-6273 |
| DFNA5 | Deafness, autosomal dominant 5 | SEQ ID NOS: 6274-6282 |
| GSG1 | Germ cell associated 1 | SEQ ID NOS: 6283-6291 |
| GSN | Gelsolin | SEQ ID NOS: 6292-6300 |
| GTDC1 | Glycosyltransferase-like domain containing 1 | SEQ ID NOS: 6301-6314 |
| GTPBP10 | GTP-binding protein 10 (putative) | SEQ ID NOS: 6315-6323 |
| GUCA2A | Guanylate cyclase activator 2A (guanylin) | SEQ ID NO: 6324 |
| GUCA2B | Guanylate cyclase activator 2B (uroguanylin) | SEQ ID NO: 6325 |
| GUSB | Glucuronidase, beta | SEQ ID NOS: 6326-6330 |
| GVQW1 | GVQW motif containing 1 | SEQ ID NO: 6331 |
| GXYLT1 | Glucoside xylosyltransferase 1 | SEQ ID NOS: 6332-6333 |
| GXYLT2 | Glucoside xylosyltransferase 2 | SEQ ID NOS: 6334-6336 |
| GYPB | Glycophorin B (MNS blood group) | SEQ ID NOS: 6337-6345 |
| GZMA | Granzyme A (granzyme 1, cytotoxic T-lymphocyte- | SEQ ID NO: 6346 |
| | associated serine esterase 3) | |
| GZMB | Granzyme B (granzyme 2, cytotoxic T-lymphocyte- | SEQ ID NOS: 6347-6355 |
| | associated serine esterase 1) | |
| GZMH | Granzyme H (cathepsin G-like 2, protein h-CCPX) | SEQ ID NOS: 6356-6358 |
| GZMK | Granzyme K (granzyme 3; tryptase II) | SEQ ID NO: 6359 |
| GZMM | Granzyme M (lymphocyte met-ase 1) | SEQ ID NOS: 6360-6361 |
| H6PD | Hexose-6-phosphate dehydrogenase (glucose 1- | SEQ ID NOS: 6362-6363 |
| | dehydrogenase) | |
| HABP2 | Hyaluronan binding protein 2 | SEQ ID NOS: 6364-6365 |
| HADHB | Hydroxyacyl-CoA dehydrogenase/3-ketoacyl-CoA | SEQ ID NOS: 6366-6372 |
| | thiolase/enoyl-CoA hydratase (trifunctional protein), | |
| | beta subunit | |
| HAMP | Hepcidin antimicrobial peptide | SEQ ID NOS: 6373-6374 |
| HAPLN1 | Hyaluronan and proteoglycan link protein 1 | SEQ ID NOS: 6375-6381 |
| HAPLN2 | Hyaluronan and proteoglycan link protein 2 | SEQ ID NOS: 6382-6383 |
| HAPLN3 | Hyaluronan and proteoglycan link protein 3 | SEQ ID NOS: 6384-6387 |
| HAPLN4 | Hyaluronan and proteoglycan link protein 4 | SEQ ID NO: 6388 |
| HARS2 | Histidyl-tRNA synthetase 2, mitochondrial | SEQ ID NOS: 6389-6404 |
| HAVCR1 | Hepatitis A virus cellular receptor 1 | SEQ ID NOS: 6405-6409 |
| HCCS | Holocytochrome c synthase | SEQ ID NOS: 6410-6412 |
| HCRT | Hypocretin (orexin) neuropeptide precursor | SEQ ID NO: 6413 |
| CECR5 | Cat eye syndrome chromosome region, candidate 5 | SEQ ID NOS: 6414-6416 |
| HEATR5A | HEAT repeat containing 5A | SEQ ID NOS: 6417-6423 |
| HEPH | Hephaestin | SEQ ID NOS: 6424-6431 |
| HEXA | Hexosaminidase A (alpha polypeptide) | SEQ ID NOS: 6432-6441 |
| HEXB | Hexosaminidase B (beta polypeptide) | SEQ ID NOS: 6442-6447 |
| HFE2 | Hemochromatosis type 2 (juvenile) | SEQ ID NOS: 6448-6454 |
| HGF | Hepatocyte growth factor (hepapoietin A; scatter | SEQ ID NOS: 6455-6465 |
| | factor) | |
| HGFAC | HGF activator | SEQ ID NOS: 6466-6467 |
| HHIP | Hedgehog interacting protein | SEQ ID NOS: 6468-6469 |
| HHIPL1 | HHIP-like 1 | SEQ ID NOS: 6470-6471 |
| HHIPL2 | HHIP-like 2 | SEQ ID NO: 6472 |
| HHLA1 | HERV-H LTR-associating 1 | SEQ ID NOS: 6473-6474 |
| HHLA2 | HERV-H LTR-associating 2 | SEQ ID NOS: 6475-6485 |
| HIBADH | 3-hydroxyisobutyrate dehydrogenase | SEQ ID NOS: 6486-6488 |
| HINT2 | Histidine triad nucleotide binding protein 2 | SEQ ID NO: 6489 |
| HLA-A | Major histocompatibility complex, class I, A | SEQ ID NOS: 6490-6494 |
| HLA-C | Major histocompatibility complex, class I, C | SEQ ID NOS: 6495-6499 |
| HLA-DOA | Major histocompatibility complex, class II, DO alpha | SEQ ID NOS: 6500-6501 |
| HLA-DPA1 | Major histocompatibility complex, class II, DP | SEQ ID NOS: 6502-6505 |
| | alpha 1 | |
| HLA-DQA1 | Major histocompatibility complex, class II, DQ | SEQ ID NOS: 6506-6511 |
| | alpha 1 | |
| HLA-DQB1 | Major histocompatibility complex, class II, DQ beta 1 | SEQ ID NOS: 6512-6517 |
| HLA-DQB2 | Major histocompatibility complex, class II, DQ beta 2 | SEQ ID NOS: 6518-6521 |
| HMCN1 | Hemicentin 1 | SEQ ID NOS: 6522-6523 |
| HMCN2 | Hemicentin 2 | SEQ ID NOS: 6524-6527 |
| HMGCL | 3-hydroxymethyl-3-methylglutaryl-CoA lyase | SEQ ID NOS: 6528-6531 |
| HMSD | Histocompatibility (minor) serpin domain containing | SEQ ID NOS: 6532-6533 |
| HP | Haptoglobin | SEQ ID NOS: 6534-6547 |
| HPR | Haptoglobin-related protein | SEQ ID NOS: 6548-6550 |
| HPSE | Heparanase | SEQ ID NOS: 6551-6557 |
| HPSE2 | Heparanase 2 (inactive) | SEQ ID NOS: 6558-6563 |
| HPX | Hemopexin | SEQ ID NOS: 6564-6565 |
| HRC | Histidine rich calcium binding protein | SEQ ID NOS: 6566-6568 |
| HRG | Histidine-rich glycoprotein | SEQ ID NO: 6569 |
| HS2ST1 | Heparan sulfate 2-O-sulfotransferase 1 | SEQ ID NOS: 6570-6572 |
| HS3ST1 | Heparan sulfate (glucosamine) 3-O- | SEQ ID NOS: 6573-6575 |
| | sulfotransferase 1 | |
| HS6ST1 | Heparan sulfate 6-O-sulfotransferase 1 | SEQ ID NO: 6576 |
| HS6ST3 | Heparan sulfate 6-O-sulfotransferase 3 | SEQ ID NOS: 6577-6578 |
| HSD11B1L | Hydroxysteroid (11-beta) dehydrogenase 1-like | SEQ ID NOS: 6579-6597 |
| HSD17811 | Hydroxysteroid (17-beta) dehydrogenase 11 | SEQ ID NOS: 6598-6599 |
| HSD17B7 | Hydroxysteroid (17-beta) dehydrogenase 7 | SEQ ID NOS: 6600-6604 |
| HSP90B1 | Heat shock protein 90 kDa beta (Grp94), member 1 | SEQ ID NOS: 6605-6610 |
| HSPA13 | Heat shock protein 70 kDa family, member 13 | SEQ ID NO: 6611 |
| HSPA5 | Heat shock 70 kDa protein 5 (glucose-regulated | SEQ ID NO: 6612 |
| | protein, 78 kDa) | |
| HSPG2 | Heparan sulfate proteoglycan 2 | SEQ ID NOS: 6613-6617 |
| HTATIP2 | HIV-1 Tat interactive protein 2, 30 kDa | SEQ ID NOS: 6618-6625 |
| HTN1 | Histatin 1 | SEQ ID NOS: 6626-6628 |
| HTN3 | Histatin 3 | SEQ ID NOS: 6629-6631 |
| HTRA1 | HtrA serine peptidase 1 | SEQ ID NOS: 6632-6633 |
| HTRA3 | HtrA serine peptidase 3 | SEQ ID NOS: 6634-6635 |
| HTRA4 | HtrA serine peptidase 4 | SEQ ID NO: 6636 |
| HYAL1 | Hyaluronoglucosaminidase 1 | SEQ ID NOS: 6637-6645 |
| HYAL2 | Hyaluronoglucosaminidase 2 | SEQ ID NOS: 6646-6654 |
| HYAL3 | Hyaluronoglucosaminidase 3 | SEQ ID NOS: 6655-6661 |
| HYOU1 | Hypoxia up-regulated 1 | SEQ ID NOS: 6662-6676 |
| IAPP | Islet amyloid polypeptide | SEQ ID NOS: 6677-6681 |
| IBSP | Integrin-binding sialoprotein | SEQ ID NO: 6682 |
| ICAM1 | Intercellular adhesion molecule 1 | SEQ ID NOS: 6683-6685 |
| ICAM2 | Intercellular adhesion molecule 2 | SEQ ID NOS: 6686-6696 |
| ICAM4 | Intercellular adhesion molecule 4 (Landsteiner- | SEQ ID NOS: 6697-6699 |
| | Wiener blood group) | |
| ID1 | Inhibitor of DNA binding 1, dominant negative helix- | SEQ ID NOS: 6700-6701 |
| | loop-helix protein | |
| IDE | Insulin-degrading enzyme | SEQ ID NOS: 6702-6705 |
| IDNK | IdnK, gluconokinase homolog (E. coli) | SEQ ID NOS: 6706-6711 |
| IDS | Iduronate 2-sulfatase | SEQ ID NOS: 6712-6717 |
| IDUA | Iduronidase, alpha-L- | SEQ ID NOS: 6718-6723 |
| IFI27L2 | Interferon, alpha-inducible protein 27-like 2 | SEQ ID NOS: 6724-6725 |
| IFI30 | Interferon, gamma-inducible protein 30 | SEQ ID NOS: 6726-6727 |
| IFNA1 | Interferon, alpha 1 | SEQ ID NO: 6728 |
| IFNA10 | Interferon, alpha 10 | SEQ ID NO: 6729 |
| IFNA13 | Interferon, alpha 13 | SEQ ID NOS: 6730-6731 |
| IFNA14 | Interferon, alpha 14 | SEQ ID NO: 6732 |
| IFNA16 | Interferon, alpha 16 | SEQ ID NO: 6733 |
| IFNA17 | Interferon, alpha 17 | SEQ ID NO: 6734 |
| IFNA2 | Interferon, alpha 2 | SEQ ID NO: 6735 |
| IFNA21 | Interferon, alpha 21 | SEQ ID NO: 6736 |
| IFNA4 | Interferon, alpha 4 | SEQ ID NO: 6737 |
| IFNA5 | Interferon, alpha 5 | SEQ ID NO: 6738 |
| IFNA6 | Interferon, alpha 6 | SEQ ID NOS: 6739-6740 |
| IFNA7 | Interferon, alpha 7 | SEQ ID NO: 6741 |
| IFNA8 | Interferon, alpha 8 | SEQ ID NO: 6742 |
| IFNAR1 | Interferon (alpha, beta and omega) receptor 1 | SEQ ID NOS: 6743-6744 |
| IFNB1 | Interferon, beta 1, fibroblast | SEQ ID NO: 6745 |
| IFNE | Interferon, epsilon | SEQ ID NO: 6746 |
| IFNG | Interferon, gamma | SEQ ID NO: 6747 |
| IFNGR1 | Interferon gamma receptor 1 | SEQ ID NOS: 6748-6758 |
| IFNL1 | Interferon, lambda 1 | SEQ ID NO: 6759 |
| IFNL2 | Interferon, lambda 2 | SEQ ID NO: 6760 |
| IFNL3 | Interferon, lambda 3 | SEQ ID NOS: 6761-6762 |
| IFNLR1 | Interferon, lambda receptor 1 | SEQ ID NOS: 6763-6767 |
| IFNW1 | Interferon, omega 1 | SEQ ID NO: 6768 |
| IGF1 | Insulin-like growth factor 1 (somatomedin C) | SEQ ID NOS: 6769-6774 |
| IGF2 | Insulin-like growth factor 2 | SEQ ID NOS: 6775-6782 |
| IGFALS | Insulin-like growth factor binding protein, acid labile | SEQ ID NOS: 6783-6785 |
| | subunit | |
| IGFBP1 | Insulin-like growth factor binding protein 1 | SEQ ID NOS: 6786-6788 |
| IGFBP2 | Insulin-like growth factor binding protein 2, 36 kDa | SEQ ID NOS: 6789-6792 |
| IGFBP3 | Insulin-like growth factor binding protein 3 | SEQ ID NOS: 6793-6800 |
| IGFBP4 | Insulin-like growth factor binding protein 4 | SEQ ID NO: 6801 |
| IGFBP5 | Insulin-like growth factor binding protein 5 | SEQ ID NOS: 6802-6803 |
| IGFBP6 | Insulin-like growth factor binding protein 6 | SEQ ID NOS: 6804-6806 |
| IGFBP7 | Insulin-like growth factor binding protein 7 | SEQ ID NOS: 6807-6808 |
| IGFBPL1 | Insulin-like growth factor binding protein-like 1 | SEQ ID NO: 6809 |
| IGFL1 | IGF-like family member 1 | SEQ ID NO: 6810 |
| IGFL2 | IGF-like family member 2 | SEQ ID NOS: 6811-6813 |
| IGFL3 | IGF-like family member 3 | SEQ ID NO: 6814 |
| IGFLR1 | IGF-like family receptor 1 | SEQ ID NOS: 6815-6823 |
| IGIP | IgA-inducing protein | SEQ ID NO: 6824 |
| IGLON5 | IgLON family member 5 | SEQ ID NO: 6825 |
| IGSF1 | Immunoglobulin superfamily, member 1 | SEQ ID NOS: 6826-6831 |
| IGSF10 | Immunoglobulin superfamily, member 10 | SEQ ID NOS: 6832-6833 |
| IGSF11 | Immunoglobulin superfamily, member 11 | SEQ ID NOS: 6834-6841 |
| IGSF21 | Immunoglobin superfamily, member 21 | SEQ ID NO: 6842 |
| IGSF8 | Immunoglobulin superfamily, member 8 | SEQ ID NOS: 6843-6846 |
| IGSF9 | Immunoglobulin superfamily, member 9 | SEQ ID NOS: 6847-6849 |
| IHH | Indian hedgehog | SEQ ID NO: 6850 |
| IL10 | Interleukin 10 | SEQ ID NOS: 6851-6852 |
| IL11 | Interleukin 11 | SEQ ID NOS: 6853-6856 |
| IL11RA | Interleukin 11 receptor, alpha | SEQ ID NOS: 6857-6867 |
| IL12B | Interleukin 12B | SEQ ID NO: 6868 |
| IL12RB1 | Interleukin 12 receptor, beta 1 | SEQ ID NOS: 6869-6874 |
| IL12RB2 | Interleukin 12 receptor, beta 2 | SEQ ID NOS: 6875-6879 |
| IL13 | Interleukin 13 | SEQ ID NOS: 6880-6881 |
| IL13RA1 | Interleukin 13 receptor, alpha 1 | SEQ ID NOS: 6882-6883 |
| IL15RA | Interleukin 15 receptor, alpha | SEQ ID NOS: 6884-6901 |
| IL17A | Interleukin 17A | SEQ ID NO: 6902 |
| IL17B | Interleukin 17B | SEQ ID NO: 6903 |
| IL17C | Interleukin 17C | SEQ ID NO: 6904 |
| IL17D | Interleukin 17D | SEQ ID NOS: 6905-6907 |
| IL17F | Interleukin 17F | SEQ ID NO: 6908 |
| IL17RA | Interleukin 17 receptor A | SEQ ID NOS: 6909-6910 |
| IL17RC | Interleukin 17 receptor C | SEQ ID NOS: 6911-6926 |
| IL17RE | Interleukin 17 receptor E | SEQ ID NOS: 6927-6933 |
| IL18BP | Interleukin 18 binding protein | SEQ ID NOS: 6934-6944 |
| IL18R1 | Interleukin 18 receptor 1 | SEQ ID NOS: 6945-6948 |
| IL18RAP | Interleukin 18 receptor accessory protein | SEQ ID NOS: 6949-6951 |
| IL19 | Interleukin 19 | SEQ ID NOS: 6952-6954 |
| IL1R1 | Interleukin 1 receptor, type I | SEQ ID NOS: 6955-6967 |
| IL1R2 | Interleukin 1 receptor, type II | SEQ ID NOS: 6968-6971 |
| IL1RAP | Interleukin 1 receptor accessory protein | SEQ ID NOS: 6972-6985 |
| IL1RL1 | Interleukin 1 receptor-like 1 | SEQ ID NOS: 6986-6991 |
| IL1RL2 | Interleukin 1 receptor-like 2 | SEQ ID NOS: 6992-6994 |
| IL1RN | Interleukin 1 receptor antagonist | SEQ ID NOS: 6995-6999 |
| IL2 | Interleukin 2 | SEQ ID NO: 7000 |
| IL20 | Interleukin 20 | SEQ ID NOS: 7001-7003 |
| IL20RA | Interleukin 20 receptor, alpha | SEQ ID NOS: 7004-7010 |
| IL21 | Interleukin 21 | SEQ ID NOS: 7011-7012 |
| IL22 | Interleukin 22 | SEQ ID NOS: 7013-7014 |
| IL22RA2 | Interleukin 22 receptor, alpha 2 | SEQ ID NOS: 7015-7017 |
| IL23A | Interleukin 23, alpha subunit p19 | SEQ ID NO: 7018 |
| IL24 | Interleukin 24 | SEQ ID NOS: 7019-7024 |
| IL25 | Interleukin 25 | SEQ ID NOS: 7025-7026 |
| IL26 | Interleukin 26 | SEQ ID NO: 7027 |
| IL27 | Interleukin 27 | SEQ ID NOS: 7028-7029 |
| IL2RB | Interleukin 2 receptor, beta | SEQ ID NOS: 7030-7034 |
| IL3 | Interleukin 3 | SEQ ID NO: 7035 |
| IL31 | Interleukin 31 | SEQ ID NO: 7036 |
| IL31RA | Interleukin 31 receptor A | SEQ ID NOS: 7037-7044 |
| IL32 | Interleukin 32 | SEQ ID NOS: 7045-7074 |
| IL34 | Interleukin 34 | SEQ ID NOS: 7075-7078 |
| IL3RA | Interleukin 3 receptor, alpha (low affinity) | SEQ ID NOS: 7079-7081 |
| IL4 | Interleukin 4 | SEQ ID NOS: 7082-7084 |
| IL4I1 | Interleukin 4 induced 1 | SEQ ID NOS: 7085-7092 |
| IL4R | Interleukin 4 receptor | SEQ ID NOS: 7093-7106 |
| IL5 | Interleukin 5 | SEQ ID NOS: 7107-7108 |
| IL5RA | Interleukin 5 receptor, alpha | SEQ ID NOS: 7109-7118 |
| IL6 | Interleukin 6 | SEQ ID NOS: 7119-7125 |
| IL6R | Interleukin 6 receptor | SEQ ID NOS: 7126-7131 |
| IL6ST | Interleukin 6 signal transducer | SEQ ID NOS: 7132-7141 |
| IL7 | Interleukin 7 | SEQ ID NOS: 7142-7149 |
| IL7R | Interleukin 7 receptor | SEQ ID NOS: 7150-7156 |
| IL9 | Interleukin 9 | SEQ ID NO: 7157 |
| ILDR1 | Immunoglobulin-like domain containing receptor 1 | SEQ ID NOS: 7158-7162 |
| ILDR2 | Immunoglobulin-like domain containing receptor 2 | SEQ ID NOS: 7163-7169 |
| IMP4 | IMP4, U3 small nucleolar ribonucleoprotein | SEQ ID NOS: 7170-7175 |
| IMPG1 | Interphotoreceptor matrix proteoglycan 1 | SEQ ID NOS: 7176-7179 |
| INHA | Inhibin, alpha | SEQ ID NO: 7180 |
| INHBA | Inhibin, beta A | SEQ ID NOS: 7181-7183 |
| INHBB | Inhibin, beta B | SEQ ID NO: 7184 |
| INHBC | Inhibin, beta C | SEQ ID NO: 7185 |
| INHBE | Inhibin, beta E | SEQ ID NOS: 7186-7187 |
| INPP5A | Inositol polyphosphate-5-phosphatase A | SEQ ID NOS: 7188-7192 |
| INS | Insulin | SEQ ID NOS: 7193-7197 |
| INS-IGF2 | INS-IGF2 readthrough | SEQ ID NOS: 7198-7199 |
| INSL3 | Insulin-like 3 (Leydig cell) | SEQ ID NOS: 7200-7202 |
| INSL4 | Insulin-like 4 (placenta) | SEQ ID NO: 7203 |
| INSL5 | Insulin-like 5 | SEQ ID NO: 7204 |
| INSL6 | Insulin-like 6 | SEQ ID NO: 7205 |
| INTS3 | Integrator complex subunit 3 | SEQ ID NOS: 7206-7211 |
| IPO11 | Importin 11 | SEQ ID NOS: 7212-7220 |
| IPO9 | Importin 9 | SEQ ID NOS: 7221-7222 |
| IQCF6 | IQ motif containing F6 | SEQ ID NOS: 7223-7224 |
| IRAK3 | Interleukin-1 receptor-associated kinase 3 | SEQ ID NOS: 7225-7227 |
| IRS4 | Insulin receptor substrate 4 | SEQ ID NO: 7228 |
| ISLR | Immunoglobulin superfamily containing leucine-rich | SEQ ID NOS: 7229-7232 |
| | repeat | |
| ISLR2 | Immunoglobulin superfamily containing leucine-rich | SEQ ID NOS: 7233-7242 |
| | repeat 2 | |
| ISM1 | Isthmin 1, angiogenesis inhibitor | SEQ ID NO: 7243 |
| ISM2 | Isthmin 2 | SEQ ID NOS: 7244-7249 |
| ITGA4 | Integrin, alpha 4 (antigen CD49D, alpha 4 subunit of | SEQ ID NOS: 7250-7252 |
| | VLA-4 receptor) | |
| ITGA9 | Integrin, alpha 9 | SEQ ID NOS: 7253-7255 |
| ITGAL | Integrin, alpha L (antigen CD11A (p180), lymphocyte | SEQ ID NOS: 7256-7265 |
| | function-associated antigen 1; alpha polypeptide) | |
| ITGAX | Integrin, alpha X (complement component 3 | SEQ ID NOS: 7266-7268 |
| | receptor 4 subunit) | |
| ITGB1 | Integrin, beta 1 (fibronectin receptor, beta | SEQ ID NOS: 7269-7284 |
| | polypeptide, antigen CD29 includes MDF2, MSK12) | |
| ITGB2 | Integrin, beta 2 (complement component 3 receptor | SEQ ID NOS: 7285-7301 |
| | 3 and 4 subunit) | |
| ITGB3 | Integrin, beta 3 (platelet glycoprotein IIIa, antigen | SEQ ID NOS: 7302-7304 |
| | CD61) | |
| ITGB7 | Integrin, beta 7 | SEQ ID NOS: 7305-7312 |
| ITGBL1 | Integrin, beta-like 1 (with EGF-like repeat domains) | SEQ ID NOS: 7313-7318 |
| ITIH1 | Inter-alpha-trypsin inhibitor heavy chain 1 | SEQ ID NOS: 7319-7324 |
| ITIH2 | Inter-alpha-trypsin inhibitor heavy chain 2 | SEQ ID NOS: 7325-7327 |
| ITIH3 | Inter-alpha-trypsin inhibitor heavy chain 3 | SEQ ID NOS: 7328-7330 |
| ITIH4 | Inter-alpha-trypsin inhibitor heavy chain family, | SEQ ID NOS: 7331-7334 |
| | member 4 | |
| ITIH5 | Inter-alpha-trypsin inhibitor heavy chain family, | SEQ ID NOS: 7335-7338 |
| | member 5 | |
| ITIH6 | Inter-alpha-trypsin inhibitor heavy chain family, | SEQ ID NO: 7339 |
| | member 6 | |
| ITLN1 | Intelectin 1 (galactofuranose binding) | SEQ ID NO: 7340 |
| ITLN2 | Intelectin 2 | SEQ ID NO: 7341 |
| IZUMO1R | IZUMO1 receptor, JUNO | SEQ ID NOS: 7342-7343 |
| IZUMO4 | IZUMO family member 4 | SEQ ID NOS: 7344-7350 |
| AMICA1 | Adhesion molecule, interacts with CXADR antigen 1 | SEQ ID NOS: 7351-7359 |
| JCHAIN | Joining chain of multimeric IgA and IgM | SEQ ID NOS: 7360-7365 |
| JMJD8 | Jumonji domain containing 8 | SEQ ID NOS: 7366-7370 |
| JSRP1 | Junctional sarcoplasmic reticulum protein 1 | SEQ ID NO: 7371 |
| KANSL2 | KAT8 regulatory NSL complex subunit 2 | SEQ ID NOS: 7372-7382 |
| KAZALD1 | Kazal-type serine peptidase inhibitor domain 1 | SEQ ID NO: 7383 |
| KCNIP3 | Kv channel interacting protein 3, calsenilin | SEQ ID NOS: 7384-7386 |
| KCNK7 | Potassium channel, two pore domain subfamily K, | SEQ ID NOS: 7387-7392 |
| | member 7 | |
| KCNN4 | Potassium channel, calcium activated | SEQ ID NOS: 7393-7398 |
| | intermediate/small conductance subfamily N alpha, | |
| | member 4 | |
| KCNU1 | Potassium channel, subfamily U, member 1 | SEQ ID NOS: 7399-7403 |
| KCP | Kielin/chordin-like protein | SEQ ID NOS: 7404-7407 |
| KDELC1 | KDEL (Lys-Asp-Glu-Leu) containing 1 | SEQ ID NO: 7408 |
| KDELC2 | KDEL (Lys-Asp-Glu-Leu) containing 2 | SEQ ID NOS: 7409-7412 |
| KDM1A | Lysine (K)-specific demethylase 1A | SEQ ID NOS: 7413-7416 |
| KDM3B | Lysine (K)-specific demethylase 3B | SEQ ID NOS: 7417-7420 |
| KDM6A | Lysine (K)-specific demethylase 6A | SEQ ID NOS: 7421-7430 |
| KDM7A | Lysine (K)-specific demethylase 7A | SEQ ID NOS: 7431-7432 |
| KDSR | 3-ketodihydrosphingosine reductase | SEQ ID NOS: 7433-7439 |
| KERA | Keratocan | SEQ ID NO: 7440 |
| KIAA0100 | KIAA0100 | SEQ ID NOS: 7441-7446 |
| KIAA0319 | KIAA0319 | SEQ ID NOS: 7447-7452 |
| KIAA1324 | KIAA1324 | SEQ ID NOS: 7453-7461 |
| KIFC2 | Kinesin family member C2 | SEQ ID NOS: 7462-7464 |
| KIR2DL4 | Killer cell immunoglobulin-like receptor, two | SEQ ID NOS: 7465-7471 |
| | domains, long cytoplasmic tail, 4 | |
| KIR3DX1 | Killer cell immunoglobulin-like receptor, three | SEQ ID NOS: 7472-7476 |
| | domains, X1 | |
| KIRREL2 | Kin of IRRE like 2 (Drosophila) | SEQ ID NOS: 7477-7481 |
| KISS1 | KiSS-1 metastasis-suppressor | SEQ ID NOS: 7482-7483 |
| KLHL11 | Kelch-like family member 11 | SEQ ID NO: 7484 |
| KLHL22 | Kelch-like family member 22 | SEQ ID NOS: 7485-7491 |
| KLK1 | Kallikrein 1 | SEQ ID NOS: 7492-7493 |
| KLK10 | Kallikrein-related peptidase 10 | SEQ ID NOS: 7494-7498 |
| KLK11 | Kallikrein-related peptidase 11 | SEQ ID NOS: 7499-7507 |
| KLK12 | Kallikrein-related peptidase 12 | SEQ ID NOS: 7508-7514 |
| KLK13 | Kallikrein-related peptidase 13 | SEQ ID NOS: 7515-7523 |
| KLK14 | Kallikrein-related peptidase 14 | SEQ ID NOS: 7524-7525 |
| KLK15 | Kallikrein-related peptidase 15 | SEQ ID NOS: 7526-7530 |
| KLK2 | Kallikrein-related peptidase 2 | SEQ ID NOS: 7531-7543 |
| KLK3 | Kallikrein-related peptidase 3 | SEQ ID NOS: 7544-7555 |
| KLK4 | Kallikrein-related peptidase 4 | SEQ ID NOS: 7556-7560 |
| KLK5 | Kallikrein-related peptidase 5 | SEQ ID NOS: 7561-7564 |
| KLK6 | Kallikrein-related peptidase 6 | SEQ ID NOS: 7565-7571 |
| KLK7 | Kallikrein-related peptidase 7 | SEQ ID NOS: 7572-7576 |
| KLK8 | Kallikrein-related peptidase 8 | SEQ ID NOS: 7577-7584 |
| KLK9 | Kallikrein-related peptidase 9 | SEQ ID NOS: 7585-7586 |
| KLKB1 | Kallikrein B, plasma (Fletcher factor) 1 | SEQ ID NOS: 7587-7591 |
| SETD8 | SET domain containing (lysine methyltransferase) 8 | SEQ ID NOS: 7592-7595 |
| KNDC1 | Kinase non-catalytic C-lobe domain (KIND) | SEQ ID NOS: 7596-7597 |
| | containing 1 | |
| KNG1 | Kininogen 1 | SEQ ID NOS: 7598-7602 |
| KRBA2 | KRAB-A domain containing 2 | SEQ ID NOS: 7603-7606 |
| KREMEN2 | Kringle containing transmembrane protein 2 | SEQ ID NOS: 7607-7612 |
| KRTDAP | Keratinocyte differentiation-associated protein | SEQ ID NOS: 7613-7614 |
| L1CAM | L1 cell adhesion molecule | SEQ ID NOS: 7615-7624 |
| L3MBTL2 | L(3)mbt-like 2 (Drosophila) | SEQ ID NOS: 7625-7629 |
| LACRT | Lacritin | SEQ ID NOS: 7630-7632 |
| LACTB | Lactamase, beta | SEQ ID NOS: 7633-7635 |
| LAG3 | Lymphocyte-activation gene 3 | SEQ ID NOS: 7636-7637 |
| LAIR2 | Leukocyte-associated immunoglobulin-like | SEQ ID NOS: 7638-7641 |
| | receptor 2 | |
| LALBA | Lactalbumin, alpha- | SEQ ID NOS: 7642-7643 |
| LAMA1 | Laminin, alpha 1 | SEQ ID NOS: 7644-7645 |
| LAMA2 | Laminin, alpha 2 | SEQ ID NOS: 7646-7649 |
| LAMA3 | Laminin, alpha 3 | SEQ ID NOS: 7650-7659 |
| LAMA4 | Laminin, alpha 4 | SEQ ID NOS: 7660-7674 |
| LAMAS | Laminin, alpha 5 | SEQ ID NOS: 7675-7677 |
| LAMB1 | Laminin, beta 1 | SEQ ID NOS: 7678-7682 |
| LAMB2 | Laminin, beta 2 (laminin S) | SEQ ID NOS: 7683-7685 |
| LAMB3 | Laminin, beta 3 | SEQ ID NOS: 7686-7690 |
| LAMB4 | Laminin, beta 4 | SEQ ID NOS: 7691-7694 |
| LAMC1 | Laminin, gamma 1 (formerly LAMB2) | SEQ ID NOS: 7695-7696 |
| LAMC2 | Laminin, gamma 2 | SEQ ID NOS: 7697-7698 |
| LAMC3 | Laminin, gamma 3 | SEQ ID NOS: 7699-7700 |
| LAMP3 | Lysosomal-associated membrane protein 3 | SEQ ID NOS: 7701-7704 |
| GYLTL1B | Glycosyltransferase-like 1B | SEQ ID NOS: 7705-7710 |
| LAT | Linker for activation of T cells | SEQ ID NOS: 7711-7720 |
| LAT2 | Linker for activation of T cells family, member 2 | SEQ ID NOS: 7721-7729 |
| LBP | Lipopolysaccharide binding protein | SEQ ID NO: 7730 |
| LCAT | Lecithin-cholesterol acyltransferase | SEQ ID NOS: 7731-7737 |
| LCN1 | Lipocalin 1 | SEQ ID NOS: 7738-7739 |
| LCN10 | Lipocalin 10 | SEQ ID NOS: 7740-7745 |
| LCN12 | Lipocalin 12 | SEQ ID NOS: 7746-7748 |
| LCN15 | Lipocalin 15 | SEQ ID NO: 7749 |
| LCN2 | Lipocalin 2 | SEQ ID NOS: 7750-7752 |
| LCN6 | Lipocalin 6 | SEQ ID NOS: 7753-7754 |
| LCN8 | Lipocalin 8 | SEQ ID NOS: 7755-7756 |
| LCN9 | Lipocalin 9 | SEQ ID NOS: 7757-7758 |
| LCORL | Ligand dependent nuclear receptor corepressor-like | SEQ ID NOS: 7759-7764 |
| LDLR | Low density lipoprotein receptor | SEQ ID NOS: 7765-7773 |
| LDLRAD2 | Low density lipoprotein receptor class A domain | SEQ ID NOS: 7774-7775 |
| | containing 2 | |
| LEAP2 | Liver expressed antimicrobial peptide 2 | SEQ ID NO: 7776 |
| LECT2 | Leukocyte cell-derived chemotaxin 2 | SEQ ID NOS: 7777-7780 |
| LEFTY1 | Left-right determination factor 1 | SEQ ID NOS: 7781-7782 |
| LEFTY2 | Left-right determination factor 2 | SEQ ID NOS: 7783-7784 |
| LEP | Leptin | SEQ ID NO: 7785 |
| LFNG | LFNG O-fucosylpeptide 3-beta-N- | SEQ ID NOS: 7786-7791 |
| | acetylglucosaminyltransferase | |
| LGALS3BP | Lectin, galactoside-binding, soluble, 3 binding | SEQ ID NOS: 7792-7806 |
| | protein | |
| LGI1 | Leucine-rich, glioma inactivated 1 | SEQ ID NOS: 7807-7825 |
| LGI2 | Leucine-rich repeat LGI family, member 2 | SEQ ID NOS: 7826-7827 |
| LGI3 | Leucine-rich repeat LGI family, member 3 | SEQ ID NOS: 7828-7831 |
| LGI4 | Leucine-rich repeat LGI family, member 4 | SEQ ID NOS: 7832-7835 |
| LGMN | Legumain | SEQ ID NOS: 7836-7849 |
| LGR4 | Leucine-rich repeat containing G protein-coupled | SEQ ID NOS: 7850-7852 |
| | receptor 4 | |
| LHB | Luteinizing hormone beta polypeptide | SEQ ID NO: 7853 |
| LHCGR | Luteinizing hormone/choriogonadotropin receptor | SEQ ID NOS: 7854-7858 |
| LIF | Leukemia inhibitory factor | SEQ ID NOS: 7859-7860 |
| LIFR | Leukemia inhibitory factor receptor alpha | SEQ ID NOS: 7861-7865 |
| LILRA1 | Leukocyte immunoglobulin-like receptor, subfamily | SEQ ID NOS: 7866-7867 |
| | A (with TM domain), member 1 | |
| LILRA2 | Leukocyte immunoglobulin-like receptor, subfamily | SEQ ID NOS: 7868-7874 |
| | A (with TM domain), member 2 | |
| LILRB3 | Leukocyte immunoglobulin-like receptor, subfamily | SEQ ID NOS: 7875-7879 |
| | B (with TM and ITIM domains), member 3 | |
| LIME1 | Lck interacting transmembrane adaptor 1 | SEQ ID NOS: 7880-7885 |
| LINGO1 | Leucine rich repeat and Ig domain containing 1 | SEQ ID NOS: 7886-7896 |
| LIPA | Lipase A, lysosomal acid, cholesterol esterase | SEQ ID NOS: 7897-7901 |
| LIPC | Lipase, hepatic | SEQ ID NOS: 7902-7905 |
| LIPF | Lipase, gastric | SEQ ID NOS: 7906-7909 |
| LIPG | Lipase, endothelial | SEQ ID NOS: 7910-7915 |
| LIPH | Lipase, member H | SEQ ID NOS: 7916-7920 |
| LIPK | Lipase, family member K | SEQ ID NO: 7921 |
| LIPM | Lipase, family member M | SEQ ID NOS: 7922-7923 |
| LIPN | Lipase, family member N | SEQ ID NO: 7924 |
| LMAN2 | Lectin, mannose-binding 2 | SEQ ID NOS: 7925-7929 |
| LMNTD1 | Lamin tail domain containing 1 | SEQ ID NOS: 7930-7940 |
| LNX1 | Ligand of numb-protein X 1, E3 ubiquitin protein | SEQ ID NOS: 7941-7947 |
| | ligase | |
| LOX | Lysyl oxidase | SEQ ID NOS: 7948-7950 |
| LOXL1 | Lysyl oxidase-like 1 | SEQ ID NOS: 7951-7952 |
| LOXL2 | Lysyl oxidase-like 2 | SEQ ID NOS: 7953-7961 |
| LOXL3 | Lysyl oxidase-like 3 | SEQ ID NOS: 7962-7968 |
| LOXL4 | Lysyl oxidase-like 4 | SEQ ID NO: 7969 |
| LPA | Lipoprotein, Lp(a) | SEQ ID NOS: 7970-7972 |
| LPL | Lipoprotein lipase | SEQ ID NOS: 7973-7977 |
| LPO | Lactoperoxidase | SEQ ID NOS: 7978-7984 |
| LRAT | Lecithin retinol acyltransferase | SEQ ID NOS: 7985-7987 |
| | (phosphatidylcholine-retinol O-acyltransferase) | |
| LRCH3 | Leucine-rich repeats and calponin homology (CH) | SEQ ID NOS: 7988-7996 |
| | domain containing 3 | |
| LRCOL1 | Leucine rich colipase-like 1 | SEQ ID NOS: 7997-8000 |
| LRFN4 | Leucine rich repeat and fibronectin type III domain | SEQ ID NOS: 8001-8002 |
| | containing 4 | |
| LRFN5 | Leucine rich repeat and fibronectin type III domain | SEQ ID NOS: 8003-8005 |
| | containing 5 | |
| LRG1 | Leucine-rich alpha-2-glycoprotein 1 | SEQ ID NO: 8006 |
| LRP1 | Low density lipoprotein receptor-related protein 1 | SEQ ID NOS: 8007-8012 |
| LRP11 | Low density lipoprotein receptor-related protein 11 | SEQ ID NOS: 8013-8014 |
| LRP1B | Low density lipoprotein receptor-related protein 1B | SEQ ID NOS: 8015-8018 |
| LRP2 | Low density lipoprotein receptor-related protein 2 | SEQ ID NOS: 8019-8020 |
| LRP4 | Low density lipoprotein receptor-related protein 4 | SEQ ID NOS: 8021-8022 |
| LRPAP1 | Low density lipoprotein receptor-related protein | SEQ ID NOS: 8023-8024 |
| | associated protein 1 | |
| LRRC17 | Leucine rich repeat containing 17 | SEQ ID NOS: 8025-8027 |
| LRRC32 | Leucine rich repeat containing 32 | SEQ ID NOS: 8028-8031 |
| LRRC3B | Leucine rich repeat containing 3B | SEQ ID NOS: 8032-8036 |
| LRRC4B | Leucine rich repeat containing 4B | SEQ ID NOS: 8037-8039 |
| LRRC70 | Leucine rich repeat containing 70 | SEQ ID NOS: 8040-8041 |
| LRRN3 | Leucine rich repeat neuronal 3 | SEQ ID NOS: 8042-8045 |
| LRRTM1 | Leucine rich repeat transmembrane neuronal 1 | SEQ ID NOS: 8046-8052 |
| LRRTM2 | Leucine rich repeat transmembrane neuronal 2 | SEQ ID NOS: 8053-8055 |
| LRRTM4 | Leucine rich repeat transmembrane neuronal 4 | SEQ ID NOS: 8056-8061 |
| LRTM2 | Leucine-rich repeats and transmembrane domains 2 | SEQ ID NOS: 8062-8066 |
| LSR | Lipolysis stimulated lipoprotein receptor | SEQ ID NOS: 8067-8077 |
| LST1 | Leukocyte specific transcript 1 | SEQ ID NOS: 8078-8095 |
| LTA | Lymphotoxin alpha | SEQ ID NOS: 8096-8097 |
| LTBP1 | Latent transforming growth factor beta binding | SEQ ID NOS: 8098-8107 |
| | protein 1 | |
| LTBP2 | Latent transforming growth factor beta binding | SEQ ID NOS: 8108-8111 |
| | protein 2 | |
| LTBP3 | Latent transforming growth factor beta binding | SEQ ID NOS: 8112-8124 |
| | protein 3 | |
| LTBP4 | Latent transforming growth factor beta binding | SEQ ID NOS: 8125-8140 |
| | protein 4 | |
| LTBR | Lymphotoxin beta receptor (TNFR superfamily, | SEQ ID NOS: 8141-8146 |
| | member 3) | |
| LTF | Lactotransferrin | SEQ ID NOS: 8147-8151 |
| LTK | Leukocyte receptor tyrosine kinase | SEQ ID NOS: 8152-8155 |
| LUM | Lumican | SEQ ID NO: 8156 |
| LUZP2 | Leucine zipper protein 2 | SEQ ID NOS: 8157-8160 |
| LVRN | Laeverin | SEQ ID NOS: 8161-8166 |
| LY6E | Lymphocyte antigen 6 complex, locus E | SEQ ID NOS: 8167-8180 |
| LY6G5B | Lymphocyte antigen 6 complex, locus G5B | SEQ ID NOS: 8181-8182 |
| LY6G6D | Lymphocyte antigen 6 complex, locus G6D | SEQ ID NOS: 8183-8184 |
| LY6G6E | Lymphocyte antigen 6 complex, locus G6E | SEQ ID NOS: 8185-8188 |
| | (pseudogene) | |
| LY6H | Lymphocyte antigen 6 complex, locus H | SEQ ID NOS: 8189-8192 |
| LY6K | Lymphocyte antigen 6 complex, locus K | SEQ ID NOS: 8193-8196 |
| RP11- | | SEQ ID NO: 8197 |
| 520P18.5 | | |
| LY86 | Lymphocyte antigen 86 | SEQ ID NOS: 8198-8199 |
| LY96 | Lymphocyte antigen 96 | SEQ ID NOS: 8200-8201 |
| LYG1 | Lysozyme G-like 1 | SEQ ID NOS: 8202-8203 |
| LYG2 | Lysozyme G-like 2 | SEQ ID NOS: 8204-8209 |
| LYNX1 | Ly6/neurotoxin 1 | SEQ ID NOS: 8210-8214 |
| LYPD1 | LY6/PLAUR domain containing 1 | SEQ ID NOS: 8215-8217 |
| LYPD2 | LY6/PLAUR domain containing 2 | SEQ ID NO: 8218 |
| LYPD4 | LY6/PLAUR domain containing 4 | SEQ ID NOS: 8219-8221 |
| LYPD6 | LY6/PLAUR domain containing 6 | SEQ ID NOS: 8222-8226 |
| LYPD6B | LY6/PLAUR domain containing 6B | SEQ ID NOS: 8227-8233 |
| LYPD8 | LY6/PLAUR domain containing 8 | SEQ ID NOS: 8234-8235 |
| LYZ | Lysozyme | SEQ ID NOS: 8236-8238 |
| LYZL4 | Lysozyme-like 4 | SEQ ID NOS: 8239-8240 |
| LYZL6 | Lysozyme-like 6 | SEQ ID NOS: 8241-8243 |
| M6PR | Mannose-6-phosphate receptor (cation dependent) | SEQ ID NOS: 8244-8254 |
| MAD1L1 | MAD1 mitotic arrest deficient-like 1 (yeast) | SEQ ID NOS: 8255-8267 |
| MAG | Myelin associated glycoprotein | SEQ ID NOS: 8268-8273 |
| MAGT1 | Magnesium transporter 1 | SEQ ID NOS: 8274-8277 |
| MALSU1 | Mitochondrial assembly of ribosomal large subunit 1 | SEQ ID NO: 8278 |
| MAMDC2 | MAM domain containing 2 | SEQ ID NO: 8279 |
| MAN2B1 | Mannosidase, alpha, class 2B, member 1 | SEQ ID NOS: 8280-8285 |
| MAN2B2 | Mannosidase, alpha, class 2B, member 2 | SEQ ID NOS: 8286-8288 |
| MANBA | Mannosidase, beta A, lysosomal | SEQ ID NOS: 8289-8302 |
| MANEAL | Mannosidase, endo-alpha-like | SEQ ID NOS: 8303-8307 |
| MANF | Mesencephalic astrocyte-derived neurotrophic | SEQ ID NOS: 8308-8309 |
| | factor | |
| MANSC1 | MANSC domain containing 1 | SEQ ID NOS: 8310-8313 |
| MAP3K9 | Mitogen-activated protein kinase 9 | SEQ ID NOS: 8314-8319 |
| MASP1 | Mannan-binding lectin serine peptidase 1 (C4/C2 | SEQ ID NOS: 8320-8327 |
| | activating component of Ra-reactive factor) | |
| MASP2 | Mannan-binding lectin serine peptidase 2 | SEQ ID NOS: 8328-8329 |
| MATN1 | Matrilin 1, cartilage matrix protein | SEQ ID NO: 8330 |
| MATN2 | Matrilin 2 | SEQ ID NOS: 8331-8343 |
| MATN3 | Matrilin 3 | SEQ ID NOS: 8344-8345 |
| MATN4 | Matrilin 4 | SEQ ID NOS: 8346-8350 |
| MATR3 | Matrin 3 | SEQ ID NOS: 8351-8378 |
| MAU2 | MAU2 sister chromatid cohesion factor | SEQ ID NOS: 8379-8381 |
| MAZ | MYC-associated zinc finger protein (purine-binding | SEQ ID NOS: 8382-8396 |
| | transcription factor) | |
| MBD6 | Methyl-CpG binding domain protein 6 | SEQ ID NOS: 8397-8408 |
| MBL2 | Mannose-binding lectin (protein C) 2, soluble | SEQ ID NO: 8409 |
| MBNL1 | Muscleblind-like splicing regulator 1 | SEQ ID NOS: 8410-8428 |
| MCCC1 | Methylcrotonoyl-CoA carboxylase 1 (alpha) | SEQ ID NOS: 8429-8440 |
| MCCD1 | Mitochondrial coiled-coil domain 1 | SEQ ID NO: 8441 |
| MCEE | Methylmalonyl CoA epimerase | SEQ ID NOS: 8442-8445 |
| MCF2L | MCF.2 cell line derived transforming sequence-like | SEQ ID NOS: 8446-8467 |
| MCFD2 | Multiple coagulation factor deficiency 2 | SEQ ID NOS: 8468-8479 |
| MDFIC | MyoD family inhibitor domain containing | SEQ ID NOS: 8480-8487 |
| MDGA1 | MAM domain containing | SEQ ID NOS: 8488-8493 |
| | glycosylphosphatidylinositol anchor 1 | |
| MDK | Midkine (neurite growth-promoting factor 2) | SEQ ID NOS: 8494-8503 |
| MED20 | Mediator complex subunit 20 | SEQ ID NOS: 8504-8508 |
| MEGF10 | Multiple EGF-like-domains 10 | SEQ ID NOS: 8509-8512 |
| MEGF6 | Multiple EGF-like-domains 6 | SEQ ID NOS: 8513-8516 |
| MEI1 | Meiotic double-stranded break formation protein 1 | SEQ ID NOS: 8517-8520 |
| MEI4 | Meiotic double-stranded break formation protein 4 | SEQ ID NO: 8521 |
| MEIS1 | Meis homeobox 1 | SEQ ID NOS: 8522-8527 |
| MEIS3 | Meis homeobox 3 | SEQ ID NOS: 8528-8537 |
| MFI2 | Antigen p97 (melanoma associated) identified by | SEQ ID NOS: 8538-8540 |
| | monoclonal antibodies 133.2 and 96.5 | |
| MEPE | Matrix extracellular phosphoglycoprotein | SEQ ID NOS: 8541-8547 |
| MESDC2 | Mesoderm development candidate 2 | SEQ ID NOS: 8548-8552 |
| MEST | Mesoderm specific transcript | SEQ ID NOS: 8553-8566 |
| MET | MET proto-oncogene, receptor tyrosine kinase | SEQ ID NOS: 8567-8572 |
| METRN | Meteorin, glial cell differentiation regulator | SEQ ID NOS: 8573-8577 |
| METRNL | Meteorin, glial cell differentiation regulator-like | SEQ ID NOS: 8578-8581 |
| METTL17 | Methyltransferase like 17 | SEQ ID NOS: 8582-8592 |
| METTL24 | Methyltransferase like 24 | SEQ ID NO: 8593 |
| METTL7B | Methyltransferase like 7B | SEQ ID NOS: 8594-8595 |
| METTL9 | Methyltransferase like 9 | SEQ ID NOS: 8596-8604 |
| MEX3C | Mex-3 RNA binding family member C | SEQ ID NOS: 8605-8607 |
| MFAP2 | Microfibrillar-associated protein 2 | SEQ ID NOS: 8608-8609 |
| MFAP3 | Microfibrillar-associated protein 3 | SEQ ID NOS: 8610-8614 |
| MFAP3L | Microfibrillar-associated protein 3-like | SEQ ID NOS: 8615-8624 |
| MFAP4 | Microfibrillar-associated protein 4 | SEQ ID NOS: 8625-8627 |
| MFAP5 | Microfibrillar associated protein 5 | SEQ ID NOS: 8628-8638 |
| MFGE8 | Milk fat globule-EGF factor 8 protein | SEQ ID NOS: 8639-8645 |
| MFNG | MFNG O-fucosylpeptide 3-beta-N- | SEQ ID NOS: 8646-8653 |
| | acetylglucosaminyltransferase | |
| MGA | MGA, MAX dimerization protein | SEQ ID NOS: 8654-8662 |
| MGAT2 | Mannosyl (alpha-1,6-)-glycoprotein beta-1,2-N- | SEQ ID NO: 8663 |
| | acetylglucosaminyltransferase | |
| MGAT3 | Mannosyl (beta-1,4-)-glycoprotein beta-1,4-N- | SEQ ID NOS: 8664-8666 |
| | acetylglucosaminyltransferase | |
| MGAT4A | Mannosyl (alpha-1,3-)-glycoprotein beta-1,4-N- | SEQ ID NOS: 8667-8671 |
| | acetylglucosaminyltransferase, isozyme A | |
| MGAT4B | Mannosyl (alpha-1,3-)-glycoprotein beta-1,4-N- | SEQ ID NOS: 8672-8682 |
| | acetylglucosaminyltransferase, isozyme B | |
| MGAT4D | MGAT4 family, member D | SEQ ID NOS: 8683-8688 |
| MGLL | Monoglyceride lipase | SEQ ID NOS: 8689-8698 |
| MGP | Matrix Gla protein | SEQ ID NOS: 8699-8701 |
| MGST2 | Microsomal glutathione S-transferase 2 | SEQ ID NOS: 8702-8705 |
| MIA | Melanoma inhibitory activity | SEQ ID NOS: 8706-8711 |
| MIA2 | Melanoma inhibitory activity 2 | SEQ ID NO: 8712 |
| MIA3 | Melanoma inhibitory activity family, member 3 | SEQ ID NOS: 8713-8717 |
| MICU1 | Mitochondrial calcium uptake 1 | SEQ ID NOS: 8718-8727 |
| MIER1 | Mesoderm induction early response 1, | SEQ ID NOS: 8728-8736 |
| | transcriptional regulator | |
| MINOS1- | MINOS1-NBL1 readthrough | SEQ ID NOS: 8737-8739 |
| NBL1 | | |
| MINPP1 | Multiple inositol-polyphosphate phosphatase 1 | SEQ ID NOS: 8740-8742 |
| MLEC | Malectin | SEQ ID NOS: 8743-8746 |
| MLN | Motilin | SEQ ID NOS: 8747-8749 |
| MLXIP | MLX interacting protein | SEQ ID NOS: 8750-8755 |
| MLXIPL | MLX interacting protein-like | SEQ ID NOS: 8756-8763 |
| MMP1 | Matrix metallopeptidase 1 | SEQ ID NO: 8764 |
| MMP10 | Matrix metallopeptidase 10 | SEQ ID NOS: 8765-8766 |
| MMP11 | Matrix metallopeptidase 11 | SEQ ID NOS: 8767-8770 |
| MMP12 | Matrix metallopeptidase 12 | SEQ ID NO: 8771 |
| MMP13 | Matrix metallopeptidase 13 | SEQ ID NOS: 8772-8774 |
| MMP14 | Matrix metallopeptidase 14 (membrane-inserted) | SEQ ID NOS: 8775-8777 |
| MMP17 | Matrix metallopeptidase 17 (membrane-inserted) | SEQ ID NOS: 8778-8785 |
| MMP19 | Matrix metallopeptidase 19 | SEQ ID NOS: 8786-8791 |
| MMP2 | Matrix metallopeptidase 2 | SEQ ID NOS: 8792-8799 |
| MMP20 | Matrix metallopeptidase 20 | SEQ ID NO: 8800 |
| MMP21 | Matrix metallopeptidase 21 | SEQ ID NO: 8801 |
| MMP25 | Matrix metallopeptidase 25 | SEQ ID NOS: 8802-8803 |
| MMP26 | Matrix metallopeptidase 26 | SEQ ID NOS: 8804-8805 |
| MMP27 | Matrix metallopeptidase 27 | SEQ ID NO: 8806 |
| MMP28 | Matrix metallopeptidase 28 | SEQ ID NOS: 8807-8812 |
| MMP3 | Matrix metallopeptidase 3 | SEQ ID NOS: 8813-8815 |
| MMP7 | Matrix metallopeptidase 7 | SEQ ID NO: 8816 |
| MMP8 | Matrix metallopeptidase 8 | SEQ ID NOS: 8817-8822 |
| MMP9 | Matrix metallopeptidase 9 | SEQ ID NO: 8823 |
| MMRN1 | Multimerin 1 | SEQ ID NOS: 8824-8826 |
| MMRN2 | Multimerin 2 | SEQ ID NOS: 8827-8831 |
| MOXD1 | Monooxygenase, DBH-like 1 | SEQ ID NOS: 8832-8834 |
| C6orf25 | Chromosome 6 open reading frame 25 | SEQ ID NOS: 8835-8842 |
| MPO | Myeloperoxidase | SEQ ID NOS: 8843-8844 |
| MPPED1 | Metallophosphoesterase domain containing 1 | SEQ ID NOS: 8845-8848 |
| MPZL1 | Myelin protein zero-like 1 | SEQ ID NOS: 8849-8853 |
| MR1 | Major histocompatibility complex, class I-related | SEQ ID NOS: 8854-8859 |
| MRPL2 | Mitochondrial ribosomal protein L2 | SEQ ID NOS: 8860-8864 |
| MRPL21 | Mitochondrial ribosomal protein L21 | SEQ ID NOS: 8865-8871 |
| MRPL22 | Mitochondrial ribosomal protein L22 | SEQ ID NOS: 8872-8876 |
| MRPL24 | Mitochondrial ribosomal protein L24 | SEQ ID NOS: 8877-8881 |
| MRPL27 | Mitochondrial ribosomal protein L27 | SEQ ID NOS: 8882-8887 |
| MRPL32 | Mitochondrial ribosomal protein L32 | SEQ ID NOS: 8888-8890 |
| MRPL34 | Mitochondrial ribosomal protein L34 | SEQ ID NOS: 8891-8895 |
| MRPL35 | Mitochondrial ribosomal protein L35 | SEQ ID NOS: 8896-8899 |
| MRPL52 | Mitochondrial ribosomal protein L52 | SEQ ID NOS: 8900-8910 |
| MRPL55 | Mitochondrial ribosomal protein L55 | SEQ ID NOS: 8911-8936 |
| MRPS14 | Mitochondrial ribosomal protein S14 | SEQ ID NOS: 8937-8938 |
| MRPS22 | Mitochondrial ribosomal protein S22 | SEQ ID NOS: 8939-8947 |
| MRPS28 | Mitochondrial ribosomal protein S28 | SEQ ID NOS: 8948-8955 |
| MS4A14 | Membrane-spanning 4-domains, subfamily A, | SEQ ID NOS: 8956-8966 |
| | member 14 | |
| MS4A3 | Membrane-spanning 4-domains, subfamily A, | SEQ ID NOS: 8967-8971 |
| | member 3 (hematopoietic cell-specific) | |
| MSH3 | MutS homolog 3 | SEQ ID NO: 8972 |
| MSH5 | MutS homolog 5 | SEQ ID NOS: 8973-8984 |
| MSLN | Mesothelin | SEQ ID NOS: 8985-8992 |
| MSMB | Microseminoprotein, beta- | SEQ ID NOS: 8993-8994 |
| MSRA | Methionine sulfoxide reductase A | SEQ ID NOS: 8995-9002 |
| MSRB2 | Methionine sulfoxide reductase B2 | SEQ ID NOS: 9003-9004 |
| MSRB3 | Methionine sulfoxide reductase B3 | SEQ ID NOS: 9005-9018 |
| MST1 | Macrophage stimulating 1 | SEQ ID NOS: 9019-9020 |
| MSTN | Myostatin | SEQ ID NO: 9021 |
| MT1G | Metallothionein 1G | SEQ ID NOS: 9022-9025 |
| MTHFD2 | Methylenetetrahydrofolate dehydrogenase (NADP + | SEQ ID NOS: 9026-9030 |
| | dependent) 2, methenyltetrahydrofolate | |
| | cyclohydrolase | |
| MTMR14 | Myotubularin related protein 14 | SEQ ID NOS: 9031-9041 |
| MTRNR2L11 | MT-RNR2-like 11 (pseudogene) | SEQ ID NO: 9042 |
| MTRR | 5-methyltetrahydrofolate-homocysteine | SEQ ID NOS: 9043-9055 |
| | methyltransferase reductase | |
| MTTP | Microsomal triglyceride transfer protein | SEQ ID NOS: 9056-9066 |
| MTX2 | Metaxin 2 | SEQ ID NOS: 9067-9071 |
| MUC1 | Mucin 1, cell surface associated | SEQ ID NOS: 9072-9097 |
| MUC13 | Mucin 13, cell surface associated | SEQ ID NOS: 9098-9099 |
| MUC20 | Mucin 20, cell surface associated | SEQ ID NOS: 9100-9104 |
| MUC3A | Mucin 3A, cell surface associated | SEQ ID NOS: 9105-9107 |
| MUC5AC | Mucin 5AC, oligomeric mucus/gel-forming | SEQ ID NO: 9108 |
| MUC5B | Mucin 5B, oligomeric mucus/gel-forming | SEQ ID NOS: 9109-9110 |
| MUC6 | Mucin 6, oligomeric mucus/gel-forming | SEQ ID NOS: 9111-9114 |
| MUC7 | Mucin 7, secreted | SEQ ID NOS: 9115-9118 |
| MUCL1 | Mucin-like 1 | SEQ ID NOS: 9119-9121 |
| MXRA5 | Matrix-remodelling associated 5 | SEQ ID NO: 9122 |
| MXRA7 | Matrix-remodelling associated 7 | SEQ ID NOS: 9123-9129 |
| MYDGF | Myeloid-derived growth factor | SEQ ID NOS: 9130-9132 |
| MYL1 | Myosin, light chain 1, alkali; skeletal, fast | SEQ ID NOS: 9133-9134 |
| MYOC | Myocilin, trabecular meshwork inducible | SEQ ID NOS: 9135-9136 |
| | glucocorticoid response | |
| MYRFL | Myelin regulatory factor-like | SEQ ID NOS: 9137-9141 |
| MZB1 | Marginal zone B and B1 cell-specific protein | SEQ ID NOS: 9142-9146 |
| N4BP2L2 | NEDD4 binding protein 2-like 2 | SEQ ID NOS: 9147-9152 |
| NAA38 | N(alpha)-acetyltransferase 38, NatC auxiliary subunit | SEQ ID NOS: 9153-9158 |
| NAAA | N-acylethanolamine acid amidase | SEQ ID NOS: 9159-9164 |
| NAGA | N-acetylgalactosaminidase, alpha- | SEQ ID NOS: 9165-9167 |
| NAGLU | N-acetylglucosaminidase, alpha | SEQ ID NOS: 9168-9172 |
| NAGS | N-acetylglutamate synthase | SEQ ID NOS: 9173-9174 |
| NAPSA | Napsin A aspartic peptidase | SEQ ID NOS: 9175-9177 |
| CARKD | Carbohydrate kinase domain containing | SEQ ID NOS: 9178-9179 |
| APOA1BP | Apolipoprotein A-I binding protein | SEQ ID NOS: 9180-9182 |
| NBL1 | Neuroblastoma 1, DAN family BMP antagonist | SEQ ID NOS: 9183-9196 |
| NCAM1 | Neural cell adhesion molecule 1 | SEQ ID NOS: 9197-9216 |
| NCAN | Neurocan | SEQ ID NOS: 9217-9218 |
| NCBP2-AS2 | NCBP2 antisense RNA 2 (head to head) | SEQ ID NO: 9219 |
| NCSTN | Nicastrin | SEQ ID NOS: 9220-9229 |
| NDNF | Neuron-derived neurotrophic factor | SEQ ID NOS: 9230-9232 |
| NDP | Norrie disease (pseudoglioma) | SEQ ID NOS: 9233-9235 |
| NDUFA10 | NADH dehydrogenase (ubiquinone) 1 alpha | SEQ ID NOS: 9236-9245 |
| | subcomplex, 10, 42 kDa | |
| NDUFB5 | NADH dehydrogenase (ubiquinone) 1 beta | SEQ ID NOS: 9246-9254 |
| | subcomplex, 5, 16 kDa | |
| NDUFS8 | NADH dehydrogenase (ubiquinone) Fe—S protein 8, | SEQ ID NOS: 9255-9264 |
| | 23 kDa (NADH-coenzyme Q reductase) | |
| NDUFV1 | NADH dehydrogenase (ubiquinone) flavoprotein 1, | SEQ ID NOS: 9265-9278 |
| | 51 kDa | |
| NECAB3 | N-terminal EF-hand calcium binding protein 3 | SEQ ID NOS: 9279-9288 |
| PVRL1 | Poliovirus receptor-related 1 (herpesvirus entry | SEQ ID NOS: 9289-9291 |
| | mediator C) | |
| NELL1 | Neural EGFL like 1 | SEQ ID NOS: 9292-9295 |
| NELL2 | Neural EGFL like 2 | SEQ ID NOS: 9296-9310 |
| NENF | Neudesin neurotrophic factor | SEQ ID NO: 9311 |
| NETO1 | Neuropilin (NRP) and tolloid (TLL)-like 1 | SEQ ID NOS: 9312-9316 |
| NFASC | Neurofascin | SEQ ID NOS: 9317-9331 |
| NFE2L1 | Nuclear factor, erythroid 2-like 1 | SEQ ID NOS: 9332-9350 |
| NFE2L3 | Nuclear factor, erythroid 2-like 3 | SEQ ID NOS: 9351-9352 |
| NGEF | Neuronal guanine nucleotide exchange factor | SEQ ID NOS: 9353-9358 |
| NGF | Nerve growth factor (beta polypeptide) | SEQ ID NO: 9359 |
| NGLY1 | N-glycanase 1 | SEQ ID NOS: 9360-9366 |
| NGRN | Neugrin, neurite outgrowth associated | SEQ ID NOS: 9367-9368 |
| NHLRC3 | NHL repeat containing 3 | SEQ ID NOS: 9369-9371 |
| NID1 | Nidogen 1 | SEQ ID NOS: 9372-9373 |
| NID2 | Nidogen 2 (osteonidogen) | SEQ ID NOS: 9374-9376 |
| NKG7 | Natural killer cell granule protein 7 | SEQ ID NOS: 9377-9381 |
| NLGN3 | Neuroligin 3 | SEQ ID NOS: 9382-9386 |
| NLGN4Y | Neuroligin 4, Y-linked | SEQ ID NOS: 9387-9393 |
| NLRP5 | NLR family, pyrin domain containing 5 | SEQ ID NOS: 9394-9396 |
| NMB | Neuromedin B | SEQ ID NOS: 9397-9398 |
| NME1 | NME/NM23 nucleoside diphosphate kinase 1 | SEQ ID NOS: 9399-9405 |
| NME1- | NME1-NME2 readthrough | SEQ ID NOS: 9406-9408 |
| NME2 | | |
| NME3 | NME/NM23 nucleoside diphosphate kinase 3 | SEQ ID NOS: 9409-9413 |
| NMS | Neuromedin S | SEQ ID NO: 9414 |
| NMU | Neuromedin U | SEQ ID NOS: 9415-9418 |
| NOA1 | Nitric oxide associated 1 | SEQ ID NO: 9419 |
| NODAL | Nodal growth differentiation factor | SEQ ID NOS: 9420-9421 |
| NOG | Noggin | SEQ ID NO: 9422 |
| NOMO3 | NODAL modulator 3 | SEQ ID NOS: 9423-9429 |
| NOS1AP | Nitric oxide synthase 1 (neuronal) adaptor protein | SEQ ID NOS: 9430-9434 |
| NOTCH3 | Notch 3 | SEQ ID NOS: 9435-9438 |
| NOTUM | Notum pectinacetylesterase homolog (Drosophila) | SEQ ID NOS: 9439-9441 |
| NOV | Nephroblastoma overexpressed | SEQ ID NO: 9442 |
| NPB | Neuropeptide B | SEQ ID NOS: 9443-9444 |
| NPC2 | Niemann-Pick disease, type C2 | SEQ ID NOS: 9445-9453 |
| NPFF | Neuropeptide FF-amide peptide precursor | SEQ ID NO: 9454 |
| NPFFR2 | Neuropeptide FF receptor 2 | SEQ ID NOS: 9455-9458 |
| NPHS1 | Nephrosis 1, congenital, Finnish type (nephrin) | SEQ ID NOS: 9459-9460 |
| NPNT | Nephronectin | SEQ ID NOS: 9461-9471 |
| NPPA | Natriuretic peptide A | SEQ ID NOS: 9472-9474 |
| NPPB | Natriuretic peptide B | SEQ ID NO: 9475 |
| NPPC | Natriuretic peptide C | SEQ ID NOS: 9476-9477 |
| NPS | Neuropeptide S | SEQ ID NO: 9478 |
| NPTX1 | Neuronal pentraxin I | SEQ ID NO: 9479 |
| NPTX2 | Neuronal pentraxin II | SEQ ID NO: 9480 |
| NPTXR | Neuronal pentraxin receptor | SEQ ID NOS: 9481-9482 |
| NPVF | Neuropeptide VF precursor | SEQ ID NO: 9483 |
| NPW | Neuropeptide W | SEQ ID NOS: 9484-9486 |
| NPY | Neuropeptide Y | SEQ ID NOS: 9487-9489 |
| NQO2 | NAD(P)H dehydrogenase, quinone 2 | SEQ ID NOS: 9490-9498 |
| NRCAM | Neuronal cell adhesion molecule | SEQ ID NOS: 9499-9511 |
| NRG1 | Neuregulin 1 | SEQ ID NOS: 9512-9529 |
| NRN1L | Neuritin 1-like | SEQ ID NOS: 9530-9532 |
| NRP1 | Neuropilin 1 | SEQ ID NOS: 9533-9546 |
| NRP2 | Neuropilin 2 | SEQ ID NOS: 9547-9553 |
| NRTN | Neurturin | SEQ ID NO: 9554 |
| NRXN1 | Neurexin 1 | SEQ ID NOS: 9555-9585 |
| NRXN2 | Neurexin 2 | SEQ ID NOS: 9586-9594 |
| NT5C3A | 5′-nucleotidase, cytosolic IIIA | SEQ ID NOS: 9595-9605 |
| NT5DC3 | 5′-nucleotidase domain containing 3 | SEQ ID NOS: 9606-9608 |
| NT5E | 5′-nucleotidase, ecto (CD73) | SEQ ID NOS: 9609-9613 |
| NTF3 | Neurotrophin 3 | SEQ ID NOS: 9614-9615 |
| NTF4 | Neurotrophin 4 | SEQ ID NOS: 9616-9617 |
| NTM | Neurotrimin | SEQ ID NOS: 9618-9627 |
| NTN1 | Netrin 1 | SEQ ID NOS: 9628-9629 |
| NTN3 | Netrin 3 | SEQ ID NO: 9630 |
| NTN4 | Netrin 4 | SEQ ID NOS: 9631-9635 |
| NTN5 | Netrin 5 | SEQ ID NOS: 9636-9637 |
| NTNG1 | Netrin G1 | SEQ ID NOS: 9638-9644 |
| NTNG2 | Netrin G2 | SEQ ID NOS: 9645-9646 |
| NTS | Neurotensin | SEQ ID NOS: 9647-9648 |
| NUBPL | Nucleotide binding protein-like | SEQ ID NOS: 9649-9655 |
| NUCB1 | Nucleobindin 1 | SEQ ID NOS: 9656-9662 |
| NUCB2 | Nucleobindin 2 | SEQ ID NOS: 9663-9678 |
| NUDT19 | Nudix (nucleoside diphosphate linked moiety X)-type | SEQ ID NO: 9679 |
| | motif 19 | |
| NUDT9 | Nudix (nucleoside diphosphate linked moiety X)-type | SEQ ID NOS: 9680-9684 |
| | motif 9 | |
| NUP155 | Nucleoporin 155 kDa | SEQ ID NOS: 9685-9688 |
| NUP214 | Nucleoporin 214 kDa | SEQ ID NOS: 9689-9700 |
| NUP85 | Nucleoporin 85 kDa | SEQ ID NOS: 9701-9715 |
| NXPE3 | Neurexophilin and PC-esterase domain family, | SEQ ID NOS: 9716-9721 |
| | member 3 | |
| NXPE4 | Neurexophilin and PC-esterase domain family, | SEQ ID NOS: 9722-9723 |
| | member 4 | |
| NXPH1 | Neurexophilin 1 | SEQ ID NOS: 9724-9727 |
| NXPH2 | Neurexophilin 2 | SEQ ID NO: 9728 |
| NXPH3 | Neurexophilin 3 | SEQ ID NOS: 9729-9730 |
| NXPH4 | Neurexophilin 4 | SEQ ID NOS: 9731-9732 |
| NYX | Nyctalopin | SEQ ID NOS: 9733-9734 |
| OAF | Out at first homolog | SEQ ID NOS: 9735-9736 |
| OBP2A | Odorant binding protein 2A | SEQ ID NOS: 9737-9743 |
| OBP2B | Odorant binding protein 2B | SEQ ID NOS: 9744-9747 |
| OC90 | Otoconin 90 | SEQ ID NO: 9748 |
| OCLN | Occludin | SEQ ID NOS: 9749-9751 |
| ODAM | Odontogenic, ameloblast asssociated | SEQ ID NOS: 9752-9755 |
| C4orf26 | Chromosome 4 open reading frame 26 | SEQ ID NOS: 9756-9759 |
| OGG1 | 8-oxoguanine DNA glycosylase | SEQ ID NOS: 9760-9773 |
| OGN | Osteoglycin | SEQ ID NOS: 9774-9776 |
| OIT3 | Oncoprotein induced transcript 3 | SEQ ID NOS: 9777-9778 |
| OLFM1 | Olfactomedin 1 | SEQ ID NOS: 9779-9789 |
| OLFM2 | Olfactomedin 2 | SEQ ID NOS: 9790-9793 |
| OLFM3 | Olfactomedin 3 | SEQ ID NOS: 9794-9796 |
| OLFM4 | Olfactomedin 4 | SEQ ID NO: 9797 |
| OLFML1 | Olfactomedin-like 1 | SEQ ID NOS: 9798-9801 |
| OLFML2A | Olfactomedin-like 2A | SEQ ID NOS: 9802-9804 |
| OLFML2B | Olfactomedin-like 2B | SEQ ID NOS: 9805-9809 |
| OLFML3 | Olfactomedin-like 3 | SEQ ID NOS: 9810-9812 |
| OMD | Osteomodulin | SEQ ID NO: 9813 |
| OMG | Oligodendrocyte myelin glycoprotein | SEQ ID NO: 9814 |
| OOSP2 | Oocyte secreted protein 2 | SEQ ID NOS: 9815-9816 |
| OPCML | Opioid binding protein/cell adhesion molecule-like | SEQ ID NOS: 9817-9821 |
| PROL1 | Proline rich, lacrimal 1 | SEQ ID NO: 9822 |
| OPTC | Opticin | SEQ ID NOS: 9823-9824 |
| ORAI1 | ORAI calcium release-activated calcium modulator 1 | SEQ ID NO: 9825 |
| ORM1 | Orosomucoid 1 | SEQ ID NO: 9826 |
| ORM2 | Orosomucoid 2 | SEQ ID NO: 9827 |
| ORMDL2 | ORMDL sphingolipid biosynthesis regulator 2 | SEQ ID NOS: 9828-9831 |
| OS9 | Osteosarcoma amplified 9, endoplasmic reticulum | SEQ ID NOS: 9832-9846 |
| | lectin | |
| OSCAR | Osteoclast associated, immunoglobulin-like receptor | SEQ ID NOS: 9847-9857 |
| OSM | Oncostatin M | SEQ ID NOS: 9858-9860 |
| OSMR | Oncostatin M receptor | SEQ ID NOS: 9861-9865 |
| OSTN | Osteocrin | SEQ ID NOS: 9866-9867 |
| OTOA | Otoancorin | SEQ ID NOS: 9868-9873 |
| OTOG | Otogelin | SEQ ID NOS: 9874-9876 |
| OTOGL | Otogelin-like | SEQ ID NOS: 9877-9883 |
| OTOL1 | Otolin 1 | SEQ ID NO: 9884 |
| OTOR | Otoraplin | SEQ ID NO: 9885 |
| OTOS | Otospiralin | SEQ ID NOS: 9886-9887 |
| OVCH1 | Ovochymase 1 | SEQ ID NOS: 9888-9890 |
| OVCH2 | Ovochymase 2 (gene/pseudogene) | SEQ ID NOS: 9891-9892 |
| OVGP1 | Oviductal glycoprotein 1, 120 kDa | SEQ ID NO: 9893 |
| OXCT1 | 3-oxoacid CoA transferase 1 | SEQ ID NOS: 9894-9897 |
| OXCT2 | 3-oxoacid CoA transferase 2 | SEQ ID NO: 9898 |
| OXNAD1 | Oxidoreductase NAD-binding domain containing 1 | SEQ ID NOS: 9899-9905 |
| OXT | Oxytocin/neurophysin I prepropeptide | SEQ ID NO: 9906 |
| P3H1 | Prolyl 3-hydroxylase 1 | SEQ ID NOS: 9907-9911 |
| P3H2 | Prolyl 3-hydroxylase 2 | SEQ ID NOS: 9912-9915 |
| P3H3 | Prolyl 3-hydroxylase 3 | SEQ ID NO: 9916 |
| P3H4 | Prolyl 3-hydroxylase family member 4 (non- | SEQ ID NOS: 9917-9921 |
| | enzymatic) | |
| P4HA1 | Prolyl 4-hydroxylase, alpha polypeptide I | SEQ ID NOS: 9922-9926 |
| P4HA2 | Prolyl 4-hydroxylase, alpha polypeptide II | SEQ ID NOS: 9927-9941 |
| P4HA3 | Prolyl 4-hydroxylase, alpha polypeptide III | SEQ ID NOS: 9942-9946 |
| P4HB | Prolyl 4-hydroxylase, beta polypeptide | SEQ ID NOS: 9947-9958 |
| PAEP | Progestagen-associated endometrial protein | SEQ ID NOS: 9959-9967 |
| PAM | Peptidylglycine alpha-amidating monooxygenase | SEQ ID NOS: 9968-9981 |
| PAMR1 | Peptidase domain containing associated with muscle | SEQ ID NOS: 9982-9988 |
| | regeneration 1 | |
| PAPLN | Papilin, proteoglycan-like sulfated glycoprotein | SEQ ID NOS: 9989-9996 |
| PAPPA | Pregnancy-associated plasma protein A, | SEQ ID NO: 9997 |
| | pappalysin 1 | |
| PAPPA2 | Pappalysin 2 | SEQ ID NOS: 9998-9999 |
| PARP15 | Poly (ADP-ribose) polymerase family, member 15 | SEQ ID NOS: 10000-10003 |
| PARVB | Parvin, beta | SEQ ID NOS: 10004-10008 |
| PATE1 | Prostate and testis expressed 1 | SEQ ID NOS: 10009-10010 |
| PATE2 | Prostate and testis expressed 2 | SEQ ID NOS: 10011-10012 |
| PATE3 | Prostate and testis expressed 3 | SEQ ID NO: 10013 |
| PATE4 | Prostate and testis expressed 4 | SEQ ID NOS: 10014-10015 |
| PATL2 | Protein associated with topoisomerase II homolog 2 | SEQ ID NOS: 10016-10021 |
| | (yeast) | |
| PAX2 | Paired box 2 | SEQ ID NOS: 10022-10027 |
| PAX4 | Paired box 4 | SEQ ID NOS: 10028-10034 |
| PCCB | Propionyl CoA carboxylase, beta polypeptide | SEQ ID NOS: 10035-10049 |
| PCDH1 | Protocadherin 1 | SEQ ID NOS: 10050-10055 |
| PCDH12 | Protocadherin 12 | SEQ ID NOS: 10056-10057 |
| PCDH15 | Protocadherin-related 15 | SEQ ID NOS: 10058-10091 |
| PCDHA1 | Protocadherin alpha 1 | SEQ ID NOS: 10092-10094 |
| PCDHA10 | Protocadherin alpha 10 | SEQ ID NOS: 10095-10097 |
| PCDHA11 | Protocadherin alpha 11 | SEQ ID NOS: 10098-10100 |
| PCDHA6 | Protocadherin alpha 6 | SEQ ID NOS: 10101-10103 |
| PCDHB12 | Protocadherin beta 12 | SEQ ID NOS: 10104-10106 |
| PCDHGA11 | Protocadherin gamma subfamily A, 11 | SEQ ID NOS: 10107-10109 |
| PCF11 | PCF11 cleavage and polyadenylation factor subunit | SEQ ID NOS: 10110-10114 |
| PCOLCE | Procollagen C-endopeptidase enhancer | SEQ ID NO: 10115 |
| PCOLCE2 | Procollagen C-endopeptidase enhancer 2 | SEQ ID NOS: 10116-10119 |
| PCSK1 | Proprotein convertase subtilisin/kexin type 1 | SEQ ID NOS: 10120-10122 |
| PCSK1N | Proprotein convertase subtilisin/kexin type 1 | SEQ ID NO: 10123 |
| | inhibitor | |
| PCSK2 | Proprotein convertase subtilisin/kexin type 2 | SEQ ID NOS: 10124-10126 |
| PCSK4 | Proprotein convertase subtilisin/kexin type 4 | SEQ ID NOS: 10127-10129 |
| PCSK5 | Proprotein convertase subtilisin/kexin type 5 | SEQ ID NOS: 10130-10134 |
| PCSK9 | Proprotein convertase subtilisin/kexin type 9 | SEQ ID NO: 10135 |
| PCYOX1 | Prenylcysteine oxidase 1 | SEQ ID NOS: 10136-10140 |
| PCYOX1L | Prenylcysteine oxidase 1 like | SEQ ID NOS: 10141-10145 |
| PDE11A | Phosphodiesterase 11A | SEQ ID NOS: 10146-10151 |
| PDE2A | Phosphodiesterase 2A, cGMP-stimulated | SEQ ID NOS: 10152-10173 |
| PDE7A | Phosphodiesterase 7A | SEQ ID NOS: 10174-10177 |
| PDF | Peptide deformylase (mitochondrial) | SEQ ID NO: 10178 |
| PDGFA | Platelet-derived growth factor alpha polypeptide | SEQ ID NOS: 10179-10182 |
| PDGFB | Platelet-derived growth factor beta polypeptide | SEQ ID NOS: 10183-10186 |
| PDGFC | Platelet derived growth factor C | SEQ ID NOS: 10187-10190 |
| PDGFD | Platelet derived growth factor D | SEQ ID NOS: 10191-10193 |
| PDGFRA | Platelet-derived growth factor receptor, alpha | SEQ ID NOS: 10194-10200 |
| | polypeptide | |
| PDGFRB | Platelet-derived growth factor receptor, beta | SEQ ID NOS: 10201-10204 |
| | polypeptide | |
| PDGFRL | Platelet-derived growth factor receptor-like | SEQ ID NOS: 10205-10206 |
| PDHA1 | Pyruvate dehydrogenase (lipoamide) alpha 1 | SEQ ID NOS: 10207-10215 |
| PDIA2 | Protein disulfide isomerase family A, member 2 | SEQ ID NOS: 10216-10219 |
| PDIA3 | Protein disulfide isomerase family A, member 3 | SEQ ID NOS: 10220-10223 |
| PDIA4 | Protein disulfide isomerase family A, member 4 | SEQ ID NOS: 10224-10225 |
| PDIA5 | Protein disulfide isomerase family A, member 5 | SEQ ID NOS: 10226-10229 |
| PDIA6 | Protein disulfide isomerase family A, member 6 | SEQ ID NOS: 10230-10236 |
| PDILT | Protein disulfide isomerase-like, testis expressed | SEQ ID NOS: 10237-10238 |
| PDYN | Prodynorphin | SEQ ID NOS: 10239-10241 |
| PDZD8 | PDZ domain containing 8 | SEQ ID NO: 10242 |
| PDZRN4 | PDZ domain containing ring finger 4 | SEQ ID NOS: 10243-10245 |
| PEAR1 | Platelet endothelial aggregation receptor 1 | SEQ ID NOS: 10246-10249 |
| PEBP4 | Phosphatidylethanolamine-binding protein 4 | SEQ ID NOS: 10250-10251 |
| PECAM1 | Platelet/endothelial cell adhesion molecule 1 | SEQ ID NOS: 10252-10255 |
| PENK | Proenkephalin | SEQ ID NOS: 10256-10261 |
| PET117 | PET117 homolog | SEQ ID NO: 10262 |
| PF4 | Platelet factor 4 | SEQ ID NO: 10263 |
| PF4V1 | Platelet factor 4 variant 1 | SEQ ID NO: 10264 |
| PFKP | Phosphofructokinase, platelet | SEQ ID NOS: 10265-10273 |
| PFN1 | Profilin 1 | SEQ ID NOS: 10274-10276 |
| PGA3 | Pepsinogen 3, group I (pepsinogen A) | SEQ ID NOS: 10277-10280 |
| PGA4 | Pepsinogen 4, group I (pepsinogen A) | SEQ ID NOS: 10281-10283 |
| PGA5 | Pepsinogen 5, group I (pepsinogen A) | SEQ ID NOS: 10284-10286 |
| PGAM5 | PGAM family member 5, serine/threonine protein | SEQ ID NOS: 10287-10290 |
| | phosphatase, mitochondrial | |
| PGAP3 | Post-GPI attachment to proteins 3 | SEQ ID NOS: 10291-10298 |
| PGC | Progastricsin (pepsinogen C) | SEQ ID NOS: 10299-10302 |
| PGF | Placental growth factor | SEQ ID NOS: 10303-10306 |
| PGLYRP1 | Peptidoglycan recognition protein 1 | SEQ ID NO: 10307 |
| PGLYRP2 | Peptidoglycan recognition protein 2 | SEQ ID NOS: 10308-10311 |
| PGLYRP3 | Peptidoglycan recognition protein 3 | SEQ ID NO: 10312 |
| PGLYRP4 | Peptidoglycan recognition protein 4 | SEQ ID NOS: 10313-10314 |
| PHACTR1 | Phosphatase and actin regulator 1 | SEQ ID NOS: 10315-10321 |
| PHB | Prohibitin | SEQ ID NOS: 10322-10330 |
| PI15 | Peptidase inhibitor 15 | SEQ ID NOS: 10331-10332 |
| PI3 | Peptidase inhibitor 3, skin-derived | SEQ ID NO: 10333 |
| PIANP | PILR alpha associated neural protein | SEQ ID NOS: 10334-10339 |
| PIGK | Phosphatidylinositol glycan anchor biosynthesis, | SEQ ID NOS: 10340-10343 |
| | class K | |
| PIGL | Phosphatidylinositol glycan anchor biosynthesis, | SEQ ID NOS: 10344-10351 |
| | class L | |
| PIGT | Phosphatidylinositol glycan anchor biosynthesis, | SEQ ID NOS: 10352-10406 |
| | class T | |
| PIGZ | Phosphatidylinositol glycan anchor biosynthesis, | SEQ ID NOS: 10407-10409 |
| | class Z | |
| PIK3AP1 | Phosphoinositide-3-kinase adaptor protein 1 | SEQ ID NOS: 10410-10412 |
| PIK3IP1 | Phosphoinositide-3-kinase interacting protein 1 | SEQ ID NOS: 10413-10416 |
| PILRA | Paired immunoglobin-like type 2 receptor alpha | SEQ ID NOS: 10417-10421 |
| PILRB | Paired immunoglobin-like type 2 receptor beta | SEQ ID NOS: 10422-10433 |
| PINLYP | Phospholipase A2 inhibitor and LY6/PLAUR domain | SEQ ID NOS: 10434-10438 |
| | containing | |
| PIP | Prolactin-induced protein | SEQ ID NO: 10439 |
| PIWIL4 | Piwi-like RNA-mediated gene silencing 4 | SEQ ID NOS: 10440-10444 |
| PKDCC | Protein kinase domain containing, cytoplasmic | SEQ ID NOS: 10445-10446 |
| PKHD1 | Polycystic kidney and hepatic disease 1 (autosomal | SEQ ID NOS: 10447-10448 |
| | recessive) | |
| PLA1A | Phospholipase A1 member A | SEQ ID NOS: 10449-10453 |
| PLA2G10 | Phospholipase A2, group X | SEQ ID NOS: 10454-10455 |
| PLA2G12A | Phospholipase A2, group XIIA | SEQ ID NOS: 10456-10458 |
| PLA2G12B | Phospholipase A2, group XIIB | SEQ ID NO: 10459 |
| PLA2G15 | Phospholipase A2, group XV | SEQ ID NOS: 10460-10467 |
| PLA2G1B | Phospholipase A2, group IB (pancreas) | SEQ ID NOS: 10468-10470 |
| PLA2G2A | Phospholipase A2, group IIA (platelets, synovial | SEQ ID NOS: 10471-10472 |
| | fluid) | |
| PLA2G2C | Phospholipase A2, group IIC | SEQ ID NOS: 10473-10474 |
| PLA2G2D | Phospholipase A2, group IID | SEQ ID NOS: 10475-10476 |
| PLA2G2E | Phospholipase A2, group IIE | SEQ ID NO: 10477 |
| PLA2G3 | Phospholipase A2, group III | SEQ ID NO: 10478 |
| PLA2G5 | Phospholipase A2, group V | SEQ ID NO: 10479 |
| PLA2G7 | Phospholipase A2, group VII (platelet-activating | SEQ ID NOS: 10480-10481 |
| | factor acetylhydrolase, plasma) | |
| PLA2R1 | Phospholipase A2 receptor 1, 180 kDa | SEQ ID NOS: 10482-10483 |
| PLAC1 | Placenta-specific 1 | SEQ ID NO: 10484 |
| PLAC9 | Placenta-specific 9 | SEQ ID NOS: 10485-10487 |
| PLAT | Plasminogen activator, tissue | SEQ ID NOS: 10488-10496 |
| PLAU | Plasminogen activator, urokinase | SEQ ID NOS: 10497-10499 |
| PLAUR | Plasminogen activator, urokinase receptor | SEQ ID NOS: 10500-10511 |
| PLBD1 | Phospholipase B domain containing 1 | SEQ ID NOS: 10512-10514 |
| PLBD2 | Phospholipase B domain containing 2 | SEQ ID NOS: 10515-10517 |
| PLG | Plasminogen | SEQ ID NOS: 10518-10520 |
| PLGLB1 | Plasminogen-like B1 | SEQ ID NOS: 10521-10524 |
| PLGLB2 | Plasminogen-like B2 | SEQ ID NOS: 10525-10526 |
| PLOD1 | Procollagen-lysine, 2-oxoglutarate 5-dioxygenase 1 | SEQ ID NOS: 10527-10529 |
| PLOD2 | Procollagen-lysine, 2-oxoglutarate 5-dioxygenase 2 | SEQ ID NOS: 10530-10535 |
| PLOD3 | Procollagen-lysine, 2-oxoglutarate 5-dioxygenase 3 | SEQ ID NOS: 10536-10542 |
| PLTP | Phospholipid transfer protein | SEQ ID NOS: 10543-10547 |
| PLXNA4 | Plexin A4 | SEQ ID NOS: 10548-10551 |
| PLXNB2 | Plexin B2 | SEQ ID NOS: 10552-10560 |
| PM20D1 | Peptidase M20 domain containing 1 | SEQ ID NO: 10561 |
| PMCH | Pro-melanin-concentrating hormone | SEQ ID NO: 10562 |
| PMEL | Premelanosome protein | SEQ ID NOS: 10563-10574 |
| PMEPA1 | Prostate transmembrane protein, androgen | SEQ ID NOS: 10575-10581 |
| | induced 1 | |
| PNLIP | Pancreatic lipase | SEQ ID NO: 10582 |
| PNLIPRP1 | Pancreatic lipase-related protein 1 | SEQ ID NOS: 10583-10591 |
| PNLIPRP3 | Pancreatic lipase-related protein 3 | SEQ ID NO: 10592 |
| PNOC | Prepronociceptin | SEQ ID NOS: 10593-10595 |
| PNP | Purine nucleoside phosphorylase | SEQ ID NOS: 10596-10599 |
| PNPLA4 | Patatin-like phospholipase domain containing 4 | SEQ ID NOS: 10600-10603 |
| PODNL1 | Podocan-like 1 | SEQ ID NOS: 10604-10615 |
| POFUT1 | Protein O-fucosyltransferase 1 | SEQ ID NOS: 10616-10617 |
| POFUT2 | Protein O-fucosyltransferase 2 | SEQ ID NOS: 10618-10623 |
| POGLUT1 | Protein O-glucosyltransferase 1 | SEQ ID NOS: 10624-10628 |
| POLL | Polymerase (DNA directed), lambda | SEQ ID NOS: 10629-10641 |
| POMC | Proopiomelanocortin | SEQ ID NOS: 10642-10646 |
| POMGNT2 | Protein O-linked mannose N- | SEQ ID NOS: 10647-10648 |
| | acetylglucosaminyltransferase 2 (beta 1,4-) | |
| PON1 | Paraoxonase 1 | SEQ ID NOS: 10649-10650 |
| PON2 | Paraoxonase 2 | SEQ ID NOS: 10651-10663 |
| PON3 | Paraoxonase 3 | SEQ ID NOS: 10664-10669 |
| POSTN | Periostin, osteoblast specific factor | SEQ ID NOS: 10670-10675 |
| PPBP | Pro-platelet basic protein (chemokine (C-X-C motif) | SEQ ID NO: 10676 |
| | ligand 7) | |
| PPIB | Peptidylprolyl isomerase B (cyclophilin B) | SEQ ID NO: 10677 |
| PPIC | Peptidylprolyl isomerase C (cyclophilin C) | SEQ ID NO: 10678 |
| PPOX | Protoporphyrinogen oxidase | SEQ ID NOS: 10679-10689 |
| PPP1CA | Protein phosphatase 1, catalytic subunit, alpha | SEQ ID NOS: 10690-10695 |
| | isozyme | |
| PPT1 | Palmitoyl-protein thioesterase 1 | SEQ ID NOS: 10696-10712 |
| PPT2 | Palmitoyl-protein thioesterase 2 | SEQ ID NOS: 10713-10720 |
| PPY | Pancreatic polypeptide | SEQ ID NOS: 10721-10725 |
| PRAC2 | Prostate cancer susceptibility candidate 2 | SEQ ID NOS: 10726-10727 |
| PRADC1 | Protease-associated domain containing 1 | SEQ ID NO: 10728 |
| PRAP1 | Proline-rich acidic protein 1 | SEQ ID NOS: 10729-10730 |
| PRB1 | Proline-rich protein BstNI subfamily 1 | SEQ ID NOS: 10731-10734 |
| PRB2 | Proline-rich protein BstNI subfamily 2 | SEQ ID NOS: 10735-10736 |
| PRB3 | Proline-rich protein BstNI subfamily 3 | SEQ ID NOS: 10737-10738 |
| PRB4 | Proline-rich protein BstNI subfamily 4 | SEQ ID NOS: 10739-10742 |
| PRCD | Progressive rod-cone degeneration | SEQ ID NOS: 10743-10744 |
| PRCP | Prolylcarboxypeptidase (angiotensinase C) | SEQ ID NOS: 10745-10756 |
| PRDM12 | PR domain containing 12 | SEQ ID NO: 10757 |
| PRDX4 | Peroxiredoxin 4 | SEQ ID NOS: 10758-10761 |
| PRELP | Proline/arginine-rich end leucine-rich repeat protein | SEQ ID NO: 10762 |
| PRF1 | Perforin 1 (pore forming protein) | SEQ ID NOS: 10763-10765 |
| PRG2 | Proteoglycan 2, bone marrow (natural killer cell | SEQ ID NOS: 10766-10768 |
| | activator, eosinophil granule major basic protein) | |
| PRG3 | Proteoglycan 3 | SEQ ID NO: 10769 |
| PRG4 | Proteoglycan 4 | SEQ ID NOS: 10770-10775 |
| PRH1 | Proline-rich protein Haelll subfamily 1 | SEQ ID NOS: 10776-10778 |
| PRH2 | Proline-rich protein Haelll subfamily 2 | SEQ ID NOS: 10779-10780 |
| PRKAG1 | Protein kinase, AMP-activated, gamma 1 non- | SEQ ID NOS: 10781-10795 |
| | catalytic subunit | |
| PRKCSH | Protein kinase C substrate 80K-H | SEQ ID NOS: 10796-10805 |
| PRKD1 | Protein kinase D1 | SEQ ID NOS: 10806-10811 |
| PRL | Prolactin | SEQ ID NOS: 10812-10814 |
| PRLH | Prolactin releasing hormone | SEQ ID NO: 10815 |
| PRLR | Prolactin receptor | SEQ ID NOS: 10816-10834 |
| PRNP | Prion protein | SEQ ID NOS: 10835-10838 |
| PRNT | Prion protein (testis specific) | SEQ ID NO: 10839 |
| PROC | Protein C (inactivator of coagulation factors Va and | SEQ ID NOS: 10840-10847 |
| | VIIIa) | |
| PROK1 | Prokineticin 1 | SEQ ID NO: 10848 |
| PROK2 | Prokineticin 2 | SEQ ID NOS: 10849-10850 |
| PROM1 | Prominin 1 | SEQ ID NOS: 10851-10862 |
| PROS1 | Protein S (alpha) | SEQ ID NOS: 10863-10866 |
| PROZ | Protein Z, vitamin K-dependent plasma glycoprotein | SEQ ID NOS: 10867-10868 |
| PRR27 | Proline rich 27 | SEQ ID NOS: 10869-10872 |
| PRR4 | Proline rich 4 (lacrimal) | SEQ ID NOS: 10873-10875 |
| PRRG2 | Proline rich Gla (G-carboxyglutamic acid) 2 | SEQ ID NOS: 10876-10878 |
| PRRT3 | Proline-rich transmembrane protein 3 | SEQ ID NOS: 10879-10881 |
| PRRT4 | Proline-rich transmembrane protein 4 | SEQ ID NOS: 10882-10888 |
| PRSS1 | Protease, serine, 1 (trypsin 1) | SEQ ID NOS: 10889-10892 |
| PRSS12 | Protease, serine, 12 (neurotrypsin, motopsin) | SEQ ID NO: 10893 |
| PRSS16 | Protease, serine, 16 (thymus) | SEQ ID NOS: 10894-10901 |
| PRSS2 | Protease, serine, 2 (trypsin 2) | SEQ ID NOS: 10902-10905 |
| PRSS21 | Protease, serine, 21 (testisin) | SEQ ID NOS: 10906-10911 |
| PRSS22 | Protease, serine, 22 | SEQ ID NOS: 10912-10914 |
| PRSS23 | Protease, serine, 23 | SEQ ID NOS: 10915-10918 |
| PRSS27 | Protease, serine 27 | SEQ ID NOS: 10919-10921 |
| PRSS3 | Protease, serine, 3 | SEQ ID NOS: 10922-10926 |
| PRSS33 | Protease, serine, 33 | SEQ ID NOS: 10927-10930 |
| PRSS35 | Protease, serine, 35 | SEQ ID NO: 10931 |
| PRSS36 | Protease, serine, 36 | SEQ ID NOS: 10932-10935 |
| PRSS37 | Protease, serine, 37 | SEQ ID NOS: 10936-10939 |
| PRSS38 | Protease, serine, 38 | SEQ ID NO: 10940 |
| PRSS42 | Protease, serine, 42 | SEQ ID NOS: 10941-10942 |
| PRSS48 | Protease, serine, 48 | SEQ ID NOS: 10943-10944 |
| PRSS50 | Protease, serine, 50 | SEQ ID NO: 10945 |
| PRSS53 | Protease, serine, 53 | SEQ ID NO: 10946 |
| PRSS54 | Protease, serine, 54 | SEQ ID NOS: 10947-10951 |
| PRSS55 | Protease, serine, 55 | SEQ ID NOS: 10952-10954 |
| PRSS56 | Protease, serine, 56 | SEQ ID NOS: 10955-10956 |
| PRSS57 | Protease, serine, 57 | SEQ ID NOS: 10957-10958 |
| PRSS58 | Protease, serine, 58 | SEQ ID NOS: 10959-10960 |
| PRSS8 | Protease, serine, 8 | SEQ ID NOS: 10961-10964 |
| PRTG | Protogenin | SEQ ID NOS: 10965-10968 |
| PRTN3 | Proteinase 3 | SEQ ID NOS: 10969-10970 |
| PSAP | Prosaposin | SEQ ID NOS: 10971-10974 |
| PSAPL1 | Prosaposin-like 1 (gene/pseudogene) | SEQ ID NO: 10975 |
| PSG1 | Pregnancy specific beta-1-glycoprotein 1 | SEQ ID NOS: 10976-10983 |
| PSG11 | Pregnancy specific beta-1-glycoprotein 11 | SEQ ID NOS: 10984-10988 |
| PSG2 | Pregnancy specific beta-1-glycoprotein 2 | SEQ ID NOS: 10989-10990 |
| PSG3 | Pregnancy specific beta-1-glycoprotein 3 | SEQ ID NOS: 10991-10994 |
| PSG4 | Pregnancy specific beta-1-glycoprotein 4 | SEQ ID NOS: 10995-11006 |
| PSG5 | Pregnancy specific beta-1-glycoprotein 5 | SEQ ID NOS: 11007-11012 |
| PSG6 | Pregnancy specific beta-1-glycoprotein 6 | SEQ ID NOS: 11013-11018 |
| PSG7 | Pregnancy specific beta-1-glycoprotein 7 | SEQ ID NOS: 11019-11021 |
| | (gene/pseudogene) | |
| PSG8 | Pregnancy specific beta-1-glycoprotein 8 | SEQ ID NOS: 11022-11026 |
| PSG9 | Pregnancy specific beta-1-glycoprotein 9 | SEQ ID NOS: 11027-11034 |
| PSMD1 | Proteasome 26S subunit, non-ATPase 1 | SEQ ID NOS: 11035-11042 |
| PSORS1C2 | Psoriasis susceptibility 1 candidate 2 | SEQ ID NO: 11043 |
| PSPN | Persephin | SEQ ID NOS: 11044-11045 |
| PTGDS | Prostaglandin D2 synthase 21 kDa (brain) | SEQ ID NOS: 11046-11050 |
| PTGIR | Prostaglandin I2 (prostacyclin) receptor (IP) | SEQ ID NOS: 11051-11055 |
| PTGS1 | Prostaglandin-endoperoxide synthase 1 | SEQ ID NOS: 11056-11064 |
| | (prostaglandin G/H synthase and cyclooxygenase) | |
| PTGS2 | Prostaglandin-endoperoxide synthase 2 | SEQ ID NOS: 11065-11066 |
| | (prostaglandin G/H synthase and cyclooxygenase) | |
| PTH | Parathyroid hormone | SEQ ID NOS: 11067-11068 |
| PTH2 | Parathyroid hormone 2 | SEQ ID NO: 11069 |
| PTHLH | Parathyroid hormone-like hormone | SEQ ID NOS: 11070-11078 |
| PTK7 | Protein tyrosine kinase 7 (inactive) | SEQ ID NOS: 11079-11094 |
| PTN | Pleiotrophin | SEQ ID NOS: 11095-11096 |
| PTPRA | Protein tyrosine phosphatase, receptor type, A | SEQ ID NOS: 11097-11104 |
| PTPRB | Protein tyrosine phosphatase, receptor type, B | SEQ ID NOS: 11105-11112 |
| PTPRC | Protein tyrosine phosphatase, receptor type, C | SEQ ID NOS: 11113-11123 |
| PTPRCAP | Protein tyrosine phosphatase, receptor type, C- | SEQ ID NO: 11124 |
| | associated protein | |
| PTPRD | Protein tyrosine phosphatase, receptor type, D | SEQ ID NOS: 11125-11136 |
| PTPRF | Protein tyrosine phosphatase, receptor type, F | SEQ ID NOS: 11137-11144 |
| PTPRJ | Protein tyrosine phosphatase, receptor type, J | SEQ ID NOS: 11145-11150 |
| PTPRO | Protein tyrosine phosphatase, receptor type, O | SEQ ID NOS: 11151-11159 |
| PTPRS | Protein tyrosine phosphatase, receptor type, S | SEQ ID NOS: 11160-11167 |
| PTTG1IP | Pituitary tumor-transforming 1 interacting protein | SEQ ID NOS: 11168-11171 |
| PTX3 | Pentraxin 3, long | SEQ ID NO: 11172 |
| PTX4 | Pentraxin 4, long | SEQ ID NOS: 11173-11175 |
| PVR | Poliovirus receptor | SEQ ID NOS: 11176-11181 |
| PXDN | Peroxidasin | SEQ ID NOS: 11182-11186 |
| PXDNL | Peroxidasin-like | SEQ ID NOS: 11187-11189 |
| PXYLP1 | 2-phosphoxylose phosphatase 1 | SEQ ID NOS: 11190-11202 |
| PYY | Peptide YY | SEQ ID NOS: 11203-11204 |
| PZP | Pregnancy-zone protein | SEQ ID NOS: 11205-11206 |
| QPCT | Glutaminyl-peptide cyclotransferase | SEQ ID NOS: 11207-11209 |
| QPRT | Quinolinate phosphoribosyltransferase | SEQ ID NOS: 11210-11211 |
| QRFP | Pyroglutamylated RFamide peptide | SEQ ID NOS: 11212-11213 |
| QSOX1 | Quiescin Q6 sulfhydryl oxidase 1 | SEQ ID NOS: 11214-11217 |
| R3HDML | R3H domain containing-like | SEQ ID NO: 11218 |
| RAB26 | RAB26, member RAS oncogene family | SEQ ID NOS: 11219-11222 |
| RAB36 | RAB36, member RAS oncogene family | SEQ ID NOS: 11223-11225 |
| RAB9B | RAB9B, member RAS oncogene family | SEQ ID NO: 11226 |
| RAET1E | Retinoic acid early transcript 1E | SEQ ID NOS: 11227-11232 |
| RAET1G | Retinoic acid early transcript 1G | SEQ ID NOS: 11233-11235 |
| RAMP2 | Receptor (G protein-coupled) activity modifying | SEQ ID NOS: 11236-11240 |
| | protein 2 | |
| RAPGEF5 | Rap guanine nucleotide exchange factor (GEF) 5 | SEQ ID NOS: 11241-11247 |
| RARRES1 | Retinoic acid receptor responder (tazarotene | SEQ ID NOS: 11248-11249 |
| | induced) 1 | |
| RARRES2 | Retinoic acid receptor responder (tazarotene | SEQ ID NOS: 11250-11253 |
| | induced) 2 | |
| RASA2 | RAS p21 protein activator 2 | SEQ ID NOS: 11254-11256 |
| RBM3 | RNA binding motif (RNP1, RRM) protein 3 | SEQ ID NOS: 11257-11259 |
| RBP3 | Retinol binding protein 3, interstitial | SEQ ID NO: 11260 |
| RBP4 | Retinol binding protein 4, plasma | SEQ ID NOS: 11261-11264 |
| RCN1 | Reticulocalbin 1, EF-hand calcium binding domain | SEQ ID NOS: 11265-11268 |
| RCN2 | Reticulocalbin 2, EF-hand calcium binding domain | SEQ ID NOS: 11269-11272 |
| RCN3 | Reticulocalbin 3, EF-hand calcium binding domain | SEQ ID NOS: 11273-11276 |
| RCOR1 | REST corepressor 1 | SEQ ID NOS: 11277-11278 |
| RDH11 | Retinol dehydrogenase 11 (all-trans/9-cis/11-cis) | SEQ ID NOS: 11279-11286 |
| RDH12 | Retinol dehydrogenase 12 (all-trans/9-cis/11-cis) | SEQ ID NOS: 11287-11288 |
| RDH13 | Retinol dehydrogenase 13 (all-trans/9-cis) | SEQ ID NOS: 11289-11297 |
| RDH5 | Retinol dehydrogenase 5 (11-cis/9-cis) | SEQ ID NOS: 11298-11302 |
| RDH8 | Retinol dehydrogenase 8 (all-trans) | SEQ ID NOS: 11303-11304 |
| REG1A | Regenerating islet-derived 1 alpha | SEQ ID NO: 11305 |
| REG1B | Regenerating islet-derived 1 beta | SEQ ID NOS: 11306-11307 |
| REG3A | Regenerating islet-derived 3 alpha | SEQ ID NOS: 11308-11310 |
| REG3G | Regenerating islet-derived 3 gamma | SEQ ID NOS: 11311-11313 |
| REG4 | Regenerating islet-derived family, member 4 | SEQ ID NOS: 11314-11317 |
| RELN | Reelin | SEQ ID NOS: 11318-11321 |
| RELT | RELT tumor necrosis factor receptor | SEQ ID NOS: 11322-11325 |
| REN | Renin | SEQ ID NOS: 11326-11327 |
| REPIN1 | Replication initiator 1 | SEQ ID NOS: 11328-11341 |
| REPS2 | RALBP1 associated Eps domain containing 2 | SEQ ID NOS: 11342-11343 |
| RET | Ret proto-oncogene | SEQ ID NOS: 11344-11349 |
| RETN | Resistin | SEQ ID NOS: 11350-11352 |
| RETNLB | Resistin like beta | SEQ ID NO: 11353 |
| RETSAT | Retinol saturase (all-trans-retinol 13,14-reductase) | SEQ ID NOS: 11354-11358 |
| RFNG | RFNG O-fucosylpeptide 3-beta-N- | SEQ ID NOS: 11359-11361 |
| | acetylglucosaminyltransferase | |
| RGCC | Regulator of cell cycle | SEQ ID NO: 11362 |
| RGL4 | Ral guanine nucleotide dissociation stimulator-like 4 | SEQ ID NOS: 11363-11369 |
| RGMA | Repulsive guidance molecule family member a | SEQ ID NOS: 11370-11379 |
| RGMB | Repulsive guidance molecule family member b | SEQ ID NOS: 11380-11381 |
| RHOQ | Ras homolog family member Q | SEQ ID NOS: 11382-11386 |
| RIC3 | RIC3 acetylcholine receptor chaperone | SEQ ID NOS: 11387-11394 |
| HRSP12 | Heat-responsive protein 12 | SEQ ID NOS: 11395-11398 |
| RIMS1 | Regulating synaptic membrane exocytosis 1 | SEQ ID NOS: 11399-11414 |
| RIPPLY1 | Ripply transcriptional repressor 1 | SEQ ID NOS: 11415-11416 |
| RLN1 | Relaxin 1 | SEQ ID NO: 11417 |
| RLN2 | Relaxin 2 | SEQ ID NOS: 11418-11419 |
| RLN3 | Relaxin 3 | SEQ ID NOS: 11420-11421 |
| RMDN1 | Regulator of microtubule dynamics 1 | SEQ ID NOS: 11422-11435 |
| RNASE1 | Ribonuclease, RNase A family, 1 (pancreatic) | SEQ ID NOS: 11436-11440 |
| RNASE10 | Ribonuclease, RNase A family, 10 (non-active) | SEQ ID NOS: 11441-11442 |
| RNASE11 | Ribonuclease, RNase A family, 11 (non-active) | SEQ ID NOS: 11443-11453 |
| RNASE12 | Ribonuclease, RNase A family, 12 (non-active) | SEQ ID NO: 11454 |
| RNASE13 | Ribonuclease, RNase A family, 13 (non-active) | SEQ ID NO: 11455 |
| RNASE2 | Ribonuclease, RNase A family, 2 (liver, eosinophil- | SEQ ID NO: 11456 |
| | derived neurotoxin) | |
| RNASE3 | Ribonuclease, RNase A family, 3 | SEQ ID NO: 11457 |
| RNASE4 | Ribonuclease, RNase A family, 4 | SEQ ID NOS: 11458-11460 |
| RNASE6 | Ribonuclease, RNase A family, k6 | SEQ ID NO: 11461 |
| RNASE7 | Ribonuclease, RNase A family, 7 | SEQ ID NOS: 11462-11463 |
| RNASE8 | Ribonuclease, RNase A family, 8 | SEQ ID NO: 11464 |
| RNASE9 | Ribonuclease, RNase A family, 9 (non-active) | SEQ ID NOS: 11465-11475 |
| RNASEH1 | Ribonuclease H1 | SEQ ID NOS: 11476-11478 |
| RNASET2 | Ribonuclease T2 | SEQ ID NOS: 11479-11486 |
| RNF146 | Ring finger protein 146 | SEQ ID NOS: 11487-11498 |
| RNF148 | Ring finger protein 148 | SEQ ID NOS: 11499-11500 |
| RNF150 | Ring finger protein 150 | SEQ ID NOS: 11501-11505 |
| RNF167 | Ring finger protein 167 | SEQ ID NOS: 11506-11516 |
| RNF220 | Ring finger protein 220 | SEQ ID NOS: 11517-11523 |
| RNF34 | Ring finger protein 34, E3 ubiquitin protein ligase | SEQ ID NOS: 11524-11531 |
| RNLS | Renalase, FAD-dependent amine oxidase | SEQ ID NOS: 11532-11534 |
| RNPEP | Arginyl aminopeptidase (aminopeptidase B) | SEQ ID NOS: 11535-11540 |
| ROR1 | Receptor tyrosine kinase-like orphan receptor 1 | SEQ ID NOS: 11541-11543 |
| RPL3 | Ribosomal protein L3 | SEQ ID NOS: 11544-11549 |
| RPLP2 | Ribosomal protein, large, P2 | SEQ ID NOS: 11550-11552 |
| RPN2 | Ribophorin II | SEQ ID NOS: 11553-11559 |
| RPS27L | Ribosomal protein S27-like | SEQ ID NOS: 11560-11565 |
| RS1 | Retinoschisin 1 | SEQ ID NO: 11566 |
| RSF1 | Remodeling and spacing factor 1 | SEQ ID NOS: 11567-11573 |
| RSPO1 | R-spondin 1 | SEQ ID NOS: 11574-11577 |
| RSPO2 | R-spondin 2 | SEQ ID NOS: 11578-11585 |
| RSPO3 | R-spondin 3 | SEQ ID NOS: 11586-11587 |
| RSPO4 | R-spondin 4 | SEQ ID NOS: 11588-11589 |
| RSPRY1 | Ring finger and SPRY domain containing 1 | SEQ ID NOS: 11590-11596 |
| RTBDN | Retbindin | SEQ ID NOS: 11597-11609 |
| RTN4RL1 | Reticulon 4 receptor-like 1 | SEQ ID NO: 11610 |
| RTN4RL2 | Reticulon 4 receptor-like 2 | SEQ ID NOS: 11611-11613 |
| SAA1 | Serum amyloid A1 | SEQ ID NOS: 11614-11616 |
| SAA2 | Serum amyloid A2 | SEQ ID NOS: 11617-11622 |
| SAA4 | Serum amyloid A4, constitutive | SEQ ID NO: 11623 |
| SAP30 | Sin3A-associated protein, 30 kDa | SEQ ID NO: 11624 |
| SAR1A | Secretion associated, Ras related GTPase 1A | SEQ ID NOS: 11625-11631 |
| SARAF | Store-operated calcium entry-associated regulatory | SEQ ID NOS: 11632-11642 |
| | factor | |
| SARM1 | Sterile alpha and TIR motif containing 1 | SEQ ID NOS: 11643-11646 |
| SATB1 | SATB homeobox 1 | SEQ ID NOS: 11647-11659 |
| SAXO2 | Stabilizer of axonemal microtubules 2 | SEQ ID NOS: 11660-11664 |
| SBSN | Suprabasin | SEQ ID NOS: 11665-11667 |
| SBSPON | Somatomedin B and thrombospondin, type 1 | SEQ ID NO: 11668 |
| | domain containing | |
| SCARF1 | Scavenger receptor class F, member 1 | SEQ ID NOS: 11669-11673 |
| SCG2 | Secretogranin II | SEQ ID NOS: 11674-11676 |
| SCG3 | Secretogranin III | SEQ ID NOS: 11677-11679 |
| SCG5 | Secretogranin V | SEQ ID NOS: 11680-11684 |
| SCGB1A1 | Secretoglobin, family 1A, member 1 (uteroglobin) | SEQ ID NOS: 11685-11686 |
| SCGB1C1 | Secretoglobin, family 1C, member 1 | SEQ ID NO: 11687 |
| SCGB1C2 | Secretoglobin, family 1C, member 2 | SEQ ID NO: 11688 |
| SCGB1D1 | Secretoglobin, family 1D, member 1 | SEQ ID NO: 11689 |
| SCGB1D2 | Secretoglobin, family 1D, member 2 | SEQ ID NO: 11690 |
| SCGB1D4 | Secretoglobin, family 1D, member 4 | SEQ ID NO: 11691 |
| SCGB2A1 | Secretoglobin, family 2A, member 1 | SEQ ID NO: 11692 |
| SCGB2A2 | Secretoglobin, family 2A, member 2 | SEQ ID NOS: 11693-11694 |
| SCGB2B2 | Secretoglobin, family 2B, member 2 | SEQ ID NOS: 11695-11696 |
| SCGB3A1 | Secretoglobin, family 3A, member 1 | SEQ ID NO: 11697 |
| SCGB3A2 | Secretoglobin, family 3A, member 2 | SEQ ID NOS: 11698-11699 |
| SCN1B | Sodium channel, voltage gated, type I beta subunit | SEQ ID NOS: 11700-11705 |
| SCN3B | Sodium channel, voltage gated, type III beta subunit | SEQ ID NOS: 11706-11710 |
| SCPEP1 | Serine carboxypeptidase 1 | SEQ ID NOS: 11711-11718 |
| SCRG1 | Stimulator of chondrogenesis 1 | SEQ ID NOS: 11719-11720 |
| SCT | Secretin | SEQ ID NO: 11721 |
| SCUBE1 | Signal peptide, CUB domain, EGF-like 1 | SEQ ID NOS: 11722-11725 |
| SCUBE2 | Signal peptide, CUB domain, EGF-like 2 | SEQ ID NOS: 11726-11732 |
| SCUBE3 | Signal peptide, CUB domain, EGF-like 3 | SEQ ID NO: 11733 |
| SDC1 | Syndecan 1 | SEQ ID NOS: 11734-11738 |
| SDF2 | Stromal cell-derived factor 2 | SEQ ID NOS: 11739-11741 |
| SDF2L1 | Stromal cell-derived factor 2-like 1 | SEQ ID NO: 11742 |
| SDF4 | Stromal cell derived factor 4 | SEQ ID NOS: 11743-11746 |
| SDHAF2 | Succinate dehydrogenase complex assembly factor 2 | SEQ ID NOS: 11747-11754 |
| SDHAF4 | Succinate dehydrogenase complex assembly factor 4 | SEQ ID NO: 11755 |
| SDHB | Succinate dehydrogenase complex, subunit B, iron | SEQ ID NOS: 11756-11758 |
| | sulfur (Ip) | |
| SDHD | Succinate dehydrogenase complex, subunit D, | SEQ ID NOS: 11759-11768 |
| | integral membrane protein | |
| SEC14L3 | SEC14-like lipid binding 3 | SEQ ID NOS: 11769-11775 |
| SEC16A | SEC16 homolog A, endoplasmic reticulum export | SEQ ID NOS: 11776-11782 |
| | factor | |
| SEC16B | SEC16 homolog B, endoplasmic reticulum export | SEQ ID NOS: 11783-11786 |
| | factor | |
| SEC22C | SEC22 homolog C, vesicle trafficking protein | SEQ ID NOS: 11787-11799 |
| SEC31A | SEC31 homolog A, COPII coat complex component | SEQ ID NOS: 11800-11829 |
| SECISBP2 | SECIS binding protein 2 | SEQ ID NOS: 11830-11834 |
| SECTM1 | Secreted and transmembrane 1 | SEQ ID NOS: 11835-11842 |
| SEL1L | Sel-1 suppressor of lin-12-like (C. elegans) | SEQ ID NOS: 11843-11845 |
| SEPT15 | 15 kDa selenoprotein | SEQ ID NOS: 11846-11852 |
| SELM | Selenoprotein M | SEQ ID NOS: 11853-11855 |
| SEPN1 | Selenoprotein N, 1 | SEQ ID NOS: 11856-11859 |
| SELO | Selenoprotein O | SEQ ID NOS: 11860-11861 |
| SEPP1 | Selenoprotein P, plasma, 1 | SEQ ID NOS: 11862-11867 |
| SEMA3A | Sema domain, immunoglobulin domain (Ig), short | SEQ ID NOS: 11868-11872 |
| | basic domain, secreted, (semaphorin) 3A | |
| SEMA3B | Sema domain, immunoglobulin domain (Ig), short | SEQ ID NOS: 11873-11879 |
| | basic domain, secreted, (semaphorin) 3B | |
| SEMA3C | Sema domain, immunoglobulin domain (Ig), short | SEQ ID NOS: 11880-11884 |
| | basic domain, secreted, (semaphorin) 3C | |
| SEMA3E | Sema domain, immunoglobulin domain (Ig), short | SEQ ID NOS: 11885-11889 |
| | basic domain, secreted, (semaphorin) 3E | |
| SEMA3F | Sema domain, immunoglobulin domain (Ig), short | SEQ ID NOS: 11890-11896 |
| | basic domain, secreted, (semaphorin) 3F | |
| SEMA3G | Sema domain, immunoglobulin domain (Ig), short | SEQ ID NOS: 11897-11899 |
| | basic domain, secreted, (semaphorin) 3G | |
| SEMA4A | Sema domain, immunoglobulin domain (Ig), | SEQ ID NOS: 11900-11908 |
| | transmembrane domain (TM) and short cytoplasmic | |
| | domain, (semaphorin) 4A | |
| SEMA4B | Sema domain, immunoglobulin domain (Ig), | SEQ ID NOS: 11909-11919 |
| | transmembrane domain (TM) and short cytoplasmic | |
| | domain, (semaphorin) 4B | |
| SEMA4C | Sema domain, immunoglobulin domain (Ig), | SEQ ID NOS: 11920-11922 |
| | transmembrane domain (TM) and short cytoplasmic | |
| | domain, (semaphorin) 4C | |
| SEMA4D | Sema domain, immunoglobulin domain (Ig), | SEQ ID NOS: 11923-11936 |
| | transmembrane domain (TM) and short cytoplasmic | |
| | domain, (semaphorin) 4D | |
| SEMA4F | Sema domain, immunoglobulin domain (Ig), | SEQ ID NOS: 11937-11945 |
| | transmembrane domain (TM) and short cytoplasmic | |
| | domain, (semaphorin) 4F | |
| SEMA4G | Sema domain, immunoglobulin domain (Ig), | SEQ ID NOS: 11946-11953 |
| | transmembrane domain (TM) and short cytoplasmic | |
| | domain, (semaphorin) 4G | |
| SEMA5A | Sema domain, seven thrombospondin repeats (type | SEQ ID NOS: 11954-11955 |
| | 1 and type 1-like), transmembrane domain (TM) and | |
| | short cytoplasmic domain, (semaphorin) 5A | |
| SEMA6A | Sema domain, transmembrane domain (TM), and | SEQ ID NOS: 11956-11963 |
| | cytoplasmic domain, (semaphorin) 6A | |
| SEMA6C | Sema domain, transmembrane domain (TM), and | SEQ ID NOS: 11964-11969 |
| | cytoplasmic domain, (semaphorin) 6C | |
| SEMA6D | Sema domain, transmembrane domain (TM), and | SEQ ID NOS: 11970-11983 |
| | cytoplasmic domain, (semaphorin) 6D | |
| SEMG1 | Semenogelin I | SEQ ID NO: 11984 |
| SEMG2 | Semenogelin II | SEQ ID NO: 11985 |
| SEPT9 | Septin 9 | SEQ ID NOS: 11986-12022 |
| SERPINA1 | Serpin peptidase inhibitor, clade A (alpha-1 | SEQ ID NOS: 12023-12039 |
| | antiproteinase, antitrypsin), member 1 | |
| SERPINA10 | Serpin peptidase inhibitor, clade A (alpha-1 | SEQ ID NOS: 12040-12043 |
| | antiproteinase, antitrypsin), member 10 | |
| SERPINA11 | Serpin peptidase inhibitor, clade A (alpha-1 | SEQ ID NO: 12044 |
| | antiproteinase, antitrypsin), member 11 | |
| SERPINA12 | Serpin peptidase inhibitor, clade A (alpha-1 | SEQ ID NOS: 12045-12046 |
| | antiproteinase, antitrypsin), member 12 | |
| SERPINA3 | Serpin peptidase inhibitor, clade A (alpha-1 | SEQ ID NOS: 12047-12053 |
| | antiproteinase, antitrypsin), member 3 | |
| SERPINA4 | Serpin peptidase inhibitor, clade A (alpha-1 | SEQ ID NOS: 12054-12056 |
| | antiproteinase, antitrypsin), member 4 | |
| SERPINA5 | Serpin peptidase inhibitor, clade A (alpha-1 | SEQ ID NOS: 12057-12068 |
| | antiproteinase, antitrypsin), member 5 | |
| SERPINA6 | Serpin peptidase inhibitor, clade A (alpha-1 | SEQ ID NOS: 12069-12071 |
| | antiproteinase, antitrypsin), member 6 | |
| SERPINA7 | Serpin peptidase inhibitor, clade A (alpha-1 | SEQ ID NOS: 12072-12073 |
| | antiproteinase, antitrypsin), member 7 | |
| SERPINA9 | Serpin peptidase inhibitor, clade A (alpha-1 | SEQ ID NOS: 12074-12080 |
| | antiproteinase, antitrypsin), member 9 | |
| SERPINB2 | Serpin peptidase inhibitor, clade B (ovalbumin), | SEQ ID NOS: 12081-12085 |
| | member 2 | |
| SERPINC1 | Serpin peptidase inhibitor, clade C (antithrombin), | SEQ ID NOS: 12086-12087 |
| | member 1 | |
| SERPIND1 | Serpin peptidase inhibitor, clade D (heparin | SEQ ID NOS: 12088-12089 |
| | cofactor), member 1 | |
| SERPINE1 | Serpin peptidase inhibitor, clade E (nexin, | SEQ ID NO: 12090 |
| | plasminogen activator inhibitor type 1), member 1 | |
| SERPINE2 | Serpin peptidase inhibitor, clade E (nexin, | SEQ ID NOS: 12091-12097 |
| | plasminogen activator inhibitor type 1), member 2 | |
| SERPINE3 | Serpin peptidase inhibitor, clade E (nexin, | SEQ ID NOS: 12098-12101 |
| | plasminogen activator inhibitor type 1), member 3 | |
| SERPINF1 | Serpin peptidase inhibitor, clade F (alpha-2 | SEQ ID NOS: 12102-12110 |
| | antiplasmin, pigment epithelium derived factor), | |
| | member 1 | |
| SERPINF2 | Serpin peptidase inhibitor, clade F (alpha-2 | SEQ ID NOS: 12111-12115 |
| | antiplasmin, pigment epithelium derived factor), | |
| | member 2 | |
| SERPING1 | Serpin peptidase inhibitor, clade G (C1 inhibitor), | SEQ ID NOS: 12116-12126 |
| | member 1 | |
| SERPINH1 | Serpin peptidase inhibitor, clade H (heat shock | SEQ ID NOS: 12127-12141 |
| | protein 47), member 1, (collagen binding protein 1) | |
| SERPINI1 | Serpin peptidase inhibitor, clade I (neuroserpin), | SEQ ID NOS: 12142-12146 |
| | member 1 | |
| SERPINI2 | Serpin peptidase inhibitor, clade I (pancpin), | SEQ ID NOS: 12147-12153 |
| | member 2 | |
| SEZ6L2 | Seizure related 6 homolog (mouse)-like 2 | SEQ ID NOS: 12154-12160 |
| SFRP1 | Secreted frizzled-related protein 1 | SEQ ID NOS: 12161-12162 |
| SFRP2 | Secreted frizzled-related protein 2 | SEQ ID NO: 12163 |
| SFRP4 | Secreted frizzled-related protein 4 | SEQ ID NOS: 12164-12165 |
| SFRP5 | Secreted frizzled-related protein 5 | SEQ ID NO: 12166 |
| SFTA2 | Surfactant associated 2 | SEQ ID NOS: 12167-12168 |
| SFTPA1 | Surfactant protein A1 | SEQ ID NOS: 12169-12173 |
| SFTPA2 | Surfactant protein A2 | SEQ ID NOS: 12174-12178 |
| SFTPB | Surfactant protein B | SEQ ID NOS: 12179-12183 |
| SFTPD | Surfactant protein D | SEQ ID NOS: 12184-12185 |
| SFXN5 | Sideroflexin 5 | SEQ ID NOS: 12186-12190 |
| SGCA | Sarcoglycan, alpha (50 kDa dystrophin-associated | SEQ ID NOS: 12191-12198 |
| | glycoprotein) | |
| SGSH | N-sulfoglucosamine sulfohydrolase | SEQ ID NOS: 12199-12207 |
| SH3RF3 | SH3 domain containing ring finger 3 | SEQ ID NO: 12208 |
| SHBG | Sex hormone-binding globulin | SEQ ID NOS: 12209-12227 |
| SHE | Src homology 2 domain containing E | SEQ ID NOS: 12228-12230 |
| SHH | Sonic hedgehog | SEQ ID NOS: 12231-12234 |
| SHKBP1 | SH3KBP1 binding protein 1 | SEQ ID NOS: 12235-12250 |
| SIAE | Sialic acid acetylesterase | SEQ ID NOS: 12251-12253 |
| SIDT2 | SID1 transmembrane family, member 2 | SEQ ID NOS: 12254-12263 |
| SIGLEC10 | Sialic acid binding Ig-like lectin 10 | SEQ ID NOS: 12264-12272 |
| SIGLEC6 | Sialic acid binding Ig-like lectin 6 | SEQ ID NOS: 12273-12278 |
| SIGLEC7 | Sialic acid binding Ig-like lectin 7 | SEQ ID NOS: 12279-12283 |
| SIGLECL1 | SIGLEC family like 1 | SEQ ID NOS: 12284-12289 |
| SIGMAR1 | Sigma non-opioid intracellular receptor 1 | SEQ ID NOS: 12290-12293 |
| SIL1 | SIL1 nucleotide exchange factor | SEQ ID NOS: 12294-12302 |
| SIRPB1 | Signal-regulatory protein beta 1 | SEQ ID NOS: 12303-12315 |
| SIRPD | Signal-regulatory protein delta | SEQ ID NOS: 12316-12318 |
| SLAMF1 | Signaling lymphocytic activation molecule family | SEQ ID NOS: 12319-12321 |
| | member 1 | |
| SLAMF7 | SLAM family member 7 | SEQ ID NOS: 12322-12330 |
| SLC10A3 | Solute carrier family 10, member 3 | SEQ ID NOS: 12331-12335 |
| SLC15A3 | Solute carrier family 15 (oligopeptide transporter), | SEQ ID NOS: 12336-12341 |
| | member 3 | |
| SLC25A14 | Solute carrier family 25 (mitochondrial carrier, | SEQ ID NOS: 12342-12348 |
| | brain), member 14 | |
| SLC25A25 | Solute carrier family 25 (mitochondrial carrier; | SEQ ID NOS: 12349-12355 |
| | phosphate carrier), member 25 | |
| SLC2A5 | Solute carrier family 2 (facilitated glucose/fructose | SEQ ID NOS: 12356-12364 |
| | transporter), member 5 | |
| SLC35E3 | Solute carrier family 35, member E3 | SEQ ID NOS: 12365-12366 |
| SLC39A10 | Solute carrier family 39 (zinc transporter), | SEQ ID NOS: 12367-12373 |
| | member 10 | |
| SLC39A14 | Solute carrier family 39 (zinc transporter), | SEQ ID NOS: 12374-12384 |
| | member 14 | |
| SLC39A4 | Solute carrier family 39 (zinc transporter), member 4 | SEQ ID NOS: 12385-12387 |
| SLC39A5 | Solute carrier family 39 (zinc transporter), member 5 | SEQ ID NOS: 12388-12394 |
| SLC3A1 | Solute carrier family 3 (amino acid transporter heavy | SEQ ID NOS: 12395-12404 |
| | chain), member 1 | |
| SLC51A | Solute carrier family 51, alpha subunit | SEQ ID NOS: 12405-12409 |
| SLC52A2 | Solute carrier family 52 (riboflavin transporter), | SEQ ID NOS: 12410-12420 |
| | member 2 | |
| SLC5A6 | Solute carrier family 5 (sodium/multivitamin and | SEQ ID NOS: 12421-12431 |
| | iodide cotransporter), member 6 | |
| SLC6A9 | Solute carrier family 6 (neurotransmitter | SEQ ID NOS: 12432-12439 |
| | transporter, glycine), member 9 | |
| SLC8A1 | Solute carrier family 8 (sodium/calcium exchanger), | SEQ ID NOS: 12440-12451 |
| | member 1 | |
| SLC8B1 | Solute carrier family 8 (sodium/lithium/calcium | SEQ ID NOS: 12452-12462 |
| | exchanger), member B1 | |
| SLC9A6 | Solute carrier family 9, subfamily A (NHE6, cation | SEQ ID NOS: 12463-12474 |
| | proton antiporter 6), member 6 | |
| SLCO1A2 | Solute carrier organic anion transporter family, | SEQ ID NOS: 12475-12488 |
| | member 1A2 | |
| SLIT1 | Slit guidance ligand 1 | SEQ ID NOS: 12489-12492 |
| SLIT2 | Slit guidance ligand 2 | SEQ ID NOS: 12493-12501 |
| SLIT3 | Slit guidance ligand 3 | SEQ ID NOS: 12502-12504 |
| SLITRK3 | SLIT and NTRK-like family, member 3 | SEQ ID NOS: 12505-12507 |
| SLPI | Secretory leukocyte peptidase inhibitor | SEQ ID NO: 12508 |
| SLTM | SAFB-like, transcription modulator | SEQ ID NOS: 12509-12522 |
| SLURP1 | Secreted LY6/PLAUR domain containing 1 | SEQ ID NO: 12523 |
| SMARCA2 | SWI/SNF related, matrix associated, actin dependent | SEQ ID NOS: 12524-12571 |
| | regulator of chromatin, subfamily a, member 2 | |
| SMG6 | SMG6 nonsense mediated mRNA decay factor | SEQ ID NOS: 12572-12583 |
| SMIM7 | Small integral membrane protein 7 | SEQ ID NOS: 12584-12600 |
| SMOC1 | SPARC related modular calcium binding 1 | SEQ ID NOS: 12601-12602 |
| SMOC2 | SPARC related modular calcium binding 2 | SEQ ID NOS: 12603-12607 |
| SMPDL3A | Sphingomyelin phosphodiesterase, acid-like 3A | SEQ ID NOS: 12608-12609 |
| SMPDL3B | Sphingomyelin phosphodiesterase, acid-like 3B | SEQ ID NOS: 12610-12614 |
| SMR3A | Submaxillary gland androgen regulated protein 3A | SEQ ID NO: 12615 |
| SMR3B | Submaxillary gland androgen regulated protein 3B | SEQ ID NOS: 12616-12618 |
| SNED1 | Sushi, nidogen and EGF-like domains 1 | SEQ ID NOS: 12619-12625 |
| SNTB1 | Syntrophin, beta 1 (dystrophin-associated protein | SEQ ID NOS: 12626-12628 |
| | A1, 59 kDa, basic component 1) | |
| SNTB2 | Syntrophin, beta 2 (dystrophin-associated protein | SEQ ID NOS: 12629-12633 |
| | A1, 59 kDa, basic component 2) | |
| SNX14 | Sorting nexin 14 | SEQ ID NOS: 12634-12645 |
| SOD3 | Superoxide dismutase 3, extracellular | SEQ ID NOS: 12646-12647 |
| SOST | Sclerostin | SEQ ID NO: 12648 |
| SOSTDC1 | Sclerostin domain containing 1 | SEQ ID NOS: 12649-12650 |
| SOWAHA | Sosondowah ankyrin repeat domain family member | SEQ ID NO: 12651 |
| | A | |
| SPACA3 | Sperm acrosome associated 3 | SEQ ID NOS: 12652-12654 |
| SPACA4 | Sperm acrosome associated 4 | SEQ ID NO: 12655 |
| SPACA5 | Sperm acrosome associated 5 | SEQ ID NOS: 12656-12657 |
| SPACA5B | Sperm acrosome associated 5B | SEQ ID NO: 12658 |
| SPACA7 | Sperm acrosome associated 7 | SEQ ID NOS: 12659-12662 |
| SPAG11A | Sperm associated antigen 11A | SEQ ID NOS: 12663-12671 |
| SPAG11B | Sperm associated antigen 11B | SEQ ID NOS: 12672-12680 |
| SPARC | Secreted protein, acidic, cysteine-rich (osteonectin) | SEQ ID NOS: 12681-12685 |
| SPARCL1 | SPARC-like 1 (hevin) | SEQ ID NOS: 12686-12695 |
| SPATA20 | Spermatogenesis associated 20 | SEQ ID NOS: 12696-12709 |
| SPESP1 | Sperm equatorial segment protein 1 | SEQ ID NO: 12710 |
| SPINK1 | Serine peptidase inhibitor, Kazal type 1 | SEQ ID NOS: 12711-12712 |
| SPINK13 | Serine peptidase inhibitor, Kazal type 13 (putative) | SEQ ID NOS: 12713-12715 |
| SPINK14 | Serine peptidase inhibitor, Kazal type 14 (putative) | SEQ ID NOS: 12716-12717 |
| SPINK2 | Serine peptidase inhibitor, Kazal type 2 (acrosin- | SEQ ID NOS: 12718-12723 |
| | trypsin inhibitor) | |
| SPINK4 | Serine peptidase inhibitor, Kazal type 4 | SEQ ID NOS: 12724-12725 |
| SPINK5 | Serine peptidase inhibitor, Kazal type 5 | SEQ ID NOS: 12726-12731 |
| SPINK6 | Serine peptidase inhibitor, Kazal type 6 | SEQ ID NOS: 12732-12734 |
| SPINK7 | Serine peptidase inhibitor, Kazal type 7 (putative) | SEQ ID NOS: 12735-12736 |
| SPINK8 | Serine peptidase inhibitor, Kazal type 8 (putative) | SEQ ID NO: 12737 |
| SPINK9 | Serine peptidase inhibitor, Kazal type 9 | SEQ ID NOS: 12738-12739 |
| SPINT1 | Serine peptidase inhibitor, Kunitz type 1 | SEQ ID NOS: 12740-12747 |
| SPINT2 | Serine peptidase inhibitor, Kunitz type, 2 | SEQ ID NOS: 12748-12755 |
| SPINT3 | Serine peptidase inhibitor, Kunitz type, 3 | SEQ ID NO: 12756 |
| SPINT4 | Serine peptidase inhibitor, Kunitz type 4 | SEQ ID NO: 12757 |
| SPOCK1 | Sparc/osteonectin, cwcv and kazal-like domains | SEQ ID NOS: 12758-12761 |
| | proteoglycan (testican) 1 | |
| SPOCK2 | Sparc/osteonectin, cwcv and kazal-like domains | SEQ ID NOS: 12762-12765 |
| | proteoglycan (testican) 2 | |
| SPOCK3 | Sparc/osteonectin, cwcv and kazal-like domains | SEQ ID NOS: 12766-12791 |
| | proteoglycan (testican) 3 | |
| SPON1 | Spondin 1, extracellular matrix protein | SEQ ID NO: 12792 |
| SPON2 | Spondin 2, extracellular matrix protein | SEQ ID NOS: 12793-12802 |
| SPP1 | Secreted phosphoprotein 1 | SEQ ID NOS: 12803-12807 |
| SPP2 | Secreted phosphoprotein 2, 24 kDa | SEQ ID NOS: 12808-12810 |
| SPRN | Shadow of prion protein homolog (zebrafish) | SEQ ID NO: 12811 |
| SPRYD3 | SPRY domain containing 3 | SEQ ID NOS: 12812-12815 |
| SPRYD4 | SPRY domain containing 4 | SEQ ID NO: 12816 |
| SPTY2D1- | SPTY2D1 antisense RNA 1 | SEQ ID NOS: 12817-12822 |
| AS1 | | |
| SPX | Spexin hormone | SEQ ID NOS: 12823-12824 |
| SRGN | Serglycin | SEQ ID NO: 12825 |
| SRL | Sarcalumenin | SEQ ID NOS: 12826-12828 |
| SRP14 | Signal recognition particle 14 kDa (homologous Alu | SEQ ID NOS: 12829-12832 |
| | RNA binding protein) | |
| SRPX | Sushi-repeat containing protein, X-linked | SEQ ID NOS: 12833-12836 |
| SRPX2 | Sushi-repeat containing protein, X-linked 2 | SEQ ID NOS: 12837-12840 |
| SSC4D | Scavenger receptor cysteine rich family, 4 domains | SEQ ID NO: 12841 |
| SSC5D | Scavenger receptor cysteine rich family, 5 domains | SEQ ID NOS: 12842-12845 |
| SSPO | SCO-spondin | SEQ ID NO: 12846 |
| SSR2 | Signal sequence receptor, beta (translocon- | SEQ ID NOS: 12847-12856 |
| | associated protein beta) | |
| SST | Somatostatin | SEQ ID NO: 12857 |
| ST3GAL1 | ST3 beta-galactoside alpha-2,3-sialyltransferase 1 | SEQ ID NOS: 12858-12865 |
| ST3GAL4 | ST3 beta-galactoside alpha-2,3-sialyltransferase 4 | SEQ ID NOS: 12866-12881 |
| ST6GAL1 | ST6 beta-galactosamide alpha-2,6-sialyltranferase 1 | SEQ ID NOS: 12882-12897 |
| ST6GALNAC | ST6 (alpha-N-acetyl-neuraminyl-2,3-beta-galactosyl- | SEQ ID NOS: 12898-12902 |
| 2 | 1,3)-N-acetylgalactosaminide alpha-2,6- | |
| | sialyltransferase 2 | |
| ST6GALNAC | ST6 (alpha-N-acetyl-neuraminyl-2,3-beta-galactosyl- | SEQ ID NOS: 12903-12904 |
| 5 | 1,3)-N-acetylgalactosaminide alpha-2,6- | |
| | sialyltransferase 5 | |
| ST6GALNAC | ST6 (alpha-N-acetyl-neuraminyl-2,3-beta-galactosyl- | SEQ ID NOS: 12905-12912 |
| 6 | 1,3)-N-acetylgalactosaminide alpha-2,6- | |
| | sialyltransferase 6 | |
| ST8SIA2 | ST8 alpha-N-acetyl-neuraminide alpha-2,8- | SEQ ID NOS: 12913-12915 |
| | sialyltransferase 2 | |
| ST8SIA4 | ST8 alpha-N-acetyl-neuraminide alpha-2,8- | SEQ ID NOS: 12916-12918 |
| | sialyltransferase 4 | |
| ST8SIA6 | ST8 alpha-N-acetyl-neuraminide alpha-2,8- | SEQ ID NOS: 12919-12920 |
| | sialyltransferase 6 | |
| STARD7 | StAR-related lipid transfer (START) domain | SEQ ID NOS: 12921-12922 |
| | containing 7 | |
| STATH | Statherin | SEQ ID NOS: 12923-12925 |
| STC1 | Stanniocalcin 1 | SEQ ID NOS: 12926-12927 |
| STC2 | Stanniocalcin 2 | SEQ ID NOS: 12928-12930 |
| STMND1 | Stathmin domain containing 1 | SEQ ID NOS: 12931-12932 |
| C7orf73 | Chromosome 7 open reading frame 73 | SEQ ID NOS: 12933-12934 |
| STOML2 | Stomatin (EPB72)-like 2 | SEQ ID NOS: 12935-12938 |
| STOX1 | Storkhead box 1 | SEQ ID NOS: 12939-12943 |
| STRC | Stereocilin | SEQ ID NOS: 12944-12949 |
| SUCLG1 | Succinate-CoA ligase, alpha subunit | SEQ ID NOS: 12950-12951 |
| SUDS3 | SDS3 homolog, SIN3A corepressor complex | SEQ ID NO: 12952 |
| | component | |
| SULF1 | Sulfatase 1 | SEQ ID NOS: 12953-12963 |
| SULF2 | Sulfatase 2 | SEQ ID NOS: 12964-12968 |
| SUMF1 | Sulfatase modifying factor 1 | SEQ ID NOS: 12969-12973 |
| SUMF2 | Sulfatase modifying factor 2 | SEQ ID NOS: 12974-12987 |
| SUSD1 | Sushi domain containing 1 | SEQ ID NOS: 12988-12993 |
| SUSD5 | Sushi domain containing 5 | SEQ ID NOS: 12994-12995 |
| SVEP1 | Sushi, von Willebrand factor type A, EGF and | SEQ ID NOS: 12996-12998 |
| | pentraxin domain containing 1 | |
| SWSAP1 | SWIM-type zinc finger 7 associated protein 1 | SEQ ID NO: 12999 |
| SYAP1 | Synapse associated protein 1 | SEQ ID NO: 13000 |
| SYCN | Syncollin | SEQ ID NO: 13001 |
| TAC1 | Tachykinin, precursor 1 | SEQ ID NOS: 13002-13004 |
| TAC3 | Tachykinin 3 | SEQ ID NOS: 13005-13014 |
| TAC4 | Tachykinin 4 (hemokinin) | SEQ ID NOS: 13015-13020 |
| TAGLN2 | Transgelin 2 | SEQ ID NOS: 13021-13024 |
| TAPBP | TAP binding protein (tapasin) | SEQ ID NOS: 13025-13030 |
| TAPBPL | TAP binding protein-like | SEQ ID NOS: 13031-13032 |
| TBL2 | Transducin (beta)-like 2 | SEQ ID NOS: 13033-13045 |
| TBX10 | T-box 10 | SEQ ID NO: 13046 |
| TCF12 | Transcription factor 12 | SEQ ID NOS: 13047-13060 |
| TCN1 | Transcobalamin I (vitamin B12 binding protein, R | SEQ ID NO: 13061 |
| | binder family) | |
| TCN2 | Transcobalamin II | SEQ ID NOS: 13062-13065 |
| TCTN1 | Tectonic family member 1 | SEQ ID NOS: 13066-13084 |
| TCTN3 | Tectonic family member 3 | SEQ ID NOS: 13085-13089 |
| TDP2 | Tyrosyl-DNA phosphodiesterase 2 | SEQ ID NOS: 13090-13091 |
| C14orf80 | Chromosome 14 open reading frame 80 | SEQ ID NOS: 13092-13105 |
| TEK | TEK tyrosine kinase, endothelial | SEQ ID NOS: 13106-13110 |
| TEPP | Testis, prostate and placenta expressed | SEQ ID NOS: 13111-13112 |
| TEX101 | Testis expressed 101 | SEQ ID NOS: 13113-13114 |
| TEX264 | Testis expressed 264 | SEQ ID NOS: 13115-13126 |
| C1orf234 | Chromosome 1 open reading frame 234 | SEQ ID NOS: 13127-13129 |
| TF | Transferrin | SEQ ID NOS: 13130-13136 |
| TFAM | Transcription factor A, mitochondrial | SEQ ID NOS: 13137-13139 |
| TFF1 | Trefoil factor 1 | SEQ ID NO: 13140 |
| TFF2 | Trefoil factor 2 | SEQ ID NO: 13141 |
| TFF3 | Trefoil factor 3 (intestinal) | SEQ ID NOS: 13142-13144 |
| TFPI | Tissue factor pathway inhibitor (lipoprotein- | SEQ ID NOS: 13145-13154 |
| | associated coagulation inhibitor) | |
| TFPI2 | Tissue factor pathway inhibitor 2 | SEQ ID NOS: 13155-13156 |
| TG | Thyroglobulin | SEQ ID NOS: 13157-13166 |
| TGFB1 | Transforming growth factor, beta 1 | SEQ ID NOS: 13167-13168 |
| TGFB2 | Transforming growth factor, beta 2 | SEQ ID NOS: 13169-13170 |
| TGFB3 | Transforming growth factor, beta 3 | SEQ ID NOS: 13171-13172 |
| TGFBI | Transforming growth factor, beta-induced, 68 kDa | SEQ ID NOS: 13173-13180 |
| TGFBR1 | Transforming growth factor, beta receptor 1 | SEQ ID NOS: 13181-13190 |
| TGFBR3 | Transforming growth factor, beta receptor III | SEQ ID NOS: 13191-13197 |
| THBS1 | Thrombospondin 1 | SEQ ID NOS: 13198-13199 |
| THBS2 | Thrombospondin 2 | SEQ ID NOS: 13200-13202 |
| THBS3 | Thrombospondin 3 | SEQ ID NOS: 13203-13207 |
| THBS4 | Thrombospondin 4 | SEQ ID NOS: 13208-13209 |
| THOC3 | THO complex 3 | SEQ ID NOS: 13210-13219 |
| THPO | Thrombopoietin | SEQ ID NOS: 13220-13225 |
| THSD4 | Thrombospondin, type I, domain containing 4 | SEQ ID NOS: 13226-13229 |
| THY1 | Thy-1 cell surface antigen | SEQ ID NOS: 13230-13235 |
| TIE1 | Tyrosine kinase with immunoglobulin-like and EGF- | SEQ ID NOS: 13236-13237 |
| | like domains 1 | |
| TIMMDC1 | Translocase of inner mitochondrial membrane | SEQ ID NOS: 13238-13245 |
| | domain containing 1 | |
| TIMP1 | TIMP metallopeptidase inhibitor 1 | SEQ ID NOS: 13246-13250 |
| TIMP2 | TIMP metallopeptidase inhibitor 2 | SEQ ID NOS: 13251-13255 |
| TIMP3 | TIMP metallopeptidase inhibitor 3 | SEQ ID NO: 13256 |
| TIMP4 | TIMP metallopeptidase inhibitor 4 | SEQ ID NO: 13257 |
| TINAGL1 | Tubulointerstitial nephritis antigen-like 1 | SEQ ID NOS: 13258-13260 |
| TINF2 | TERF1 (TRF1)-interacting nuclear factor 2 | SEQ ID NOS: 13261-13270 |
| TLL2 | Tolloid-like 2 | SEQ ID NO: 13271 |
| TLR1 | Toll-like receptor 1 | SEQ ID NOS: 13272-13277 |
| TLR3 | Toll-like receptor 3 | SEQ ID NOS: 13278-13280 |
| TM2D2 | TM2 domain containing 2 | SEQ ID NOS: 13281-13286 |
| TM2D3 | TM2 domain containing 3 | SEQ ID NOS: 13287-13294 |
| TM7SF3 | Transmembrane 7 superfamily member 3 | SEQ ID NOS: 13295-13309 |
| TM95F1 | Transmembrane 9 superfamily member 1 | SEQ ID NOS: 13310-13320 |
| TMCO6 | Transmembrane and coiled-coil domains 6 | SEQ ID NOS: 13321-13328 |
| TMED1 | Transmembrane p24 trafficking protein 1 | SEQ ID NOS: 13329-13335 |
| TMED2 | Transmembrane p24 trafficking protein 2 | SEQ ID NOS: 13336-13338 |
| TMED3 | Transmembrane p24 trafficking protein 3 | SEQ ID NOS: 13339-13342 |
| TMED4 | Transmembrane p24 trafficking protein 4 | SEQ ID NOS: 13343-13345 |
| TMED5 | Transmembrane p24 trafficking protein 5 | SEQ ID NOS: 13346-13349 |
| TMED7 | Transmembrane p24 trafficking protein 7 | SEQ ID NOS: 13350-13351 |
| TMED7- | TMED7-TICAM2 readthrough | SEQ ID NOS: 13352-13353 |
| TICAM2 | | |
| TMEM108 | Transmembrane protein 108 | SEQ ID NOS: 13354-13362 |
| TMEM116 | Transmembrane protein 116 | SEQ ID NOS: 13363-13374 |
| TMEM119 | Transmembrane protein 119 | SEQ ID NOS: 13375-13378 |
| TMEM155 | Transmembrane protein 155 | SEQ ID NOS: 13379-13382 |
| TMEM168 | Transmembrane protein 168 | SEQ ID NOS: 13383-13388 |
| TMEM178A | Transmembrane protein 178A | SEQ ID NOS: 13389-13390 |
| TMEM179 | Transmembrane protein 179 | SEQ ID NOS: 13391-13396 |
| TMEM196 | Transmembrane protein 196 | SEQ ID NOS: 13397-13401 |
| TMEM199 | Transmembrane protein 199 | SEQ ID NOS: 13402-13405 |
| TMEM205 | Transmembrane protein 205 | SEQ ID NOS: 13406-13419 |
| TMEM213 | Transmembrane protein 213 | SEQ ID NOS: 13420-13423 |
| TMEM25 | Transmembrane protein 25 | SEQ ID NOS: 13424-13440 |
| TMEM30C | Transmembrane protein 30C | SEQ ID NO: 13441 |
| TMEM38B | Transmembrane protein 38B | SEQ ID NOS: 13442-13446 |
| TMEM44 | Transmembrane protein 44 | SEQ ID NOS: 13447-13456 |
| TMEM52 | Transmembrane protein 52 | SEQ ID NOS: 13457-13461 |
| TMEM52B | Transmembrane protein 52B | SEQ ID NOS: 13462-13464 |
| TMEM59 | Transmembrane protein 59 | SEQ ID NOS: 13465-13472 |
| TMEM67 | Transmembrane protein 67 | SEQ ID NOS: 13473-13484 |
| TMEM70 | Transmembrane protein 70 | SEQ ID NOS: 13485-13487 |
| TMEM87A | Transmembrane protein 87A | SEQ ID NOS: 13488-13497 |
| TMEM94 | Transmembrane protein 94 | SEQ ID NOS: 13498-13513 |
| TMEM95 | Transmembrane protein 95 | SEQ ID NOS: 13514-13516 |
| TMIGD1 | Transmembrane and immunoglobulin domain | SEQ ID NOS: 13517-13518 |
| | containing 1 | |
| TMPRSS12 | Transmembrane (C-terminal) protease, serine 12 | SEQ ID NOS: 13519-13520 |
| TMPRSS5 | Transmembrane protease, serine 5 | SEQ ID NOS: 13521-13532 |
| TMUB1 | Transmembrane and ubiquitin-like domain | SEQ ID NOS: 13533-13539 |
| | containing 1 | |
| TMX2 | Thioredoxin-related transmembrane protein 2 | SEQ ID NOS: 13540-13547 |
| TMX3 | Thioredoxin-related transmembrane protein 3 | SEQ ID NOS: 13548-13555 |
| TNC | Tenascin C | SEQ ID NOS: 13556-13564 |
| TNFAIP6 | Tumor necrosis factor, alpha-induced protein 6 | SEQ ID NO: 13565 |
| TNFRSF11A | Tumor necrosis factor receptor superfamily, | SEQ ID NOS: 13566-13570 |
| | member 11a, NFKB activator | |
| TNFRSF11B | Tumor necrosis factor receptor superfamily, | SEQ ID NOS: 13571-13572 |
| | member 11b | |
| TNFRSF12A | Tumor necrosis factor receptor superfamily, | SEQ ID NOS: 13573-13578 |
| | member 12A | |
| TNFRSF14 | Tumor necrosis factor receptor superfamily, | SEQ ID NOS: 13579-13585 |
| | member 14 | |
| TNFRSF18 | Tumor necrosis factor receptor superfamily, | SEQ ID NOS: 13586-13589 |
| | member 18 | |
| TNFRSF1A | Tumor necrosis factor receptor superfamily, | SEQ ID NOS: 13590-13598 |
| | member 1A | |
| TNFRSF1B | Tumor necrosis factor receptor superfamily, | SEQ ID NOS: 13599-13600 |
| | member 1B | |
| TNFRSF25 | Tumor necrosis factor receptor superfamily, | SEQ ID NOS: 13601-13612 |
| | member 25 | |
| TNFRSF6B | Tumor necrosis factor receptor superfamily, | SEQ ID NO: 13613 |
| | member 6b, decoy | |
| TNFSF11 | Tumor necrosis factor (ligand) superfamily, | SEQ ID NOS: 13614-13618 |
| | member 11 | |
| TNFSF12 | Tumor necrosis factor (ligand) superfamily, | SEQ ID NOS: 13619-13620 |
| | member 12 | |
| TNFSF12- | TNFSF12-TNFSF13 readthrough | SEQ ID NO: 13621 |
| TNFSF13 | | |
| TNFSF15 | Tumor necrosis factor (ligand) superfamily, | SEQ ID NOS: 13622-13623 |
| | member 15 | |
| TNN | Tenascin N | SEQ ID NOS: 13624-13626 |
| TNR | Tenascin R | SEQ ID NOS: 13627-13629 |
| TNXB | Tenascin XB | SEQ ID NOS: 13630-13636 |
| FAM179B | Family with sequence similarity 179, member B | SEQ ID NOS: 13637-13642 |
| TOMM7 | Translocase of outer mitochondrial membrane 7 | SEQ ID NOS: 13643-13646 |
| | homolog (yeast) | |
| TOP1MT | Topoisomerase (DNA) I, mitochondrial | SEQ ID NOS: 13647-13661 |
| TOR1A | Torsin family 1, member A (torsin A) | SEQ ID NO: 13662 |
| TOR1B | Torsin family 1, member B (torsin B) | SEQ ID NOS: 13663-13664 |
| TOR2A | Torsin family 2, member A | SEQ ID NOS: 13665-13671 |
| TOR3A | Torsin family 3, member A | SEQ ID NOS: 13672-13676 |
| TPD52 | Tumor protein D52 | SEQ ID NOS: 13677-13689 |
| TPO | Thyroid peroxidase | SEQ ID NOS: 13690-13700 |
| TPP1 | Tripeptidyl peptidase I | SEQ ID NOS: 13701-13718 |
| TPSAB1 | Tryptase alpha/beta 1 | SEQ ID NOS: 13719-13721 |
| TPSB2 | Tryptase beta 2 (gene/pseudogene) | SEQ ID NOS: 13722-13724 |
| TPSD1 | Tryptase delta 1 | SEQ ID NOS: 13725-13726 |
| TPST1 | Tyrosylprotein sulfotransferase 1 | SEQ ID NOS: 13727-13729 |
| TPST2 | Tyrosylprotein sulfotransferase 2 | SEQ ID NOS: 13730-13738 |
| TRABD2A | TraB domain containing 2A | SEQ ID NOS: 13739-13741 |
| TRABD2B | TraB domain containing 2B | SEQ ID NO: 13742 |
| TREH | Trehalase (brush-border membrane glycoprotein) | SEQ ID NOS: 13743-13745 |
| TREM1 | Triggering receptor expressed on myeloid cells 1 | SEQ ID NOS: 13746-13749 |
| TREM2 | Triggering receptor expressed on myeloid cells 2 | SEQ ID NOS: 13750-13752 |
| TRH | Thyrotropin-releasing hormone | SEQ ID NOS: 13753-13754 |
| TRIM24 | Tripartite motif containing 24 | SEQ ID NOS: 13755-13756 |
| TRIM28 | Tripartite motif containing 28 | SEQ ID NOS: 13757-13762 |
| TRIO | Trio Rho guanine nucleotide exchange factor | SEQ ID NOS: 13763-13769 |
| TRNP1 | TMF1-regulated nuclear protein 1 | SEQ ID NOS: 13770-13771 |
| TSC22D4 | TSC22 domain family, member 4 | SEQ ID NOS: 13772-13775 |
| TSHB | Thyroid stimulating hormone, beta | SEQ ID NOS: 13776-13777 |
| TSHR | Thyroid stimulating hormone receptor | SEQ ID NOS: 13778-13785 |
| TSKU | Tsukushi, small leucine rich proteoglycan | SEQ ID NOS: 13786-13790 |
| TSLP | Thymic stromal lymphopoietin | SEQ ID NOS: 13791-13793 |
| TSPAN3 | Tetraspanin 3 | SEQ ID NOS: 13794-13799 |
| TSPAN31 | Tetraspanin 31 | SEQ ID NOS: 13800-13806 |
| TSPEAR | Thrombospondin-type laminin G domain and EAR | SEQ ID NOS: 13807-13810 |
| | repeats | |
| TTC13 | Tetratricopeptide repeat domain 13 | SEQ ID NOS: 13811-13817 |
| TTC19 | Tetratricopeptide repeat domain 19 | SEQ ID NOS: 13818-13823 |
| TTC9B | Tetratricopeptide repeat domain 9B | SEQ ID NO: 13824 |
| TTLL11 | Tubulin tyrosine ligase-like family member 11 | SEQ ID NOS: 13825-13829 |
| TTR | Transthyretin | SEQ ID NOS: 13830-13832 |
| TWSG1 | Twisted gastrulation BMP signaling modulator 1 | SEQ ID NOS: 13833-13835 |
| TXNDC12 | Thioredoxin domain containing 12 (endoplasmic | SEQ ID NOS: 13836-13838 |
| | reticulum) | |
| TXNDC15 | Thioredoxin domain containing 15 | SEQ ID NOS: 13839-13845 |
| TXNDC5 | Thioredoxin domain containing 5 (endoplasmic | SEQ ID NOS: 13846-13847 |
| | reticulum) | |
| TXNRD2 | Thioredoxin reductase 2 | SEQ ID NOS: 13848-13860 |
| TYRP1 | Tyrosinase-related protein 1 | SEQ ID NOS: 13861-13863 |
| UBAC2 | UBA domain containing 2 | SEQ ID NOS: 13864-13868 |
| UBALD1 | UBA-like domain containing 1 | SEQ ID NOS: 13869-13877 |
| UBAP2 | Ubiquitin associated protein 2 | SEQ ID NOS: 13878-13884 |
| UBXN8 | UBX domain protein 8 | SEQ ID NOS: 13885-13891 |
| UCMA | Upper zone of growth plate and cartilage matrix | SEQ ID NOS: 13892-13893 |
| | associated | |
| UCN | Urocortin | SEQ ID NO: 13894 |
| UCN2 | Urocortin 2 | SEQ ID NO: 13895 |
| UCN3 | Urocortin 3 | SEQ ID NO: 13896 |
| UGGT2 | UDP-glucose glycoprotein glucosyltransferase 2 | SEQ ID NOS: 13897-13902 |
| UGT1A10 | UDP glucuronosyltransferase 1 family, polypeptide | SEQ ID NOS: 13903-13904 |
| | A10 | |
| UGT2A1 | UDP glucuronosyltransferase 2 family, polypeptide | SEQ ID NOS: 13905-13909 |
| | A1, complex locus | |
| UGT2B11 | UDP glucuronosyltransferase 2 family, polypeptide | SEQ ID NO: 13910 |
| | B11 | |
| UGT2B28 | UDP glucuronosyltransferase 2 family, polypeptide | SEQ ID NOS: 13911-13912 |
| | B28 | |
| UGT2B4 | UDP glucuronosyltransferase 2 family, polypeptide | SEQ ID NOS: 13913-13916 |
| | B4 | |
| UGT2B7 | UDP glucuronosyltransferase 2 family, polypeptide | SEQ ID NOS: 13917-13920 |
| | B7 | |
| UGT3A1 | UDP glycosyltransferase 3 family, polypeptide A1 | SEQ ID NOS: 13921-13926 |
| UGT3A2 | UDP glycosyltransferase 3 family, polypeptide A2 | SEQ ID NOS: 13927-13930 |
| UGT8 | UDP glycosyltransferase 8 | SEQ ID NOS: 13931-13933 |
| ULBP3 | UL16 binding protein 3 | SEQ ID NOS: 13934-13935 |
| UMOD | Uromodulin | SEQ ID NOS: 13936-13947 |
| UNC5C | Unc-5 netrin receptor C | SEQ ID NOS: 13948-13952 |
| UPK3B | Uroplakin 3B | SEQ ID NOS: 13953-13955 |
| USP11 | Ubiquitin specific peptidase 11 | SEQ ID NOS: 13956-13959 |
| USP14 | Ubiquitin specific peptidase 14 (tRNA-guanine | SEQ ID NOS: 13960-13966 |
| | transglycosylase) | |
| USP3 | Ubiquitin specific peptidase 3 | SEQ ID NOS: 13967-13982 |
| CIRH1A | Cirrhosis, autosomal recessive 1A (cirhin) | SEQ ID NOS: 13983-13992 |
| UTS2 | Urotensin 2 | SEQ ID NOS: 13993-13995 |
| UTS2B | Urotensin 2B | SEQ ID NOS: 13996-14001 |
| UTY | Ubiquitously transcribed tetratricopeptide repeat | SEQ ID NOS: 14002-14014 |
| | containing, Y-linked | |
| UXS1 | UDP-glucuronate decarboxylase 1 | SEQ ID NOS: 14015-14022 |
| VASH1 | Vasohibin 1 | SEQ ID NOS: 14023-14025 |
| VCAN | Versican | SEQ ID NOS: 14026-14032 |
| VEGFA | Vascular endothelial growth factor A | SEQ ID NOS: 14033-14058 |
| VEGFB | Vascular endothelial growth factor B | SEQ ID NOS: 14059-14061 |
| VEGFC | Vascular endothelial growth factor C | SEQ ID NO: 14062 |
| FIGF | C-fos induced growth factor (vascular endothelial | SEQ ID NO: 14063 |
| | growth factor D) | |
| VGF | VGF nerve growth factor inducible | SEQ ID NOS: 14064-14066 |
| VIP | Vasoactive intestinal peptide | SEQ ID NOS: 14067-14069 |
| VIPR2 | Vasoactive intestinal peptide receptor 2 | SEQ ID NOS: 14070-14073 |
| VIT | Vitrin | SEQ ID NOS: 14074-14081 |
| VKORC1 | Vitamin K epoxide reductase complex, subunit 1 | SEQ ID NOS: 14082-14089 |
| VLDLR | Very low density lipoprotein receptor | SEQ ID NOS: 14090-14092 |
| VMO1 | Vitelline membrane outer layer 1 homolog (chicken) | SEQ ID NOS: 14093-14096 |
| VNN1 | Vanin 1 | SEQ ID NO: 14097 |
| VNN2 | Vanin 2 | SEQ ID NOS: 14098-14111 |
| VNN3 | Vanin 3 | SEQ ID NOS: 14112-14123 |
| VOPP1 | Vesicular, overexpressed in cancer, prosurvival | SEQ ID NOS: 14124-14136 |
| | protein 1 | |
| VPREB1 | Pre-B lymphocyte 1 | SEQ ID NOS: 14137-14138 |
| VPREB3 | Pre-B lymphocyte 3 | SEQ ID NOS: 14139-14140 |
| VPS37B | Vacuolar protein sorting 37 homolog B (S. cerevisiae) | SEQ ID NOS: 14141-14143 |
| VPS51 | Vacuolar protein sorting 51 homolog (S. cerevisiae) | SEQ ID NOS: 14144-14155 |
| VSIG1 | V-set and immunoglobulin domain containing 1 | SEQ ID NOS: 14156-14158 |
| VSIG10 | V-set and immunoglobulin domain containing 10 | SEQ ID NOS: 14159-14160 |
| VSTM1 | V-set and transmembrane domain containing 1 | SEQ ID NOS: 14161-14167 |
| VSTM2A | V-set and transmembrane domain containing 2A | SEQ ID NOS: 14168-14171 |
| VSTM2B | V-set and transmembrane domain containing 2B | SEQ ID NO: 14172 |
| VSTM2L | V-set and transmembrane domain containing 2 like | SEQ ID NOS: 14173-14175 |
| VSTM4 | V-set and transmembrane domain containing 4 | SEQ ID NOS: 14176-14177 |
| VTN | Vitronectin | SEQ ID NOS: 14178-14179 |
| VWA1 | Von Willebrand factor A domain containing 1 | SEQ ID NOS: 14180-14183 |
| VWA2 | Von Willebrand factor A domain containing 2 | SEQ ID NOS: 14184-14185 |
| VWA5B2 | Von Willebrand factor A domain containing 5B2 | SEQ ID NOS: 14186-14187 |
| VWA7 | Von Willebrand factor A domain containing 7 | SEQ ID NO: 14188 |
| VWC2 | Von Willebrand factor C domain containing 2 | SEQ ID NO: 14189 |
| VWC2L | Von Willebrand factor C domain containing protein | SEQ ID NOS: 14190-14191 |
| | 2-like | |
| VWCE | Von Willebrand factor C and EGF domains | SEQ ID NOS: 14192-14196 |
| VWDE | Von Willebrand factor D and EGF domains | SEQ ID NOS: 14197-14202 |
| VWF | Von Willebrand factor | SEQ ID NOS: 14203-14205 |
| WDR25 | WD repeat domain 25 | SEQ ID NOS: 14206-14212 |
| WDR81 | WD repeat domain 81 | SEQ ID NOS: 14213-14222 |
| WDR90 | WD repeat domain 90 | SEQ ID NOS: 14223-14230 |
| WFDC1 | WAP four-disulfide core domain 1 | SEQ ID NOS: 14231-14233 |
| WFDC10A | WAP four-disulfide core domain 10A | SEQ ID NO: 14234 |
| WFDC10B | WAP four-disulfide core domain 10B | SEQ ID NOS: 14235-14236 |
| WFDC11 | WAP four-disulfide core domain 11 | SEQ ID NOS: 14237-14239 |
| WFDC12 | WAP four-disulfide core domain 12 | SEQ ID NO: 14240 |
| WFDC13 | WAP four-disulfide core domain 13 | SEQ ID NO: 14241 |
| WFDC2 | WAP four-disulfide core domain 2 | SEQ ID NOS: 14242-14246 |
| WFDC3 | WAP four-disulfide core domain 3 | SEQ ID NOS: 14247-14250 |
| WFDC5 | WAP four-disulfide core domain 5 | SEQ ID NOS: 14251-14252 |
| WFDC6 | WAP four-disulfide core domain 6 | SEQ ID NOS: 14253-14254 |
| WFDC8 | WAP four-disulfide core domain 8 | SEQ ID NOS: 14255-14256 |
| WFIKKN1 | WAP, follistatin/kazal, immunoglobulin, kunitz and | SEQ ID NO: 14257 |
| | netrin domain containing 1 | |
| WFIKKN2 | WAP, follistatin/kazal, immunoglobulin, kunitz and | SEQ ID NOS: 14258-14259 |
| | netrin domain containing 2 | |
| DFNB31 | Deafness, autosomal recessive 31 | SEQ ID NOS: 14260-14263 |
| WIF1 | WNT inhibitory factor 1 | SEQ ID NOS: 14264-14266 |
| WISP1 | WNT1 inducible signaling pathway protein 1 | SEQ ID NOS: 14267-14271 |
| WISP2 | WNT1 inducible signaling pathway protein 2 | SEQ ID NOS: 14272-14274 |
| WISP3 | WNT1 inducible signaling pathway protein 3 | SEQ ID NOS: 14275-14282 |
| WNK1 | WNK lysine deficient protein kinase 1 | SEQ ID NOS: 14283-14296 |
| WNT1 | Wingless-type MMTV integration site family, | SEQ ID NOS: 14297-14298 |
| | member 1 | |
| WNT10B | Wingless-type MMTV integration site family, | SEQ ID NOS: 14299-14303 |
| | member 10B | |
| WNT11 | Wingless-type MMTV integration site family, | SEQ ID NOS: 14304-14306 |
| | member 11 | |
| WNT16 | Wingless-type MMTV integration site family, | SEQ ID NOS: 14307-14308 |
| | member 16 | |
| WNT2 | Wingless-type MMTV integration site family | SEQ ID NOS: 14309-14311 |
| | member 2 | |
| WNT3 | Wingless-type MMTV integration site family, | SEQ ID NO: 14312 |
| | member 3 | |
| WNT3A | Wingless-type MMTV integration site family, | SEQ ID NO: 14313 |
| | member 3A | |
| WNT5A | Wingless-type MMTV integration site family, | SEQ ID NOS: 14314-14317 |
| | member 5A | |
| WNT5B | Wingless-type MMTV integration site family, | SEQ ID NOS: 14318-14324 |
| | member 5B | |
| WNT6 | Wingless-type MMTV integration site family, | SEQ ID NO: 14325 |
| | member 6 | |
| WNT7A | Wingless-type MMTV integration site family, | SEQ ID NO: 14326 |
| | member 7A | |
| WNT7B | Wingless-type MMTV integration site family, | SEQ ID NOS: 14327-14331 |
| | member 7B | |
| WNT8A | Wingless-type MMTV integration site family, | SEQ ID NOS: 14332-14335 |
| | member 8A | |
| WNT8B | Wingless-type MMTV integration site family, | SEQ ID NO: 14336 |
| | member 8B | |
| WNT9A | Wingless-type MMTV integration site family, | SEQ ID NO: 14337 |
| | member 9A | |
| WNT9B | Wingless-type MMTV integration site family, | SEQ ID NOS: 14338-14340 |
| | member 9B | |
| WSB1 | WD repeat and SOCS box containing 1 | SEQ ID NOS: 14341-14350 |
| WSCD1 | WSC domain containing 1 | SEQ ID NOS: 14351-14360 |
| WSCD2 | WSC domain containing 2 | SEQ ID NOS: 14361-14364 |
| XCL1 | Chemokine (C motif) ligand 1 | SEQ ID NO: 14365 |
| XCL2 | Chemokine (C motif) ligand 2 | SEQ ID NO: 14366 |
| XPNPEP2 | X-prolyl aminopeptidase (aminopeptidase P) 2, | SEQ ID NOS: 14367-14368 |
| | membrane-bound | |
| XXYLT1 | Xyloside xylosyltransferase 1 | SEQ ID NOS: 14369-14374 |
| XYLT1 | Xylosyltransferase I | SEQ ID NO: 14375 |
| XYLT2 | Xylosyltransferase II | SEQ ID NOS: 14376-14381 |
| ZFYVE21 | Zinc finger, FYVE domain containing 21 | SEQ ID NOS: 14382-14386 |
| ZG16 | Zymogen granule protein 16 | SEQ ID NO: 14387 |
| ZG16B | Zymogen granule protein 16B | SEQ ID NOS: 14388-14391 |
| ZIC4 | Zic family member 4 | SEQ ID NOS: 14392-14400 |
| ZNF207 | Zinc finger protein 207 | SEQ ID NOS: 14401-14411 |
| ZNF26 | Zinc finger protein 26 | SEQ ID NOS: 14412-14415 |
| ZNF34 | Zinc finger protein 34 | SEQ ID NOS: 14416-14419 |
| ZNF419 | Zinc finger protein 419 | SEQ ID NOS: 14420-14434 |
| ZNF433 | Zinc finger protein 433 | SEQ ID NOS: 14435-14444 |
| ZNF449 | Zinc finger protein 449 | SEQ ID NOS: 14445-14446 |
| ZNF488 | Zinc finger protein 488 | SEQ ID NOS: 14447-14448 |
| ZNF511 | Zinc finger protein 511 | SEQ ID NOS: 14449-14450 |
| ZNF570 | Zinc finger protein 570 | SEQ ID NOS: 14451-14456 |
| ZNF691 | Zinc finger protein 691 | SEQ ID NOS: 14457-14464 |
| ZNF98 | Zinc finger protein 98 | SEQ ID NOS: 14465-14468 |
| ZPBP | Zona pellucida binding protein | SEQ ID NOS: 14469-14472 |
| ZPBP2 | Zona pellucida binding protein 2 | SEQ ID NOS: 14473-14476 |
| ZSCAN29 | Zinc finger and SCAN domain containing 29 | SEQ ID NOS: 14477-14483 |

[0412] In certain embodiments, the therapeutic protein is not secreted, but rather functions intracellularly.

[0413] In certain embodiments, the therapeutic protein is not secreted, but rather directs a modified cell of the disclosure to a cell niche of a subject's body.

[0414] In certain embodiments of the methods of the disclosure, the subject has a disease or disorder and the plurality of therapeutic immune cells or immune precursor cells improves a sign or symptom of the disease or disorder, optionally by providing a therapeutic protein systemically or locally within the subject that acts upon the immune cell, the immune precursor cell or a second cell in the subject. Exemplary therapeutic secreted proteins may be used as a monotherapy or in combination with another therapy in the treatment or prevention of any disease or disorder. These secreted proteins may be used as a monotherapy or in combination with another therapy for enzyme replacement and/or administration of biologic therapeutics.

### Inducible Proapoptotic Polypeptides

[0415] Inducible proapoptotic polypeptides of the disclosure are superior to existing inducible polypeptides because the inducible proapoptotic polypeptides of the disclosure are far less immunogenic. While inducible proapoptotic polypeptides of the disclosure are recombinant polypeptides, and, therefore, non-naturally occurring, the sequences that are recombined to produce the inducible proapoptotic polypeptides of the disclosure do not comprise non-human sequences that the host human immune system could recognize as “non-self” and, consequently, induce an immune response in the subject receiving an inducible proapoptotic polypeptide of the disclosure, a cell comprising the inducible proapoptotic polypeptide or a composition comprising the inducible proapoptotic polypeptide or the cell comprising the inducible proapoptotic polypeptide.

[0416] Modified cells and/or transposons of the disclosure may comprise an inducible proapoptotic polypeptide comprising (a) a ligand binding region, (b) a linker, and (c) a proapoptotic polypeptide, wherein the inducible proapoptotic polypeptide does not comprise a non-human sequence. In certain embodiments, the non-human sequence comprises a restriction site. In certain embodiments, the ligand binding region may be a multimeric ligand binding region. Inducible proapoptotic polypeptides of the disclosure may also be referred to as an “iC9 safety switch”. In certain embodiments, modified cells and/or transposons of the disclosure may comprise an inducible caspase polypeptide comprising (a) a ligand binding region, (b) a linker, and (c) a caspase polypeptide, wherein the inducible proapoptotic polypeptide does not comprise a non-human sequence. In certain embodiments, modified cells and/or transposons of the disclosure may comprise an inducible caspase polypeptide comprising (a) a ligand binding region, (b) a linker, and (c) a caspase polypeptide, wherein the inducible proapoptotic polypeptide does not comprise a non-human sequence. In certain embodiments, transposons of the disclosure may comprise an inducible caspase polypeptide comprising (a) a ligand binding region, (b) a linker, and (c) a truncated caspase 9 polypeptide, wherein the inducible proapoptotic polypeptide does not comprise a non-human sequence. In certain embodiments of the inducible proapoptotic polypeptides, inducible caspase polypeptides or truncated caspase 9 polypeptides of the disclosure, the ligand binding region may comprise a FK506 binding protein 12 (FKBP12) polypeptide. In certain embodiments, the amino acid sequence of the ligand binding region that comprise a FK506 binding protein 12 (FKBP12) polypeptide may comprise a modification at position 36 of the sequence. The modification may be a substitution of valine (V) for phenylalanine (F) at position 36 (F36V).

[0417] In certain embodiments, the FKBP12 polypeptide is encoded by an amino acid sequence comprising

(SEQ ID NO: 14635)
GVQVETISPGDGRTFPKRGQTCVVHYTGMLEDGKKVDSSRDRNKPFKF
MLGKQEVIRGWEEGVAQMSVGQRAKLTISPDVAYGATGHPGIIPPHAT
LVFDVELLKLE.

[0418] In certain embodiments, the FKBP12 polypeptide is encoded by a nucleic acid sequence comprising

(SEQ ID NO: 14636)
GGGGTCCAGGTCGAGACTATTTCACCAGGGGATGGGCGAACATTTCCA
AAAAGGGGCCAGACTTGCGTCGTGCATTACACCGGGATGCTGGAGGAC
GGGAAGAAAGTGGACAGCTCCAGGGATCGCAACAAGCCCTTCAAGTTC
ATGCTGGGAAAGCAGGAAGTGATCCGAGGATGGGAGGAAGGCGTGGCA
CAGATGTCAGTCGGCCAGCGGGCCAAACTGACCATTAGCCCTGACTAC
GCTTATGGAGCAACAGGCCACCCAGGGATCATTCCCCCTCATGCCACC
CTGGTCTTCGATGTGGAACTGCTGAAGCTGGAG.

In certain embodiments, the induction agent specific for the ligand binding region may comprise a FK506 binding protein 12 (FKBP12) polypeptide having a substitution of valine (V) for phenylalanine (F) at position 36 (F36V) comprises AP20187 and/or AP1903, both synthetic drugs.

[0419] In certain embodiments of the inducible proapoptotic polypeptides, inducible caspase polypeptides or truncated caspase 9 polypeptides of the disclosure, the linker region is encoded by an amino acid comprising GGGGS (SEQ ID NO: 14637) or a nucleic acid sequence comprising GGAGGAGGAGGATCC (SEQ ID NO: 14638). In certain embodiments, the nucleic acid sequence encoding the linker does not comprise a restriction site.

[0420] In certain embodiments of the truncated caspase 9 polypeptides of the disclosure, the truncated caspase 9 polypeptide is encoded by an amino acid sequence that does not comprise an arginine (R) at position 87 of the sequence. Alternatively, or in addition, in certain embodiments of the inducible proapoptotic polypeptides, inducible caspase polypeptides or truncated caspase 9 polypeptides of the disclosure, the truncated caspase 9 polypeptide is encoded by an amino acid sequence that does not comprise an alanine (A) at position 282 the sequence. In certain embodiments of the inducible proapoptotic polypeptides, inducible caspase polypeptides or truncated caspase 9 polypeptides of the disclosure, the truncated caspase 9 polypeptide is encoded by an amino acid comprising

(SEQ ID NO: 14639)
GFGDVGALESLRGNADLAYILSMEPCGHCLIINNVNFCRESGLRTRTG
SNIDCEKLRRRFSSLHFMVEVKGDLTAKKMVLALLELAQQDHGALDCC
VVVILSHGCQASHLQFPGAVYGTDGCPVSVEKIVNIFNGTSCPSLGGK
PKLFFIQACGGEQKDHGFEVASTSPEDESPGSNPEPDATPFQEGLRTF
DQLDAISSLPTPSDIFVSYSTFPGFVSWRDPKSGSWYVETLDDIFEQW
AHSEDLQSLLLRVANAVSVKGIYKQMPGCFNFLRKKLFFKTS
or a nucleic acid sequence comprising
(SEQ ID NO: 14640)
TTTGGGGACGTGGGGGCCCTGGAGTCTCTGCGAGGAAATGCCGATCTG
GCTTACATCCTGAGCATGGAACCCTGCGGCCACTGTCTGATCATTAAC
AATGTGAACTTCTGCAGAGAAAGCGGACTGCGAACACGGACTGGCTCC
AATATTGACTGTGAGAAGCTGCGGAGAAGGTTCTCTAGTCTGCACTTT
ATGGTCGAAGTGAAAGGGGATCTGACCGCCAAGAAAATGGTGCTGGCC
CTGCTGGAGCTGGCTCAGCAGGACCATGGAGCTCTGGATTGCTGCGTG
GTCGTGATCCTGTCCCACGGGTGCCAGGCTTCTCATCTGCAGTTCCCC
GGAGCAGTGTACGGAACAGACGGCTGTCCTGTCAGCGTGGAGAAGATC
GTCAACATCTTCAACGGCACTTCTTGCCCTAGTCTGGGGGGAAAGCCA
AAACTGTTCTTTATCCAGGCCTGTGGCGGGGAACAGAAAGATCACGGC
TTCGAGGTGGCCAGCACCAGCCCTGAGGACGAATCACCAGGGAGCAAC
CCTGAACCAGATGCAACTCCATTCCAGGAGGGACTGAGGACCTTTGAC
CAGCTGGATGCTATCTCAAGCCTGCCCACTCCTAGTGACATTTTCGTG
TCTTACAGTACCTTCCCAGGCTTTGTCTCATGGCGCGATCCCAAGTCA
GGGAGCTGGTACGTGGAGACACTGGACGACATCTTTGAACAGTGGGCC
CATTCAGAGGACCTGCAGAGCCTGCTGCTGCGAGTGGCAAACGCTGTC
TCTGTGAAGGGCATCTACAAACAGATGCCCGGGTGCTTCAATTTTCTG
AGAAAGAAACTGTTCTTTAAGACTTCC.

[0421] In certain embodiments of the inducible proapoptotic polypeptides, wherein the polypeptide comprises a truncated caspase 9 polypeptide, the inducible proapoptotic polypeptide is encoded by an amino acid sequence comprising

(SEQ ID NO: 14641)
GVQVETISPGDGRTFPKRGQTCVVHYTGMLEDGKKVDSSRDRNKPFKF
MLGKQEVIRGWEEGVAQMSVGQRAKLTISPDVAYGATGHPGIIPPHAT
LVFDVELLKLEGGGGSGFGDVGALESLRGNADLAYILSMEPCGHCLII
NNVNFCRESGLRTRTGSNIDCEKLRRRFSSLHFMVEVKGDLTAKKMVL
ALLELAQQDHGALDCCVVVILSHGCQASHLQFPGAVYGTDGCPVSVEK
IVNIFNGTSCPSLGGKPKLFFIQACGGEQKDHGFEVASTSPEDESPGS
NPEPDATPFQEGLRTFDQLDAIS SLPTP SDIFVSYSTFPGFVSWRD
PKSGSWYVETLDDIFEQWAHSEDLQSLLLRVANAVSVKGIYKQMPGCF
NFLRKKLFFKTS
or the nucleic acid sequence comprising
(SEQ ID NO: 14642)
ggggtccaggtcgagactatttcaccaggggatgggcgaacatttcca
aaaaggggccagacttgcgtcgtgcattacaccgggatgctggaggac
gggaagaaagtggacagctccagggatcgcaacaagcccttcaagttc
atgctgggaaagcaggaagtgatccgaggatgggaggaaggcgtggca
cagatgtcagtcggccagcgggccaaactgaccattagccctgactac
gcttatggagcaacaggccacccagggatcattccccctcatgccacc
ctggtcttcgatgtggaactgctgaagctggagggaggaggaggatcc
ggatttggggacgtgggggccctggagtctctgcgaggaaatgccgat
ctggcttacatcctgagcatggaaccctgcggccactgtctgatcatt
aacaatgtgaacttctgcagagaaagcggactgcgaacacggactggc
tccaatattgactgtgagaagctgcggagaaggttctctagtctgcac
tttatggtcgaagtgaaaggggatctgaccgccaagaaaatggtgctg
gccctgctggagctggctcagcaggaccatggagctctggattgctgc
gtggtcgtgatcctgtcccacgggtgccaggcttctcatctgcagttc
cccggagcagtgtacggaacagacggctgtcctgtcagcgtggagaag
atcgtcaacatcttcaacggcacttcttgccctagtctggggggaaag
ccaaaactgttctttatccaggcctgtggcggggaacagaaagatcac
ggcttcgaggtggccagcaccagccctgaggacgaatcaccagggagc
aaccctgaaccagatgcaactccattccaggagggactgaggaccttt
gaccagctggatgctatctcaagcctgcccactcctagtgacattttc
gtgtcttacagtaccttcccaggctttgtctcatggcgcgatcccaag
tcagggagctggtacgtggagacactggacgacatctttgaacagtgg
gcccattcagaggacctgcagagcctgctgctgcgagtggcaaacgct
gtctctgtgaagggcatctacaaacagatgcccgggtgcttcaattac
tgagaaagaaactgttctttaagacttcc.

### Construct Elements

[0422] Transposons and other delivery vectors of the disclosure may comprise at least one self-cleaving peptide(s) located, for example, between one or more of a sequence encoding an inducible proapoptotic polypeptide of the disclosure, a sequence encoding a therapeutic protein of the disclosure and a selection gene of the disclosure.

[0423] Transposons and other delivery vectorsof the disclosure may comprise at least two self-cleaving peptide(s), a first self-cleaving peptide located, for example, upstream or immediately upstream of an inducible proapoptotic polypeptide of the disclosure of the disclosure and a second first self-cleaving peptide located, for example, downstream or immediately upstream of an inducible proapoptotic polypeptide of the disclosure of the disclosure.

[0424] The at least one self-cleaving peptide may comprise, for example, a T2A peptide, GSG-T2A peptide, an E2A peptide, a GSG-E2A peptide, an F2A peptide, a GSG-F2A peptide, a P2A peptide, or a GSG-P2A peptide. A T2A peptide may comprise an amino acid sequence comprising EGRGSLLTCGDVEENPGP (SEQ ID NO: 14643) or a sequence having at least 70%, 80%, 90%, 95%, or 99% identity to the amino acid sequence comprising EGRGSLLTCGDVEENPGP (SEQ ID NO: 14643). A GSG-T2A peptide may comprise an amino acid sequence comprising GSGEGRGSLLTCGDVEENPGP (SEQ ID NO: 14644) or a sequence having at least 70%, 80%, 90%, 95%, or 99% identity to the amino acid sequence comprising GSGEGRGSLLTCGDVEENPGP (SEQ ID NO: 14644). A GSG-T2A peptide may comprise a nucleic acid sequence comprising

(SEQ ID NO: 14645)
ggatctggagagggaaggggaagcctgctgacctgtggagacgtggagg
aaaacccaggacca.

An E2A peptide may comprise an amino acid sequence comprising QCTNYALLKLAGDVESNPGP (SEQ ID NO: 14646) or a sequence having at least 70%, 80%, 90%, 95%, or 99% identity to the amino acid sequence comprising QCTNYALLKLAGDVESNPGP (SEQ ID NO: 14646). A GSG-E2A peptide may comprise an amino acid sequence comprising GSGQCTNYALLKLAGDVESNPGP (SEQ ID NO: 14647) or a sequence having at least 70%, 80%, 90%, 95%, or 99% identity to the amino acid sequence comprising GSGQCTNYALLKLAGDVESNPGP (SEQ ID NO: 14647). An F2A peptide may comprise an amino acid sequence comprising VKQTLNFDLLKLAGDVESNPGP (SEQ ID NO: 14648) or a sequence having at least 70%, 80%, 90%, 95%, or 99% identity to the amino acid sequence comprising VKQTLNFDLLKLAGDVESNPGP (SEQ ID NO: 14648). A GSG-F2A peptide may comprise an amino acid sequence comprising GSGVKQTLNFDLLKLAGDVESNPGP (SEQ ID NO: 14649) or a sequence having at least 70%, 80%, 90%, 95%, or 99% identity to the amino acid sequence comprising GSGVKQTLNFDLLKLAGDVESNPGP (SEQ ID NO: 14649). A P2A peptide may comprise an amino acid sequence comprising ATNFSLLKQAGDVEENPGP (SEQ ID NO: 14650) or a sequence having at least 70%, 80%, 90%, 95%, or 99% identity to the amino acid sequence comprising ATNFSLLKQAGDVEENPGP (SEQ ID NO: 14650). A GSG-P2A peptide may comprise an amino acid sequence comprising GSGATNFSLLKQAGDVEENPGP (SEQ ID NO: 14651) or a sequence having at least 70%, 80%, 90%, 95%, or 99% identity to the amino acid sequence comprising GSGATNFSLLKQAGDVEENPGP (SEQ ID NO: 14651).

[0425] Transposons and other delivery vectors of the disclosure may comprise a first and a second self-cleaving peptide, the first self-cleaving peptide located, for example, upstream of one or more of a sequence encoding a therapeutic protein of the disclosure the second self-cleaving peptide located, for example, downstream of a sequence encoding a therapeutic protein of the disclosure. The first and/or the second self-cleaving peptide may comprise, for example, a T2A peptide, GSG-T2A peptide, an E2A peptide, a GSG-E2A peptide, an F2A peptide, a GSG-F2A peptide, a P2A peptide, or a GSG-P2A peptide. A T2A peptide may comprise an amino acid sequence comprising EGRGSLLTCGDVEENPGP (SEQ ID NO: 14643) or a sequence having at least 70%, 80%, 90%, 95%, or 99% identity to the amino acid sequence comprising EGRGSLLTCGDVEENPGP (SEQ ID NO: 14643). A GSG-T2A peptide may comprise an amino acid sequence comprising GSGEGRGSLLTCGDVEENPGP (SEQ ID NO: 14644) or a sequence having at least 70%, 80%, 90%, 95%, or 99% identity to the amino acid sequence comprising GSGEGRGSLLTCGDVEENPGP (SEQ ID NO: 14644). A GSG-T2A peptide may comprise a nucleic acid sequence comprising

(SEQ ID NO: 14645)
ggatctggagagggaaggggaagcctgctgacctgtggagacgtggagg
aaaacccaggacca.

An E2A peptide may comprise an amino acid sequence comprising QCTNYALLKLAGDVESNPGP (SEQ ID NO: 14646) or a sequence having at least 70%, 80%, 90%, 95%, or 99% identity to the amino acid sequence comprising QCTNYALLKLAGDVESNPGP (SEQ ID NO: 14646). A GSG-E2A peptide may comprise an amino acid sequence comprising GSGQCTNYALLKLAGDVESNPGP (SEQ ID NO: 14647) or a sequence having at least 70%, 80%, 90%, 95%, or 99% identity to the amino acid sequence comprising GSGQCTNYALLKLAGDVESNPGP (SEQ ID NO: 14647). An F2A peptide may comprise an amino acid sequence comprising VKQTLNFDLLKLAGDVESNPGP (SEQ ID NO: 14648) or a sequence having at least 70%, 80%, 90%, 95%, or 99% identity to the amino acid sequence comprising VKQTLNFDLLKLAGDVESNPGP (SEQ ID NO: 14648). A GSG-F2A peptide may comprise an amino acid sequence comprising GSGVKQTLNFDLLKLAGDVESNPGP (SEQ ID NO: 14649) or a sequence having at least 70%, 80%, 90%, 95%, or 99% identity to the amino acid sequence comprising GSGVKQTLNFDLLKLAGDVESNPGP (SEQ ID NO: 14649). A P2A peptide may comprise an amino acid sequence comprising ATNFSLLKQAGDVEENPGP (SEQ ID NO: 14650) or a sequence having at least 70%, 80%, 90%, 95%, or 99% identity to the amino acid sequence comprising ATNFSLLKQAGDVEENPGP (SEQ ID NO: 14650). A GSG-P2A peptide may comprise an amino acid sequence comprising GSGATNFSLLKQAGDVEENPGP (SEQ ID NO: 14651) or a sequence having at least 70%, 80%, 90%, 95%, or 99% identity to the amino acid sequence comprising GSGATNFSLLKQAGDVEENPGP (SEQ ID NO: 14651).

[0426] Transposons of the disclosure may comprise a selection gene. The selection gene may encode a gene product essential for cell viability and survival. The selection gene may encode a gene product essential for cell viability and survival when challenged by selective cell culture conditions. Selective cell culture conditions may comprise a compound harmful to cell viability or survival and wherein the gene product confers resistance to the compound.

[0427] By “stable transformation” is intended that the polynucleotide construct introduced into a cell integrates into the genome of the host and is capable of being inherited by progeny thereof.

[0428] By “transient transformation” is intended that a polynucleotide construct introduced into the host does not integrate into the genome of the host.

[0429] All percentages and ratios are calculated based on the total composition unless otherwise indicated.

[0430] Every maximum numerical limitation given throughout this disclosure includes every lower numerical limitation, as if such lower numerical limitations were expressly written herein. Every minimum numerical limitation given throughout this disclosure will include every higher numerical limitation, as if such higher numerical limitations were expressly written herein. Every numerical range given throughout this disclosure will include every narrower numerical range that falls within such broader numerical range, as if such narrower numerical ranges were all expressly written herein.

[0431] The values disclosed herein are not to be understood as being strictly limited to the exact numerical values recited. Instead, unless otherwise specified, each such value is intended to mean both the recited value and a functionally equivalent range surrounding that value. For example, a value disclosed as “20 μm” is intended to mean “about 20 μm.”

[0432] Every document cited herein, including any cross referenced or related patent or application, is hereby incorporated herein by reference in its entirety unless expressly excluded or otherwise limited. The citation of any document is not an admission that it is prior art with respect to any invention disclosed or claimed herein or that it alone, or in any combination with any other reference or references, teaches, suggests or discloses any such invention. Further, to the extent that any meaning or definition of a term in this document conflicts with any meaning or definition of the same term in a document incorporated by reference, the meaning or definition assigned to that term in this document shall govern.

[0433] While particular embodiments of the disclosure have been illustrated and described, various other changes and modifications can be made without departing from the spirit and scope of the disclosure. The scope of the appended claims includes all such changes and modifications that are within the scope of this disclosure.

### EXAMPLES

[0434] In order that the invention disclosed herein may be more efficiently understood, examples are provided below. It should be understood that these examples are for illustrative purposes only and are not to be construed as limiting the invention in any manner. Throughout these examples, molecular cloning reactions, and other standard recombinant DNA techniques, were carried out according to methods described in Maniatis et al., Molecular Cloning—A Laboratory Manual, 2nd ed., Cold Spring Harbor Press (1989), using commercially available reagents, except where otherwise noted.

### Example 1: Ex Vivo Genetic Modification of T Cells

[0435] The piggyBac™ (PB) transposon system was used for genetically modifying human lymphocytes for production of autologous CAR-T immunotherapies and other applications. T Lymphocytes purified from patient blood or apheresis product was electroporated with a plasmid DNA transposon and a transposase. Several different electroporation systems have been used for T cell delivery of the transposon system, including the Neon (Thermo Fisher), BTX ECM 830 (Harvard Apparatus), Gene Pulser (BioRad), MaxCyte PulseAgile (MaxCyte), and the Amaxa 2B and Amaxa 4D (Lonza). Some were tested using manufacturer provided or recommended electroporation buffer, as well as several in-house developed buffers. Results were consistent with the prevailing dogma that resting T lymphocytes are particularly refractory to DNA transfection and that there appeared to be an inverse relationship between electroporation efficiency, as measured by GFP expression from the electroporated plasmid, and cell viability. FIG. 1 shows an example of an experiment testing multiple electroporation systems and nucleofection programs.

[0436] To further test whether or not plasmid DNA was toxic to T cells during nucleofection, primary human T lymphocytes were electroporated with two different DNA plasmids. The first plasmid was a pmaxGFP™ plasmid that is provided as a control plasmid in the Lonza Amaxa nucleofection kit. It is highly purified by HPLC and does not contain endotoxin at detectable levels. The second plasmid was our in-house produced PB transposon encoding a human EF1 alpha promoter driving GFP. Transfection efficiency, as measured by GFP expression from the electroporated plasmid, and cell viability was assessed by FACS at days 2, 3, and 6 post-electroporation. Data are displayed in FIG. 2. While mock electroporated cells (no plasmid DNA) exhibited relatively high levels of cell viability by day 6 post-electroporation, 54%, T cells electroporated with either plasmid were only 1.4-2.6% viable. These data show that plasmid DNA was cytotoxic to T lymphocytes. In addition, these data show that DNA-mediated toxicity was not due to transposon element such as the ITR regions or the core insulators since the pmaxGFP™ plasmid are devoid of these elements and was also cytotoxic at the same DNA concentration. Both plasmids are approximately the same size, meaning that similar amounts of DNA were electroporated into the T cells.

[0437] To test whether or not DNA-mediated toxicity in T cells was dose dependent, we performed a titration of our PB-GFP plasmid. FIG. 3 shows that as the dose of plasmid DNA added to the nucleofection reaction was increased incrementally (1.3, 2.5, 5.0, 10.0, and 20.0 μg of plasmid DNA), cell viability decreased as measured at both day 1 and 5 post-nucleofection. Even 1.3 μg of plasmid DNA was responsible for a 2.4-fold decrease in T cell viability by day 4.

[0438] Since it was clear that plasmid DNA is toxic to T cells during nucleofection, we considered whether or not extracellular plasmid DNA was contributing to cell death. FIG. 4 shows that extracellular plasmid DNA was not cytotoxic to T cells. In that experiment, 5 μg of plasmid DNA was added to the cells 45 min post-electroporation and little cell death was observed at day 1 or day 4. Similarly, when 5 μg of plasmid DNA was added to the nucleofection reaction in the absence of electroporation, little cell death was observed. However, when the plasmid DNA was added before the electroporation reaction, the cells exhibited a 2.0-fold reduction in cell viability at day 1 and a 13.2-fold reduction at day 4.

[0439] Since DNA-mediated toxicity is dose dependent, we next focused our attention on ways to reduce the total amount of DNA delivered to the T cells that is required for transposition. One relatively straightforward way of achieving this would be to deliver the transposase as encoded in mRNA instead of encoded in DNA. mRNA delivery to primary human T cells is very efficient, resulting in high transfection efficiency and high viability. We subcloned the Super piggyBac™ (SPB) transposase enzyme into our in-house mRNA production vector and produced high quality SPB mRNA. Co-delivery of PB-GFP transposon with various doses of SPB mRNA (30, 10, 3.3, 3, 1, 0.33 μg mRNA) in Jurkat cells demonstrated strong transposition at all doses tested (FIG. 5). These data show that SPB transposase can be delivered and are equally effective as either plasmid DNA or mRNA. In addition, that the amount of SPB mRNA makes little difference in overall transposition efficiency in Jurkats, in either overall percentage of GFP+ cells or in the MFI of GFP expression. To see if this also holds true for T lymphocytes, we delivered PB-GFP with either SPB plasmid DNA, at a 3:1 ratio, or 5 μg of SPB mRNA. Seven (7) days following the nucleofection reaction and the addition of IL7 and IL15, GFP transposition was assessed. FIG. 6 shows that SPB mRNA efficiently mediated transposition of the GFP transposon into T lymphocytes. Importantly, T cell viability was improved when co-delivering the SPB as an mRNA as opposed to a pDNA; 32.4% versus 25.4%, respectively. These data suggest that co-delivery of SPB as mRNA would be dose-sparing in the total amount of plasmid DNA being delivered to T cells and is thus less cytotoxic.

[0440] Since the current plasmid transposon also contains a backbone required for plasmid amplification in bacteria, it is possible to significantly reduce the total amount of DNA by excluding this sequence. This may be achieved by restriction digest of the plasmid transposon prior to the nucleofection reaction. In addition, this could be achieved by administering the transposon as a PCR product or as a Doggybone™ DNA, which is a double stranded DNA that is produced in vitro by a mechanism that excludes the initial backbone elements required for bacterial replication of the plasmid.

[0441] We performed a pilot experiment to see whether or not plasmid transposon needed to be circular, or if it could be delivered to the cell in a linear fashion. To test this, transposon was incubated overnight with a restriction enzyme (ApaLI) to linearize the plasmid. Either uncut or linearized plasmid is electroporated into primary T lymphocytes. GFP expression was assessed 2 days later. FIG. 7 shows that linearized plasmid was also efficiently delivered to the cell nucleus. These data demonstrate that linear transposon products can also be efficiently electroporated into primary human T cells.

[0442] We show above that plasmid DNA is toxic in primary T lymphocytes, but we have observed that this toxic effect is not as dramatic in tumor cell lines and other transformed cells. Based upon this observation, we hypothesized that primary T lymphocytes may be refractory to plasmid DNA transfection due to heightened DNA sensing pathways, which would protect immune cells from infection by viruses and bacteria. If these data are a result of heightened DNA sensing mechanisms, then it may be possible to enhance plasmid transfection efficiency and/or cell viability by the addition of DNA sensing pathway inhibitors to the post-nucleofection reaction. Thus, we tested a number of different reagents that inhibited the TLR-9 pathway, caspase pathway, or those involved in cytoplasmic double stranded DNA sensing. These reagents include Bafilomycin Al, which is an autophagy inhibitor that interferes with endosomal acidification and blocks NFkB signaling by TLR9, Chloroquine, which is a TLR9 antagonist, Quinacrine, which is a TLR9 antagonist and a cGAS antagonist, AC-YVAD-CMK, which is a caspase 1 inhibitor targeting the AIM2 pathway, Z-VAD-FMK, which is a pan caspase inhibitor, Z-IETD-FMK, which is a caspase 8 inhibitor triggered by the TLR9 pathway. In addition, we also tested the stimulation of electroporated T cells by the addition of the cytokines IL7 and IL15, as well as the addition of anti-CD3 anti-CD28 Dynabeads® Human T-Expander CD3/CD28 beads. Results are displayed in FIG. 8. We found that few of the compounds or caspase inhibitors had any positive effect on cell viability at day 4 post-nucleofection at the doses tested. However, we acknowledge that further dosing studies may be required to better test these reagents. It may also be more effective to inhibit these pathways genetically. Two post-nucleofection conditions did enhance viability of the T cells. The addition of IL7 and IL15, whether they were added either 1 hour or 1 day following electroporation, enhanced viability over 3-fold when compared with introduction of the plasmid transposon alone without additional treatment. Furthermore, stimulation of the T cells post-nucleofection using either activator or expander beads also dramatically enhanced T cell viability; stimulation was better when the beads were added 1 hour or 1 day post-nucleofection as compared to adding the beads 2 days post. Lastly, we also tested ROCK inhibitor and the removal of dead cells from the culture using the Dead Cell Removal kit from Miltenyi, but saw no improvement in cell viability.

[0443] To further expand upon these findings demonstrating that stimulation of the T cells post-nucleofection improves viability, we repeated the study using the addition of the cytokine IL7 and IL15. FIG. 9 shows that the addition of these cytokines each at a dose of 20 ng/mL either immediately following nucleofection or up to 1 hour post enhanced cell viability up to 2.9-fold when compared to no treatment. Addition of these cytokines up to 1 day post-nucleofection also enhanced viability, but not as strong as the prior time points.

[0444] Since we found that immediate stimulation of the T cells post-nucleofection was able to increase cell viability, we hypothesized that stimulating the cells prior to nucleofection may also enhance viability and transfection efficiency. To test this, we stimulated primary T lymphocytes either 2, 3, or 4 days prior to transposon nucleofection. FIG. 10 shows that some level of transposition occurs when the transposon and the transposase are co-delivered after the T cells have been stimulated prior to the nucleofection reaction. The efficacy of pre-stimulation may be influenced by the kinetics of stimulation and may therefore be dependent upon the precise type of expander technology chosen.

### Example 2: Ex Vivo Genetic Modification of NK Cells

[0445] The piggyBac™ (PB) transposon system was used for genetically modifying human NK cells. Non-activated NK cells derived from CD3-depleted leukopheresis (containing CD14/CD19/CD56+ cells) were were electroporated with plasmid piggyBac transposon DNA encoding GFP and mRNA encoding Super piggyBac transposase using the program indicated in FIG. 14 from Lonza 4D nucleofector or BTX ECM 830 (500V, 700 usec pulse length, 0.2 mm electrode gap, one pulse). Transposed cells were co-cultured (stimulated) at day 2 with artificial antigen presenting cells (aAPCs). Fluorescent activated cell sorting (FACS) analysis of GFP percent at day 7 post-EP (day 5 post-stimulation) is shown in FIG. 14. Percent viability is the percentage of 7-Aminoactinomycin (7AAD)-negative cells at day 2 post-EP.

[0446] Transposition of non-activated NK cells from CD3-depleted leukopheresis (containing CD14/CD19/CD56+ cells) is shown in FIG. 15. Cells were electroporated with a plasmid piggyBac transposon encoding GFP and 5 ug mRNA encoding Super piggyBac transposase using the indicated Maxcyte electroporator program. Transposed cells were stimulated at day 2 with artificial antigen presenting cells (aAPCs). FACS plots (FIG. 15A) and a bar graph (FIG. 15B) from the analysis of percent GFP+ of CD56+ cells at day 6 post-EP and day 4 post-stimulation are shown. Percent viability is the percentage of 7AAD-negative cells at day 2 post EP.

[0447] FIG. 16 shows that there is dose-dependent DNA-mediated cytotoxicity in NK cells. FACS analysis of live cells (7AAD-ve/FSC, or Forward Scatter) at day 2 post-EP using Lonza 4D Nucleofector program DN-100. FACS plots (FIG. 16A) are quantified in graph (FIG. 16B). 5x10E6 cells were electroporated per electroporation in 100 uL P3 buffer in cuvettes. Cells were electroporated with no DNA (Mock) or varying amounts of piggyBac GFP transposon co-delivered with 5 ug super piggyBac mRNA.

### Example 3: In Vitro Differentiation of piggyBac Modified HSPCs into B Cells

[0448] Human CD34+ HSPCs were electroporated with mRNA encoding Super piggyBac along with a piggyBac transposon encoding GFP. After electroporation, HSPCs were primed for B cell differentiation in presence of human IL-3, Flt3L, TPO, SCF, and G-CSF for 5 days. On day 6, cells were transferred to a layer of MS-5 feeder cells and fed bi-weekly, along with transfer to a fresh layer of feeders once per week. On day 34 of the in vitro differentiation process, CD19+B cells were generated and detectable in the culture (FIG. 17). A fraction of the B cells were positive for the GFP piggyBac transgene (FIG. 17, lower right panel) demonstrating that the piggyBac DNA Modification System can be used to modify HSPCs, which can then be later differentiated into more differentiated immune cell types. This technique allows for the derivation of genetically-modified immune cells from hematopoietic progenitors.

The application's sequence listing, which the Patent Office published only in electronic form, follows.

SEQUENCE LISTING (14689 sequences)

SEQ ID NO: 1 - protein, 306 aa, Homo Sapiens
LTCQAHLETPDFQLFKNGVAQEPVHLDSPAIKHQFLLTGDTQGRYRCRSGLSTGWTQLSKLLELTGPKSLPAPWLSMAPVSWITPGLKTTAVCRGVLRGVTFLLRREGDHEFLEVPEAQEDVEATFPVHQPGNYSCSYRTDGEGALSEPSATVTIEELGPGPGSWPHGCLGLMVAKEFGQRMPKEWKAAPPPPVLMHHGESSQVLHPGNKVTLTCVAPLSGVDFQLRRGEKELLVPRSSTSPDRIFFHLNAVALGDGGHYTCRYRLHDNQNGWSGDSAPVELILSDETLPAPEFSPEPESGRALRL

SEQ ID NO: 2 - protein, 495 aa, Homo Sapiens
MSMLVVFLLLWGVTWGPVTEAAIFYETQPSLWAESESLLKPLANVTLTCQAHLETPDFQLFKNGVAQEPVHLDSPAIKHQFLLTGDTQGRYRCRSGLSTGWTQLSKLLELTGPKSLPAPWLSMAPVSWITPGLKTTAVCRGVLRGVTFLLRREGDHEFLEVPEAQEDVEATFPVHQPGNYSCSYRTDGEGALSEPSATVTIEELAAPPPPVLMHHGESSQVLHPGNKVTLTCVAPLSGVDFQLRRGEKELLVPRSSTSPDRIFFHLNAVALGDGGHYTCRYRLHDNQNGWSGDSAPVELILSDETLPAPEFSPEPESGRALRLRCLAPLEGARFALVREDRGGRRVHRFQSPAGTEALFELHNISVADSANYSCVYVDLKPPFGGSAPSERLELHVDGPPPRPQLRATWSGAVLAGRDAVLRCEGPIPDVTFELLREGETKAVKTVRTPGAAANLELIFVGPQHAGNYRCRYRSWVPHTFESELSDPVELLVAES

SEQ ID NO: 3 - protein, 90 aa, Homo Sapiens
MGKNKLLHPSLVLLLLVLLPTDASVSGKPQYMVLVPSLLHTETTEKGCVLLSYLNETVTVSASLESVRGNRSLFTDLEAENDVLHCVAFA

SEQ ID NO: 4 - protein, 168 aa, Homo Sapiens
MGKNKLLHPSLVLLLLVLLPTDASVSGKPQYMVLVPSLLHTETTEKGCVLLSYLNETVTVSASLESVRGNRSLFTDLEAENDVLHCVAFAVPKSSSNEEVMFLTVQVKGPTQEFKKRTTVMVKNEDSLVFVQTDKSIYKPGQTVKFRVVSMDENFHPLNELIPLVYIQ

SEQ ID NO: 5 - protein, 1474 aa, Homo Sapiens
MGKNKLLHPSLVLLLLVLLPTDASVSGKPQYMVLVPSLLHTETTEKGCVLLSYLNETVTVSASLESVRGNRSLFTDLEAENDVLHCVAFAVPKSSSNEEVMFLTVQVKGPTQEFKKRTTVMVKNEDSLVFVQTDKSIYKPGQTVKFRVVSMDENFHPLNELIPLVYIQDPKGNRIAQWQSFQLEGGLKQFSFPLSSEPFQGSYKVVVQKKSGGRTEHPFTVEEFVLPKFEVQVTVPKIITILEEEMNVSVCGLYTYGKPVPGHVTVSICRKYSDASDCHGEDSQAFCEKFSGQLNSHGCFYQQVKTKVFQLKRKEYEMKLHTEAQIQEEGTVVELTGRQSSEITRTITKLSFVKVDSHFRQGIPFFGQVRLVDGKGVPIPNKVIFIRGNEANYYSNATTDEHGLVQFSINTTNVMGTSLTVRVNYKDRSPCYGYQWVSEEHEEAHHTAYLVFSPSKSFVHLEPMSHELPCGHTQTVQAHYILNGGTLLGLKKLSFYYLIMAKGGIVRTGTHGLLVKQEDMKGHFSISIPVKSDIAPVARLLIYAVLPTGDVIGDSAKYDVENCLANKVDLSFSPSQSLPASHAHLRVTAAPQSVCALRAVDQSVLLMKPDAELSASSVYNLLPEKDLTGFPGPLNDQDNEDCINRHNVYINGITYTPVSSTNEKDMYSFLEDMGLKAFTNSKIRKPKMCPQLQQYEMHGPEGLRVGFYESDVMGRGHARLVHVEEPHTETVRKYFPETWIWDLVVVNSAGVAEVGVTVPDTITEWKAGAFCLSEDAGLGISSTASLRAFQPFFVELTMPYSVIRGEAFTLKATVLNYLPKCIRVSVQLEASPAFLAVPVEKEQAPHCICANGRQTVSWAVTPKSLGNVNFTVSAEALESQELCGTEVPSVPEHGRKDTVIKPLLVEPEGLEKETTFNSLLCPSGGEVSEELSLKLPPNVVEESARASVSVLGDILGSAMQNTQNLLQMPYGCGEQNMVLFAPNIYVLDYLNETQQLTPEIKSKAIGYLNTGYQRQLNYKHYDGSYSTFGERYGRNQGNTWLTAFVLKTFAQARAYIFIDEAHITQALIWLSQRQKDNGCFRSSGSLLNNAIKGGVEDEVTLSAYITIALLEIPLTVTHPVVRNALFCLESAWKTAQEGDHGSHVYTKALLAYAFALAGNQDKRKEVLKSLNEEAVKKDNSVHWERPQKPKAPVGHFYEPQAPSAEVEMTSYVLLAYLTAQPAPTSEDLTSATNIVKWITKQQNAQGGFSSTQDTVVALHALSKYGAATFTRTGKAAQVTIQSSGTFSSKFQVDNNNRLLLQQVSLPELPGEYSMKVTGEGCVYLQTSLKYNILPEKEEFPFALGVQTLPQTCDEPKAHTSFQISLSVSYTGSRSASNMAIVDVKMVSGFIPLKPTVKMLERSNHVSRTEVSSNHVLIYLDKVSNQTLSLFFTVLQDVPVRDLKPAIVKVYDYYETDEFAIAEYNAPCSKDLGNA

SEQ ID NO: 6 - protein, 73 aa, Homo Sapiens
NGGTLLGLKKLSFYYLIMAKGGIVRTGTHGLLVKQEDMKGHFSISIPVKSDIAPVARFTTCYQKRTSLASLGL

SEQ ID NO: 7 - protein, 183 aa, Homo Sapiens
MLGELIGKGSLVMEGQKHLNSKKKGLKASFSLSLTFTSRLAPDPSLVIYAIFPSGGVVADKIQFSVEMCFDNQVSLGFSPSQQLPGAEVELQLQAAPGSLCALRAVDESVLLLRPDRELSNRSVYGMFPFWYGHYPYQVAEYDQCPVSGPWDFPQPLIDPMPQGHSSQRSIIWRPSFSEGTDL

SEQ ID NO: 8 - protein, 963 aa, Homo Sapiens
MLIGKGSLVMEGQKHLNSKKKGLKASFSLSLTFTSRLAPDPSLVIYAIFPSGGVVADKIQFSVEMCFDNQVSLGFSPSQQLPGAEVELQLQAAPGSLCALRAVDESVLLLRPDRELSNRSVYGMFPFWYGHYPYQVAEYDQCPVSGPWDFPQPLIDPMPQGHSSQRSIIWRPSFSEGTDLFSFFRDVGLKILSNAKIKKPVDCSHRSPEYSTAMGAGGGHPEAFESSTPLHQAEDSQVRQYFPETWLWDLFPIGNSGKEAVHVTVPDAITEWKAMSFCTSQSRGFGLSPTVGLTAFKPFFVDLTLPYSVVRGESFRLTATIFNYLKDCIRVQTDLAKSHEYQLESWADSQTSSCLCADDAKTHHWNITAVKLGHINFTISTKILDSNEPCGGQKGFVPQKGRSDTLIKPVLVKPEGVLVEKTHSSLLCPKGKVASESVSLELPVDIVPDSTKAYVTVLGDIMGTALQNLDGLVQMPSGCGEQNMVLFAPIIYVLQYLEKAGLLTEEIRSRAVGFLEIGYQKELMYKHSNGSYSAFGERDGNGNTWLTAFVTKCFGQAQKFIFIDPKNIQDALKWMAGNQLPSGCYANVGNLLHTAMKGGVDDEVSLTAYVTAALLEMGKDVDDPMVSQGLRCLKNSATSTTNLYTQALLAYIFSLAGEMDIRNILLKQLDQQAIISGESIYWSQKPTPSSNASPWSEPAAVDVELTAYALLAQLTKPSLTQKEIAKATSIVAWLAKQHNAYGGFSSTQDTVVALQALAKYATTAYMPSEEINLVVKSTENFQRTFNIQSVNRLVFQQDTLPNVPGMYTLEASGQGCVYVQTVLRYNILPPTNMKTFSLSVEIGKARCEQPTSPRSLTLTIHTSYVGSRSSSNMAIVEVKMLSGFSPMEGTNQLLLQQPLVKKVEFGTDTLNIYLDELIKNTQTYTFTISQSVLVTNLKPATIKVYDYYLPDEQATIQYSDPCE

SEQ ID NO: 9 - protein, 81 aa, Homo Sapiens
MVRNNFYAVRLLPSTCVVLSQTSNCRRSHQDPLAASCICQASGCWLIGKGSLVMEGQKHLNSKKKGLKASFSLSLTFTSRL

SEQ ID NO: 10 - protein, 1454 aa, Homo Sapiens
MWAQLLLGMLALSPAIAEELPNYLVTLPARLNFPSVQKVCLDLSPGYSDVKFTVTLETKDKTQKLLEYSGLKKRHLHCISFLVPPPAGGTEEVATIRVSGVGNNISFEEKKKVLIQRQGNGTFVQTDKPLYTPGQQVYFRIVTMDSNFVPVNDKYSMVELQDPNSNRIAQWLEVVPEQGIVDLSFQLAPEAMLGTYTVAVAEGKTFGTFSVEEYVLPKFKVEVVEPKELSTVQESFLVKICCRYTYGKPMLGAVQVSVCQKANTYWYREVEREQLPDKCRNLSGQTDKTGCFSAPVDMATFDLIGYAYSHQINIVATVVEEGTGVEANATQNIYISPQMGSMTFEDTSNFYHPNFPFSGKIRVRGHDDSFLKNHLVFLVIYGTNGTFNQTLVTDNNGLAPFTLETSGWNGTDVSLEGKFQMEDLVYNPEQVPRYYQNAYLHLRPFYSTTRSFLGIHRLNGPLKCGQPQEVLVDYYIDPADASPDQEISFSYYLIGKGSLVMEGQKHLNSKKKGLKASFSLSLTFTSRLAPDPSLVIYAIFPSGGVVADKIQFSVEMCFDNQVSLGFSPSQQLPGAEVELQLQAAPGSLCALRAVDESVLLLRPDRELSNRSVYGMFPFWYGHYPYQVAEYDQCPVSGPWDFPQPLIDPMPQGHSSQRSIIWRPSFSEGTDLFSFFRDVGLKILSNAKIKKPVDCSHRSPEYSTAMGAGGGHPEAFESSTPLHQAEDSQVRQYFPETWLWDLFPIGNSGKEAVHVTVPDAITEWKAMSFCTSQSRGFGLSPTVGLTAFKPFFVDLTLPYSVVRGESFRLTATIFNYLKDCIRVQTDLAKSHEYQLESWADSQTSSCLCADDAKTHHWNITAVKLGHINFTISTKILDSNEPCGGQKGFVPQKGRSDTLIKPVLVKPEGVLVEKTHSSLLCPKGKVASESVSLELPVDIVPDSTKAYVTVLGDIMGTALQNLDGLVQMPSGCGEQNMVLFAPIIYVLQYLEKAGLLTEEIRSRAVGFLEIGYQKELMYKHSNGSYSAFGERDGNGNTWLTAFVTKCFGQAQKFIFIDPKNIQDALKWMAGNQLPSGCYANVGNLLHTAMKGGVDDEVSLTAYVTAALLEMGKDVDDPMVSQGLRCLKNSATSTTNLYTQALLAYIFSLAGEMDIRNILLKQLDQQAIISGESIYWSQKPTPSSNASPWSEPAAVDVELTAYALLAQLTKPSLTQKEIAKATSIVAWLAKQHNAYGGFSSTQDTVVALQALAKYATTAYMPSEEINLVVKSTENFQRTFNIQSVNRLVFQQDTLPNVPGMYTLEASGQGCVYVQTVLRYNILPPTNMKTFSLSVEIGKARCEQPTSPRSLTLTIHTSYVGSRSSSNMAIVEVKMLSGFSPMEGTNQLLLQQPLVKKVEFGTDTLNIYLDELIKNTQTYTFTISQSVLVTNLKPATIKVYDYYLPDEQATIQYSDPCE

SEQ ID NO: 11 - protein, 1004 aa, Homo Sapiens
SFLGIHRLNGPLKCGQPQEVLVDYYIDPADASPDQEISFSYYLIGKGSLVMEGQKHLNSKKKGLKASFSLSLTFTSRLAPDPSLVIYAIFPSGGVVADKIQFSVEMCFDNQVSLGFSPSQQLPGAEVELQLQAAPGSLCALRAVDESVLLLRPDRELSNRSVYGMFPFWYGHYPYQVAEYDQCPVSGPWDFPQPLIDPMPQGHSSQRSIIWRPSFSEGTDLFSFFRDVGLKILSNAKIKKPVDCSHRSPEYSTAMGAGGGHPEAFESSTPLHQAEDSQVRQYFPETWLWDLFPIGNSGKEAVHVTVPDAITEWKAMSFCTSQSRGFGLSPTVGLTAFKPFFVDLTLPYSVVRGESFRLTATIFNYLKDCIRVQTDLAKSHEYQLESWADSQTSSCLCADDAKTHHWNITAVKLGHINFTISTKILDSNEPCGGQKGFVPQKGRSDTLIKPVLVKPEGVLVEKTHSSLLCPKGKVASESVSLELPVDIVPDSTKAYVTVLGDIMGTALQNLDGLVQMPSGCGEQNMVLFAPIIYVLQYLEKAGLLTEEIRSRAVGFLEIGYQKELMYKHSNGSYSAFGERDGNGNTWLTAFVTKCFGQAQKFIFIDPKNIQDALKWMAGNQLPSGCYANVGNLLHTAMKGGVDDEVSLTAYVTAALLEMGKDVDDPMVSQGLRCLKNSATSTTNLYTQALLAYIFSLAGEMDIRNILLKQLDQQAIISGESIYWSQKPTPSSNASPWSEPAAVDVELTAYALLAQLTKPSLTQKEIAKATSIVAWLAKQHNAYGGFSSTQDTVVALQALAKYATTAYMPSEEINLVVKSTENFQRTFNIQSVNRLVFQQDTLPNVPGMYTLEASGQGCVYVQTVLRYNILPPTNMKTFSLSVEIGKARCEQPTSPRSLTLTIHTSYVGSRSSSNMAIVEVKMLSGFSPMEGTNQLLLQQPLVKKVEFGTDTLNIYLDELIKNTQTYTFTISQSVLVTNLKPATIKVYDYYLPDEQATIQYSDPCE

SEQ ID NO: 12 - protein, 182 aa, Homo Sapiens
  misc_feature (1)..(1): Xaa can be any naturally occurring amino acid
XRTFNIQSVNRLVFQQDTLPNVPGMYTLEASGQGCVYVQTVLRYNILPPTNMKTFSLSVEIGKARCEQPTSPRSLTLTIHTSYVGSRSSSNMAIVEVKMLSGFSPMEGTNQLLLQQPLVKKVEFGTDTLNIYLDELIKNTQTYTFTISQSVLVTNLKPATIKVYDYYLPDEQATIQYSDPCE

SEQ ID NO: 13 - protein, 340 aa, Homo Sapiens
MRKELQLSLSVTLLLVCGFLYQFTLKSSCLFCLPSFKSHQGLEALLSHRRGIVFLETSERMEPPHLVSCSVESAAKIYPEWPVVFFMKGLTDSTPMPSNSTYPAFSFLSAIDNVFLFPLDMKRLLEDTPLFSWYNQINASAERNWLHISSDASRLAIIWKYGGIYMDTDVISIRPIPEENFLAAQASRYSSNGIFGFLPHHPFLWECMENFVEHYNSAIWGNQGPELMTRMLRVWCKLEDFQEVSDLRCLNISFLHPQRFYPISYREWRRYYEVWDTEPSFNVSYALHLWNHMNQEGRAVIRGSNTLVENLYRKHCPRTYRDLIKGPEGSVTGELGPGNK

SEQ ID NO: 14 - protein, 401 aa, Homo Sapiens
MGLKALCLGLLCVLFVSHFYTPMPDNIEESWKIMALDAIAKTCTFTAMCFENMRIMRYEEFISMIFRLDYTQPLSDEYITVTDTTFVDIPVRLYLPKRKSETRRRAVIYFHGGGFCFGSSKQRAFDFLNRWTANTLDAVVVGVDYRLAPQHHFPAQFEDGLAAVKFFLLEKILTKYGVDPTRICIAGDSSGGNLATAVTQQVQNDAEIKHKIKMQVLLYPGLQITDSYLPSHRENEHGIVLTRDVAIKLVSLYFTKDEALPWAMRRNQHMPLESRHLFKFVNWSILLPEKYRKDYVYTEPILGGLSYSLPGLTDSRALPLLANDSQLQNLPLTYILTCQHDLLRDDGLMYVTRLRNVGVQVVHEHIEDGIHGALSFMTSPFYLRLGLRIRDMYVSWLDKNL

SEQ ID NO: 15 - protein, 53 aa, Homo Sapiens
MGLKALCLGLLCVLFVSHFYTPMPDNIEESWKIMALDAIAKTCTFTNRGLLTS

SEQ ID NO: 16 - protein, 252 aa, Homo Sapiens
MEPQSMKGQKRPFGGPWRLKVLGGPPWLRRTLPKLGRPKEAPVARMSTQSTHPLKPEAPRLPPGIPESPSCQRRHTLPASEFRCLTPEDAVSAFEIEREAFISVLGVCPLYLDEIRHFLTLCPELSLGWFEEGCLVAFIIGSLWDKERLMQESLTLHRSGGHIAHLHVLAVHRAFRQQGRGPILLWRYLHHLGSQPAVRRAALMCEDALVPFYERFSFHAVGPCAITVGSLTFMELHCSLRGHPFLRRNSGC

SEQ ID NO: 17 - protein, 152 aa, Homo Sapiens [sequence omitted]

SEQ ID NO: 18 - protein, 207 aa, Homo Sapiens
MSTQSTHPLKPEAPRLPPGIPESPSCQRRHTLPASEFRCLTPEDAVSAFEIEREAFISVLGVCPLYLDEIRHFLTLCPELSLGWFEEGCLVAFIIGSLWDKERLMQESLTLHRSGGHIAHLHVLAVHRAFRQQGRGPILLWRYLHHLGSQPAVRRAALMCEDALVPFYERFSFHAVGPCAITVGSLTFMELHCSLRGHPFLRRNSGC

SEQ ID NO: 19 - protein, 92 aa, Homo Sapiens
MSTQSTHPLKPEAPRLPPGIPESPSCQRRHTLPASEFRCLTPEDAVSAFEIEREDSGREAQRLPVTHLSLLPQPSSPSWASAPCTWMRSGTS

SEQ ID NO: 20 - protein, 257 aa, Homo Sapiens
MACLMAAFSVGTAMNASSYSAEMTEPKSVCVSVDEVVSSNMEATETDLLNGHLKKVDNNLTEAQRFSSLPRRAAVNIEFRDLSYSVPEGPWWRKKGYKTLLKGISGKFNSGELVAIMGPSGAGKSTLMNILAGYRETGMKGAVLINGLPRDLRCFRKVSCYIMQDDMLLPHLTVQEAMMVKEILTALGLLSCANTRTGSLSGGQRKRLAIALELVNNPPVMFFDEPTSGLDSASCFQVVSLMKGLAQGGRSIICTIH

SEQ ID NO: 21 - protein, 678 aa, Homo Sapiens
MACLMAAFSVGTAMNASSYSAEMTEPKSVCVSVDEVVSSNMEATETDLLNGHLKKVDNNLTEAQRFSSLPRRAAVNIEFRDLSYSVPEGPWWRKKGYKTLLKGISGKFNSGELVAIMGPSGAGKSTLMNILAGYRETGMKGAVLINGLPRDLRCFRKVSCYIMQDDMLLPHLTVQEAMMVSAHLKLQEKDEGRREMVKEILTALGLLSCANTRTGSLSGGQRKRLAIALELVNNPPVMFFDEPTSGLDSASCFQVVSLMKGLAQGGRSIICTIHQPSAKLFELFDQLYVLSQGQCVYRGKVCNLVPYLRDLGLNCPTYHNPADFVMEVASGEYGDQNSRLVRAVREGMCDSDHKRDLGGDAEVNPFLWHRPSEEVKQTKRLKGLRKDSSSMEGCHSFSASCLTQFCILFKRTFLSIMRDSVLTHLRITSHIGIGLLIGLLYLGIGNEAKKVLSNSGFLFFSMLFLMFAALMPTVLTFPLEMGVFLREHLNYWYSLKAYYLAKTMADVPFQIMFPVAYCSIVYWMTSQPSDAVRFVLFAALGTMTSLVAQSLGLLIGAASTSLQVATFVGPVTAIPVLLFSGFFVSFDTIPTYLQWMSYISYVRYGFEGVILSIYGLDREDLHCDIDETCHFQKSEAILRELDVENAKLYLDFIVLGIFFISLRLIAYFVLRYKIRAER

SEQ ID NO: 22 - protein, 666 aa, Homo Sapiens
MACLMAAFSVGTAMNASSYSAEMTEPKSVCVSVDEVVSSNMEATETDLLNGHLKKVDNNLTEAQRFSSLPRRAAVNIEFRDLSYSVPEGPWWRKKGYKTLLKGISGKFNSGELVAIMGPSGAGKSTLMNILAGYRETGMKGAVLINGLPRDLRCFRKVSCYIMQDDMLLPHLTVQEAMMVSAHLKLQEKDEGRREMVKEILTALGLLSCANTRTGSLSGGQRKRLAIALELVNNPPVMFFDEPTSGLDSASCFQVVSLMKGLAQGGRSIICTIHQPSAKLFELFDQLYVLSQGQCVYRGKVCNLVPYLRDLGLNCPTYHNPADFVMEVASGEYGDQNSRLVRAVREGMCDSDHKRDLGGDAEVNPFLWHRPSEEDSSSMEGCHSFSASCLTQFCILFKRTFLSIMRDSVLTHLRITSHIGIGLLIGLLYLGIGNEAKKVLSNSGFLFFSMLFLMFAALMPTVLTFPLEMGVFLREHLNYWYSLKAYYLAKTMADVPFQIMFPVAYCSIVYWMTSQPSDAVRFVLFAALGTMTSLVAQSLGLLIGAASTSLQVATFVGPVTAIPVLLFSGFFVSFDTIPTYLQWMSYISYVRYGFEGVILSIYGLDREDLHCDIDETCHFQKSEAILRELDVENAKLYLDFIVLGIFFISLRLIAYFVLRYKIRAER

SEQ ID NO: 23 - protein, 663 aa, Homo Sapiens
MIMRLPQPHGTNASSYSAEMTEPKSVCVSVDEVVSSNMEATETDLLNGHLKKVDNNLTEAQRFSSLPRRAAVNIEFRDLSYSVPEGPWWRKKGYKTLLKGISGKFNSGELVAIMGPSGAGKSTLMNILAGYRETGMKGAVLINGLPRDLRCFRKVSCYIMQDDMLLPHLTVQEAMMVSAHLKLQEKDEGRREMVKEILTALGLLSCANTRTGSLSGGQRKRLAIALELVNNPPVMFFDEPTSGLDSASCFQVVSLMKGLAQGGRSIICTIHQPSAKLFELFDQLYVLSQGQCVYRGKVCNLVPYLRDLGLNCPTYHNPADFVMEVASGEYGDQNSRLVRAVREGMCDSDHKRDLGGDAEVNPFLWHRPSEEDSSSMEGCHSFSASCLTQFCILFKRTFLSIMRDSVLTHLRITSHIGIGLLIGLLYLGIGNEAKKVLSNSGFLFFSMLFLMFAALMPTVLTFPLEMGVFLREHLNYWYSLKAYYLAKTMADVPFQIMFPVAYCSIVYWMTSQPSDAVRFVLFAALGTMTSLVAQSLGLLIGAASTSLQVATFVGPVTAIPVLLFSGFFVSFDTIPTYLQWMSYISYVRYGFEGVILSIYGLDREDLHCDIDETCHFQKSEAILRELDVENAKLYLDFIVLGIFFISLRLIAYFVLRYKIRAER

SEQ ID NO: 24 - protein, 824 aa, Homo Sapiens
MLAVQQTEHLPACPPARRWSSNFCPESTEGGPSLLGLRDMVRRGWSVCTAILLARLWCLVPTHTFLSEYPEAAEYPHPGWVYWLQMAVAPGHLRAWVMRNNVTTNIPSAFSGTLTHEEKAVLTVFTGTATAVHVQVAALASAKLESSVFVTDCVSCKIENVCDSALQGKRVPMSGLQGSSIVIMPPSNRPLASAASCTWSVQVQGGPHHLGVVAISGKVLSAAHGAGRAYGWGFPGDPMEEGYKTLLKGISGKFNSGELVAIMGPSGAGKSTLMNILAGYRETGMKGAVLINGLPRDLRCFRKVSCYIMQDDMLLPHLTVQEAMMVSAHLKLQEKDEGRREMVKEILTALGLLSCANTRTGSLSGGQRKRLAIALELVNNPPVMFFDEPTSGLDSASCFQVVSLMKGLAQGGRSIICTIHQPSAKLFELFDQLYVLSQGQCVYRGKVCNLVPYLRDLGLNCPTYHNPADFVMEVASGEYGDQNSRLVRAVREGMCDSDHKRDLGGDAEVNPFLWHRPSEEVKQTKRLKGLRKDSSSMEGCHSFSASCLTQFCILFKRTFLSIMRDSVLTHLRITSHIGIGLLIGLLYLGIGNEAKKVLSNSGFLFFSMLFLMFAALMPTVLTFPLEMGVFLREHLNYWYSLKAYYLAKTMADVPFQIMFPVAYCSIVYWMTSQPSDAVRFVLFAALGTMTSLVAQSLGLLIGAASTSLQVATFVGPVTAIPVLLFSGFFVSFDTIPTYLQWMSYISYVRYGFEGVILSIYGLDREDLHCDIDETCHFQKSEAILRELDVENAKLYLDFIVLGIFFISLRLIAYFVLRYKIRAER

SEQ ID NO: 25 - protein, 668 aa, Homo Sapiens
MLGTQGWTKQRKPCPQNASSYSAEMTEPKSVCVSVDEVVSSNMEATETDLLNGHLKKVDNNLTEAQRFSSLPRRAAVNIEFRDLSYSVPEGPWWRKKGYKTLLKGISGKFNSGELVAIMGPSGAGKSTLMNILAGYRETGMKGAVLINGLPRDLRCFRKVSCYIMQDDMLLPHLTVQEAMMVSAHLKLQEKDEGRREMVKEILTALGLLSCANTRTGSLSGGQRKRLAIALELVNNPPVMFFDEPTSGLDSASCFQVVSLMKGLAQGGRSIICTIHQPSAKLFELFDQLYVLSQGQCVYRGKVCNLVPYLRDLGLNCPTYHNPADFVMEVASGEYGDQNSRLVRAVREGMCDSDHKRDLGGDAEVNPFLWHRPSEEDSSSMEGCHSFSASCLTQFCILFKRTFLSIMRDSVLTHLRITSHIGIGLLIGLLYLGIGNEAKKVLSNSGFLFFSMLFLMFAALMPTVLTFPLEMGVFLREHLNYWYSLKAYYLAKTMADVPFQIMFPVAYCSIVYWMTSQPSDAVRFVLFAALGTMTSLVAQSLGLLIGAASTSLQVATFVGPVTAIPVLLFSGFFVSFDTIPTYLQWMSYISYVRYGFEGVILSIYGLDREDLHCDIDETCHFQKSEAILRELDVENAKLYLDFIVLGIFFISLRLIAYFVLRYKIRAER

SEQ ID NO: 26 - protein, 677 aa, Homo Sapiens
MRISLPRAPERDGGVSASSLLDTVTNASSYSAEMTEPKSVCVSVDEVVSSNMEATETDLLNGHLKKVDNNLTEAQRFSSLPRRAAVNIEFRDLSYSVPEGPWWRKKGYKTLLKGISGKFNSGELVAIMGPSGAGKSTLMNILAGYRETGMKGAVLINGLPRDLRCFRKVSCYIMQDDMLLPHLTVQEAMMVSAHLKLQEKDEGRREMVKEILTALGLLSCANTRTGSLSGGQRKRLAIALELVNNPPVMFFDEPTSGLDSASCFQVVSLMKGLAQGGRSIICTIHQPSAKLFELFDQLYVLSQGQCVYRGKVCNLVPYLRDLGLNCPTYHNPADFVMEVASGEYGDQNSRLVRAVREGMCDSDHKRDLGGDAEVNPFLWHRPSEEDSSSMEGCHSFSASCLTQFCILFKRTFLSIMRDSVLTHLRITSHIGIGLLIGLLYLGIGNEAKKVLSNSGFLFFSMLFLMFAALMPTVLTFPLEMGVFLREHLNYWYSLKAYYLAKTMADVPFQIMFPVAYCSIVYWMTSQPSDAVRFVLFAALGTMTSLVAQSLGLLIGAASTSLQVATFVGPVTAIPVLLFSGFFVSFDTIPTYLQWMSYISYVRYGFEGVILSIYGLDREDLHCDIDETCHFQKSEAILRELDVENAKLYLDFIVLGIFFISLRLIAYFVLRYKIRAER

SEQ ID NO: 27 - protein, 177 aa, Homo Sapiens
MAPGQTPSLCSWLLPLPSTWATTGHVCFSDILQTPDGGQLLLDWAKQPDSSQDPDPTTQPIVLLLPGITGSSQETYVLHLVNQALRDGYQAVVFNNRGCRGEELRTHRAFCASNTEDLETVVNHIKHRYPQAPLLAVGISFGGILVLNHLAQARQAAGLVAALTLSACWDSFETTRS

SEQ ID NO: 28 - protein, 102 aa, Homo Sapiens
MAPGQTPSLCSWLLPLPSTWATTGHVCFSDILQTPDGGQLLLDWAKQPDSSQDPDPTTQPIVLLLPGITGSSQETYVLHLVNQALRDGYQPTGLFVPAILKI

SEQ ID NO: 29 - protein, 405 aa, Homo Sapiens
MLSSFLSPQNGTWADTFSLLLALAVALYLGYYWACVLQRPRLVAGPQFLAFLEPHCSITTETFYPTLWCFEGRLQSIFQVLLQSQPLVLYQSDILQTPDGGQLLLDWAKQPDSSQDPDPTTQPIVLLLPGITGSSQETYVLHLVNQALRDGYQAVVFNNRGCRGEELRTHRAFCASNTEDLETVVNHIKHRYPQAPLLAVGISFGGILVLNHLAQARQAAGLVAALTLSACWDSFETTRSLETPLNSLLFNQPLTAGLCQLVERNRKVIEKVVDIDFVLQARTIRQFDERYTSVAFGYQDCVTYYKAASPRTKIDAIRIPVLYLSAADDPFSPVCALPIQAAQHSPYVALLITARGGHIGFLEGLLPWQHWYMSRLLHQYAKAIFQDPEGLPDLRALLPSEDRNS

SEQ ID NO: 30 - protein, 305 aa, Homo Sapiens
MLSSFLSPQNGTWADTFSLLLALAVALYLGYYWACVLQRPRLVAGPQFLAFLEPHCSITTETFYPTLWCFEGRLQSIFQVLLQSQPLVLYQSDILQTPDGGQLLLDWAKQPDSSQDPDPTTQPIVLLLPGITGSSQETYVLHLVNQALRDGYQAVVFNNRGCRGEELRTHRAFCASNTEDLETVVNHIKHRYPQAPLLAVGISFGGILVLNHLAQARQAAGLVAALTLSACWDSFETTRSLETPLNSLLFNQPLTAGLCQLVERLSYGKTCRPVQSASLMSATHLWPLDIKTVLPTTKQQALEPR

SEQ ID NO: 31 - protein, 305 aa, Homo Sapiens; identical to SEQ ID NO: 30

SEQ ID NO: 32 - protein, 205 aa, Homo Sapiens
MAVARLAAVAAWVPCRSWGWAAVPFGPHRGLSVLLARIPQRAPRWLPACRQKTSLSFLNRPDLPNLAYKKLKGKSPGIIFIPGYLSYMNGTKALAIEEFCKSLGHACIRFDYSGVGSSDGNSEESTLGKWRKDVLSIIDDLADGPQILVGSSLGGWLMLHAAIARPEKVVALIGVATAADTLVTKFNQLPVEDSGRKNYISLHSA

SEQ ID NO: 33 - protein, 306 aa, Homo Sapiens
MAVARLAAVAAWVPCRSWGWAAVPFGPHRGLSVLLARIPQRAPRWLPACRQKTSLSFLNRPDLPNLAYKKLKGKSPGIIFIPGYLSYMNGTKALAIEEFCKSLGHACIRFDYSGVGSSDGNSEESTLGKWRKDVLSIIDDLADGPQILVGSSLGGWLMLHAAIARPEKVVALIGVATAADTLVTKFNQLPVELKKEVEMKGVWSMPSKYSEEGVYNVQYSFIKEAEHHCLLHSPIPVNCPIRLLHGMKDDIVPWHTSMQVADRVLSTDVDVILRKHSDHRMREKADIQLLVYTIDDLIDKLSTIVN

SEQ ID NO: 34 - protein, 52 aa, Homo Sapiens
MAVARLAAVAAWVPCRSWGWAAVPFGPHRGLSVLLARIPQRAPRWLPDSCWI

SEQ ID NO: 35 - protein, 75 aa, Homo Sapiens
MAVARLAAVAAWVPCRSWGWAAVPFGPHRGLSVLLARIPQRAPRWLPGLITQELEVQMVTQRKAHWGNGEKMFFL

SEQ ID NO: 36 - protein, 229 aa, Homo Sapiens [sequence omitted]

SEQ ID NO: 37 - protein, 225 aa, Homo Sapiens [sequence omitted]

SEQ ID NO: 38 - protein, 153 aa, Homo Sapiens [sequence omitted]

SEQ ID NO: 39 - protein, 124 aa, Homo Sapiens
MVGALCGCWFRLGGARPLIPLGPTVVQTSMSRSQVALLGLSLLLMLLLYVGLPGPPEQTSCLWGDPNVTVLAGLTPGNSPIFYREVLPLNQAHRLQPLSCMESWTTSWLESHCGSSATCPTTLW

SEQ ID NO: 40 - protein, 271 aa, Homo Sapiens
MVGALCGCWFRLGGARPLIPLGPTVVQTSMSRSQVALLGLSLLLMLLLYVGLPGPPEQTSCLWGDPNVTVLAGLTPGNSPIFYREVLPLNQAHRVEVVLLHGKAFNSHTWEQLGTLQLLSQRGYRAVALDLPGFGNSAPSKEASTEAGRAALLERALRDLEVQNAVLVSPSLSGHYALPFLMRGHHQLHGFVPIAPTSTQNYTQEQFWAVKTPTLILYGELDHILARESLRQLRHLPNHSVVKLRNAGHACYLHKPQDFHLVLLAFLDHLP

SEQ ID NO: 41 - protein, 468 aa, Homo Sapiens
MPPWGAALALILAVLALLGLLGPRLRGPWGRAVGERTLPGAQDRDDGEEADGGGPADQFSDGREPLPGGCSLVCKPSALAQCLLRALRRSEALEAGPRSWFSGPHLQTLCHFVLPVAPGPELAREYLQLADDGLVALDWVVGPCVRGRRITSAGGLPAVLLVIPNAWGRLTRNVLGLCLLALERGYYPVIFHRRGHHGCPLVSPRLQPFGDPSDLKEAVTYIRFRHPAAPLFAVSEGSGSALLLSYLGECGSSSYVTGAACISPVLRCREWFEAGLPWPYERGFLLHQKIALSRYATALEDTVDTSRLFRSRSLREFEEALFCHTKSFPISWDTYWDRNDPLRDVDEAAVPVLCICSADDPVCGPPDHTLTTELFHSNPYFFLLLSRHGGHCGFLRQEPLPAWSHEVILESFRALTEFFRTEERIKGLSRHRASFLGGRRRGGALQRREVSSSSNLEEIFNWKRSYTR

SEQ ID NO: 42 - protein, 191 aa, Homo Sapiens
CIVVLWYGWLHFYAEPKYLIVVRPAPPPSQKKSCSGKTRSRKPLQLVVGTLTPSSVFLSWGFLINPHHDWTLPSHCPNDRFYTIRYREKDKEKKWIFQICPATETIVENLKPNTVYEFGVKDNVEGGIWSKIFNHKTVVGSKKVNGKIQSTYDQDHTVPAYVPRKLIPITIIKQVIQNVTHKDSAKSPEKA

SEQ ID NO: 43 - protein, 60 aa, Homo Sapiens
MRGGKCNMLSSLGCLLLCGSITLALGNAQKLPKANKRTELVIQHGWMSLIKMMLNERSQV

SEQ ID NO: 44 - protein, 161 aa, Homo Sapiens
MRGGKCNMLSSLGCLLLCGSITLALGNAQKLPKDAEPKYLIVVRPAPPPSQKKSCSGKTRSRKPLQLVVGTLTPSSVFLSWGFLINPHHDWTLPSHCPNDRFYTIRYREKDKEKKWIFQICPATETIVENLKPNTVYEFGVKDNVEGGIWSKIFNHKTVVG

SEQ ID NO: 45 - protein, 1075 aa, Homo Sapiens
MRGGKCNMLSSLGCLLLCGSITLALGNAQKLPKGKRPNLKVHINTTSDSILLKFLRPSPNVKLEGLLLGYGSNVSPNQYFPLPAEGKFTEAIVDAEPKYLIVVRPAPPPSQKKSCSGKTRSRKPLQLVVGTLTPSSVFLSWGFLINPHHDWTLPSHCPNDRFYTIRYREKDKEKKWIFQICPATETIVENLKPNTVYEFGVKDNVEGGIWSKIFNHKTVVGSKKVNGKIQSTYDQDHTVPAYVPRKLIPITIIKQVIQNVTHKDSAKSPEKAPLGGVILVHLIIPGLNETTVKLPASLMFEISDALKTQLAKNETLALPAESKTPEVEKISARPTTVTPETVPRSTKPTTSSALDVSETTLASSEKPWIVPTAKISEDSKVLQPQTATYDVFSSPTTSDEPEISDSYTATSDRILDSIPPKTSRTLEQPRATLAPSETPFVPQKLEIFTSPEMQPTTPAPQQTTSIPSTPKRRPRPKPPRTKPERTTSAGTITPKISKSPEPTWTTPAPGKTQFISLKPKIPLSPEVTHTKPAPKQTPRAPPKPKTSPRPRIPQTQPVPKVPQRVTAKPKTSPSPEVSYTTPAPKDVLLPHKPYPEVSQSEPAPLETRGIPFIPMISPSPSQEELQTTLEETDQSTQEPFTTKIPRTTELAKTTQAPHRFYTTVRPRTSDKPHIRPGVKQAPRPSGADRNVSVDSTHPTKKPGTRRPPLPPRPTHPRRKPLPPNNVTGKPGSAGIISSGPITTPPLRSTPRPTGTPLERIETDIKQPTVPASGEELENITDFSSSPTRETDPLGKPRFKGPHVRYIQKPDNSPCSITDSVKRFPKEEATEGNATSPPQNPPTNLTVVTVEGCPSFVILDWEKPLNDTVTEYEVISRENGSFSGKNKSIQMTNQTFSTVENLKPNTSYEFQVKPKNPLGEGPVSNTVAFSTESADPRVSEPVSAGRDAIWTERPFNSDSYSECKGKQYVKRTWYKKFVGVQLCNSLRYKIYLSDSLTGKFYNIGDQRGHGEDHCQFVDSFLDGRTGQQLTSDQLPIKEGYFRAVRQEPVQFGEIGGHTQINYVQWYECGTTIPGKW

SEQ ID NO: 46 - protein, 1777 aa, Homo Sapiens
MRGGKCNMLSSLGCLLLCGSITLALGNAQKLPKGKRPNLKVHINTTSDSILLKFLRPSPNVKLEGLLLGYGSNVSPNQYFPLPAEGKFTEAIVDAEPKYLIVVRPAPPPSQKKSCSGKTRSRKPLQLVVGTLTPSSVFLSWGFLINPHHDWTLPSHCPNDRFYTIRYREKDKEKKWIFQICPATETIVENLKPNTVYEFGVKDNVEGGIWSKIFNHKTVVGSKKVNGKIQSTYDQDHTVPAYVPRKLIPITIIKQVIQNVTHKDSAKSPEKAPLGGVILVHLIIPGLNETTVKLPASLMFEISDALKTQLAKNETLALPAESKTPEVEKISARPTTVTPETVPRSTKPTTSSALDVSETTLVLSKRTPETLQTILIPQFELPLSTLAPKSLPEFPEAKTPFPFEKPRGTLASSEKPWIVPTAKISEDSKVLQPQTATYDVFSSPTTSDEPEISDSYTATSDRILDSIPPKTSRTLEQPRATLAPSETPFVPQKLEIFTSPEMQPTTPAPQQTTSIPSTPKRRPRPKPPRTKPERTTSAGTITPKISKSPEPTWTTPAPGKTQFISLKPKIPLSPEVTHTKPAPEPQTLLPSQSTIGPETPGTKPSTTLAPRKTKRPGRRPRPRPRPKTTPSPEVPKSKPALEPATIQPEPLVPTTASKPSERPKTTHRPDAPQIQPGSKPPKQLLPKPQTTAEPDMPPTKSVSEPVPFETEAPSMTIVPTTDIEPVTVRTEATVTTLAPKTSQRTRTRRPRPKHKTTPRPETLQTKLDFGPITPGTSSAPTTTTKRTRRPHPKPKTTPHPEVPQTKLVPATILEPVLRTEASGTTAAPKVPQRTHRPHPKPKTTLSPEELQTELVPATIFEPVSPIKEAPGTTFVPVTDLEPVTFRTEIPATTLATKTSKRTRPPRPRPKTTPSPQAPETKPVPATVLEPVTLRPEASTTLASKTSQRTRRPRLRTKTTPRPEAPESKPVPTAELKPVTLRTETWVTTQAPKTSQRTRRPRPKTKTTPSPEVPQTKLVPSTDLEPGTLRTEAPKTMVVTTVLEPDTFRTKFPETTLAPKTQRTRRPRPRPKTTSSPEVPQNKSVSVTGFEPVVHSTDAPGTTFALTELQTLILKPVTSPSLEMTESQPVSDVLESVTLSTESPKETIAPAKTDYVYPTAKAPLWPEEPKTEVVESITYVSEPPETTLETSPLPSQSITLPSPDEPQTEPAPKQTPRAPPKPKTSPRPRIPQTQPVPKVPQRVTAKPKTSPSPEVSYTTPAPKDVLLPHKPYPEVSQSEPAPLETRGIPFIPMISPSPSQEELQTTLEETDQSTQEPFTTKIPRTTELAKTTQAPHRFYTTVRPRTSDKPHIRPVLNRTTTRPTRPKPSGMPSGNGVGTGVKQAPRPSGADRNVSVDSTHPTKKPGTRRPPLPPRPTHPRRKPLPPNNVTGKPGSAGIISSGPITTPPLRSTPRPTGTPLERIETDIKQPTVPASGEELENITDFSSSPTRETDPLGKPRFKGPHVRYIQKPDNSPCSITDSVKRFPKEEATEGNATSPPQNPPTNLTVVTVEGCPSFVILDWEKPLNDTVTEYEVISRENGSFSGKNKSIQMTNQTFSTVENLKPNTSYEFQVKPKNPLGEGPVSNTVAFSTESADPRVSEPVSAGRDAIWTERPFNSDSYSECKGKQYVKRTWYKKFVGVQLCNSLRYKIYLSDSLTGKFYNIGDQRGHGEDHCQFVDSFLDGRTGQQLTSDQLPIKEGYFRAVRQEPVQFGEIGGHTQINYVQWYECGTTIPGKW

SEQ ID NO: 47 - protein, 1005 aa, Homo Sapiens
MRGGKCNMLSSLGCLLLCGSITLALGNAQKLPKGKRPNLKVHINTTSDSILLKFLRPSPNVKLEGLLLGYGSNVSPNQYFPLPAEGKFTEAIVDAEPKYLIVVRPAPPPSQKKSCSGKTRSRKPLQLVVGTLTPSSVFLSWGFLINPHHDWTLPSHCPNDRFYTIRYREKDKEKKWIFQICPATETIVENLKPNTVYEFGVKDNVEGGIWSKIFNHKTVVGSKKVNGKIQSTYDQDHTVPAYVPRKLIPITIIKQVIQNVTHKDSAKSPEKAPLGGVILVHLIIPGLNETTVKLPASLMFEISDALKTQLAKNETLALPAESKTPEVEKISARPTTVTPETVPRSTKPTTSSALDVSETTLVLSKRTPETLQTILIPQFELPLSTLAPKSLPEFPEAKTPFPFEKPRGTLASSEKPWIVPTAKISEDSKVLQPQTATYDVFSSPTTSDEPEISDSYTATSDRILDSIPPKTSRTLEQPRATLAPSETPFVPQKLEIFTSPEMQPTTPAPQQTTSIPSTPKRRPRPKPPRTKPERTTSAGTITPKISKSPEPTWTTPAPGKTQFISLKPKIPLSPEVTHTKPAPEPQTLLPSQSTIGPETPGTKPSTTLAPRKTKRPGRRPRPRPRPKTTPSPEVPKSKPALEPATIQPEPLVPTTASKPSERPKTTHRPDAPQIQPGSKPPKQLLPKPQTTAEPDMPPTKSVSEPVPFETEAPSMTIVPTTDIEPVTVRTEATVTTLAPKTSQRTRTRRPRPKHKTTPRPETLQTKLDFGPITPGTSSAPTTTTKRTRRPHPKPKTTPHPEVPQTKLATKTSKRTRPPRPRPKTTPSPQAPETKPVPATVLEPVTLRPEASTTLASKTSQRTRRPRLRTKTTPRPEAPESKPVPTAELKPVTLRTETWVTTQAPKTSQRTRRPRPKTKTTPSPEVPQTKLVPSTDLEPGTLRTEAPKTMVVTTVLEPDTFRTKFPETTLAPKTQRTRRPRPRPKTTSSPEVPQNKSGKCMNPWLK

SEQ ID NO: 48 - protein, 188 aa, Homo Sapiens [sequence omitted]

SEQ ID NO: 49 - protein, 233 aa, Homo Sapiens
QRVTAKPKTSPSPEVSYTTPAPKDVLLPHKPYPEVSQSEPAPLETRGIPFIPMISPSPSQEELQTTLAPHRFYTTVRPRTSDKPHIRPGVKQAPRPSGADRNVSVDSTHPTKKPGTRRPPLPPRPTHPRRKPLPPNNVTGKPGSAGIISSGPITTPPLRSTPRPTGTPLERIETDIKQPTVPASGEELENITDFSSSPTRETDPLGKPRFKGPHVRYIQKPDNSPCSITDSVK

SEQ ID NO: 50 - protein, 158 aa, Homo Sapiens
VSDVLESVTLSTESPKETIAPAKTDYVYPTAKAPLWPEEPKTEVVESITYVSEPPETTLETSPLPSQSITLPSPDEPQTEPAPKQTPRAPPKPKTSPRPRIPQTQPVPKVPQRVTAKPKTSPSPEVSYTTPAPLETRGIPFIPMISPSPSQEELQTTL

SEQ ID NO: 51 - protein, 84 aa, Homo Sapiens
  misc_feature (1)..(1): Xaa can be any naturally occurring amino acid
XFEKPRGTLASSEKPWIVPTAKISEDSKVLQPQTATSDRILDSIPPKTSRTLEQPRATLAPSETPFVPQKLEIFTSPEMQPTTP

SEQ ID NO: 52 - protein, 187 aa, Homo Sapiens
  misc_feature (1)..(1): Xaa can be any naturally occurring amino acid
XFISLKPKIPLSPEVTHTKPAPKTSQRTRTRRPRPKHKTTPRPETLQTKLDFGPITPGTSSAPTTTTKRTRRPHPKPKTTPHPEVPQTKLAPKQTPRAPPKPKTSPRPRIPQTQPVPKVPQRVTAKPKTSPSPEVSYTTPAPKDVLLPHKPYPEVSQSEPAPLETRGIPFIPMISPSPSQEELQTTL

SEQ ID NO: 53 - protein, 1131 aa, Homo Sapiens
  misc_feature (1)..(1): Xaa can be any naturally occurring amino acid
XISLKPKIPLSPEVTHTKPAPEPQTLLPSQSTIGPETPGTKPSTTLALEPATIQPEPLVPTTASKPSERPKTTHRPDAPQIQPGSKPPKQLLPKPQTTAEPDMPPTKSVSEPVPFETEAPSMTIVPTTDIEPVTVRTEATVTTLAPKTSQRTRTRRPRPKHKTTPRPETLQTKLDFGPITPGTSSAPTTTTKRTRRPHPKPKTTPHPEVPQTKLVPATILEPVLRTEASGTTAVPATIFEPVSPIKEAPGTTFVPVTDLEPVTFRTEIPATTLATKTSKRTRPPRPRPKTTPSPQAPETKPVPATVLEPVTLRPEASTTLASKTSQRTRRPRLRTKTTPRPEAPESKPVPTAELKPVTLRTETWVTTQAPKTSQRTRRPRPKTKTTPSPEVPQTKLVPSTDLEPGTLRTEAPKTMVVTTVLEPDTFRTKFPETTLAPKTQRTRRPRPRPKTTSSPEVPQNKSVSVTGFEPVVHSTDAPGTTFALTELQTLILKPVTSPSLEMTESQPVSDVLESVTLSTESPKETIAPAKTDYVYPTAKAPLWPEEPKTEVVESITYVSEPPETTLETSPLPSQSITLPSPDEPQTEPAPKQTPRAPPKPKTSPRPRIPQTQPVPKVPQRVTAKPKTSPSPEVSYTTPAPKDVLLPHKPYPEVSQSEPAPLETRGIPFIPMISPSPSQEELQTTLEETDQSTQEPFTTKIPRTTELAKTTQAPHRFYTTVRPRTSDKPHIRPGVKQAPRPSGADRNVSVDSTHPTKKPGTRRPPLPPRPTHPRRKPLPPNNVTGKPGSAGIISSGPITTPPLRSTPRPTGTPLERIETDIKQPTVPASGEELENITDFSSSPTRETDPLGKPRFKGPHVRYIQKPDNSPCSITDSVKRFPKEEATEGNATSPPQNPPTNLTVVTVEGCPSFVILDWEKPLNDTVTEYEVISRENGSFSGKNKSIQMTNQTFSTVENLKPNTSYEFQVKPKNPLGEGPVSNTVAFSTESADPRVSEPVSAGRDAIWTERPFNSDSYSECKGKQYVKRTWYKKFVGVQLCNSLRYKIYLSDSLTGKFYNIGDQRGHGEDHCQFVDSFLDGRTGQQLTSDQLPIKEGYFRAVRQEPVQFGEIGGHTQINYVQWYECGTTIPGKW

SEQ ID NO: 54 - protein, 125 aa, Homo Sapiens
  misc_feature (1)..(1): Xaa can be any naturally occurring amino acid
XKNETLALPAESKTPEVEKISARPTTVTPETVPRSTKPTTSSALDVSETTLAPKSLPEFPEAKTPFPFEKPRGTLASSEKPWIVPTAKISEDSKVLQPQTALTELQTLILKPVTSPSLEMTESQP

SEQ ID NO: 55 - protein, 187 aa, Homo Sapiens
  misc_feature (1)..(1): Xaa can be any naturally occurring amino acid
XKTTPHPEVPQTKLAPKVPQRTHRPHPKPKTTLSPEELQTELVPATIFEPVSPIKEAPGTTFVPVTDLEPVTFRTEIPATTLATKTSKRTRPPRPRPKTTPSPQAPETKPAPKQTPRAPPKPKTSPRPRIPQTQPVPKVPQRVTAKPKTSPSPEVSYTTPAPLETRGIPFIPMISPSPSQEELQTTL

SEQ ID NO: 56 - protein, 187 aa, Homo Sapiens
  misc_feature (1)..(1): Xaa can be any naturally occurring amino acid
XNGKIQSTYDQDHTVPAYVPRKLIPITIIKQVIQNVTHKDSAKSPEKAPLGGVILVHLIIPGLNETTVKLPASLMFEISDALKTQLAKNETLALPAESKTPEVEKISARPTTVTPETVPRSTKPTTSSALDVSETTLVLSKRTPETLQTILIPQFELPLSTLASSEKPWIVPTAKISEDSKVLQPQT

SEQ ID NO: 57 - protein, 150 aa, Homo Sapiens
  misc_feature (1)..(1): Xaa can be any naturally occurring amino acid
XPETPGTKPSTTLAPRKTKRPGRRPRPRPRPKTTPSPEVPKSKPALEPATIQPEPLVPTTVPTTDIEPVTVRTEATVTTLAPKTSQRTRTRRPRPKHKTTPRPETLQTKLDFGPITPGTSSAPTTTTKRTRRPHPKPKTTPHPEVPQTKL

SEQ ID NO: 58 - protein, 308 aa, Homo Sapiens
  misc_feature (1)..(1): Xaa can be any naturally occurring amino acid
XPKPKTTPHPEVPQTKLATKTSKRTRPPRPRPKTTPSPQAPETKPVPATVLEPVTLRPEASTTLASKTSQRTRRPRLRTKTTPRPEAPESKPVPTAELKPVTLRTETWVTTQAPKQTPRAPPKPKTSPRPRIPQTQPVPKVPQRVTAKPKTSPSPEVSYTTPAPKDVLLPHKPYPEVSQSEPAPLETRGIPFIPMISPSPSQEELQTTLEETDQSTQEPFTTKIPRTTELAKTTQAPHRFYTTVRPRTSDKPHIRPVLNRTTTRPTRPKPSGMPSGNGVGTGVKQAPRPSGADRNVSVDSTHPTKKPG

SEQ ID NO: 59 - protein, 87 aa, Homo Sapiens
  misc_feature (1)..(1): Xaa can be any naturally occurring amino acid
XQTLLPSQSTIGPETPGTKPSTTLAPRKTKRPGRRPRPRPRPKTTPSPEVPKSKPALEPATIQPEPLVPTTVSEPVPFETEAPSMTI

SEQ ID NO: 60 - protein, 187 aa, Homo Sapiens
  misc_feature (1)..(1): Xaa can be any naturally occurring amino acid
XRTTSAGTITPKISKSPEPTWTTPAPGKTQFISLKPKIPLSPEVTHTKPVPTTDIEPVTVRTEATVTTLAPKTSQRTRTRRPRPKHKTTPRPETLQTKLDFGPITPGTSSAPTTTTKRTRRPHPKPKTTPHPEVPQTKLAPKVPQRTHRPHPKPKTTLSPEELQTELVPATIFEPVSPIKEAPGTTF

SEQ ID NO: 61 - protein, 189 aa, Homo Sapiens
  misc_feature (1)..(1): Xaa can be any naturally occurring amino acid
XTAKPKTSPSPEVSYTTPAPLETRGIPFIPMISPSPSQEELQTTLEETDQSTQEPFTTKIPRTTELAKTTQAPHRFYTTVRPRTSDKPHIRPVLNRTTTRPTRPKPSGMPSGNGVGTGVKQAPRPSGADRNVSVDSTHPTKKPGTRRPPLPPRPTHPRRKPLPPNNVTGKPGSAGIISSGPITTPPLRS

SEQ ID NO: 62 - protein, 303 aa, Homo Sapiens
  misc_feature (1)..(1): Xaa can be any naturally occurring amino acid
XTPEVEKISARPTTVTPETVPRSTKPTTSSALDVSETTLASSEKPWIVPTAKISEDSKVLQPQTATYDVFSSPTTSDEPEISDSYTATSDRILDSIPPKTSRTLEQPRATLAPSETPFVPQKLEIFTSPEMQPTTPAPQQTTSIPSTPKRRPRPKPPRTKPERTTSAGTITPKISKSPEPTWTTPAPGKTQFISLKPKIPLSPEVTHTKPAPEPQTLLPSQSTIGPETPGTKPSTTLAPRKTKRPGRRPRPRPRPKTTPSPEVPKSKPALEPATIQPEPLVPTTASKPSERPKTTHRPDAPQI

SEQ ID NO: 63 - protein, 151 aa, Homo Sapiens
  misc_feature (1)..(1): Xaa can be any naturally occurring amino acid
XVESITYVSEPPETTLETSPLPSQSITLPSPDEPQTEPAPKQTPRAPPKPKTSPRPRIPQTQPVPKVPQRVTAKPKTSPSPEVSYTTPAPKDVLLPHKPYPEVSQSEPVLQPVTFRFEPPKTTIAPLETRGIPFIPMISPSPSQEELQTTL

SEQ ID NO: 64 - protein, 198 aa, Homo Sapiens
LLHKNLQEHFSNQDLVFLLLTPSIITESCSTHRLEHSLYKPQKGLFHRVPLVVANLGMSEQLGYKTVSGSCMSTGFSRAVQTHSSKFFEEDGSLKEVHKINEMYASLQEELKLYSFSECHLHPGSRLKEQPLFGTCPHGIRQRARKLVDYRREPPQLAHELIFQFISVYFQRTNWHDKSCINEKLHVKKHFTTYKAYL

SEQ ID NO: 65 - protein, 360 aa, Homo Sapiens
MDDVEVVYTIDIQKYIPCYQLFSFYNSSGEVNEQALKKILSNVKKNVVGWYKFRRHSDQIMTFRERLLHKNLQEHFSNQDLVFLLLTPSIITESCSTHRLEHSLYKPQKGLFHRVPLVVANLGMSEQLGYKTVSGSCMSTGFSRAVQTHSSKFFEEDGSLKEVHKINEMYASLQEELKSICKKVEDSEQAVDKLVKDVNRLKREIEKRRGAQIQAAREKNIQKDPQENIFLCQALRTFFPNSEFLHSCVMSLKNRHVSKSSCNYNHHLDVVDNLTLMVEHTDIPEASPASTPQIIKHKALDLDDRWQFKRSRLLDTQDKRSKADTGSSNQDKASKMSSPETDEEIEKMKGFGEYSRSPTF

SEQ ID NO: 66 - protein, 74 aa, Homo Sapiens
MEGESTSAVLSGFVLGALAFQHLNTDSDTEGFLLGEVKGEAKNSITDSQMDDVEVVYTIDIQKYIPCYQLFRMW

SEQ ID NO: 67 - protein, 409 aa, Homo Sapiens
MEGESTSAVLSGFVLGALAFQHLNTDSDTEGFLLGEVKGEAKNSITDSQMDDVEVVYTIDIQKYIPCYQLFSFYNSSGEVNEQALKKILSNVKKNVVGWYKFRRHSDQIMTFRERLLHKNLQEHFSNQDLVFLLLTPSIITESCSTHRLEHSLYKPQKGLFHRVPLVVANLGMSEQLGYKTVSGSCMSTGFSRAVQTHSSKFFEEDGSLKEVHKINEMYASLQEELKSICKKVEDSEQAVDKLVKDVNRLKREIEKRRGAQIQAAREKNIQKDPQENIFLCQALRTFFPNSEFLHSCVMSLKNRHVSKSSCNYNHHLDVVDNLTLMVEHTDIPEASPASTPQIIKHKALDLDDRWQFKRSRLLDTQDKRSKADTGSSNQDKASKMSSPETDEEIEKMKGFGEYSRSPTF

SEQ ID NO: 68 - protein, 37 aa, Homo Sapiens
MEGESTSAVLSGFVLGALAFQHLNTDSDTVGRGGSRL

SEQ ID NO: 69 - protein, 189 aa, Homo Sapiens
MEGESTSAVLSGFVLGALAFQHLNTDSDTVSRGTGRGPASPGKSPARGLPPRCCSGPRPLPRRRRASSLRSRLCLLSPSAVPEEGFLLGEVKGEAKNSITDSQMDDVEVVYTIDIQKYIPCYQLFSFYNSSGEVNEQALKKILSNVKKNVVGWYKFRRHSDQIMTFRERLLHKNLQEHFSNQDLVFLLL

SEQ ID NO: 70 - protein, 220 aa, Homo Sapiens
MKTSSPKENCLFLCFTSMKNGQEGFLLGEVKGEAKNSITDSQMDDVEVVYTIDIQKYIPCYQLFSFYNSSGEVNEQALKKILSNVKKNVVGWYKFRRHSDQIMTFRERLLHKNLQEHFSNQDLVFLLLTPSIITESCSTHRLEHSLYKPQKGLFHRVPLVVANLGMSEQLGYKTVSGSCMSTGFSRAVQTHSSKFFEEDGSLKEVHKINEMYASLQEELK

SEQ ID NO: 71 - protein, 82 aa, Homo Sapiens
MMLKLFIQLMESHSVAQTGVKWHDLGSLQPLPLEVKRFSCLGLRSSWDYRHTQPCPANFFCIFSRDGVSPCWPGWSRTPDLK

SEQ ID NO: 72 - protein, 536 aa, Homo Sapiens
MGAWAFPAALFLLCLTSESLQGGLPLLPPGLGKVYGPHSGLGAGYDGGVKPQKPGFVVRHGLGTQPDTEGGMKPQNLGFRTFAGAAAQPGYGNGLGAAAFPVAGAQSGPAAQNGFGPGFGGGGKPQKPGPTTQNGYRPGYVGAVKPQKPGFQYRIGLGAQPGFRGDMKAQEPGLGNGNGLSAQPVLTAQNRFGFGAGLGGNVKPLKPGYGKRLRAGAFPGAGTQPEYGHGNGPGVQPGLGAGMKPQMPGLGAPNGYGPGRGRAGVPGGPERRPWVPHLLPFSSPGYLGVMKAQKPGPLAQNGYRAGAGEGMKPQKPGLRGTLKPQKSGHGHENGPWPGPCNARVAPMLLPRLPTPGVPSDKEGGWGLKSQPPSAVQNGKLPAPMPAIQWGLKPQKAGHQPPNGYGPGAEPGFNGGLEPQKIGLGYGNGVLGARVFPEAHPQPGFHGANGFRNRDGVEALVYPKAAALAPEGNGQAGVLWNSRWPTLQAWGAGLKPGYQAGDEYAEARSQPGGPDVKRGSNGQLGNGYGGRCPLGKC

SEQ ID NO: 73 - protein, 195 aa, Homo Sapiens
MPNFLGLHRARSFTVLCFWSTADVLNASGPRRQWHPLASCSSWSRPQSQGSTPGVLCKTGMGREPIPETQCHFANSMCSLHVSVPYFGNSPNISNFFRWSLALSPRQWCDLGSLQPPSPRFKGFSCLSLPSSWDYRRAPSPANFCILVEMGFHHVGQADLELLTSADLPTSASQSAGITGVSHHAWPQTLSLLLY

SEQ ID NO: 74 - protein, 130 aa, Homo Sapiens
MGGTWASKEPLRPRCRPINATLAVEKEGCPVCITVNTTICAGYCPTMTRVLQGVLPALPQVVCNYRDVRFESIRLPGCPRGVNPVVSYAVALSCQCALCRRSTTDCGGPKDHPLTCDDPRFQDSSSSKAP

SEQ ID NO: 75 - protein, 77 aa, Homo Sapiens
MSKGLLLLLLLSMGGTWASKEPLRPRCRPINATLAVEKEGCPVCITVNTTICAGYCPTMTRVLQGVLPALPQVVCNY

SEQ ID NO: 76 - protein, 165 aa, Homo Sapiens
MDAEGLALLLPPVTLAALVDSWLREDCPGLNYAALVSGAGPSQAALWAKSPGVLAGQPFFDAIFTQLNCQVSWFLPEGSKLVPVARVAEVRGPAHCLLLGERVALNTLARCSGIASAAAAAVEAARGAGWTGHVAGTRKTTPGFRLVEKYGLLVGGAASHRYDLG

SEQ ID NO: 77 - protein, 210 aa, Homo Sapiens [sequence omitted]

SEQ ID NO: 78 - protein, 83 aa, Homo Sapiens [sequence omitted]

SEQ ID NO: 79 - protein, 105 aa, Homo Sapiens
MKGWGWLALLLGALLGTAWARRSQDLHCGACRALVDELEWEIAQVDPKKTIQMGSFRINPDGSQSVVENASCLVLAARHASASSTNLKDILADLIPKEQARIKTF

SEQ ID NO: 80 - protein, 263 aa, Homo Sapiens
MKGWGWLALLLGALLGTAWARRSQDLHCGACRALVDELEWEIAQVDPKKTIQMGSFRINPDGSQSVVEVPYARSEAHLTELLEEICDRMKEYGEQIDPSTHRKNYVRVVGRNGESSELDLQGIRIDSDISGTLKFACESIVEEYEDELIEFFSREADNVKDKLCSKRTDGGTSKNRDRKGKMDVTNSAEKSRRSPAMALLTAAARLLGTKNASCLVLAARHASASSTNLKDILADLIPKEQARIKTFRQQHGKTVVGQITVDM

SEQ ID NO: 81 - protein, 171 aa, Homo Sapiens
MPETSHIVALTSKSEQELYIPSVVSNSPSTVQSIENTSKSHGEIFKKDVCAENNNNMAMLICLIIIAVLFLICTFLFLSTVVLANKVSSLRRSKQVGKRQPRSNGDFLASGLWPAESDTWKRTKQLTGPNLVMQSTGVLTATRERKDEEGTEKLTNKQIAKSPKCPVRTRI

SEQ ID NO: 82 - protein, 123 aa, Homo Sapiens
  misc_feature (1)..(1): Xaa can be any naturally occurring amino acid
XCAENNNNMAMLICLIIIAVLFLICTFLFLSTVVLANKVSSLRRSKQVGKRQPRSNGDFLASGLWPAESDTWKRTKQLTGPNLVMQSTGVLTATRERKDEEGTEKLTNKQIAKSPKCPVRTRI

SEQ ID NO: 83 - protein, 117 aa, Homo Sapiens
  misc_feature (1)..(1): Xaa can be any naturally occurring amino acid
XCAENNNNMAMLICLIIIAVLFLICTFLFLSTVVLANKVSSLRRSKQVGKRQPRSNGDFLASGLWPAESDTWKRTKQLTGPNLVMQSTGVLTATRERKDEEGTEKLTNKQIDNEEIF

SEQ ID NO: 84 - protein, 153 aa, Homo Sapiens
  misc_feature (1)..(1): Xaa can be any naturally occurring amino acid
XCAENNNNMAMLICLIIIAVLFLICTFLFLSTVVLANKVSSLRRSKQVGKRQPRSNGDFLASGLWPAESDTWKRTKQLTGPNLVMQSTGVLTATRERKDEEGTEKLTNKQIEEETVTQKCRVLPKVIQVNRTHHSLLMRRNLTKLFQFARGTF

SEQ ID NO: 85 - protein, 104 aa, Homo Sapiens
MGSTWGSPGWVRLALCLTGLVLSLYALHVKAARARDRDYRALCDVGTAISCSRVFSSRAAATELNSWSVVLGSLQREGLSPGAEEVGVAALQLPRAYNHYSQGS

SEQ ID NO: 86 - protein, 166 aa, Homo Sapiens
MGSTWGSPGWVRLALCLTGLVLSLYALHVKAARARDRDYRALCDVGTAISCSRVFSSRWGRGFGLVEHVLGQDSILNQSNSIFGCIFYTLQLLLGLQAAQRACGQRGPGPPKPQEGNTVPGEWPWQASVRRQGAHICSGSLVADTWVLTAAHCFEKAAATELNSWS

SEQ ID NO: 87 - protein, 121 aa, Homo Sapiens
  misc_feature (1)..(1): Xaa can be any naturally occurring amino acid
XDVGTAISCSRVFSSRWGRGFGLVEHVLGQDSILNQSNSIFGCIFYTLQLLLGCLRTRWASVLMLLSSLVSLAGSVYLAWILFFVLYDFCIVCITTYAINVSLMWLSFRKVQEPQGKAKRH

SEQ ID NO: 88 - protein, 199 aa, Homo Sapiens
MALLLRFVLLCRVADFIRGWSITTPEQMIEKAKGETAYLPCKFTLSPEDQGPLDIEWLISPADNQKVDQVIILYSGDKIYDDYYPDLKGRVHFKSNDLKSGDASINVTNFQLSDIGTDQCKVKRAPGVANRKIQLVVLGKMCRLQRAARPLPEATAVIIHPWDPYLLPTWKDIPRLSINKYQVKTLNALLRVRLSHLLR

SEQ ID NO: 89 - protein, 116 aa, Homo Sapiens
MEFGLNWVFLVAIIKGAQCEVQLVESGGGLVQPGGSLRLSCPDSGFTFSNHYMSWVRQAPGKGLEWISYISGDSGYTNYADSVKGRFTISRDNANNSPYLQMNSLRAEDTAVYYCV

SEQ ID NO: 90 - protein, 124 aa, Homo Sapiens
MLCPRAAFLVGSFHGVFPGPPASSHWEFWVPSTPVGAYFCPPQPQLTPPNTPKLVSEVEELYKSITALREKLLQAEQSLRNLKDIHMSLEKDVTAMTNSVFIDRQKCMAHRTCYPTILQLAGYQ

SEQ ID NO: 91 - protein, 117 aa, Homo Sapiens
MKHLWFFLLLVAAPRWVLSQVQLQESGPGLVKPSETLSLTCTVSGYSISSGYYWGWIRQPPGKGLEWIGSIYHSGSTYYNPSLKSRVTISVDTSKNQFSLKLSSVTAADTAVYYCAR

SEQ ID NO: 92 - protein, 67 aa, Homo Sapiens
MESPSAPPHRWCIPWQRLLLTASLLTFWNPPTTAKLTIESTPFNVAEGKEVLLLAHNLPQNRIGYSW

SEQ ID NO: 93 - protein, 152 aa, Homo Sapiens
MESPSAPPHRWCIPWQRLLLTASLLTFWNPPTTAKLTIESTPFNVAEGKEVLLLVHNLPQHLFGYSWYKGERVDGNRQIIGYVIGTQQATPGPAYSGREIIYPNASLLIQNIIQNDTGFYTLHVIKSDLVNEEATGQFRVYPELPKPSISSN

SEQ ID NO: 94 - protein, 155 aa, Homo Sapiens
MSPAKCKICFPDREVKPSMSGLHLVKRGREHKKLDLHRDFTVASPAEFVTRFGGDRVIEKVLIANNGIAAVKCMRSIRRWAYEMFRNERAIRFVVMVTPEDLKANAEYIKMADHYVPVPGGPNNNNYANVELIVDIAKRIPVQAVWAGWGHASEN

SEQ ID NO: 95 - protein, 143 aa, Homo Sapiens
MTDSKPITKSKSEANLIPSQEPFPASDNSGETPQRNGEGHTLPKTPSQAEPASHKGPKDAGRRRNSLPPSHQKPPRNPLSSSDAAPSPELQANGTGTQGLEATDTNGLSSSARPQGQQAGSPSKEDKKQANIKRQLMTNFILG

SEQ ID NO: 96 - protein, 858 aa, Homo Sapiens
MTVPISITNPDLLRHSTELFMDSGFSPLCQRMGAMVAFRRFEDFTRNFDEVISCFANVPKDTPLFSEARTSLYSEDDCKSLREEPIHILNVSIQCADHLEDEALVPILRTFVQSKKNILVDYGLRRITFLIAQEKEFPKFFTFRARDEFAEDRIYRHLEPALAFQLELNRMRNFDLTAVPCANHKMHLYLGAAKVKEGVEVTDHRFFIRAIIRHSDLITKEASFEYLQNEGERLLLEAMDELEVAFNNTSVRTDCNHIFLNFVPTVIMDPFKIEESVRYMVMRYGSRLWKLRVLQAEVKINIRQTTTGSAVPIRLFITNESGYYLDISLYKEVTDSRSGNIMFHSFGNKQGPQHGMLINTPYVTKDLLQAKRFQAQTLGTTYIYDFPEMFRQALFKLWGSPDKYPKDILTYTELVLDSQGQLVEMNRLPGGNEVGMVAFKMRFKTQEYPEGRDVIVIGNDITFRIGSFGPGEDLLYLRASEMARAEGIPKIYVAANSGARIGMAEEIKHMFHVAWVDPEDPHKGFKYLYLTPQDYTRISSLNSVHCKHIEEGGESRYMITDIIGKDDGLGVENLRGSGMIAGESSLAYEEIVTISLVTCRAIGIGAYLVRLGQRVIQVENSHIILTGASALNKVLGREVYTSNNQLGGVQIMHYNGVSHITVPDDFEGVYTILEWLSYMPKDNHSPVPIITPTDPIDREIEFLPSRAPYDPRWMLAGRPHPTLKGTWQSGFFDHGSFKEIMAPWAQTVVTGRARLGGIPVGVIAVETRTVEVAVPADPANLDSEAKIIQQAGQVWFPDSAYKTAQAVKDFNREKLPLMIFANWRGFSGGMKGCLGTWRDVSWWKIRAMLPMHIGEGSV

SEQ ID NO: 97 - protein, 2458 aa, Homo Sapiens
MVLLLCLSCLIFSCLTFSWLKIWGKMTDSKPITKSKSEANLIPSQEPFPASDNSGETPQRNGEGHTLPKTPSQAEPASHKGPKDAGRRRNSLPPSHQKPPRNPLSSSDAAPSPELQANGTGTQGLEATDTNGLSSSARPQGQQAGSPSKEDKKQANIKRQLMTNFILGSFDDYSSDEDSVAGSSRESTRKGSRASLGALSLEAYLTTGEAETRVPTMRPSMSGLHLVKRGREHKKLDLHRDFTVASPAEFVTRFGGDRVIEKVLIANNGIAAVKCMRSIRRWAYEMFRNERAIRFVVMVTPEDLKANAEYIKMADHYVPVPGGPNNNNYANVELIVDIAKRIPVQAVWAGWGHASENPKLPELLCKNGVAFLGPPSEAMWALGDKIASTVVAQTLQVPTLPWSGSGLTVEWTEDDLQQGKRISVPEDVYDKGCVKDVDEGLEAAERIGFPLMIKASEGGGGKGIRKAESAEDFPILFRQVQSEIPGSPIFLMKLAQHARHLEVQILADQYGNAVSLFGRDCSIQRRHQKIVEEAPATIAPLAIFEFMEQCAIRLAKTVGYVSAGTVEYLYSQDGSFHFLELNPRLQVEHPCTEMIADVNLPAAQLQIAMGVPLHRLKDIRLLYGESPWGVTPISFETPSNPPLARGHVIAARITSENPDEGFKPSSGTVQELNFRSSKNVWGYFSVAATGGLHEFADSQFGHCFSWGENREEAISNMVVALKELSIRGDFRTTVEYLINLLETESFQNNDIDTGWLDYLIAEKVQAEKPDIMLGVVCGALNVADAMFRTCMTDFLHSLERGQVLPADSLLNLVDVELIYGGVKYILKVARQSLTMFVLIMNGCHIEIDAHRLNDGGLLLSYNGNSYTTYMKEEVDSYRITIGNKTCVFEKENDPTVLRSPSAGKLTQYTVEDGGHVEAGSSYAEMEVMKMIMTLNVQERGRVKYIKRPGAVLEAGCVVARLELDDPSKVHPAEPFTGELPAQQTLPILGEKLHQVFHSVLENLTNVMSGFCLPEPVFSIKLKEWVQKLMMTLRHPSLPLLELQEIMTSVAGRIPAPVEKSVRRVMAQYASNITSVLCQFPSQQIATILDCHAATLQRKADREVFFINTQSIVQLVQRYRSGIRGYMKTVVLDLLRRYLRVEHHFQQAHYDKCVINLREQFKPDMSQVLDCIFSHAQVAKKNQLVIMLIDELCGPDPSLSDELISILNELTQLSKSEHCKVALRARQILIASHLPSYELRHNQVESIFLSAIDMYGHQFCPENLKKLILSETTIFDVLPTFFYHANKVVCMASLEVYVRRGYIAYELNSLQHRQLPDGTCVVEFQFMLPSSHPNRMTVPISITNPDLLRHSTELFMDSGFSPLCQRMGAMVAFRRFEDFTRNFDEVISCFANVPKDTPLFSEARTSLYSEDDCKSLREEPIHILNVSIQCADHLEDEALVPILRTFVQSKKNILVDYGLRRITFLIAQEKEFPKFFTFRARDEFAEDRIYRHLEPALAFQLELNRMRNFDLTAVPCANHKMHLYLGAAKVKEGVEVTDHRFFIRAIIRHSDLITKEASFEYLQNEGERLLLEAMDELEVAFNNTSVRTDCNHIFLNFVPTVIMDPFKIEESVRYMVMRYGSRLWKLRVLQAEVKINIRQTTTGSAVPIRLFITNESGYYLDISLYKEVTDSRSGNIMFHSFGNKQGPQHGMLINTPYVTKDLLQAKRFQAQTLGTTYIYDFPEMFRQALFKLWGSPDKYPKDILTYTELVLDSQGQLVEMNRLPGGNEVGMVAFKMRFKTQEYPEGRDVIVIGNDITFRIGSFGPGEDLLYLRASEMARAEGIPKIYVAANSGARIGMAEEIKHMFHVAWVDPEDPHKGFKYLYLTPQDYTRISSLNSVHCKHIEEGGESRYMITDIIGKDDGLGVENLRGSGMIAGESSLAYEEIVTISLVTCRAIGIGAYLVRLGQRVIQVENSHIILTGASALNKVLGREVYTSNNQLGGVQIMHYNGVSHITVPDDFEGVYTILEWLSYMPKDNHSPVPIITPTDPIDREIEFLPSRAPYDPRWMLAGRPHPTLKGTWQSGFFDHGSFKEIMAPWAQTVVTGRARLGGIPVGVIAVETRTVEVAVPADPANLDSEAKIIQQAGQVWFPDSAYKTAQAVKDFNREKLPLMIFANWRGFSGGMKDMYDQVLKFGAYIVDGLRQYKQPILIYIPPYAELRGGSWVVIDATINPLCIEMYADKESRGGVLEPEGTVEIKFRKKDLIKSMRRIDPAYKKLMEQLGEPDLSDKDRKDLEGRLKAREDLLLPIYHQVAVQFADFHDTPGRMLEKGVISDILEWKTARTFLYWRLRRLLLEDQVKQEILQASGELSHVHIQSMLRRWFVETEGAVKAYLWDNNQVVVQWLEQHWQAGDGPRSTIRENITYLKHDSVLKTIRGLVEENPEVAVDCVIYLSQHISPAERAQVVHLLSTMDSPAST

SEQ ID NO: 98 - protein, 2458 aa, Homo Sapiens; identical to SEQ ID NO: 97

SEQ ID NO: 99 - protein, 859 aa, Homo Sapiens
  misc_feature (1)..(1): Xaa can be any naturally occurring amino acid
XMTVPISITNPDLLRHSTELFMDSGFSPLCQRMGAMVAFRRFEDFTRNFDEVISCFANVPKDTPLFSEARTSLYSEDDCKSLREEPIHILNVSIQCADHLEDEALVPILRTFVQSKKNILVDYGLRRITFLIAQEKEFPKFFTFRARDEFAEDRIYRHLEPALAFQLELNRMRNFDLTAVPCANHKMHLYLGAAKVKEGVEVTDHRFFIRAIIRHSDLITKEASFEYLQNEGERLLLEAMDELEVAFNNTSVRTDCNHIFLNFVPTVIMDPFKIEESVRYMVMRYGSRLWKLRVLQAEVKINIRQTTTGSAVPIRLFITNESGYYLDISLYKEVTDSRSGNIMFHSFGNKQGPQHGMLINTPYVTKDLLQAKRFQAQTLGTTYIYDFPEMFRQALFKLWGSPDKYPKDILTYTELVLDSQGQLVEMNRLPGGNEVGMVAFKMRFKTQEYPEGRDVIVIGNDITFRIGSFGPGEDLLYLRASEMARAEGIPKIYVAANSGARIGMAEEIKHMFHVAWVDPEDPHKGFKYLYLTPQDYTRISSLNSVHCKHIEEGGESRYMITDIIGKDDGLGVENLRGSGMIAGESSLAYEEIVTISLVTCRAIGIGAYLVRLGQRVIQVENSHIILTGASALNKVLGREVYTSNNQLGGVQIMHYNGVSHITVPDDFEGVYTILEWLSYMPKDNHSPVPIITPTDPIDREIEFLPSRAPYDPRWMLAGRPHPTLKGTWQSGFFDHGSFKEIMAPWAQTVVTGRARLGGIPVGVIAVETRTVEVAVPADPANLDSEAKIIQQAGQVWFPDSAYKTAQAVKDFNREKLPLMIFANWRGFSGGMKGCLGTWRDVSWWKIRAMLPMHIGEGSV

SEQ ID NO: 100 - protein, 112 aa, Homo Sapiens
  misc_feature (1)..(1): Xaa can be any naturally occurring amino acid
XVEMNRLPGGNEVGMVAFKMRFKTQEYPEGRDVIVIGNDITFRIGSFGPGEDLLYLRASEMARAEGIPKIYVAANSGARIGMAEEIKHMFHVAWVDPEDPHKIHDHGYHREG

SEQ ID NO: 101 - protein, 2431 aa, Homo Sapiens
MTTLLWVFVTLRVITAAVTVETSDHDNSLSVSIPQPSPLRVLLGTSLTIPCYFIDPMHPVTTAPSTAPLAPRIKWSRVSKEKEVVLLVATEGRVRVNSAYQDKVSLPNYPAIPSDATLEVQSLRSNDSGVYRCEVMHGIEDSEATLEVVVKGIVFHYRAISTRYTLDFDRAQRACLQNSAIIATPEQLQAAYEDGFHQCDAGWLADQTVRYPIHTPREGCYGDKDEFPGVRTYGIRDTNETYDVYCFAEEMEGEVFYATSPEKFTFQEAANECRRLGARLATTGQLYLAWQAGMDMCSAGWLADRSVRYPISKARPNCGGNLLGVRTVYVHANQTGYPDPSSRYDAICYTGEDFVDIPENFFGVGGEEDITVQTVTWPDMELPLPRNITEGEARGSVILTVKPIFEVSPSPLEPEEPFTFAPEIGATAFAEVENETGEATRPWGFPTPGLGPATAFTSEDLVVQVTAVPGQPHLPGGVVFHYRPGPTRYSLTFEEAQQACLRTGAVIASPEQLQAAYEAGYEQCDAGWLRDQTVRYPIVSPRTPCVGDKDSSPGVRTYGVRPSTETYDVYCFVDRLEGEVFFATRLEQFTFQEALEFCESHNATLATTGQLYAAWSRGLDKCYAGWLADGSLRYPIVTPRPACGGDKPGVRTVYLYPNQTGLPDPLSRHHAFCFRGISAVPSPGEEEGGTPTSPSGVEEWIVTQVVPGVAAVPVEEETTAVPSGETTAILEFTTEPENQTEWEPAYTPVGTSPLPGILPTWPPTGAATEESTEGPSATEVPSASEEPSPSEVPFPSEEPSPSEEPFPSVRPFPSVELFPSEEPFPSKEPSPSEEPSASEEPYTPSPPVPSWTELPSSGEESGAPDVSGDFTGSGDVSGHLDFSGQLSGDRASGLPSGDLDSSGLTSTVGSGLPVESGLPSGDEERIEWPSTPTVGELPSGAEILEGSASGVGDLSGLPSGEVLETSASGVGDLSGLPSGEVLETTAPGVEDISGLPSGEVLETTAPGVEDISGLPSGEVLETTAPGVEDISGLPSGEVLETTAPGVEDISGLPSGEVLETTAPGVEDISGLPSGEVLETTAPGVEDISGLPSGEVLETAAPGVEDISGLPSGEVLETAAPGVEDISGLPSGEVLETAAPGVEDISGLPSGEVLETAAPGVEDISGLPSGEVLETAAPGVEDISGLPSGEVLETAAPGVEDISGLPSGEVLETAAPGVEDISGLPSGEVLETAAPGVEDISGLPSGEVLETAAPGVEDISGLPSGEVLETAAPGVEDISGLPSGEVLETAAPGVEDISGLPSGEVLETAAPGVEDISGLPSGEVLETAAPGVEDISGLPSGEVLETAAPGVEDISGLPSGEVLETAAPGVEDISGLPSGEVLETAAPGVEDISGLPSGEVLETTAPGVEEISGLPSGEVLETTAPGVDEISGLPSGEVLETTAPGVEEISGLPSGEVLETSTSAVGDLSGLPSGGEVLEISVSGVEDISGLPSGEVVETSASGIEDVSELPSGEGLETSASGVEDLSRLPSGEEVLEISASGFGDLSGLPSGGEGLETSASEVGTDLSGLPSGREGLETSASGAEDLSGLPSGKEDLVGSASGDLDLGKLPSGTLGSGQAPETSGLPSGFSGEYSGVDLGSGPPSGLPDFSGLPSGFPTVSLVDSTLVEVVTASTASELEGRGTIGISGAGEISGLPSSELDISGRASGLPSGTELSGQASGSPDVSGEIPGLFGVSGQPSGFPDTSGETSGVTELSGLSSGQPGISGEASGVLYGTSQPFGITDLSGETSGVPDLSGQPSGLPGFSGATSGVPDLVSGTTSGSGESSGITFVDTSLVEVAPTTFKEEEGLGSVELSGLPSGEADLSGKSGMVDVSGQFSGTVDSSGFTSQTPEFSGLPSGIAEVSGESSRAEIGSSLPSGAYYGSGTPSSFPTVSLVDRTLVESVTQAPTAQEAGEGPSGILELSGAHSGAPDMSGEHSGFLDLSGLQSGLIEPSGEPPGTPYFSGDFASTTNVSGESSVAMGTSGEASGLPEVTLITSEFVEGVTEPTISQELGQRPPVTHTPQLFESSGKVSTAGDISGATPVLPGSGVEVSSVPESSSETSAYPEAGFGASAAPEASREDSGSPDLSETTSAFHEANLERSSGLGVSGSTLTFQEGEASAAPEVSGESTTTSDVGTEAPGLPSATPTASGDRTEISGDLSGHTSQLGVVISTSIPESEWTQQTQRPAETHLEIESSSLLYSGEETHTVETATSPTDASIPASPEWKRESESTAADQEVCEEGWNKYQGHCYRHFPDRETWVDAERRCREQQSHLSSIVTPEEQEFVNNNAQDYQWIGLNDRTIEGDFRWSDGHPMQFENWRPNQPDNFFAAGEDCVVMIWHEKGEWNDVPCNYHLPFTCKKGTATTYKRRLQKRSSRHPRRSRPSTAH

SEQ ID NO: 102 - protein, 2530 aa, Homo Sapiens
MTTLLWVFVTLRVITAAVTVETSDHDNSLSVSIPQPSPLRVLLGTSLTIPCYFIDPMHPVTTAPSTAPLAPRIKWSRVSKEKEVVLLVATEGRVRVNSAYQDKVSLPNYPAIPSDATLEVQSLRSNDSGVYRCEVMHGIEDSEATLEVVVKGIVFHYRAISTRYTLDFDRAQRACLQNSAIIATPEQLQAAYEDGFHQCDAGWLADQTVRYPIHTPREGCYGDKDEFPGVRTYGIRDTNETYDVYCFAEEMEGEVFYATSPEKFTFQEAANECRRLGARLATTGQLYLAWQAGMDMCSAGWLADRSVRYPISKARPNCGGNLLGVRTVYVHANQTGYPDPSSRYDAICYTGEDFVDIPENFFGVGGEEDITVQTVTWPDMELPLPRNITEGEARGSVILTVKPIFEVSPSPLEPEEPFTFAPEIGATAFAEVENETGEATRPWGFPTPGLGPATAFTSEDLVVQVTAVPGQPHLPGGVVFHYRPGPTRYSLTFEEAQQACLRTGAVIASPEQLQAAYEAGYEQCDAGWLRDQTVRYPIVSPRTPCVGDKDSSPGVRTYGVRPSTETYDVYCFVDRLEGEVFFATRLEQFTFQEALEFCESHNATLATTGQLYAAWSRGLDKCYAGWLADGSLRYPIVTPRPACGGDKPGVRTVYLYPNQTGLPDPLSRHHAFCFRGISAVPSPGEEEGGTPTSPSGVEEWIVTQVVPGVAAVPVEEETTAVPSGETTAILEFTTEPENQTEWEPAYTPVGTSPLPGILPTWPPTGAATEESTEGPSATEVPSASEEPSPSEVPFPSEEPSPSEEPFPSVRPFPSVELFPSEEPFPSKEPSPSEEPSASEEPYTPSPPVPSWTELPSSGEESGAPDVSGDFTGSGDVSGHLDFSGQLSGDRASGLPSGDLDSSGLTSTVGSGLPVESGLPSGDEERIEWPSTPTVGELPSGAEILEGSASGVGDLSGLPSGEVLETSASGVGDLSGLPSGEVLETTAPGVEDISGLPSGEVLETTAPGVEDISGLPSGEVLETTAPGVEDISGLPSGEVLETTAPGVEDISGLPSGEVLETTAPGVEDISGLPSGEVLETTAPGVEDISGLPSGEVLETAAPGVEDISGLPSGEVLETAAPGVEDISGLPSGEVLETAAPGVEDISGLPSGEVLETAAPGVEDISGLPSGEVLETAAPGVEDISGLPSGEVLETAAPGVEDISGLPSGEVLETAAPGVEDISGLPSGEVLETAAPGVEDISGLPSGEVLETAAPGVEDISGLPSGEVLETAAPGVEDISGLPSGEVLETAAPGVEDISGLPSGEVLETAAPGVEDISGLPSGEVLETAAPGVEDISGLPSGEVLETAAPGVEDISGLPSGEVLETAAPGVEDISGLPSGEVLETAAPGVEDISGLPSGEVLETTAPGVEEISGLPSGEVLETTAPGVDEISGLPSGEVLETTAPGVEEISGLPSGEVLETSTSAVGDLSGLPSGGEVLEISVSGVEDISGLPSGEVVETSASGIEDVSELPSGEGLETSASGVEDLSRLPSGEEVLEISASGFGDLSGLPSGGEGLETSASEVGTDLSGLPSGREGLETSASGAEDLSGLPSGKEDLVGSASGDLDLGKLPSGTLGSGQAPETSGLPSGFSGEYSGVDLGSGPPSGLPDFSGLPSGFPTVSLVDSTLVEVVTASTASELEGRGTIGISGAGEISGLPSSELDISGRASGLPSGTELSGQASGSPDVSGEIPGLFGVSGQPSGFPDTSGETSGVTELSGLSSGQPGISGEASGVLYGTSQPFGITDLSGETSGVPDLSGQPSGLPGFSGATSGVPDLVSGTTSGSGESSGITFVDTSLVEVAPTTFKEEEGLGSVELSGLPSGEADLSGKSGMVDVSGQFSGTVDSSGFTSQTPEFSGLPSGIAEVSGESSRAEIGSSLPSGAYYGSGTPSSFPTVSLVDRTLVESVTQAPTAQEAGEGPSGILELSGAHSGAPDMSGEHSGFLDLSGLQSGLIEPSGEPPGTPYFSGDFASTTNVSGESSVAMGTSGEASGLPEVTLITSEFVEGVTEPTISQELGQRPPVTHTPQLFESSGKVSTAGDISGATPVLPGSGVEVSSVPESSSETSAYPEAGFGASAAPEASREDSGSPDLSETTSAFHEANLERSSGLGVSGSTLTFQEGEASAAPEVSGESTTTSDVGTEAPGLPSATPTASGDRTEISGDLSGHTSQLGVVISTSIPESEWTQQTQRPAETHLEIESSSLLYSGEETHTVETATSPTDASIPASPEWKRESESTAAAPARSCAEEPCGAGTCKETEGHVICLCPPGYTGEHCNIDQEVCEEGWNKYQGHCYRHFPDRETWVDAERRCREQQSHLSSIVTPEEQEFVNNNAQDYQWIGLNDRTIEGDFRWSDGHPMQFENWRPNQPDNFFAAGEDCVVMIWHEKGEWNDVPCNYHLPFTCKKGTVACGEPPVVEHARTFGQKKDRYEINSLVRYQCTEGFVQRHMPTIRCQPSGHWEEPQITCTDPTTYKRRLQKRSSRHPRRSRPSTAH

SEQ ID NO: 103 - protein, 2492 aa, Homo Sapiens
MTTLLWVFVTLRVITAAVTVETSDHDNSLSVSIPQPSPLRVLLGTSLTIPCYFIDPMHPVTTAPSTAPLAPRIKWSRVSKEKEVVLLVATEGRVRVNSAYQDKVSLPNYPAIPSDATLEVQSLRSNDSGVYRCEVMHGIEDSEATLEVVVKGIVFHYRAISTRYTLDFDRAQRACLQNSAIIATPEQLQAAYEDGFHQCDAGWLADQTVRYPIHTPREGCYGDKDEFPGVRTYGIRDTNETYDVYCFAEEMEGEVFYATSPEKFTFQEAANECRRLGARLATTGQLYLAWQAGMDMCSAGWLADRSVRYPISKARPNCGGNLLGVRTVYVHANQTGYPDPSSRYDAICYTGEDFVDIPENFFGVGGEEDITVQTVTWPDMELPLPRNITEGEARGSVILTVKPIFEVSPSPLEPEEPFTFAPEIGATAFAEVENETGEATRPWGFPTPGLGPATAFTSEDLVVQVTAVPGQPHLPGGVVFHYRPGPTRYSLTFEEAQQACLRTGAVIASPEQLQAAYEAGYEQCDAGWLRDQTVRYPIVSPRTPCVGDKDSSPGVRTYGVRPSTETYDVYCFVDRLEGEVFFATRLEQFTFQEALEFCESHNATLATTGQLYAAWSRGLDKCYAGWLADGSLRYPIVTPRPACGGDKPGVRTVYLYPNQTGLPDPLSRHHAFCFRGISAVPSPGEEEGGTPTSPSGVEEWIVTQVVPGVAAVPVEEETTAVPSGETTAILEFTTEPENQTEWEPAYTPVGTSPLPGILPTWPPTGAATEESTEGPSATEVPSASEEPSPSEVPFPSEEPSPSEEPFPSVRPFPSVELFPSEEPFPSKEPSPSEEPSASEEPYTPSPPVPSWTELPSSGEESGAPDVSGDFTGSGDVSGHLDFSGQLSGDRASGLPSGDLDSSGLTSTVGSGLPVESGLPSGDEERIEWPSTPTVGELPSGAEILEGSASGVGDLSGLPSGEVLETSASGVGDLSGLPSGEVLETTAPGVEDISGLPSGEVLETTAPGVEDISGLPSGEVLETTAPGVEDISGLPSGEVLETTAPGVEDISGLPSGEVLETTAPGVEDISGLPSGEVLETTAPGVEDISGLPSGEVLETAAPGVEDISGLPSGEVLETAAPGVEDISGLPSGEVLETAAPGVEDISGLPSGEVLETAAPGVEDISGLPSGEVLETAAPGVEDISGLPSGEVLETAAPGVEDISGLPSGEVLETAAPGVEDISGLPSGEVLETAAPGVEDISGLPSGEVLETAAPGVEDISGLPSGEVLETAAPGVEDISGLPSGEVLETAAPGVEDISGLPSGEVLETAAPGVEDISGLPSGEVLETAAPGVEDISGLPSGEVLETAAPGVEDISGLPSGEVLETAAPGVEDISGLPSGEVLETAAPGVEDISGLPSGEVLETTAPGVEEISGLPSGEVLETTAPGVDEISGLPSGEVLETTAPGVEEISGLPSGEVLETSTSAVGDLSGLPSGGEVLEISVSGVEDISGLPSGEVVETSASGIEDVSELPSGEGLETSASGVEDLSRLPSGEEVLEISASGFGDLSGLPSGGEGLETSASEVGTDLSGLPSGREGLETSASGAEDLSGLPSGKEDLVGSASGDLDLGKLPSGTLGSGQAPETSGLPSGFSGEYSGVDLGSGPPSGLPDFSGLPSGFPTVSLVDSTLVEVVTASTASELEGRGTIGISGAGEISGLPSSELDISGRASGLPSGTELSGQASGSPDVSGEIPGLFGVSGQPSGFPDTSGETSGVTELSGLSSGQPGISGEASGVLYGTSQPFGITDLSGETSGVPDLSGQPSGLPGFSGATSGVPDLVSGTTSGSGESSGITFVDTSLVEVAPTTFKEEEGLGSVELSGLPSGEADLSGKSGMVDVSGQFSGTVDSSGFTSQTPEFSGLPSGIAEVSGESSRAEIGSSLPSGAYYGSGTPSSFPTVSLVDRTLVESVTQAPTAQEAGEGPSGILELSGAHSGAPDMSGEHSGFLDLSGLQSGLIEPSGEPPGTPYFSGDFASTTNVSGESSVAMGTSGEASGLPEVTLITSEFVEGVTEPTISQELGQRPPVTHTPQLFESSGKVSTAGDISGATPVLPGSGVEVSSVPESSSETSAYPEAGFGASAAPEASREDSGSPDLSETTSAFHEANLERSSGLGVSGSTLTFQEGEASAAPEVSGESTTTSDVGTEAPGLPSATPTASGDRTEISGDLSGHTSQLGVVISTSIPESEWTQQTQRPAETHLEIESSSLLYSGEETHTVETATSPTDASIPASPEWKRESESTAADQEVCEEGWNKYQGHCYRHFPDRETWVDAERRCREQQSHLSSIVTPEEQEFVNNNAQDYQWIGLNDRTIEGDFRWSDGHPMQFENWRPNQPDNFFAAGEDCVVMIWHEKGEWNDVPCNYHLPFTCKKGTVACGEPPVVEHARTFGQKKDRYEINSLVRYQCTEGFVQRHMPTIRCQPSGHWEEPQITCTDPTTYKRRLQKRSSRHPRRSRPSTAH

SEQ ID NO: 104 - protein, 721 aa, Homo Sapiens
MTTLLWVFVTLRVITAAVTVETSDHDNSLSVSIPQPSPLRVLLGTSLTIPCYFIDPMHPVTTAPSTAPLAPRIKWSRVSKEKEVVLLVATEGRVRVNSAYQDKVSLPNYPAIPSDATLEVQSLRSNDSGVYRCEVMHGIEDSEATLEVVVKGIVFHYRAISTRYTLDFDRAQRACLQNSAIIATPEQLQAAYEDGFHQCDAGWLADQTVRYPIHTPREGCYGDKDEFPGVRTYGIRDTNETYDVYCFAEEMEGEVFYATSPEKFTFQEAANECRRLGARLATTGQLYLAWQAGMDMCSAGWLADRSVRYPISKARPNCGGNLLGVRTVYVHANQTGYPDPSSRYDAICYTGEDFVDIPENFFGVGGEEDITVQTVTWPDMELPLPRNITEGEARGSVILTVKPIFEVSPSPLEPEEPFTFAPEIGATAFAEVENETGEATRPWGFPTPGLGPATAFTSEDLVVQVTAVPGQPHLPGGVVFHYRPGPTRYSLTFEEAQQACLRTGAVIASPEQLQAAYEAGYEQCDAGWLRDQTVRYPIVSPRTPCVGDKDSSPGVRTYGVRPSTETYDVYCFVDRLEGEVFFATRLEQFTFQEALEFCESHNATLATTGQLYAAWSRGLDKCYAGWLADGSLRYPIVTPRPACGGDKPGVRTVYLYPNQTGLPDPLSRHHAFCFRGMQPHFGSNSPFCLERTPLGSPDPATTQYPIHQSKKMSVPLGQSQL

SEQ ID NO: 105 - protein, 2530 aa, Homo Sapiens; identical to SEQ ID NO: 102

SEQ ID NO: 106 - protein, 2568 aa, Homo Sapiens
MTTLLWVFVTLRVITAAVTVETSDHDNSLSVSIPQPSPLRVLLGTSLTIPCYFIDPMHPVTTAPSTAPLAPRIKWSRVSKEKEVVLLVATEGRVRVNSAYQDKVSLPNYPAIPSDATLEVQSLRSNDSGVYRCEVMHGIEDSEATLEVVVKGIVFHYRAISTRYTLDFDRAQRACLQNSAIIATPEQLQAAYEDGFHQCDAGWLADQTVRYPIHTPREGCYGDKDEFPGVRTYGIRDTNETYDVYCFAEEMEGEVFYATSPEKFTFQEAANECRRLGARLATTGQLYLAWQAGMDMCSAGWLADRSVRYPISKARPNCGGNLLGVRTVYVHANQTGYPDPSSRYDAICYTGEDFVDIPENFFGVGGEEDITVQTVTWPDMELPLPRNITEGEARGSVILTVKPIFEVSPSPLEPEEPFTFAPEIGATAFAEVENETGEATRPWGFPTPGLGPATAFTSEDLVVQVTAVPGQPHLPGGVVFHYRPGPTRYSLTFEEAQQACLRTGAVIASPEQLQAAYEAGYEQCDAGWLRDQTVRYPIVSPRTPCVGDKDSSPGVRTYGVRPSTETYDVYCFVDRLEGEVFFATRLEQFTFQEALEFCESHNATLATTGQLYAAWSRGLDKCYAGWLADGSLRYPIVTPRPACGGDKPGVRTVYLYPNQTGLPDPLSRHHAFCFRGISAVPSPGEEEGGTPTSPSGVEEWIVTQVVPGVAAVPVEEETTAVPSGETTAILEFTTEPENQTEWEPAYTPVGTSPLPGILPTWPPTGAATEESTEGPSATEVPSASEEPSPSEVPFPSEEPSPSEEPFPSVRPFPSVELFPSEEPFPSKEPSPSEEPSASEEPYTPSPPVPSWTELPSSGEESGAPDVSGDFTGSGDVSGHLDFSGQLSGDRASGLPSGDLDSSGLTSTVGSGLPVESGLPSGDEERIEWPSTPTVGELPSGAEILEGSASGVGDLSGLPSGEVLETSASGVGDLSGLPSGEVLETTAPGVEDISGLPSGEVLETTAPGVEDISGLPSGEVLETTAPGVEDISGLPSGEVLETTAPGVEDISGLPSGEVLETTAPGVEDISGLPSGEVLETTAPGVEDISGLPSGEVLETAAPGVEDISGLPSGEVLETAAPGVEDISGLPSGEVLETAAPGVEDISGLPSGEVLETAAPGVEDISGLPSGEVLETAAPGVEDISGLPSGEVLETAAPGVEDISGLPSGEVLETAAPGVEDISGLPSGEVLETAAPGVEDISGLPSGEVLETAAPGVEDISGLPSGEVLETAAPGVEDISGLPSGEVLETAAPGVEDISGLPSGEVLETAAPGVEDISGLPSGEVLETAAPGVEDISGLPSGEVLETAAPGVEDISGLPSGEVLETAAPGVEDISGLPSGEVLETAAPGVEDISGLPSGEVLETTAPGVEEISGLPSGEVLETTAPGVDEISGLPSGEVLETTAPGVEEISGLPSGEVLETSTSAVGDLSGLPSGGEVLEISVSGVEDISGLPSGEVVETSASGIEDVSELPSGEGLETSASGVEDLSRLPSGEEVLEISASGFGDLSGLPSGGEGLETSASEVGTDLSGLPSGREGLETSASGAEDLSGLPSGKEDLVGSASGDLDLGKLPSGTLGSGQAPETSGLPSGFSGEYSGVDLGSGPPSGLPDFSGLPSGFPTVSLVDSTLVEVVTASTASELEGRGTIGISGAGEISGLPSSELDISGRASGLPSGTELSGQASGSPDVSGEIPGLFGVSGQPSGFPDTSGETSGVTELSGLSSGQPGISGEASGVLYGTSQPFGITDLSGETSGVPDLSGQPSGLPGFSGATSGVPDLVSGTTSGSGESSGITFVDTSLVEVAPTTFKEEEGLGSVELSGLPSGEADLSGKSGMVDVSGQFSGTVDSSGFTSQTPEFSGLPSGIAEVSGESSRAEIGSSLPSGAYYGSGTPSSFPTVSLVDRTLVESVTQAPTAQEAGEGPSGILELSGAHSGAPDMSGEHSGFLDLSGLQSGLIEPSGEPPGTPYFSGDFASTTNVSGESSVAMGTSGEASGLPEVTLITSEFVEGVTEPTISQELGQRPPVTHTPQLFESSGKVSTAGDISGATPVLPGSGVEVSSVPESSSETSAYPEAGFGASAAPEASREDSGSPDLSETTSAFHEANLERSSGLGVSGSTLTFQEGEASAAPEVSGESTTTSDVGTEAPGLPSATPTASGDRTEISGDLSGHTSQLGVVISTSIPESEWTQQTQRPAETHLEIESSSLLYSGEETHTVETATSPTDASIPASPEWKRESESTAAAPARSCAEEPCGAGTCKETEGHVICLCPPGYTGEHCNIDIDECLSSPCLNGATCVDAIDSFTCLCLPSYEGDLCEIDQEVCEEGWNKYQGHCYRHFPDRETWVDAERRCREQQSHLSSIVTPEEQEFVNNNAQDYQWIGLNDRTIEGDFRWSDGHPMQFENWRPNQPDNFFAAGEDCVVMIWHEKGEWNDVPCNYHLPFTCKKGTVACGEPPVVEHARTFGQKKDRYEINSLVRYQCTEGFVQRHMPTIRCQPSGHWEEPQITCTDPTTYKRRLQKRSSRHPRRSRPSTAH

SEQ ID NO: 107 - protein, 2473 aa, Homo Sapiens
MTTLLWVFVTLRVITAAVTVETSDHDNSLSVSIPQPSPLRVLLGTSLTIPCYFIDPMHPVTTAPSTAPLAPRIKWSRVSKEKEVVLLVATEGRVRVNSAYQDKVSLPNYPAIPSDATLEVQSLRSNDSGVYRCEVMHGIEDSEATLEVVVKGIVFHYRAISTRYTLDFDRAQRACLQNSAIIATPEQLQAAYEDGFHQCDAGWLADQTVRYPIHTPREGCYGDKDEFPGVRTYGIRDTNETYDVYCFAEEMEGEVFYATSPEKFTFQEAANECRRLGARLATTGQLYLAWQAGMDMCSAGWLADRSVRYPISKARPNCGGNLLGVRTVYVHANQTGYPDPSSRYDAICYTGEDFVDIPENFFGVGGEEDITVQTVTWPDMELPLPRNITEGEARGSVILTVKPIFEVSPSPLEPEEPFTFAPEIGATAFAEVENETGEATRPWGFPTPGLGPATAFTSEDLVVQVTAVPGQPHLPGGVVFHYRPGPTRYSLTFEEAQQACLRTGAVIASPEQLQAAYEAGYEQCDAGWLRDQTVRYPIVSPRTPCVGDKDSSPGVRTYGVRPSTETYDVYCFVDRLEGEVFFATRLEQFTFQEALEFCESHNATLATTGQLYAAWSRGLDKCYAGWLADGSLRYPIVTPRPACGGDKPGVRTVYLYPNQTGLPDPLSRHHAFCFRGISAVPSPGEEEGGTPTSPSGVEEWIVTQVVPGVAAVPVEEETTAVPSGETTAILEFTTEPENQTEWEPAYTPVGTSPLPGILPTWPPTGAATEESTEGPSATEVPSASEEPSPSEVPFPSEEPSPSEEPFPSVRPFPSVELFPSEEPFPSKEPSPSEEPSASEEPYTPSPPVPSWTELPSSGEESGAPDVSGDFTGSGDVSGHLDFSGQLSGDRASGLPSGDLDSSGLTSTVGSGLPVESGLPSGDEERIEWPSTPTVGELPSGAEILEGSASGVGDLSGLPSGEVLETSASGVGDLSGLPSGEVLETTAPGVEDISGLPSGEVLETTAPGVEDISGLPSGEVLETTAPGVEDISGLPSGEVLETTAPGVEDISGLPSGEVLETTAPGVEDISGLPSGEVLETAAPGVEDISGLPSGEVLETAAPGVEDISGLPSGEVLETAAPGVEDISGLPSGEVLETAAPGVEDISGLPSGEVLETAAPGVEDISGLPSGEVLETAAPGVEDISGLPSGEVLETAAPGVEDISGLPSGEVLETAAPGVEDISGLPSGEVLETAAPGVEDISGLPSGEVLETAAPGVEDISGLPSGEVLETAAPGVEDISGLPSGEVLETAAPGVEDISGLPSGEVLETAAPGVEDISGLPSGEVLETAAPGVEDISGLPSGEVLETAAPGVEDISGLPSGEVLETAAPGVEDISGLPSGEVLETTAPGVEEISGLPSGEVLETTAPGVDEISGLPSGEVLETTAPGVEEISGLPSGEVLETSTSAVGDLSGLPSGGEVLEISVSGVEDISGLPSGEVVETSASGIEDVSELPSGEGLETSASGVEDLSRLPSGEEVLEISASGFGDLSGLPSGGEGLETSASEVGTDLSGLPSGREGLETSASGAEDLSGLPSGKEDLVGSASGDLDLGKLPSGTLGSGQAPETSGLPSGFSGEYSGVDLGSGPPSGLPDFSGLPSGFPTVSLVDSTLVEVVTASTASELEGRGTIGISGAGEISGLPSSELDISGRASGLPSGTELSGQASGSPDVSGEIPGLFGVSGQPSGFPDTSGETSGVTELSGLSSGQPGISGEASGVLYGTSQPFGITDLSGETSGVPDLSGQPSGLPGFSGATSGVPDLVSGTTSGSGESSGITFVDTSLVEVAPTTFKEEEGLGSVELSGLPSGEADLSGKSGMVDVSGQFSGTVDSSGFTSQTPEFSGLPSGIAEVSGESSRAEIGSSLPSGAYYGSGTPSSFPTVSLVDRTLVESVTQAPTAQEAGEGPSGILELSGAHSGAPDMSGEHSGFLDLSGLQSGLIEPSGEPPGTPYFSGDFASTTNVSGESSVAMGTSGEASGLPEVTLITSEFVEGVTEPTISQELGQRPPVTHTPQLFESSGKVSTAGDISGATPVLPGSGVEVSSVPESSSETSAYPEAGFGASAAPEASREDSGSPDLSETTSAFHEANLERSSGLGVSGSTLTFQEGEASAAPEVSGESTTTSDVGTEAPGLPSATPTASGDRTEISGDLSGHTSQLGVVISTSIPESEWTQQTQRPAETHLEIESSSLLYSGEETHTVETATSPTDASIPASPEWKRESESTAADQEVCEEGWNKYQGHCYRHFPDRETWVDAERRCREQQSHLSSIVTPEEQEFVNNNAQDYQWIGLNDRTIEGDFRWSDGHPMQFENWRPNQPDNFFAAGEDCVVMIWHEKGEWNDVPCNYHLPFTCKKGTVACGEPPVVEHARTFGQKKDRYEINSLVRYQCTEGFVQRHMPTIRCQPSGHWEEPQITCTDPTTYKRRLQKRSSRHPRRSRPSTAH

SEQ ID NO: 108 - protein, 156 aa, Homo Sapiens
  misc_feature (1)..(1): Xaa can be any naturally occurring amino acid
XWNDVPCNYHLPFTCKKGTVACGEPPVVEHARTFGQKKDRYEINSLVRYQCTEGFVQRHMPTIRCQPSGHWEEPQITCTDREHHPGHLAEHRPPPTNADYRSGAHGTLGGAAPAQPTEKSFQDAPRTLSPGACQADVHPTQTVSSSCRFLSYKESH

SEQ ID NO: 109 - protein, 282 aa, Homo Sapiens
LDMETTYSVATVCHPNGSCLQLEPDLTNVMATSRKYEDLLWAWEGWRDKAGRAILQFYPKYVELINQAARLNGYVDAGDSWRSMYETPSLEQDLERLFQELQPLYLNLHAYVRRALHRHYGAQHINLEGPIPAHLLGNMWAQTWSNIYDLVVPFPSAPSMDTTEAMLKQGWTPRRMFKEADDFFTSLGLLPVPPEFWNKSMLEKPTDGREVVCHASAWDFYNEHDINFLMKMALDKIAFIPFSYLVDQWRWRVFDGSITKENYNQEWWSLRLKYQGLCPPVP

SEQ ID NO: 110 - protein, 314 aa, Homo Sapiens
MDEGGCSQAAPAFAEGAGLGSGAPALSGSCLLTSGRCRCHRHRTALSIHPPLARPLFWSQFLLHHSHEADSLQKEEARLPQTKEEAALLSQEFAEAWGQKAKELYEPIWQNFTDPQLRRIIGAVRTLGSANLPLAKRQQYNALLSNMSRIYSTAKVCLPNKTATCWSLDPDLTNILASSRSYAMLLFAWEGWHNAAGIPLKPLYEDFTALSNEAYKQDGFTDTGAYWRSWYNSPTFEDDLEHLYQQLEPLYLNLHAFVRRALHRRYGDRYINLRGPIPAHLLGDMWAQSWENIYDMVVPFPDKPNLDVTSTMLQ

SEQ ID NO: 111 - protein, 168 aa, Homo Sapiens
MGAASGRRGPGLLLPLPLLLLLPPQPALALDPGLQPGNFSADEAGAQLFAQSYNSSAEQVLFQSVAASWAHDTNITAENARRQEEAALLSQEFAEAWGQKAKELYEPIWQNFTDPQLRRIIGAVRTLGSANLPLAKRQQISPTSWLPREATPCSCLPGRAGTTLRASR

SEQ ID NO: 112 - protein, 1306 aa, Homo Sapiens
MGAASGRRGPGLLLPLPLLLLLPPQPALALDPGLQPGNFSADEAGAQLFAQSYNSSAEQVLFQSVAASWAHDTNITAENARRQEEAALLSQEFAEAWGQKAKELYEPIWQNFTDPQLRRIIGAVRTLGSANLPLAKRQQYNALLSNMSRIYSTAKVCLPNKTATCWSLDPDLTNILASSRSYAMLLFAWEGWHNAAGIPLKPLYEDFTALSNEAYKQDGFTDTGAYWRSWYNSPTFEDDLEHLYQQLEPLYLNLHAFVRRALHRRYGDRYINLRGPIPAHLLGDMWAQSWENIYDMVVPFPDKPNLDVTSTMLQQGWNATHMFRVAEEFFTSLELSPMPPEFWEGSMLEKPADGREVVCHASAWDFYNRKDFRIKQCTRVTMDQLSTVHHEMGHIQYYLQYKDLPVSLRRGANPGFHEAIGDVLALSVSTPEHLHKIGLLDRVTNDTESDINYLLKMALEKIAFLPFGYLVDQWRWGVFSGRTPPSRYNFDWWYLRTKYQGICPPVTRNETHFDAGAKFHVPNVTPYIRYFVSFVLQFQFHEALCKEAGYEGPLHQCDIYRSTKAGAKLRKVLQAGSSRPWQEVLKDMVGLDALDAQPLLKYFQPVTQWLQEQNQQNGEVLGWPEYQWHPPLPDNYPEGIDLVTDEAEASKFVEEYDRTSQVVWNEYAEANWNYNTNITTETSKILLQKNMQIANHTLKYGTQARKFDVNQLQNTTIKRIIKKVQDLERAALPAQELEEYNKILLDMETTYSVATVCHPNGSCLQLEPDLTNVMATSRKYEDLLWAWEGWRDKAGRAILQFYPKYVELINQAARLNGYVDAGDSWRSMYETPSLEQDLERLFQELQPLYLNLHAYVRRALHRHYGAQHINLEGPIPAHLLGNMWAQTWSNIYDLVVPFPSAPSMDTTEAMLKQGWTPRRMFKEADDFFTSLGLLPVPPEFWNKSMLEKPTDGREVVCHASAWDFYNGKDFRIKQCTTVNLEDLVVAHHEMGHIQYFMQYKDLPVALREGANPGFHEAIGDVLALSVSTPKHLHSLNLLSSEGGSDEHDINFLMKMALDKIAFIPFSYLVDQWRWRVFDGSITKENYNQEWWSLRLKYQGLCPPVPRTQGDFDPGAKFHIPSSVPYIRYFVSFIIQFQFHEALCQAAGHTGPLHKCDIYQSKEAGQRLATAMKLGFSRPWPEAMQLITGQPNMSASAMLSYFKPLLDWLRTENELHGEKLGWPQYNWTPNSARSEGPLPDSGRVSFLGLDLDAQQARVGQWLLLFLGIALLVATLGLSQRLFSIRHRSLHRHSHGPQFGSEVELRHS

SEQ ID NO: 113 - protein, 1242 aa, Homo Sapiens
MGAASGRRGPGLLLPLPLLLLLPPQPALALDPGLQPGNFSADEAGAQLFAQSYNSSAEQVLFQSVAASWAHDTNITAENARRQEEAALLSQEFAEAWGQKAKELYEPIWQNFTDPQLRRIIGAVRTLGSANLPLAKRQQYNALLSNMSRIYSTAKVCLPNKTATCWSLDPDLTNILASSRSYAMLLFAWEGWHNAAGIPLKPLYEDFTALSNEAYKQDGFTDTGAYWRSWYNSPTFEDDLEHLYQQLEPLYLNLHAFVRRALHRRYGDRYINLRGPIPAHLLGDMWAQSWENIYDMVVPFPDKPNLDVTSTMLQQGWNATHMFRVAEEFFTSLELSPMPPEFWEGSMLEKPADGREVVCHASAWDFYNRKDFRIKQCTRVTMDQLSTVHHEMGHIQYYLQYKDLPVSLRRGANPGFHEAIGDVLALSVSTPEHLHKIGLLDRVTNDTESDINYLLKMALEKIAFLPFGYLVDQWRWGVFSGRTPPSRYNFDWWYLRTKYQGICPPVTRNETHFDAGAKFHVPNVTPYIRYFVSFVLQFQFHEALCKEAGYEGPLHQCDIYRSTKAGAKLRKVLQAGSSRPWQEVLKDMVGLDALDAQPLLKYFQPVTQWLQEQNQQNGEVLGWPEYQWHPPLPDNYPEGIDLVTDEAEASKFVEEYDRTSQVVWNEYAEANWNYNTNITTETSKILLQKNMQIANHTLKYGTQARKFDVNQLQNTTIKRIIKKVQDLERAALPAQELEEYNKILLDMETTYSVATVCHPNGSCLQLEPDLTNVMATSRKYEDLLWAWEGWRDKAGRAILQFYPKYVELINQAARLNGYVDAGDSWRSMYETPSLEQDLERLFQELQPLYLNLHAYVRRALHRHYGAQHINLEGPIPAHLLGNMWAQTWSNIYDLVVPFPSAPSMDTTEAMLKQGWTPRRMFKEADDFFTSLGLLPVPPEFWNKSMLEKPTDGREVVCHASAWDFYNGKDFRIKQCTTVNLEDLVVAHHEMGHIQYFMQYKDLPVALREGANPGFHEAIGDVLALSVSTPKHLHSLNLLSSEGGSDEHDINFLMKMALDKIAFIPFSYLVDQWRWRVFDGSITKENYNQEWWSLRLKYQGLCPPVPRTQGDFDPGAKFHIPSSVPYIRYFVSFIIQFQFHEALCQAAGHTGPLHKCDIYQSKEAGQRLATAMKLGFSRPWPEAMQLITGQPNMSASAMLSYFKPLLDWLRTENELHGEKLGWPQYNWTPNSGTATHPTSSLGS

SEQ ID NO: 114 - protein, 36 aa, Homo Sapiens
MGQGWATAGLPSLLFLLLCYGHPLLVPSQEASQQTW

SEQ ID NO: 115 - protein, 36 aa, Homo Sapiens; identical to SEQ ID NO: 114

SEQ ID NO: 116 - protein, 145 aa, Homo Sapiens
MGQGWATAGLPSLLFLLLCYGHPLLVPSQEASQQVTVTHGTSSQATTSSQTTTHQATAHQTSAQSPNLVTDEAEASKFVEEYDRTSQVVWNEYAEANWNYNTNITTETSKILGLYDTWGSSLLCPCLDMCCLTAGIQGGCRRTCK

SEQ ID NO: 117 - protein, 208 aa, Homo Sapiens
MGQGWATAGLPSLLFLLLCYGHPLLVPSQEASQQVTVTHGTSSQATTSSQTTTHQATAHQTSAQSPNLVTDEAEASKFVEEYDRTSQVVWNEYAEANWNYNTNITTETSKILLQKNMQIANHTLKYGTQARKFDVNQLQNTTIKRIIKKVQDLERAALPAQELEEYNKILLDMETTYSVATVCHPNGSCLQLEPALKFSELPLQAEVS

SEQ ID NO: 118 - protein, 732 aa, Homo Sapiens
MGQGWATAGLPSLLFLLLCYGHPLLVPSQEASQQVTVTHGTSSQATTSSQTTTHQATAHQTSAQSPNLVTDEAEASKFVEEYDRTSQVVWNEYAEANWNYNTNITTETSKILLQKNMQIANHTLKYGTQARKFDVNQLQNTTIKRIIKKVQDLERAALPAQELEEYNKILLDMETTYSVATVCHPNGSCLQLEPDLTNVMATSRKYEDLLWAWEGWRDKAGRAILQFYPKYVELINQAARLNGYVDAGDSWRSMYETPSLEQDLERLFQELQPLYLNLHAYVRRALHRHYGAQHINLEGPIPAHLLGNMWAQTWSNIYDLVVPFPSAPSMDTTEAMLKQGWTPRRMFKEADDFFTSLGLLPVPPEFWNKSMLEKPTDGREVVCHASAWDFYNGKDFRIKQCTTVNLEDLVVAHHEMGHIQYFMQYKDLPVALREGANPGFHEAIGDVLALSVSTPKHLHSLNLLSSEGGSDEHDINFLMKMALDKIAFIPFSYLVDQWRWRVFDGSITKENYNQEWWSLRLKYQGLCPPVPRTQGDFDPGAKFHIPSSVPYIRYFVSFIIQFQFHEALCQAAGHTGPLHKCDIYQSKEAGQRLATAMKLGFSRPWPEAMQLITGQPNMSASAMLSYFKPLLDWLRTENELHGEKLGWPQYNWTPNSARSEGPLPDSGRVSFLGLDLDAQQARVGQWLLLFLGIALLVATLGLSQRLFSIRHRSLHRHSHGPQFGSEVELRHS

SEQ ID NO: 119 - protein, 691 aa, Homo Sapiens
MGQGWATAGLPSLLFLLLCYGHPLLVPSQEASQQVTVTHGTSSQATTSSQTTTHQATAHQTSAQSPNLVTDEAEASKFVEEYDRTSQVVWNEYAEANWNYNTNITTETSKILLQKNMQIANHTLKYGTQARKFDVNQLQNTTIKRIIKKVQDLERAALPAQELEEYNKILLDMETTYSVATVCHPNGSCLQLEPDLTNVMATSRKYEDLLWAWEGWRDKAGRAILQFYPKYVELINQAARLNGYVDAGDSWRSMYETPSLEQDLERLFQELQPLYLNLHAYVRRALHRHYGAQHINLEGPIPAHLLGNMWAQTWSNIYDLVVPFPSAPSMDTTEAMLKQGWTPRRMFKEADDFFTSLGLLPVPPEFWNKSMLEKPTDGREVVCHASAWDFYNGKDFRIKQCTTVNLEDLVVAHHEMGHIQYFMQYKDLPVALREGANPGFHEAIGDVLALSVSTPKHLHSLNLLSSEGGSDEHDINFLMKMALDKIAFIPFSYLVDQWRWRVFDGSITKENYNQEWWSLRLKYQGLCPPVPRTQGDFDPGAKFHIPSSVPYIRTAMKLGFSRPWPEAMQLITGQPNMSASAMLSYFKPLLDWLRTENELHGEKLGWPQYNWTPNSARSEGPLPDSGRVSFLGLDLDAQQARVGQWLLLFLGIALLVATLGLSQRLFSIRHRSLHRHSHGPQFGSEVELRHS

SEQ ID NO: 120 - protein, 119 aa, Homo Sapiens
  misc_feature (1)..(1): Xaa can be any naturally occurring amino acid
XQAGSSRPWQEVLKDMVGLDALDAQPLLKYFQPVTQWLQEQNQQNGEVLGWPEYQWHPPLPDNYPEGIGDSHPWDKQPGNNQQPDNHPPGDGPPDISPEPKWDHAGEGQGARGGRGGAG

SEQ ID NO: 121 - protein, 138 aa, Homo Sapiens
  misc_feature (1)..(1): Xaa can be any naturally occurring amino acid
XRTQGDFDPGAKFHIPSSVPYIRYFVSFIIQFQFHEALCQAAGHTGPLHKCDIYQSKEAGQRLATAMKLGFSRPWPEAMQLITGQPNMSASAMLSYFKPLLDWLRTENELHGEKLGWPQYNWTPNSGTATHPTSSLGS

SEQ ID NO: 122 - protein, 94 aa, Homo Sapiens
MLGLVMSCPDRTLVTKVRSHPSGNQHRPTRGGSRSFHCRRGVRPRPAALRVLPRCPAFSDAACPAAMRPPQCLLHTPSLASPLLLLLLWLLGGG

SEQ ID NO: 123 - protein, 55 aa, Homo Sapiens
MRPPQCLLHTPSLASPLLLLLLWLLGGGVGAEGREDAELLVTVLRAPRCGTPTVS

SEQ ID NO: 124 - protein, 159 aa, Homo Sapiens
MRPPQCLLHTPSLASPLLLLLLWLLGGGVGAEGREDAELLVTVRGGRLRGIRLKTPGGPVSAFLGIPFAEPPMGPRRFLPPEPKQPWSGVVDATTFQSVCYQYVDTLYPGFEGTEMWNPNRELSEDCLYLNVWTPYPRPTSPTPVLVWIYGGGFYSGAS

SEQ ID NO: 125 - protein, 614 aa, Homo Sapiens
MRPPQCLLHTPSLASPLLLLLLWLLGGGVGAEGREDAELLVTVRGGRLRGIRLKTPGGPVSAFLGIPFAEPPMGPRRFLPPEPKQPWSGVVDATTFQSVCYQYVDTLYPGFEGTEMWNPNRELSEDCLYLNVWTPYPRPTSPTPVLVWIYGGGFYSGASSLDVYDGRFLVQAERTVLVSMNYRVGAFGFLALPGSREAPGNVGLLDQRLALQWVQENVAAFGGDPTSVTLFGESAGAASVGMHLLSPPSRGLFHRAVLQSGAPNGPWATVGMGEARRRATQLAHLVGCPPGGTGGNDTELVACLRTRPAQVLVNHEWHVLPQESVFRFSFVPVVDGDFLSDTPEALINAGDFHGLQVLVGVVKDEGSYFLVYGAPGFSKDNESLISRAEFLAGVRVGVPQVSDLAAEAVVLHYTDWLHPEDPARLREALSDVVGDHNVVCPVAQLAGRLAAQGARVYAYVFEHRASTLSWPLWMGVPHGYEIEFIFGIPLDPSRNYTAEEKIFAQRLMRYWANFARTGDPNEPRDPKAPQWPPYTAGAQQYVSLDLRPLEVRRGLRAQACAFWNRFLPKLLSATDTLDEAERQWKAEFHRWSSYMVHWKNQFDHYSKQDRCSDL

SEQ ID NO: 126 - protein, 617 aa, Homo Sapiens
MRPPQCLLHTPSLASPLLLLLLWLLGGGVGAEGREDAELLVTVRGGRLRGIRLKTPGGPVSAFLGIPFAEPPMGPRRFLPPEPKQPWSGVVDATTFQSVCYQYVDTLYPGFEGTEMWNPNRELSEDCLYLNVWTPYPRPTSPTPVLVWIYGGGFYSGASSLDVYDGRFLVQAERTVLVSMNYRVGAFGFLALPGSREAPGNVGLLDQRLALQWVQENVAAFGGDPTSVTLFGESAGAASVGMHLLSPPSRGLFHRAVLQSGAPNGPWATVGMGEARRRATQLAHLVGCPPGGTGGNDTELVACLRTRPAQVLVNHEWHVLPQESVFRFSFVPVVDGDFLSDTPEALINAGDFHGLQVLVGVVKDEGSYFLVYGAPGFSKDNESLISRAEFLAGVRVGVPQVSDLAAEAVVLHYTDWLHPEDPARLREALSDVVGDHNVVCPVAQLAGRLAAQGARVYAYVFEHRASTLSWPLWMGVPHGYEIEFIFGIPLDPSRNYTAEEKIFAQRLMRYWANFARTGDPNEPRDPKAPQWPPYTAGAQQYVSLDLRPLEVRRGLRAQACAFWNRFLPKLLSATASEAPSTCPGFTHGEAAPRPGLPLPLLLLHQLLLLFLSHLRRL

SEQ ID NO: 127 - protein, 614 aa, Homo Sapiens; identical to SEQ ID NO: 125

SEQ ID NO: 128 - protein, 614 aa, Homo Sapiens; identical to SEQ ID NO: 125

SEQ ID NO: 129 - protein, 617 aa, Homo Sapiens; identical to SEQ ID NO: 126

SEQ ID NO: 130 - protein, 435 aa, Homo Sapiens [sequence omitted]

SEQ ID NO: 131 - protein, 398 aa, Homo Sapiens [sequence omitted]

SEQ ID NO: 132 - protein, 526 aa, Homo Sapiens
MRPPQCLLHTPSLASPLLLLLLWLLGGGVGAEGREDAELLVTVRGGRLRGIRLKTPGGPVSAFLGIPFAEPPMGPRRFLPPEPKQPWSGVVDATTFQSVCYQYVDTLYPGFEGTEMWNPNRELSEDCLYLNVWTPYPRPTSPTPVLVWIYGGGFYSGASSLDVYDGRFLVQAERTVLVSMNYRVGAFGFLALPGSREAPGNVGLLDQRLALQWVQENVAAFGGDPTSVTLFGESAGAASVGMHLLSPPSRGLFHRAVLQSGAPNGPWATVGMGEARRRATQLAHLVGCPPGGTGGNDTELVACLRTRPAQVLVNHEWHVLPQESVFRFSFVPVVDGDFLSDTPEALINAGDFHGLQLAGRLAAQGARVYAYVFEHRASTLSWPLWMGVPHGYEIEFIFGIPLDPSRNYTAEEKIFAQRLMRYWANFARTGDPNEPRDPKAPQWPPYTAGAQQYVSLDLRPLEVRRGLRAQACAFWNRFLPKLLSATDTLDEAERQWKAEFHRWSSYMVHWKNQFDHYSKQDRCSDL

SEQ ID NO: 133 - protein, 359 aa, Homo Sapiens
MRPPQCLLHTPSLASPLLLLLLWLLGGGVGAEGREDAELLVTVRGGRLRGIRLKTPGGPVSAFLGIPFAEPPMGPRRFLPPEPKQPWSGVVDATTFQSVCYQYVDTLYPGFEGTEMWNPNRELSEDCLYLNVWTPYPRPTSPTPVLVWIYGGGFYSGASSLDVYDGRFLVQAERTVLVSMNYRVGAFGFLALPGSREAPGNVGLLDQRLALQWVQENVAAFGGDPTSVTLFGESAGAASVGMHLLSPPSRGLFHRAVLQSGAPNGPWATVGMGEARRRATQLAHLVGCPPGGTGGNDTELVACLRTRPAQVLVNHEWHVLPQESVFRFSFVPVVDGDFLSDTPEALINAGDFHGLQGSQ

SEQ ID NO: 134 - protein, 403 aa, Homo Sapiens
MRPPQCLLHTPSLASPLLLLLLWLLGGGVGAEGREDAELLVTVRGGRLRGIRLKTPGGPVSAFLGIPFAEPPMGPRRFLPPEPKQPWSGVVDATTFQSVCYQYVDTLYPGFEGTEMWNPNRELSEDCLYLNVWTPYPRPTSPTPVLVWIYGGGFYSGASSLDVYDGRFLVQAERTVLVSMNYRVGAFGFLALPGSREAPGNVGLLDQRLALQWVQENVAAFGGDPTSVTLFGESAGAASVGMHLLSPPSRGLFHRAVLQSGAPNGPWATVGMGEARRRATQLAHLVGCPPGGTGGNDTELVACLRTRPAQVLVNHEWHVLPQESVFRFSFVPVVDGDFLSDTPEALINAGDFHGLQVLVGVVKDEGSYFLVYGAPGFSKDNESLISRAEFLAGVRVGVPQGSQ

SEQ ID NO: 135 - protein, 391 aa, Homo Sapiens
MAGKRSGWSRAALLQLLLGVNLVVMPPTRARSLRFVTLEGMLQHWELGQALRQRYHGFLNTSYHRQEVYVRSTDFDRTLMSAEANLAGLFPPNGMQRFNPNISWQPIPVHTVPITEDRLLKFPLGPCPRYEQLQNETRQTPEYQNESSRNAQFLDMVANETGLTDLTLETVWNVYDTLFCEQTHGLRLPPWASPQTMQRLSRLKDFSFRFLFGIYQQAEKARLQGGVLLAQIRKNLTLMATTSQLPKLLVYSAHDTTLVALQMALDVYNGEQAPYASCHIFELYQEDSGNFSVEMYFRNESDKAPWPLSLPGCPHRCPLQDFLRLTEPVVPKDWQQECQLASGPADTEVIVALAVCGSILFLLIVLLLTVLFRMQAQPPGYRHVADGEDHA

SEQ ID NO: 136 - protein, 151 aa, Homo Sapiens
MAGKRSGWSRAALLQLLLGVNLVVMPPTRARSLRFVTLLYRHGDRSPVKTYPKDPYQEEEWPQGFGQLTKEGMLQHWELGQALRQRYHGFLNTSYHRQEVYVRSTDFDRTLMSAEANLAGLFPPNGMQRFNPNISWQPIPVHTVPITEDRD

SEQ ID NO: 137 - protein, 423 aa, Homo Sapiens
MAGKRSGWSRAALLQLLLGVNLVVMPPTRARSLRFVTLLYRHGDRSPVKTYPKDPYQEEEWPQGFGQLTKEGMLQHWELGQALRQRYHGFLNTSYHRQEVYVRSTDFDRTLMSAEANLAGLFPPNGMQRFNPNISWQPIPVHTVPITEDRLLKFPLGPCPRYEQLQNETRQTPEYQNESSRNAQFLDMVANETGLTDLTLETVWNVYDTLFCEQTHGLRLPPWASPQTMQRLSRLKDFSFRFLFGIYQQAEKARLQGGVLLAQIRKNLTLMATTSQLPKLLVYSAHDTTLVALQMALDVYNGEQAPYASCHIFELYQEDSGNFSVEMYFRNESDKAPWPLSLPGCPHRCPLQDFLRLTEPVVPKDWQQECQLASGPADTEVIVALAVCGSILFLLIVLLLTVLFRMQAQPPGYRHVADGEDHA

SEQ ID NO: 138 - protein, 162 aa, Homo Sapiens
MAGKRSGWSRAALLQLLLGVNLVVMPPTRARSLRFVTLLYRHGDRSPVKTYPKDPYQEEEWPQGFGQLTKEGMLQHWELGQALRQRYHGFLNTSYHRQEVYVRSTDFDRTLMSAEANLAGLFPPNGMQRFNPNISWQPIPVHTVPITEDRQAQVTRTVEHSA

SEQ ID NO: 139 - protein, 305 aa, Homo Sapiens
MAGKRSGWSRAALLQLLLGVNLVVMPPTRARSLRFVTLLYRHGDRSPVKTYPKDPYQEEEWPQGFGQLTKEGMLQHWELGQALRQRYHGFLNTSYHRQEVYVRSTDFDRTLMSAEANLAGLFPPNGMQRFNPNISWQPIPVHTVPITEDRQFLDMVANETGLTDLTLETVWNVYDTLFCEQTHGLRLPPWASPQTMQRLSRLKDFSFRFLFGIYQQAEKARLQGGVLLAQIRKNLTLMATTSQLPKLLVYSAHDTTLVALQMALDVYNGEQAPYASCHIFELYQEDSGNFSVEMYFRNESDKAPW

SEQ ID NO: 140 - protein, 360 aa, Homo Sapiens
MAGKRSGWSRAALLQLLLGVNLVVMPPTRARSLRFVTLLYRHGDRSPVKTYPKDPYQEEEWPQGFGQLTKEGMLQHWELGQALRQRYHGFLNTSYHRQEVYVRSTDFDRTLMSAEANLAGLFPPNGMQRFNPNISWQPIPVHTVPITEDRQTHGLRLPPWASPQTMQRLSRLKDFSFRFLFGIYQQAEKARLQGGVLLAQIRKNLTLMATTSQLPKLLVYSAHDTTLVALQMALDVYNGEQAPYASCHIFELYQEDSGNFSVEMYFRNESDKAPWPLSLPGCPHRCPLQDFLRLTEPVVPKDWQQECQLASGPADTEVIVALAVCGSILFLLIVLLLTVLFRMQAQPPGYRHVADGEDHA

SEQ ID NO: 141 - protein, 160 aa, Homo Sapiens
MAGKRSGWSRAALLQLLLGVNLVVMPPTRARSLRFVTLLYRHGDRSPVKTYPKDPYQEEEWPQGFGQLTKEGMLQHWELGQALRQRYHGFLNTSYHRQEVYVRSTDFDRTLMSAEANLAGLFPPNGMQRFNPNISWQPIPVHTVPITEDRSRTETLIHFS

SEQ ID NO: 142 - protein, 395 aa, Homo Sapiens
MGVRMTEYVGLYRHGDRSPVKTYPKDPYQEEEWPQGFGQLTKEGMLQHWELGQALRQRYHGFLNTSYHRQEVYVRSTDFDRTLMSAEANLAGLFPPNGMQRFNPNISWQPIPVHTVPITEDRLLKFPLGPCPRYEQLQNETRQTPEYQNESSRNAQFLDMVANETGLTDLTLETVWNVYDTLFCEQTHGLRLPPWASPQTMQRLSRLKDFSFRFLFGIYQQAEKARLQGGVLLAQIRKNLTLMATTSQLPKLLVYSAHDTTLVALQMALDVYNGEQAPYASCHIFELYQEDSGNFSVEMYFRNESDKAPWPLSLPGCPHRCPLQDFLRLTEPVVPKDWQQECQLASGPADTEVIVALAVCGSILFLLIVLLLTVLFRMQAQPPGYRHVADGEDHA

SEQ ID NO: 143 - protein, 6 aa, Homo Sapiens
MDMWTA

SEQ ID NO: 144 - protein, 52 aa, Homo Sapiens
MDMWTALLILQALLLPSLADGATPALRFVAVGDWGGVPNAPFHTAREMANAK

SEQ ID NO: 145 - protein, 74 aa, Homo Sapiens
MDMWTALLILQALLLPSLADGATPALRFVAVGDWGGVPNAPFHTAREMANAKEIARTVQILGADFILSLGDNFY

SEQ ID NO: 146 - protein, 124 aa, Homo Sapiens
MDMWTALLILQALLLPSLADGATPALRFVAVGDWGGVPNAPFHTAREMANAKEIARTVQILGADFILSLGDNFYFTGVQDINDKRFQETFEDVFSDRSLRKVPWYVLAGNHDHLGNVSAQIAYS

SEQ ID NO: 147 - protein, 325 aa, Homo Sapiens
MDMWTALLILQALLLPSLADGATPALRFVAVGDWGGVPNAPFHTAREMANAKEIARTVQILGADFILSLGDNFYFTGVQDINDKRFQETFEDVFSDRSLRKVPWYVLAGNHDHLGNVSAQIAYSKISKRWNFPSPFYRLHFKIPQTNVSVAIFMLDTVTLCGNSDDFLSQQPERPRDVKLARTQLSWLKKQLAAAREDYVLVAGHYPVWSIAEHGPTHCLVKQLRPLLATYGVTAYLCGHDHNLQYLQDENGVGYVLSGAGNFMDPSKRHQRKVPNGYLRFHYGTEDSLGGFAYVEISSKEMTVTYIEASGKSLFKTRLPRRARP

SEQ ID NO: 148 - protein, 325 aa, Homo Sapiens; identical to SEQ ID NO: 147

SEQ ID NO: 149 - protein, 325 aa, Homo Sapiens; identical to SEQ ID NO: 147

SEQ ID NO: 150 - protein, 325 aa, Homo Sapiens; identical to SEQ ID NO: 147

SEQ ID NO: 151 - protein, 59 aa, Homo Sapiens
MDMWTALLILQALLLPSLGISWTPQSGTSARSPTAICASTMGLKTHWVALPMWRSAPKR

SEQ ID NO: 152 - protein, 228 aa, Homo Sapiens
MITGVFSMRLWTPVGVLTSLAYCLHQRRVALAELQEADGQCPVDRSLLKLKMVQVVFRHGARSPLKPLPLEEQGGMFAGQLTKVGMQQMFALGERLRKNYVEDIPFLSPTFNPQEVFIRSTNIFRNLESTRCLLAGLFQCQKEGPIIIHTDEADSEVLYPNYQSCWSLRQRTRGRRQTASLQPGISEDLKKVKDRMGIDSSDKVDFFILLDNVAAEQEKMGSCRFHGS

SEQ ID NO: 153 - protein, 428 aa, Homo Sapiens
MITGVFSMRLWTPVGVLTSLAYCLHQRRVALAELQEADGQCPVDRSLLKLKMVQVVFRHGARSPLKPLPLEEQVEWNPQLLEVPPQTQFDYTVTNLAGGPKPYSPYDSQYHETTLKGGMFAGQLTKVGMQQMFALGERLRKNYVEDIPFLSPTFNPQEVFIRSTNIFRNLESTRCLLAGLFQCQKEGPIIIHTDEADSEVLYPNYQSCWSLRQRTRGRRQTASLQPGISEDLKKVKDRMGIDSSDKVDFFILLDNVAAEQAHNLPSCPMLKRFARMIEQRAVDTSLYILPKEDRESLQMAVGPFLHILESNLLKAMDSATAPDKIRKLYLYAAHDVTFIPLLMTLGIFDHKWPPFAVDLTMELYQHLESKEWFVQLYYHGKEQVPRGCPDGLCPLDMFLNAMSVYTLSPEKYHALCSQTQVMEVGNEE

SEQ ID NO: 154 - protein, 271 aa, Homo Sapiens
MITGVFSMRLWTPVGVLTSLAYCLHQRRVALAELQEADGQCPVDRSLLKLKMVQVVFRHGARSPLKPLPLEEQVEWNPQLLEVPPQTQFDYTVTNLAGGPKPYSPYDSQYHETTLKGGMFAGQLTKVGMQQMFALGERLRKNYVEDIPFLSPTFNPQEVFIRSTNIFRNLESTRCLLAGLFQCQKEGPIIIHTDEADSEVLYPNYQSCWSLRQRTRGRRQTASLQPGISEDLKKVKDRMGIDSSDKVDFFILLDNVAAEQEKMGSCRFHGS

SEQ ID NO: 155 - protein, 77 aa, Homo Sapiens
MITGVFSMRLWTPVGVLTSLAYCLHQRRVALAELQEADGQCPVDRSLLKLKMVQVVFRHGARSPLKPLPLEEQYSFH

SEQ ID NO: 156 - protein, 143 aa, Homo Sapiens
MVQVVFRHGARSPLKPLPLEEQVEWNPQLLEVPPQTQFDYTVTNLAGGPKPYSPYDSQYHETTLKGGMFAGQLTKVGMQQMFALGERLRKNYVEDIPFLSPTFNPQEVFIRSTNIFRNLESTRCLLAGLFQCQKEGPIIIHTD

SEQ ID NO: 157 - protein, 166 aa, Homo Sapiens
  misc_feature (1)..(1): Xaa can be any naturally occurring amino acid
XDSQYHETTLKGGMFAGQLTKVGMQQMFALGERLRKNYVEDIPFLSPTFNPQEVFIRSTNIFRNLESTRCLLAGLFQCQKEGPIIIHTDEADSEVLYPNYQSCWSLRQRTRGRRQTASLQPGISEDLKKVKDRMGIDSSDKVDFFILLDNVAAEQEKMGSCRFHGS

SEQ ID NO: 158 - protein, 157 aa, Homo Sapiens
  misc_feature (1)..(1): Xaa can be any naturally occurring amino acid
XRCLLAGLFQCQKEGPIIIHTDEADSEVLYPNYQSCWSLRQRTRGRRQTASLQPGISEDLKKVKDRMGIDSSDKVDFFILLDNVAAEQAHNLPSCPMLKRFARMIEQRAVDTSLYILPKEDRESLQMAVGPFLHILESNLLKAMDSATAPDKIRTCR

SEQ ID NO: 159 - protein, 334 aa, Homo Sapiens
MHPLPGYWSCYCLLLLFSLGVQGSLGAPSAAPEQVHLSYPGEPGSMTVTWTTWVPTRSEVQFGLQPSGPLPLRAQGTFVPFVDGGILRRKLYIHRVTLRKLLPGVQYVYRCGSAQGWSRRFRFRALKNGAHWSPRLAVFGDLGADNPKAVPRLRRDTQQGMYDAVLHVATSLTTRLASACRGIMRACGTAGIWVPPTSSPSPPRSISFSIMAATWYRGSFAGWRATSRKPIRTGQPGRGSSLWGTGPCTAPTQIWTTAHDMKARSAKASKASCTGWRIFSTNMEWICSCGLMSTRMNDCGQFTTTRYLTAAERCPTPTREGLSTSSQDLLMGRS

SEQ ID NO: 160 - protein, 367 aa, Homo Sapiens
MHPLPGYWSCYCLLLLFSLGVQGSLGAPSAAPEQVHLSYPGEPGSMTVTWTTWVPTRSEVQFGLQPSGPLPLRAQGTFVPFVDGGILRRKLYIHRVTLRKLLPGVQYVYRCGSAQGWSRRFRFRALKNGAHWSPRLAVFGDLGADNPKAVPRLRRDTQQGMYDAVLHVATSLTTRLASACRGIMRACGTGNVGVLGDWPSPLKDGRCRGALVPDPCPLTPPAGIWVPPTSSPSPPRSISFSIMAATWYRGSFAGWRATSRKPIRTGQPGRGSSLWGTGPCTAPTQIWTTAHDMKARSAKASKASCTGWRIFSTNMEWICSCGLMSTRMNDCGQFTTTRYLTAAERCPTPTREGLSTSSQDLLAVRSG

SEQ ID NO: 161 - protein, 438 aa, Homo Sapiens
MHPLPGYWSCYCLLLLFSLGVQGSLGAPSAAPEQVHLSYPGEPGSMTVTWTTWVPTRSEVQFGLQPSGPLPLRAQGTFVPFVDGGILRRKLYIHRVTLRKLLPGVQYVYRCGSAQGWSRRFRFRALKNGAHWSPRLAVFGDLGADNPKAVPRLRRDTQQGMYDAVLHVGDFAYNLDQDNARVGDRFMRLIEPVAASLPYMTCPGNHEERYNFSNYKARFSMPGDNEGLWYSWDLGPAHIISFSTEVYFFLHYGRHLVQRQFRWLESDLQKANKNRAARPWIITMGHRPMYCSNADLDDCTRHESKVRKGLQGKLYGLEDLFYKYGVDLQLWAHEHSYERLWPIYNYQVFNGSREMPYTNPRGPVHIITGSAGCEERLTPFAVFPRPWSAVRVKEYGYTRLHILNGTHIHIQQVSDDQDGKIVDDVWVVRPLFGRRMYL

SEQ ID NO: 162 - protein, 227 aa, Homo Sapiens
  misc_feature (1)..(1): Xaa can be any naturally occurring amino acid
XGADNPKAVPRLRRDTQQGMYDAVLHVGDFAYNLDQDNARVGDRFMRLIEPVAASLPYMTCPGNHEERYNFSNYKARFSMPGDNEGLWYSWDLGPAHIISFSTEVYFFLHYGRHLVQRQFRWLESDLQKANKNRAARPWIITMGHRPMYCSNADLDDCTRHESKVRKGLQGKLYGLEDLFYKYGVDLQLWAHEHSYERLWPIYNYQDGKIVDDVWVVRPLFGRRMYL

SEQ ID NO: 163 - protein, 353 aa, Homo Sapiens
MRAAPLLLARAASLSLGFLFLLFFWLDRSVLAKELKFVTLVFRHGDRSPIDTFPTDPIKESSWPQGFGQLTQLGMEQHYELGEYIRKRYRKFLNESYKHEQVYIRSTDVDRTLMSAMTNLAALFPPEGVSIWNPILLWQPIPVHTVPLSEDQDFIATLGKLSGLHGQDLFGIWSKVYDPLYCESVHNFTLPSWATEDTMTKLRELSELSLLSLYGIHKQKEKSRLQGGVLVNEILNHMKRATQIPSYKKLIMYSAHDTTVSGLQMALDVYNGLLPPYASCHLTELYFEKGEYFVEMYYRNETQHEPYPLMLPGCSPSCPLERFAELVGPVIPQDWSTECMTTNSHQGTEDSTD

SEQ ID NO: 164 - protein, 418 aa, Homo Sapiens
MRAAPLLLARAASLSLGFLFLLFFWLDRSVLAKELKFVTLVFRHGDRSPIDTFPTDPIKESSWPQGFGQLTQLGMEQHYELGEYIRKRYRKFLNESYKHEQVYIRSTDVDRTLMSAMTNLAALFPPEGVSIWNPILLWQPIPVHTVPLSEDQLLYLPFRNCPRFQELESETLKSEEFQKRLHPYKDFIATLGKLSGLHGQDLFGIWSKVYDPLYCESVHNFTLPSWATEDTMTKLRELSELSLLSLYGIHKQKEKSRLQGGVLVNEILNHMKRATQIPSYKKLIMYSAHDTTVSGLQMALDVYNGLLPPYASCHLTELYFEKGEYFVEMYYRNETQHEPYPLMLPGCSPSCPLERFAELVGPVIPQDWSTECMTTNSHQVLKVIFAVAFCLISAVLMVLLFIHIRRGLCWQRESYGNI

SEQ ID NO: 165 - protein, 386 aa, Homo Sapiens
MRAAPLLLARAASLSLGFLFLLFFWLDRSVLAKELKFVTLVFRHGDRSPIDTFPTDPIKESSWPQGFGQLTQLGMEQHYELGEYIRKRYRKFLNESYKHEQVYIRSTDVDRTLMSAMTNLAALFPPEGVSIWNPILLWQPIPVHTVPLSEDQLLYLPFRNCPRFQELESETLKSEEFQKRLHPYKDFIATLGKLSGLHGQDLFGIWSKVYDPLYCESVHNFTLPSWATEDTMTKLRELSELSLLSLYGIHKQKEKSRLQGGVLVNEILNHMKRATQIPSYKKLIMYSAHDTTVSGLQMALDVYNGLLPPYASCHLTELYFEKGEYFVEMYYRNETQHEPYPLMLPGCSPSCPLERFAELVGPVIPQDWSTECMTTNSHQGTEDSTD

SEQ ID NO: 166 - protein, 165 aa, Homo Sapiens
MRAAPLLLARAASLSLGFLFLLFFWLDRSVLAKELKFVTLVFRHGDRSPIDTFPTDPIKESSWPQGFGQLTQVYIRSTDVDRTLMSAMTNLAALFPPEGVSIWNPILLWQPIPVHTVPLSEDQLLYLPFRNCPRFQELESETLKSEEFQKRLHPYKDFIATLGKL

SEQ ID NO: 167 - protein, 99 aa, Homo Sapiens
  misc_feature (1)..(1): Xaa can be any naturally occurring amino acid
XELYFEKGEYFVEMYYRNETQHEPYPLMLPGCSPSCPLERFAELVGPVIPQDWSTECMTTNSHQGPAETAHSARRNHDIALPCGRSTCLENTVLYYHYG

SEQ ID NO: 168 - protein, 421 aa, Homo Sapiens
MVEMLPTAILLVLAVSVVAKDNATCDGPCGLRFRQNPQGGVRIVGGKAAQHGAWPWMVSLQIFTYNSHRYHTCGGSLLNSRWVLTAAHCFVGKNNVHDWRLVFGAKEITYGNNKPVKAPLQERYVEKIIIHEKYNSATEGNDIALVEITPPISCGRFIGPGCLPHFKAGLPRGSQSCWVAGWGYIEEKAPRPSSILMEARVDLIDLDLCNSTQWYNGRVQPTNVCAGYPVGKIDTCQGDSGGPLMCKDSKESAYVVVGITSWGVGCARAKRPGIYTATWPYLNWIASKIGSNALRMIQSATPPPPTTRPPPIRPPFSHPISAHLPWYFQPPPRPLPPRPPAAQPRPPPSPPPPPPPPASPLPPPPPPPPPTPSSTTKLPQGLSFAKRLQQLIEVLKGKTYSDGKNHYDMETTELPELTSTS

SEQ ID NO: 169 - protein, 212 aa, Homo Sapiens
MVEMLPTAILLVLAVSVVAKDNATCDGPCGLRFRQNPQGGVRIVGGKAAQHGAWPWMVSLQIFTYNSHRYHTCGGSLLNSRWVLTAAHCFVGKNNVHDWRLVFGAKEITYGNNKPVKAPLQERYVEKIIIHEKYNSATEGNDIALVEITPPISCGRFIGPGCLPHFKAGLPRGSQSCWVAGWGYIEEKGFLECPAGTSPFKTGVAVALELCP

SEQ ID NO: 170 - protein, 100 aa, Homo Sapiens
MRKPAAGFLPSLLKVLLLPLAPAAAQDSTQASTPGSPLSPTEYERFFALLTPTWKAETTCRLRATHGCRNPTLVQLDQYENHGLVPDESPVFPASLYSLT

SEQ ID NO: 171 - protein, 510 aa, Homo Sapiens
MRKPAAGFLPSLLKVLLLPLAPAAAQDSTQASTPGSPLSPTEYERFFALLTPTWKAETTCRLRATHGCRNPTLVQLDQYENHGLVPDGAVCSNLPYASWFESFCQFTHYRCSNHVYYAKRVLCSQPVSILSPNTLKEIEASAEVSPTTMTSPISPHFTAPEHKQEQGVEHRQEPTQEHKQEEGQKQEEQEEEQEEEGKQEEGQGTKEGREAVSQLQTDSEPKFHSESLSSNPSSFAPRVREVESTPMIMENIQELIRSAQEIDEMNEIYDENSYWRNQNPGSLLQLPHTEALLVLCYSIVENTCIITPTAKAWKYMEEEILGFGKSVCDSLGRRHMSTCALCDFCSLKLEQCHSEASLQRQQCDTSHKTPFVSPLLASQSLSIGNQVGSPESGRFYGLDLYGGLHMDFWCARLATKGCEDVRVSGWLQTEFLSFQDGDFPTKICDTDYIQYPNYCSFKSQQCLMRNRNRKVSRMRCLQNETYSALSPGKSEDVVLRWSQEFSTLTLGQFG

SEQ ID NO: 172 - protein, 174 aa, Homo Sapiens [sequence omitted]

SEQ ID NO: 173 - protein, 543 aa, Homo Sapiens
MRKPAAGFLPSLLKVLLLPLAPAAAQDSTQASTPGSPLSPTEYERFFALLTPTWKAETTCRLRATHGCRNPTLVQLDQYENHGLVPDGAVCSNLPYASWFESFCQFTHYRCSNHVYYAKRVLCSQPVSILSPNTLKEIEASAEVSPTTMTSPISPHFTVTERQTFQPWPERLSNNVEELLQSSLSLGGQEQAPEHKQEQGVEHRQEPTQEHKQEEGQKQEEQEEEQEEEGKQEEGQGTKEGREAVSQLQTDSEPKFHSESLSSNPSSFAPRVREVESTPMIMENIQELIRSAQEIDEMNEIYDENSYWRNQNPGSLLQLPHTEALLVLCYSIVENTCIITPTAKAWKYMEEEILGFGKSVCDSLGRRHMSTCALCDFCSLKLEQCHSEASLQRQQCDTSHKTPFVSPLLASQSLSIGNQVGSPESGRFYGLDLYGGLHMDFWCARLATKGCEDVRVSGWLQTEFLSFQDGDFPTKICDTDYIQYPNYCSFKSQQCLMRNRNRKVSRMRCLQNETYSALSPGKSEDVVLRWSQEFSTLTLGQFG

SEQ ID NO: 174 - protein, 319 aa, Homo Sapiens
MRKPAAGFLPSLLKVLLLPLAPAAAQDSTQASTPGSPLSPTEYERFFALLTPTWKAETTCRLRATHGCRNPTLVQLDQYENHGLVPDGAVCSNLPYASWFESFCQFTHYRCSNHVYYAKRVLCSQPVSILSPNTLKEIEASAEVSPTTMTSPISPHFTVTERQTFQPWPERLSNNVEELLQSSLSLGGQEQAPEHKQEQGVEHRQEPTQEHKQEEGQKQEEQEEEQEEEGKQEEGQGTKEGREAVSQLQTDSEPKFHSESLSSNPSSFAPRVREVESTPMIMENIQELIRSAQEIDEMNEIYDENSYWRNQNPGRYRKF

SEQ ID NO: 175 - protein, 265 aa, Homo Sapiens
MNRFLLLMSLYLLGSARGTSSQPNELSGSIDHQTSVQQLPGEFFSLENPSDAEALYETSSGLNTLSEHGSSEHGSSKHTVAEHTSGEHAESEHASGEPAATEHAEGEHTVGEQPSGEQPSGEHLSGEQPLSELESGEQPSDEQPSGEHGSGEQPSGEQASGEQPSGEHASGEQASGAPISSTSTGTILNCYTCAYMNDQGKCLRGEGTCITQNSQQCMLKKIFEGGKLQFMVQGCENMCPSMNLFSHGTRMQIICCRNQSFCNKI

SEQ ID NO: 176 - protein, 246 aa, Homo Sapiens
MNRFLLLMSLYLLGSARGTSSQPNELSGSIDHQTSVQQLPGEFFSLENPSDAEALYETSSGLNTLSEHGSSEHGSSKHTVAEHTSGEHAESEHASGEPAATEHAEGEHTVGEQPSGEQPSGEHLSGEQPLSELESGEQPSDEQPSGEHGSGEQPSGEQASGEQPSGTILNCYTCAYMNDQGKCLRGEGTCITQNSQQCMLKKIFEGGKLQFMVQGCENMCPSMNLFSHGTRMQIICCRNQSFCNKI

SEQ ID NO: 177 - protein, 210 aa, Homo Sapiens
MNRFLLLMSLYLLGSARGTSSQPNELSGSIDHQTSVQQLPGEPAATEHAEGEHTVGEQPSGEQPSGEHLSGEQPLSELESGEQPSDEQPSGEHGSGEQPSGEQASGEQPSGEHASGEQASGAPISSTSTGTILNCYTCAYMNDQGKCLRGEGTCITQNSQQCMLKKIFEGGKLQFMVQGCENMCPSMNLFSHGTRMQIICCRNQSFCNKI

SEQ ID NO: 178 - protein, 195 aa, Homo Sapiens
MNRFLLLMSLYLLGSARGTSSQPNELSGSIDHQTSVQQLPGEQPSGEQPSGEHLSGEQPLSELESGEQPSDEQPSGEHGSGEQPSGEQASGEQPSGEHASGEQASGAPISSTSTGTILNCYTCAYMNDQGKCLRGEGTCITQNSQQCMLKKIFEGGKLQFMVQGCENMCPSMNLFSHGTRMQIICCRNQSFCNKI

SEQ ID NO: 179 - protein, 45 aa, Homo Sapiens
MAVYVGMLRLGRLCAGSSGVLGARAALSRSWQEARLQGVRFLRCL

SEQ ID NO: 180 - protein, 54 aa, Homo Sapiens
MAVYVGMLRLGRLCAGSSGVLGARAALSRSWQEARLQGVRFLRPSGEKLAHQGV

SEQ ID NO: 181 - protein, 640 aa, Homo Sapiens
MAVYVGMLRLGRLCAGSSGVLGARAALSRSWQEARLQGVRFLSARGGMEAGRQRISVPSSFTASAAAHSREVDRMVSTPIGGLSYVQGCTKKHLNSKTVGQCLETTAQRVPEREALVVLHEDVRLTFAQLKEEVDKAASGLLSIGLCKGDRLGMWGPNSYAWVLMQLATAQAGIILVSVNPAYQAMELEYVLKKVGCKALVFPKQFKTQQYYNVLKQICPEVENAQPGALKSQRLPDLTTVISVDAPLPGTLLLDEVVAAGSTRQHLDQLQYNQQFLSCHDPINIQFTSGTTGSPKGATLSHYNIVNNSNILGERLKLHEKTPEQLRMILPNPLYHCLGSVAGTMMCLMYGATLILASPIFNGKKALEAISRERGTFLYGTPTMFVDILNQPDFSSYDISTMCGGVIAGSPAPPELIRAIINKINMKDLVVAYGTTENSPVTFAHFPEDTVEQKAESVGRIMPHTEARIMNMEAGTLAKLNTPGELCIRGYCVMLGYWGEPQKTEEAVDQDKWYWTGDVATMNEQGFCKIVGRSKDMIIRGGENIYPAELEDFFHTHPKVQEVQVVGVKDDRMGEEICACIRLKDGEETTVEEIKAFCKGKISHFKIPKYIVFVTNYPLTISGKIQKFKLREQMERHLNL

SEQ ID NO: 182 - protein, 615 aa, Homo Sapiens
MAVYVGMLRLGRLCAGSSGVLGARAALSRSWQEARLQGVRFLSSREVDRMVSTPIGGLSYVQGCTKKHLNSKTVGQCLETTAQRVPEREALVVLHEDVRLTFAQLKEEVDKAASGLLSIGLCKGDRLGMWGPNSYAWVLMQLATAQAGIILVSVNPAYQAMELEYVLKKVGCKALVFPKQFKTQQYYNVLKQICPEVENAQPGALKSQRLPDLTTVISVDAPLPGTLLLDEVVAAGSTRQHLDQLQYNQQFLSCHDPINIQFTSGTTGSPKGATLSHYNIVNNSNILGERLKLHEKTPEQLRMILPNPLYHCLGSVAGTMMCLMYGATLILASPIFNGKKALEAISRERGTFLYGTPTMFVDILNQPDFSSYDISTMCGGVIAGSPAPPELIRAIINKINMKDLVVAYGTTENSPVTFAHFPEDTVEQKAESVGRIMPHTEARIMNMEAGTLAKLNTPGELCIRGYCVMLGYWGEPQKTEEAVDQDKWYWTGDVATMNEQGFCKIVGRSKDMIIRGGENIYPAELEDFFHTHPKVQEVQVVGVKDDRMGEEICACIRLKDGEETTVEEIKAFCKGKISHFKIPKYIVFVTNYPLTISGKIQKFKLREQMERHLNL

SEQ ID NO: 183 - protein, 602 aa, Homo Sapiens
MAVYVGMLRLGRLCAGSSGVLGARAALSRSWQEARLQGVRFLSSREVDRMVSTPIGGLSYVQGCTKKHLNSKTVGQCLETTAQRVPEREALVVLHEDVRLTFAQLKEEVDKAASGLLSIGLCKGDRLGMWGPNSYAWVLMQLATAQAMELEYVLKKVGCKALVFPKQFKTQQYYNVLKQICPEVENAQPGALKSQRLPDLTTVISVDAPLPGTLLLDEVVAAGSTRQHLDQLQYNQQFLSCHDPINIQFTSGTTGSPKGATLSHYNIVNNSNILGERLKLHEKTPEQLRMILPNPLYHCLGSVAGTMMCLMYGATLILASPIFNGKKALEAISRERGTFLYGTPTMFVDILNQPDFSSYDISTMCGGVIAGSPAPPELIRAIINKINMKDLVVAYGTTENSPVTFAHFPEDTVEQKAESVGRIMPHTEARIMNMEAGTLAKLNTPGELCIRGYCVMLGYWGEPQKTEEAVDQDKWYWTGDVATMNEQGFCKIVGRSKDMIIRGGENIYPAELEDFFHTHPKVQEVQVVGVKDDRMGEEICACIRLKDGEETTVEEIKAFCKGKISHFKIPKYIVFVTNYPLTISGKIQKFKLREQMERHLNL

SEQ ID NO: 184 - protein, 183 aa, Homo Sapiens
MAVYVGMLRLGRLCAGSSGVLGARAALSRSWQEARLQGVRFLSSREVDRMVSTPIGGLSYVQGCTKKHLNSKTVGQCLETTAQRVPEREALVVLHEDVRLTFAQLKEEVDKAASGLLSIGLCKGVCEPSLPGYGTGVCPQEGGLQGPCVPQAIQDPAILQRPEADLSRSGECPARGLEESEAP

SEQ ID NO: 185 - protein, 572 aa, Homo Sapiens
MAVYVGMLRLGRLCAGSSGVLGARAALSRSWQEARLQGVRFLSSREVDRMVSTPIGGLSYVQGCTKKHLNSKTVGQCLETTAQRVPEREALVVLHEDVRLTFAQLKEEVSVNPAYQAMELEYVLKKVGCKALVFPKQFKTQQYYNVLKQICPEVENAQPGALKSQRLPDLTTVISVDAPLPGTLLLDEVVAAGSTRQHLDQLQYNQQFLSCHDPINIQFTSGTTGSPKGATLSHYNIVNNSNILGERLKLHEKTPEQLRMILPNPLYHCLGSVAGTMMCLMYGATLILASPIFNGKKALEAISRERGTFLYGTPTMFVDILNQPDFSSYDISTMCGGVIAGSPAPPELIRAIINKINMKDLVVAYGTTENSPVTFAHFPEDTVEQKAESVGRIMPHTEARIMNMEAGTLAKLNTPGELCIRGYCVMLGYWGEPQKTEEAVDQDKWYWTGDVATMNEQGFCKIVGRSKDMIIRGGENIYPAELEDFFHTHPKVQEVQVVGVKDDRMGEEICACIRLKDGEETTVEEIKAFCKGKISHFKIPKYIVFVTNYPLTISGKIQKFKLREQMERHLNL

SEQ ID NO: 186 - protein, 85 aa, Homo Sapiens
TVPPSSWPLPSSMARRHWRPSAERGVIAGSPAPPELIRAIINKINMKDLVKSQEEIAAWEDGQQSTDVLLERPGRLLMEPQRTVP

SEQ ID NO: 187 - protein, 104 aa, Homo Sapiens
  misc_feature (1)..(1): Xaa can be any naturally occurring amino acid
XGKKALEAISRERGTFLYGTPTMFVDILNQPDFSSYDISTMCGGVIAGSPAPPELIRAIINKINMKDLVKSQEEIAAWEDGQQSTDVLLERPGRLLMEPQRTVP

SEQ ID NO: 188 - protein, 245 aa, Homo Sapiens
MASTALLALCSTGAFSGLAVEAGAGVCHATPIYAGHSWHQATFRLNVAGSTLSRYLRDLLVAANPDLLQQALPRKAITHLKKRSCYVSLDFEGDLRDPARHHPASFSVGNGCCVCLSSERFRCPEPIFQPGLLGQAEQGLPALAFRALQKMPKTLRTRLADTVVLAGGSTLFPGFAERLDKELEAQCRRHGYAALRPHLVAKHGRGMAVWTGGSMVASLHSFQRRWITRAMYQECGSRLLYDVFN

SEQ ID NO: 189 - protein, 21 aa, Homo Sapiens
MVDGVMILPVLIMIALPSPSM

SEQ ID NO: 190 - protein, 71 aa, Homo Sapiens
MVDGVMILPVLIMIALPSPSMEDEKPKVNPKLYMCVCEGLSCGNEDHCEGQQCFSSLSINDGFHVYQKGCF

SEQ ID NO: 191 - protein, 73 aa, Homo Sapiens
MVDGVMILPVLIMIALPSPSMEDEKPKVNPKLYMCVCEGLSCGNEDHCEGQQCFSSLSINDGFHVYQKGCFQV

SEQ ID NO: 192 - protein, 87 aa, Homo Sapiens
MVDGVMILPVLIMIALPSPSMEDEKPKVNPKLYMCVCEGLSCGNEDHCEGQQCFSSLSINDGFHVYQKGCFQVYEQGKMTCKTPPSP

SEQ ID NO: 193 - protein, 87 aa, Homo Sapiens; identical to SEQ ID NO: 192

SEQ ID NO: 194 - protein, 509 aa, Homo Sapiens
MVDGVMILPVLIMIALPSPSMEDEKPKVNPKLYMCVCEGLSCGNEDHCEGQQCFSSLSINDGFHVYQKGCFQVYEQGKMTCKTPPSPGQAVECCQGDWCNRNITAQLPTKGKSFPGTQNFHLEVGLIILSVVFAVCLLACLLGVALRKFKRRNQERLNPRDVEYGTIEGLITTNVGDSTLADLLDHSCTSGSGSGLPFLVQRTVARQITLLECVGKGRYGEVWRGSWQGENVAVKIFSSRDEKSWFRETELYNTVMLRHENILGFIASDMTSRHSSTQLWLITHYHEMGSLYDYLQLTTLDTVSCLRIVLSIASGLAHLHIEIFGTQGKPAIAHRDLKSKNILVKKNGQCCIADLGLAVMHSQSTNQLDVGNNPRVGTKRYMAPEVLDETIQVDCFDSYKRVDIWAFGLVLWEVARRMVSNGIVEDYKPPFYDVVPNDPSFEDMRKVVCVDQQRPNIPNRWFSDPTLTSLAKLMKECWYQNPSARLTALRIKKTLTKIDNSLDKLKTDC

SEQ ID NO: 195 - protein, 509 aa, Homo Sapiens; identical to SEQ ID NO: 194

SEQ ID NO: 196 - protein, 509 aa, Homo Sapiens; identical to SEQ ID NO: 194

SEQ ID NO: 197 - protein, 509 aa, Homo Sapiens; identical to SEQ ID NO: 194

SEQ ID NO: 198 - protein, 443 aa, Homo Sapiens
MLTNGKEQVIKSCVSLPELNAQVFCHSSNNVTKTECCFTDFCNNITLHLPTASPNAPKLGPMELAIIITVPVCLLSIAAMLTVWACQGRQCSYRKKKRPNVEEPLSECNLVNAGKTLKDLIYDVTASGSGSGLPLLVQRTIARTIVLQEIVGKGRFGEVWHGRWCGEDVAVKIFSSRDERSWFREAEIYQTVMLRHENILGFIAADNKDNGTWTQLWLVSEYHEQGSLYDYLNRNIVTVAGMIKLALSIASGLAHLHMEIVGTQGKPAIAHRDIKSKNILVKKCETCAIADLGLAVKHDSILNTIDIPQNPKVGTKRYMAPEMLDDTMNVNIFESFKRADIYSVGLVYWEIARRCSVGGIVEEYQLPYYDMVPSDPSIEEMRKVVCDQKFRPSIPNQWQSCEALRVMGRIMRECWYANGAARLTALRIKKTISQLCVKEDCKA

SEQ ID NO: 199 - protein, 493 aa, Homo Sapiens
MTRALCSALRQALLLLAAAAELSPGLKCVCLLCDSSNFTCQTEGACWASVMLTNGKEQVIKSCVSLPELNAQVFCHSSNNVTKTECCFTDFCNNITLHLPTASPNAPKLGPMELAIIITVPVCLLSIAAMLTVWACQGRQCSYRKKKRPNVEEPLSECNLVNAGKTLKDLIYDVTASGSGSGLPLLVQRTIARTIVLQEIVGKGRFGEVWHGRWCGEDVAVKIFSSRDERSWFREAEIYQTVMLRHENILGFIAADNKDNGTWTQLWLVSEYHEQGSLYDYLNRNIVTVAGMIKLALSIASGLAHLHMEIVGTQGKPAIAHRDIKSKNILVKKCETCAIADLGLAVKHDSILNTIDIPQNPKVGTKRYMAPEMLDDTMNVNIFESFKRADIYSVGLVYWEIARRCSVGGIVEEYQLPYYDMVPSDPSIEEMRKVVCDQKFRPSIPNQWQSCEALRVMGRIMRECWYANGAARLTALRIKKTISQLCVKEDCKA

SEQ ID NO: 200 - protein, 336 aa, Homo Sapiens
MTRALCSALRQALLLLAAAAELSPGLKCVCLLCDSSNFTCQTEGACWASVMLTNGKEQVIKSCVSLPELNAQVFCHSSNNVTKTECCFTDFCNNITLHLPTDNGTWTQLWLVSEYHEQGSLYDYLNRNIVTVAGMIKLALSIASGLAHLHMEIVGTQGKPAIAHRDIKSKNILVKKCETCAIADLGLAVKHDSILNTIDIPQNPKVGTKRYMAPEMLDDTMNVNIFESFKRADIYSVGLVYWEIARRCSVGGIVEEYQLPYYDMVPSDPSIEEMRKVVCDQKFRPSIPNQWQSCEALRVMGRIMRECWYANGAARLTALRIKKTISQLCVKEDCKA

SEQ ID NO: 201 - protein, 413 aa, Homo Sapiens
MTRALCSALRQALLLLAAAAELSPGLKCVCLLCDSSNFTCQTEGACWASVMLTNGKEQVIKSCVSLPELNAQVFCHSSNNVTKTECCFTDFCNNITLHLPTGLPLLVQRTIARTIVLQEIVGKGRFGEVWHGRWCGEDVAVKIFSSRDERSWFREAEIYQTVMLRHENILGFIAADNKDNGTWTQLWLVSEYHEQGSLYDYLNRNIVTVAGMIKLALSIASGLAHLHMEIVGTQGKPAIAHRDIKSKNILVKKCETCAIADLGLAVKHDSILNTIDIPQNPKVGTKRYMAPEMLDDTMNVNIFESFKRADIYSVGLVYWEIARRCSVGGIVEEYQLPYYDMVPSDPSIEEMRKVVCDQKFRPSIPNQWQSCEALRVMGRIMRECWYANGAARLTALRIKKTISQLCVKEDCKA

SEQ ID NO: 202 - protein, 517 aa, Homo Sapiens
MALTPPLLLLSAGTMTLGSPRKGLLMLLMALVTQGDPVKPSRGPLVTCTCESPHCKGPTCRGAWCTVVLVREEGRHPQEHRGCGNLHRELCRGRPTEFVNHYCCDSHLCNHNVSLVLEATQPPSEQPGTDGQLALILGPVLALLALVALGVLGLWHVRRRQEKQRGLHSELGESSLILKASEQGDSMLGDLLDSDCTTGSGSGLPFLVQRTVARQVALVECVGKGRYGEVWRGLWHGESVAVKIFSSRDEQSWFRETEIYNTVLLRHDNILGFIASDMTSRNSSTQLWLITHYHEHGSLYDFLQRQTLEPHLALRLAVSAACGLAHLHVEIFGTQGKPAIAHRDFKSRNVLVKSNLQCCIADLGLAVMHSQGSDYLDIGNNPRVGTKRYMAPEVLDEQIRTDCFESYKWTDIWAFGLVLWEIARRTIVNGIVEDYRPPFYDVVPNDPSFEDMKKVVCVDQQTPTIPNRLAADPVLSGLAQMMRECWYPNPSARLTALRIKKTLQKISNSPEKPKVIQ

SEQ ID NO: 203 - protein, 159 aa, Homo Sapiens
MALTPPLLLLSAGTMTLGSPRKGLLMLLMALVTQGDPVKPSRGPLVTCTCESPHCKGPTCRGAWCTVVLVREEGRHPQEHRGCGNLHRELCRGRPTEFVNHYCCDSHLCNHNVSLVLEGKGRYGEVWRGLWHGESVAVKIFSSRDEQSWFRETEIYNTV

SEQ ID NO: 204 - protein, 329 aa, Homo Sapiens
MALTPPLLLLSAGTMTLGSPRKGLLMLLMALVTQGKGRYGEVWRGLWHGESVAVKIFSSRDEQSWFRETEIYNTVLLRHDNILGFIASDMTSRNSSTQLWLITHYHEHGSLYDFLQRQTLEPHLALRLAVSAACGLAHLHVEIFGTQGKPAIAHRDFKSRNVLVKSNLQCCIADLGLAVMHSQGSDYLDIGNNPRVGTKRYMAPEVLDEQIRTDCFESYKWTDIWAFGLVLWEIARRTIVNGIVEDYRPPFYDVVPNDPSFEDMKKVVCVDQQTPTIPNRLAADPVLSGLAQMMRECWYPNPSARLTALRIKKTLQKISNSPEKPKVIQ

SEQ ID NO: 205 - protein, 89 aa, Homo Sapiens
MTLGSPRKGLLMLLMALVTQGDPVKPSRGPLVTCTCESPHCKGPTCRGAWCTVVLVREEGRHPQEHRGCGNLHRELCRGRPTEFVNHYC

SEQ ID NO: 206 - protein, 503 aa, Homo Sapiens
MTLGSPRKGLLMLLMALVTQGDPVKPSRGPLVTCTCESPHCKGPTCRGAWCTVVLVREEGRHPQEHRGCGNLHRELCRGRPTEFVNHYCCDSHLCNHNVSLVLEATQPPSEQPGTDGQLALILGPVLALLALVALGVLGLWHVRRRQEKQRGLHSELGESSLILKASEQGDSMLGDLLDSDCTTGSGSGLPFLVQRTVARQVALVECVGKGRYGEVWRGLWHGESVAVKIFSSRDEQSWFRETEIYNTVLLRHDNILGFIASDMTSRNSSTQLWLITHYHEHGSLYDFLQRQTLEPHLALRLAVSAACGLAHLHVEIFGTQGKPAIAHRDFKSRNVLVKSNLQCCIADLGLAVMHSQGSDYLDIGNNPRVGTKRYMAPEVLDEQIRTDCFESYKWTDIWAFGLVLWEIARRTIVNGIVEDYRPPFYDVVPNDPSFEDMKKVVCVDQQTPTIPNRLAADPVLSGLAQMMRECWYPNPSARLTALRIKKTLQKISNSPEKPKVIQ

SEQ ID NO: 207 - protein, 163 aa, Homo Sapiens
  misc_feature (1)..(1): Xaa can be any naturally occurring amino acid
XSRNVLVKSNLQCCIADLGLAVMHSQGSDYLDIGNNPRVGTKRYMAPEVLDEQIRTDCFESYKWTDIWAFGLVLWEIARRTIVNGIVEDYRPPFYDVVPNDPSFEDMKKVVCVDQQTPTIPNRLAADPVRPLLGLGWRGVVAHGWDFWAQELVSEASASSHRY

SEQ ID NO: 208 - protein, 99 aa, Homo Sapiens
MAEGNTLISVDYEIFGKVQGVFFRKHTQAEGKKLGLVGWVQNTDRGTVQGQLQGPISKVRHMQEWLETRGSPKSHIDKANFNNEKVILKLDYSDFQIVK

SEQ ID NO: 209 - protein, 99 aa, Homo Sapiens; identical to SEQ ID NO: 208

SEQ ID NO: 210 - protein, 55 aa, Homo Sapiens
MAEGNTLISVDYEIFGKVQGVFFRKHTQEMTVENRIAETHSKSCVPVSFATSYAG

SEQ ID NO: 211 - protein, 62 aa, Homo Sapiens
MAEGNTLISVDYEIFGKVQGVFFRKHTQEMTVENRIAETHSKSCVPVSFATSYAGINEFKRI

SEQ ID NO: 212 - protein, 37 aa, Homo Sapiens
MAEGNTLISVDYEIFGKVQGVFFRKHTQVCGLQALGW

SEQ ID NO: 213 - protein, 129 aa, Homo Sapiens
MPASARLAGAGLLLAFLRALGCAGRAPGLSMAEGNTLISVDYEIFGKVQGVFFRKHTQAEGKKLGLVGWVQNTDRGTVQGQLQGPISKVRHMQEWLETRGSPKSHIDKANFNNEKVILKLDYSDFQIVK

SEQ ID NO: 214 - protein, 97 aa, Homo Sapiens
MCPLPLAAAAVAAPRAPLRLLNRGLAAAMSTAQSLKSVDYEVFGRVQGVCFRMYTEDEARKIGVVGWVKNTSKGTVTGQVQGPEDKVNSMLECSGLI

SEQ ID NO: 215 - protein, 98 aa, Homo Sapiens
MCPLPLAAAAVAAPRAPLRLLNRGLAAAMSTAQSLKSVDYEVFGRVQGVCFRMYTEDEARKIGVVGWVKNTSKGTVTGQVQGPEDKVNSMNSSAPEAG

SEQ ID NO: 216 - protein, 40 aa, Homo Sapiens
MLLTQSLFGGLFPRTRETMRREAVPDDNELPRNKHLNWKS

SEQ ID NO: 217 - protein, 116 aa, Homo Sapiens
MLLTQSLFGGLFPRTRETMRRYKVSLFYLGCSRTPNVKLSSCLGLPCCWDYSYKFIQLSEFGFGQVIIVSEEPWKENISCSSTTFIKSTICLNPDSEFRPCFNAWLSLIRENAVGL

SEQ ID NO: 218 - protein, 172 aa, Homo Sapiens
MLLTQSLFGGLFPRTRETMRRYKVSLFYLGCSRTPNVKLSSCLGLPCCWDYSYKFIQLSEFGFGQVIIVSEEPWKENISCSSTTFIKSTICLSVCFRMYTEDEARKIGVVGWVKNTSKGTVTGQVQGPEDKVNSMKSWLSKVGSPSSRIDRTNFSNEKTISKLEYSNFSIRY

SEQ ID NO: 219 - protein, 99 aa, Homo Sapiens
MSTAQSLKSVDYEVFGRVQGVCFRMYTEDEARKIGVVGWVKNTSKGTVTGQVQGPEDKVNSMKSWLSKVGSPSSRIDRTNFSNEKTISKLEYSNFSIRY

SEQ ID NO: 220 - protein, 83 aa, Homo Sapiens
MTALVLQIEYTEDEARKIGVVGWVKNTSKGTVTGQVQGPEDKVNSMKSWLSKVGSPSSRIDRTNFSNEKTISKLEYSNFSIRY

SEQ ID NO: 221 - protein, 66 aa, Homo Sapiens
  misc_feature (1)..(1): Xaa can be any naturally occurring amino acid
XAQSLKSVDYEVFGRVQGVCFRMYTEDEARKIGVVGWVKNTSKGTVTGQVQGPEDKVNSILAFPFY

SEQ ID NO: 222 - protein, 270 aa, Homo Sapiens
MDSLEWNWALVYELSGEHHDEEWSVKTYQEVAQKFVETHPEFIGIKIIYSDHRSKDVAVIAESIRMAMGLRIKFPTVVAGFDLVGHEDTGHSLHDYKEALMIPAKDGVKLPYFFHAGETDWQGTSIDRNILDALMLNTTRIGHGFALSKHPAVRTYSWKKDIPIEVCPISNQVLKLVSDLRNHPVATLMATGHPMVISSDDPAMFGAKGLSYDFYEVFMGIGGMKADLRTLKQLAMNSIKYSTLLESEKNTFMEIWKKRWDKFIADVATK

SEQ ID NO: 223 - protein, 391 aa, Homo Sapiens
MDWLVRNVTYRPHCHICFTPRGIMQFRFAHPTPRPSEKCSKWILLEDYRKRVQNVTEFDDSLLRNFTLVTQHPEVIYTNQNVVWSKFETIFFTISGLIHYAPVFRDYVFRSMQEFYEDNVLYMEIRARLLPVYELSGEHHDEEWSVKTYQEVAQKFVETHPEFIGIKIIYSDHRSKDVAVIAESIRMAMGLRIKFPTVVAGFDLVGHEDTGHSLHDYKEALMIPAKDGVKLPYFFHAGETDWQGTSIDRNILDALMLNTTRIGHGFALSKHPAVRTYSWKKDIPIEVCPISNQVLKLVSDLRNHPVATLMATGHPMVISSDDPAMFGAKGLSYDFYEVFMGIGGMKADLRTLKQLAMNSIKYSTLLESEKNTFMEIWKKRWDKFIADVATK

SEQ ID NO: 224 - protein, 135 aa, Homo Sapiens
MLVDGPSERPALCFLLLAVAMSFFGSALSIDETRAHLLLKEKMMRLGGRLVLNTKEELANERLMTLKIAEMKEAMRTLIFPPSMHFFQAKHLIERSQVFNILRMMPKGAALHLHDIGIVTMDWLVRNVTYRPHCH

SEQ ID NO: 225 - protein, 152 aa, Homo Sapiens
MLVDGPSERPALCFLLLAVAMSFFGSALSIDETRAHLLLKEKMMRLGGRLVLNTKEELANERLMTLKIAEMKEAMRTLIFPPSMHFFQAKHLIERSQVFNILRMMPKGAALHLHDIGIVTMDWLVRNVTYRPHCHICFTPRGIMQFRFAHPT

SEQ ID NO: 226 - protein, 511 aa, Homo Sapiens
MLVDGPSERPALCFLLLAVAMSFFGSALSIDETRAHLLLKEKMMRLGGRLVLNTKEELANERLMTLKIAEMKEAMRTLIFPPSMHFFQAKHLIERSQVFNILRMMPKGAALHLHDIGIVTMDWLVRNVTYRPHCHICFTPRGIMQFRFAHPTPRPSEKCSKWILLEDYRKRVQNVTEFDDSLLRNFTLVTQHPEVIYTNQNVVWSKFETIFFTISGLIHYAPVFRDYVFRSMQEFYEDNVLYMEIRARLLPVYELSGEHHDEEWSVKTYQEVAQKFVETHPEFIGIKIIYSDHRSKDVAVIAESIRMAMGLRIKFPTVVAGFDLVGHEDTGHSLHDYKEALMIPAKDGVKLPYFFHAGETDWQGTSIDRNILDALMLNTTRIGHGFALSKHPAVRTYSWKKDIPIEVCPISNQVLKLVSDLRNHPVATLMATGHPMVISSDDPAMFGAKGLSYDFYEVFMGIGGMKADLRTLKQLAMNSIKYSTLLESEKNTFMEIWKKRWDKFIADVATK

SEQ ID NO: 227 - protein, 511 aa, Homo Sapiens; identical to SEQ ID NO: 226

SEQ ID NO: 228 - protein, 511 aa, Homo Sapiens; identical to SEQ ID NO: 226

SEQ ID NO: 229 - protein, 469 aa, Homo Sapiens
MMRLGGRLVLNTKEELANERLMTLKIAEMKEAMRTLIFPPSMHFFQAKHLIERSQVFNILRMMPKGAALHLHDIGIVTMDWLVRNVTYRPHCHICFTPRGIMQFRFAHPTPRPSEKCSKWILLEDYRKRVQNVTEFDDSLLRNFTLVTQHPEVIYTNQNVVWSKFETIFFTISGLIHYAPVFRDYVFRSMQEFYEDNVLYMEIRARLLPVYELSGEHHDEEWSVKTYQEVAQKFVETHPEFIGIKIIYSDHRSKDVAVIAESIRMAMGLRIKFPTVVAGFDLVGHEDTGHSLHDYKEALMIPAKDGVKLPYFFHAGETDWQGTSIDRNILDALMLNTTRIGHGFALSKHPAVRTYSWKKDIPIEVCPISNQVLKLVSDLRNHPVATLMATGHPMVISSDDPAMFGAKGLSYDFYEVFMGIGGMKADLRTLKQLAMNSIKYSTLLESEKNTFMEIWKKRWDKFIADVATK

SEQ ID NO: 230 - protein, 59 aa, Homo Sapiens
MVLLRVLILLLSWAAGMGAPARWRIPKSSPPPRPAAQTRGKLCCLQLGSCIVLYPARRS

SEQ ID NO: 231 - protein, 148 aa, Homo Sapiens
MVLLRVLILLLSWAAGMGDRDFDDGVLGLAWVGAPSGSSGGICEKSKLYSDGKKKSLNTGIITVQNYGSHVPPKVSHITFAHEVGHNFGSPHDSGTECTPGESKNLGQKENGNYIMYARATSGDKLNNNKFSLCSIRNISQVLEKKRN

SEQ ID NO: 232 - protein, 71 aa, Homo Sapiens
MVLLRVLILLLSWAAGMGDRDFDDGVLGLAWVGAPSGSSGGICEKSKLYSDVPTMGKLHSKEKPIKSSSPN

SEQ ID NO: 233 - protein, 115 aa, Homo Sapiens
MVLLRVLILLLSWAAGMGGQYGNPLNKYIRHYEGLSYNVDSLHQKHQRAKRAVSHEDQFLRLDFHAHGRDGVLPCCPGWSQTPGLKRSTCLSLPQCWDYRCEPSPMISVFDYPHK

SEQ ID NO: 234 - protein, 125 aa, Homo Sapiens
MVLLRVLILLLSWAAGMGGQYGNPLNKYIRHYEGLSYNVDSLHQKHQRAKRAVSHEDQFLRLDFHAHGRHFNLRMKRDTSLFSDEFKVETSNKVLDYDTSHIYTGHIYDYPHKYGPQGGCADHSV

SEQ ID NO: 235 - protein, 748 aa, Homo Sapiens
MVLLRVLILLLSWAAGMGGQYGNPLNKYIRHYEGLSYNVDSLHQKHQRAKRAVSHEDQFLRLDFHAHGRHFNLRMKRDTSLFSDEFKVETSNKVLDYDTSHIYTGHIYGEEGSFSHGSVIDGRFEGFIQTRGGTFYVEPAERYIKDRTLPFHSVIYHEDDINYPHKYGPQGGCADHSVFERMRKYQMTGVEEVTQIPQEEHAANGPELLRKKRTTSAEKNTCQLYIQTDHLFFKYYGTREAVIAQISSHVKAIDTIYQTTDFSGIRNISFMVKRIRINTTADEKDPTNPFRFPNIGVEKFLELNSEQNHDDYCLAYVFTDRDFDDGVLGLAWVGAPSGSSGGICEKSKLYSDGKKKSLNTGIITVQNYGSHVPPKVSHITFAHEVGHNFGSPHDSGTECTPGESKNLGQKENGNYIMYARATSGDKLNNNKFSLCSIRNISQVLEKKRNNCFVESGQPICGNGMVEQGEECDCGYSDQCKDECCFDANQPEGRKCKLKPGKQCSPSQGPCCTAQCAFKSKSEKCRDDSDCAREGICNGFTALCPASDPKPNFTDCNRHTQVCINGQCAGSICEKYGLEECTCASSDGKDDKELCHVCCMKKMDPSTCASTGSVQWSRHFSGRTITLQPGSPCNDFRGYCDVFMRCRLVDADGPLARLKKAIFSPELYENIAEWIVAHWWAVLLMGIALIMLMAGFIKICSVHTPSSNPKLPPPKPLPGTLKRRRPPQPIQQPQRQRPRESYQMGHMRR

SEQ ID NO: 236 - protein, 38 aa, Homo Sapiens
MVLLRVLILLLSWAAGMGVPTMGKLHSKEKPIKSSSPN

SEQ ID NO: 237 - protein, 58 aa, Homo Sapiens
  misc_feature (1)..(1): Xaa can be any naturally occurring amino acid
XEEGSFSHGSVIDGRFEGFIQTRGGTFYVEPAERYIKDRTLPFHSVIYHEDDISEGLN

SEQ ID NO: 238 - protein, 278 aa, Homo Sapiens
MAARPLPVSPARALLLALAGALLAPCEARGVSLWNQGRADEVVSASVGSGDLWIPVKSFDSKNHPEVLNIRLQRESKELIINLERNEGLIASSFTETHYLQDGTDVSLARNYTGHCYYHGHVRGYSDSAVSLSTCSGLRGLIVFENESYVLEPMKSATNRYKLFPAKKLKSVRGSCGSHHNTPNLAAKNVFPPPSQTWARRHKRETLKATKYVELVIVADNREFQRQGKDLEKVKQRLIEIANHVDKFYRPLNIRIVLVGVEVWNDMDKCSVSQDPFT

SEQ ID NO: 239 - protein, 909 aa, Homo Sapiens
MAARPLPVSPARALLLALAGALLAPCEARGVSLWNQGRADEVVSASVGSGDLWIPVKSFDSKNHPEVLNIRLQRESKELIINLERNEGLIASSFTETHYLQDGTDVSLARNYTVILGHCYYHGHVRGYSDSAVSLSTCSGLRGLIVFENESYVLEPMKSATNRYKLFPAKKLKSVRGSCGSHHNTPNLAAKNVFPPPSQTWARRHKRETLKATKYVELVIVADNREFQRQGKDLEKVKQRLIEIANHVDKFYRPLNIRIVLVGVEVWNDMDKCSVSQDPFTSLHEFLDWRKMKLLPRKSHDNAQLVSGVYFQGTTIGMAPIMSMCTADQSGGIVMDHSDNPLGAAVTLAHELGHNFGMNHDTLDRGCSCQMAVEKGGCIMNASTGYPFPMVFSSCSRKDLETSLEKGMGVCLFNLPEVRESFGGQKCGNRFVEEGEECDCGEPEECMNRCCNATTCTLKPDAVCAHGLCCEDCQLKPAGTACRDSSNSCDLPEFCTGASPHCPANVYLHDGHSCQDVDGYCYNGICQTHEQQCVTLWGPGAKPAPGICFERVNSAGDPYGNCGKVSKSSFAKCEMRDAKCGKIQCQGGASRPVIGTNAVSIETNIPLQQGGRILCRGTHVYLGDDMPDPGLVLAGTKCADGKICLNRQCQNISVFGVHECAMQCHGRGVCNNRKNCHCEAHWAPPFCDKFGFGGSTDSGPIRQADNQGLTIGILVTILCLLAAGFVVYLKRKTLIRLLFTNKKTTIEKLRCVRPSRPPRGFQPCQAHLGHLGKGLMRKPPDSYPPKDNPRRLLQCQNVDISRPLNGLNVPQPQSTQRVLPPLHRAPRAPSVPARPLPAKPALRQAQGTCKPNPPQKPLPADPLARTTRLTHALARTPGQWETGLRLAPLRPAPQYPHQVPRSTHTAYIK

SEQ ID NO: 240 - protein, 738 aa, Homo Sapiens
MAARPLPVSPARALLLALAGALLAPCEARGVSLWNQGRADEVVSASVGSGDLWIPVKSFDSKNHPEVLNIRLQRESKELIINLERNEGLIASSFTETHYLQDGTDVSLARNYTVILGHCYYHGHVRGYSDSAVSLSTCSGLRGLIVFENESYVLEPMKSATNRYKLFPAKKLKSVRGSCGSHHNTPNLAAKNVFPPPSQTWARRHKRETLKATKYVELVIVADNREFQRQGKDLEKVKQRLIEIANHVDKFYRPLNIRIVLVGVEVWNDMDKCSVSQDPFTSLHEFLDWRKMKLLPRKSHDNAQLVSGVYFQGTTIGMAPIMSMCTADQSGGIVMDHSDNPLGAAVTLAHELGHNFGMNHDTLDRGCSCQMAVEKGGCIMNASTGYPFPMVFSSCSRKDLETSLEKGMGVCLFNLPEVRESFGGQKCGNRFVEEGEECDCGEPEECMNRCCNATTCTLKPDAVCAHGLCCEDCQLKPAGTACRDSSNSCDLPEFCTGASPHCPANVYLHDGHSCQDVDGYCYNGICQTHEQQCVTLWGPGAKPAPGICFERVNSAGDPYGNCGKVSKSSFAKCEMRDAKCGKIQCQGGASRPVIGTNAVSIETNIPLQQGGRILCRGTHVYLGDDMPDPGLVLAGTKCADGKICLNRQCQNISVFGVHECAMQCHGRGVCNNRKNCHCEAHWAPPFCDKFGFGGSTDSGPIRQAEARQEAAESNRERGQGQEPVGSQEHASTASLTLI

SEQ ID NO: 241 - protein, 520 aa, Homo Sapiens
MRLALLWALGLLGAGSPLPSWPLPNIGGTEEQQAESEKAPREPLEPQVLQDDLPISLKKVLQTSLPEPLRIKLELDGDSHILELLQNRELVPGLNFSNCSRRALEKALLDGMGSCLFERLPSLPPMAAFCGNMFVEPGEQCDCGFLDDCVDPCCDSLTCQLRPGAQCASDGPCCQNCQLRPSGWQCRPTRGDCDLPEFCPGDSSQCPPDVSLGDGEPCAGGQAVCMHGRCASYAQQCQSLWGPGAQPAAPLCLQTANTRGNAFGSCGRNPSGSYVSCTPRDAICGQLQCQTGRTQPLLGSIRDLLWETIDVNGTELNCSWVHLDLGSDVAQPLLTLPGTACGPGLVCIDHRCQRVDLLGAQECRSKCHGHGVCDSNRHCYCEEGWAPPDCTTQLKATSSLTTGLLLSLLVLLVLVMLGASYWYRARLHQRLCQLKGPTCQYRAAQSGPSERPGPPQRALLARGTKSQGPAKPPPPRKPLPADPQGRCPSGDLPGPGAGIPPLVVPSRPAPPPPTVSSLYL

SEQ ID NO: 242 - protein, 814 aa, Homo Sapiens
MRLALLWALGLLGAGSPLPSWPLPNIGGTEEQQAESEKAPREPLEPQVLQDDLPISLKKVLQTSLPEPLRIKLELDGDSHILELLQNRELVPGRPTLVWYQPDGTRVVSEGHTLENCCYQGRVRGYAGSWVSICTCSGLRGLVVLTPERSYTLEQGPGDLQGPPIISRIQDLHLPGHTCALSWRESVHTQKPPEHPLGQRHIRRRRDVVTETKTVELVIVADHSEAQKYRDFQHLLNRTLEVALLLDTFFRPLNVRVALVGLEAWTQRDLVEISPNPAVTLENFLHWRRAHLLPRLPHDSAQLVTGTSFSGPTVGMAIQNSICSPDFSGGVNMDHSTSILGVASSIAHELGHSLGLDHDLPGNSCPCPGPAPAKTCIMEASTDFLPGLNFSNCSRRALEKALLDGMGSCLFERLPSLPPMAAFCGNMFVEPGEQCDCGFLDDCVDPCCDSLTCQLRPGAQCASDGPCCQNCQLRPSGWQCRPTRGDCDLPEFCPGDSSQCPPDVSLGDGEPCAGGQAVCMHGRCASYAQQCQSLWGPGAQPAAPLCLQTANTRGNAFGSCGRNPSGSYVSCTPRDAICGQLQCQTGRTQPLLGSIRDLLWETIDVNGTELNCSWVHLDLGSDVAQPLLTLPGTACGPGLVCIDHRCQRVDLLGAQECRSKCHGHGVCDSNRHCYCEEGWAPPDCTTQLKATSSLTTGLLLSLLVLLVLVMLGASYWYRARLHQRLCQLKGPTCQYRAAQSGPSERPGPPQRALLARGTKSQGPAKPPPPRKPLPADPQGRCPSGDLPGPGAGIPPLVVPSRPAPPPPTVSSLYL

SEQ ID NO: 243 - protein, 796 aa, Homo Sapiens
MRLALLWALGLLGAGSPLPSWPLPNIGGTEEQQAESEKAPREPLEPQVLQDDLPISLKKVLQTSLPEPLRIKLELDGDSHILELLQNRELVPGRPTLVWYQPDGTRVVSEGHTLENCCYQGRVRGYAGSWVSICTCSGLRGLVVLTPERSYTLEQGPGDLQGPPIISRIQDLHLPGHTCALSWRESVHTQKPPEHPLGQRHIRRRRDVVTETKTVELVIVADHSEAQKYRDFQHLLNRTLEVALLLDTFFRPLNVRVALVGLEAWTQRDLVEISPNPAVTLENFLHWRRAHLLPRLPHDSAQLVTGTSFSGPTVGMAIQNSICSPDFSGGVNMDHSTSILGVASSIAHELGHSLGLDHDLPGNSCPCPGPAPAKTCIMEASTDFLPGLNFSNCSRRALEKALLDGMGSCLFERLPSLPPMAAFCGNMFVEPGEQCDCGFLDDCVDPCCDSLTCQLRPGAQCASDGPCCQNCQLRPSGWQCRPTRGDCDLPEFCPGDSSQCPPDVSLGDGEPCAGGQAVCMHGRCASYAQQCQSLWGPGAQPAAPLCLQTANTRGNAFGSCGRNPSGSYVSCTPRDAICGQLQCQTGRTQPLLGSIRDLLWETIDVNGTELNCSWVHLDLGSDVAQPLLTLPGTACGPGLVCIDHRCQRVDLLGAQECRSKCHGHGVCDSNRHCYCEEGWAPPDCTTQLKATSSLTTGLLLSLLVLLVLVMLGASYWYRARLHQRLCQLKGPTCQYRLVLSASRPPLPGRCRLTLCPRDSSLRGQPSPHPQGSHCLPTPRAGAHRVTCPAQGLESRP

SEQ ID NO: 244 - protein, 772 aa, Homo Sapiens
MRLALLWALGLLGAGSPLPSWPLPNIGGTEEQQAESEKAPREPLEPQVLQDDLPISLKKVLQTSLPEPLRIKLELDGDSHILELLQNRELVPGRPTLVWYQPDGTRVVSEGHTLENCCYQGRVRGYAGSWVSICTCSGLRGLVVLTPERSYTLEQGPGDLQGPPIISRIQDLHLPGHTCALSWRESVHTQKPPEHPLGQRHIRRRRDVVTETKTVELVIVADHSEAQKYRDFQHLLNRTLEVALLLDTFFRPLNVRVALVGLEAWTQRDLVEISPNPAVTLENFLHWRRAHLLPRLPHDSAQLVTGTSFSGPTVGMAIQNSICSPDFSGGVNMDHSTSILGVASSIAHELGHSLGLDHDLPGNSCPCPGPAPAKTCIMEASTDFLPGLNFSNCSRRALEKALLDGMGSCLFERLPSLPPMAAFCGNMFVEPGEQCDCGFLDDCVDPCCDSLTCQLRPGAQCASDGPCCQNCQLRPSGWQCRPTRGDCDLPEFCPGDSSQCPPDVSLGDGEPCAGGQAVCMHGRCASYAQQCQSLWGPGAQPAAPLCLQTANTRGNAFGSCGRNPSGSYVSCTPRDAICGQLQCQTGRTQPLLGSIRDLLWETIDVNGTELNCSWVHLDLGSDVAQPLLTLPGTACGPGLVCIDHRCQRVDLLGAQECRSKCHGHGVCDSNRHCYCEEGWAPPDCTTQLKATSSLTTGLLLSLLVLLVLVMLGASYWYRARLHQRLCQLKGPTCQYSLRGQPSPHPQGSHCLPTPRAGAHRVTCPAQGLESRP

SEQ ID NO: 245 - protein, 839 aa, Homo Sapiens
MRLALLWALGLLGAGSPLPSWPLPNIGGTEEQQAESEKAPREPLEPQVLQDDLPISLKKVLQTSLPEPLRIKLELDGDSHILELLQNRELVPGRPTLVWYQPDGTRVVSEGHTLENCCYQGRVRGYAGSWVSICTCSGLRGLVVLTPERSYTLEQGPGDLQGPPIISRIQDLHLPGHTCALSWRESVHTQKPPEHPLGQRHIRRRRDVVTETKTVELVIVADHSEAQKYRDFQHLLNRTLEVALLLDTFFRPLNVRVALVGLEAWTQRDLVEISPNPAVTLENFLHWRRAHLLPRLPHDSAQLVTGTSFSGPTVGMAIQNSICSPDFSGGVNMDHSTSILGVASSIAHELGHSLGLDHDLPGNSCPCPGPAPAKTCIMEASTDFLPGLNFSNCSRRALEKALLDGMGSCLFERLPSLPPMAAFCGNMFVEPGEQCDCGFLDDCVDPCCDSLTCQLRPGAQCASDGPCCQNCQLRPSGWQCRPTRGDCDLPEFCPGDSSQCPPDVSLGDGEPCAGGQAVCMHGRCASYAQQCQSLWGPGAQPAAPLCLQTANTRGNAFGSCGRNPSGSYVSCTPRDAICGQLQCQTGRTQPLLGSIRDLLWETIDVNGTELNCSWVHLDLGSDVAQPLLTLPGTACGPGLVCIDHRCQRVDLLGAQECRSKCHGHGVCDSNRHCYCEEGWAPPDCTTQLKATSSLTTGLLLSLLVLLVLVMLGASYWYRARLHQRLCQLKGPTCQYRAAQSGPSERPGPPQRALLARGTKQASALSFPAPPSRPLPPDPVSKRLQSQGPAKPPPPRKPLPADPQGRCPSGDLPGPGAGIPPLVVPSRPAPPPPTVSSLYL

SEQ ID NO: 246 - protein, 838 aa, Homo Sapiens
MRLALLWALGLLGAGSPLPSWPLPNIGGTEEQQAESEKAPREPLEPQVLQDDLPISLKKVLQTSLPEPLRIKLELDGDSHILELLQNRELVPGRPTLVWYQPDGTRVVSEGHTLENCCYQGRVRGYAGSWVSICTCSGLRGLVVLTPERSYTLEQGPGDLQGPPIISRIQDLHLPGHTCALSWRESVHTQKPPEHPLGQRHIRRRRDVVTETKTVELVIVADHSEAQKYRDFQHLLNRTLEVALLLDTFFRPLNVRVALVGLEAWTQRDLVEISPNPAVTLENFLHWRRAHLLPRLPHDSAQLVTGTSFSGPTVGMAIQNSICSPDFSGGVNMDHSTSILGVASSIAHELGHSLGLDHDLPGNSCPCPGPAPAKTCIMEASTDFLPGLNFSNCSRRALEKALLDGMGSCLFERLPSLPPMAAFCGNMFVEPGEQCDCGFLDDCVDPCCDSLTCQLRPGAQCASDGPCCQNCQLRPSGWQCRPTRGDCDLPEFCPGDSSQCPPDVSLGDGEPCAGGQAVCMHGRCASYAQQCQSLWGPGAQPAAPLCLQTANTRGNAFGSCGRNPSGSYVSCTPRDAICGQLQCQTGRTQPLLGSIRDLLWETIDVNGTELNCSWVHLDLGSDVAQPLLTLPGTACGPGLVCIDHRCQRVDLLGAQECRSKCHGHGVCDSNRHCYCEEGWAPPDCTTQLKATSSLTTGLLLSLLVLLVLVMLGASYWYRARLHQRLCQLKGPTCQYRAAQSGPSERPGPPQRALLARGTKAELADRPNPPTRPLPADPVVRSPKSQGPAKPPPPRKPLPADPQGRCPSGDLPGPGAGIPPLVVPSRPAPPPPTVSSLYL

SEQ ID NO: 247 - protein, 863 aa, Homo Sapiens
MRLALLWALGLLGAGSPLPSWPLPNIGGTEEQQAESEKAPREPLEPQVLQDDLPISLKKVLQTSLPEPLRIKLELDGDSHILELLQNRELVPGRPTLVWYQPDGTRVVSEGHTLENCCYQGRVRGYAGSWVSICTCSGLRGLVVLTPERSYTLEQGPGDLQGPPIISRIQDLHLPGHTCALSWRESVHTQKPPEHPLGQRHIRRRRDVVTETKTVELVIVADHSEAQKYRDFQHLLNRTLEVALLLDTFFRPLNVRVALVGLEAWTQRDLVEISPNPAVTLENFLHWRRAHLLPRLPHDSAQLVTGTSFSGPTVGMAIQNSICSPDFSGGVNMDHSTSILGVASSIAHELGHSLGLDHDLPGNSCPCPGPAPAKTCIMEASTDFLPGLNFSNCSRRALEKALLDGMGSCLFERLPSLPPMAAFCGNMFVEPGEQCDCGFLDDCVDPCCDSLTCQLRPGAQCASDGPCCQNCQLRPSGWQCRPTRGDCDLPEFCPGDSSQCPPDVSLGDGEPCAGGQAVCMHGRCASYAQQCQSLWGPGAQPAAPLCLQTANTRGNAFGSCGRNPSGSYVSCTPRDAICGQLQCQTGRTQPLLGSIRDLLWETIDVNGTELNCSWVHLDLGSDVAQPLLTLPGTACGPGLVCIDHRCQRVDLLGAQECRSKCHGHGVCDSNRHCYCEEGWAPPDCTTQLKATSSLTTGLLLSLLVLLVLVMLGASYWYRARLHQRLCQLKGPTCQYRAAQSGPSERPGPPQRALLARGTKQASALSFPAPPSRPLPPDPVSKRLQAELADRPNPPTRPLPADPVVRSPKSQGPAKPPPPRKPLPADPQGRCPSGDLPGPGAGIPPLVVPSRPAPPPPTVSSLYL

SEQ ID NO: 248 - protein, 862 aa, Homo Sapiens
MRLALLWALGLLGAGSPLPSWPLPNIGGTEEQQAESEKAPREPLEPQVLQDDLPISLKKVLQTSLPEPLRIKLELDGDSHILELLQNRELVPGRPTLVWYQPDGTRVVSEGHTLENCCYQGRVRGYAGSWVSICTCSGLRGLVVLTPERSYTLEQGPGDLQGPPIISRIQDLHLPGHTCALSWRESVHTQKPPEHPLGQRHIRRRRDVVTETKTVELVIVADHSEAQKYRDFQHLLNRTLEVALLLDTFFRPLNVRVALVGLEAWTQRDLVEISPNPAVTLENFLHWRRAHLLPRLPHDSAQLVTGTSFSGPTVGMAIQNSICSPDFSGGVNMDHSTSILGVASSIAHELGHSLGLDHDLPGNSCPCPGPAPAKTCIMEASTDFLPGLNFSNCSRRALEKALLDGMGSCLFERLPSLPPMAAFCGNMFVEPGEQCDCGFLDDCVDPCCDSLTCQLRPGAQCASDGPCCQNCQLRPSGWQCRPTRGDCDLPEFCPGDSSQCPPDVSLGDGEPCAGGQAVCMHGRCASYAQQCQSLWGPGAQPAAPLCLQTANTRGNAFGSCGRNPSGSYVSCTPRDAICGQLQCQTGRTQPLLGSIRDLLWETIDVNGTELNCSWVHLDLGSDVAQPLLTLPGTACGPGLVCIDHRCQRVDLLGAQECRSKCHGHGVCDSNRHCYCEEGWAPPDCTTQLKATSSLTTGLLLSLLVLLVLVMLGASYWYRARLHQRLCQLKGPTCQYRAAQSGPSERPGPPQRALLARGTKASALSFPAPPSRPLPPDPVSKRLQAELADRPNPPTRPLPADPVVRSPKSQGPAKPPPPRKPLPADPQGRCPSGDLPGPGAGIPPLVVPSRPAPPPPTVSSLYL

SEQ ID NO: 249 - protein, 797 aa, Homo Sapiens
MRLALLWALGLLGAGSPLPSWPLPNIGGTEEQQAESEKAPREPLEPQVLQDDLPISLKKVLQTSLPEPLRIKLELDGDSHILELLQNRELVPGRPTLVWYQPDGTRVVSEGHTLENCCYQGRVRGYAGSWVSICTCSGLRGLVVLTPERSYTLEQGPGDLQGPPIISRIQDLHLPGHTCALSWRESVHTQKPPEHPLGQRHIRRRRDVVTETKTVELVIVADHSEAQKYRDFQHLLNRTLEVALLLDTFFRPLNVRVALVGLEAWTQRDLVEISPNPAVTLENFLHWRRAHLLPRLPHDSAQLVTGTSFSGPTVGMAIQNSICSPDFSGGVNMDHSTSILGVASSIAHELGHSLGLDHDLPGNSCPCPGPAPAKTCIMEASTDFLPGLNFSNCSRRALEKALLDGMGSCLFERLPSLPPMAAFCGNMFVEPGEQCDCGFLDDCVDPCCDSLTCQLRPGAQCASDGPCCQNCQLRPSGWQCRPTRGDCDLPEFCPGDSSQCPPDVSLGDGEPCAGGQAVCMHGRCASYAQQCQSLWGPGAQPAAPLCLQTANTRGNAFGSCGRNPSGSYVSCTPRDAICGQLQCQTGRTQPLLGSIRDLLWETIDVNGTELNCSWVHLDLGSDVAQPLLTLPGTACGPGLVCIDHRCQRVDLLGAQECRSKCHGHGVCDSNRHCYCEEGWAPPDCTTQLKATSSLTTGLLLSLLVLLVLVMLGASYWYRARLHQRLCQLKGPTCQYRAAQSGPSERPGPPQRALLARGTKAELADRPNPPTRPLPADPVVRSPKVTVGGEKGTASPPT

SEQ ID NO: 250 - protein, 822 aa, Homo Sapiens
MRLALLWALGLLGAGSPLPSWPLPNIGGTEEQQAESEKAPREPLEPQVLQDDLPISLKKVLQTSLPEPLRIKLELDGDSHILELLQNRELVPGRPTLVWYQPDGTRVVSEGHTLENCCYQGRVRGYAGSWVSICTCSGLRGLVVLTPERSYTLEQGPGDLQGPPIISRIQDLHLPGHTCALSWRESVHTQKPPEHPLGQRHIRRRRDVVTETKTVELVIVADHSEAQKYRDFQHLLNRTLEVALLLDTFFRPLNVRVALVGLEAWTQRDLVEISPNPAVTLENFLHWRRAHLLPRLPHDSAQLVTGTSFSGPTVGMAIQNSICSPDFSGGVNMDHSTSILGVASSIAHELGHSLGLDHDLPGNSCPCPGPAPAKTCIMEASTDFLPGLNFSNCSRRALEKALLDGMGSCLFERLPSLPPMAAFCGNMFVEPGEQCDCGFLDDCVDPCCDSLTCQLRPGAQCASDGPCCQNCQLRPSGWQCRPTRGDCDLPEFCPGDSSQCPPDVSLGDGEPCAGGQAVCMHGRCASYAQQCQSLWGPGAQPAAPLCLQTANTRGNAFGSCGRNPSGSYVSCTPRDAICGQLQCQTGRTQPLLGSIRDLLWETIDVNGTELNCSWVHLDLGSDVAQPLLTLPGTACGPGLVCIDHRCQRVDLLGAQECRSKCHGHGVCDSNRHCYCEEGWAPPDCTTQLKATSSLTTGLLLSLLVLLVLVMLGASYWYRARLHQRLCQLKGPTCQYRAAQSGPSERPGPPQRALLARGTKQASALSFPAPPSRPLPPDPVSKRLQAELADRPNPPTRPLPADPVVRSPKVTVGGEKGTASPPT

SEQ ID NO: 251 - protein, 824 aa, Homo Sapiens
MRLALLWALGLLGAGSPLPSWPLPNIVLSWGVLGPAGGTEEQQAESEKAPREPLEPQVLQDDLPISLKKVLQTSLPEPLRIKLELDGDSHILELLQNRELVPGRPTLVWYQPDGTRVVSEGHTLENCCYQGRVRGYAGSWVSICTCSGLRGLVVLTPERSYTLEQGPGDLQGPPIISRIQDLHLPGHTCALSWRESVHTQKPPEHPLGQRHIRRRRDVVTETKTVELVIVADHSEAQKYRDFQHLLNRTLEVALLLDTFFRPLNVRVALVGLEAWTQRDLVEISPNPAVTLENFLHWRRAHLLPRLPHDSAQLVTGTSFSGPTVGMAIQNSICSPDFSGGVNMDHSTSILGVASSIAHELGHSLGLDHDLPGNSCPCPGPAPAKTCIMEASTDFLPGLNFSNCSRRALEKALLDGMGSCLFERLPSLPPMAAFCGNMFVEPGEQCDCGFLDDCVDPCCDSLTCQLRPGAQCASDGPCCQNCQLRPSGWQCRPTRGDCDLPEFCPGDSSQCPPDVSLGDGEPCAGGQAVCMHGRCASYAQQCQSLWGPGAQPAAPLCLQTANTRGNAFGSCGRNPSGSYVSCTPRDAICGQLQCQTGRTQPLLGSIRDLLWETIDVNGTELNCSWVHLDLGSDVAQPLLTLPGTACGPGLVCIDHRCQRVDLLGAQECRSKCHGHGVCDSNRHCYCEEGWAPPDCTTQLKATSSLTTGLLLSLLVLLVLVMLGASYWYRARLHQRLCQLKGPTCQYRAAQSGPSERPGPPQRALLARGTKSQGPAKPPPPRKPLPADPQGRCPSGDLPGPGAGIPPLVVPSRPAPPPPTVSSLYL

SEQ ID NO: 252 - protein, 633 aa, Homo Sapiens
MRLALLWALGLLGAGSPLPSWPLPNIVSACNVEAPQVALRSSRQSQRRPRGSPWSPRSFRTISQLASKRCFRELVPGRPTLVWYQPDGTRVVSEGHTLENCCYQGRVRGYAGSWVSICTCSGLRGLVVLTPERSYTLEQGPGDLQGPPIISRIQDLHLPGHTCALSWRESVHTQKPPEHPLGQRHIRRRRDVVTETKTVELVIVADHSEAQKYRDFQHLLNRTLEVALLLDTFFRPLNVRVALVGLEAWTQRDLVEISPNPAVTLENFLHWRRAHLLPRLPHDSAQLVTGTSFSGPTVGMAIQNSICSPDFSGGVNMDHSTSILGVASSIAHELGHSLGLDHDLPGNSCPCPGPAPAKTCIMEASTDFLPGLNFSNCSRRALEKALLDGMGSCLFERLPSLPPMAAFCGNMFVEPGEQCDCGFLDDCVDPCCDSLTCQLRPGAQCASDGPCCQNCQLRPSGWQCRPTRGDCDLPEFCPGDSSQCPPDVSLGDGEPCAGGQAVCMHGRCASYAQQCQSLWGPGAQPAAPLCLQTANTRGNAFGSCGRNPSGSYVSCTPRDAICGQLQCQTGRTQPLLGSIRDLLWETIDVNGTELNCSWVHLDLGSDVAQPLLTLPGTACGPGLVSSLGGQDQV

SEQ ID NO: 253 - protein, 824 aa, Homo Sapiens
MRQSLLFLTSVVPFVLAPRPPDDPGFGPHQRLEKLDSLLSDYDILSLSNIQQHSVRKRDLQTSTHVETLLTFSALKRHFKLYLTSSTERFSQNFKVVVVDGKNESEYTVKWQDFFTGHVVGEPDSRVLAHIRDDDVIIRINTDGAEYNIEPLWRFVNDTKDKRMLVYKSEDIKNVSRLQSPKVCGYLKVDNEELLPKGLVDREPPEELVHRVKRRADPDPMKNTCKLLVVADHRFYRYMGRGEESTTTNYLIELIDRVDDIYRNTSWDNAGFKGYGIQIEQIRILKSPQEVKPGEKHYNMAKSYPNEEKDAWDVKMLLEQFSFDIAEEASKVCLAHLFTYQDFDMGTLGLAYVGSPRANSHGGVCPKAYYSPVGKKNIYLNSGLTSTKNYGKTILTKEADLVTTHELGHNFGAEHDPDGLAECAPNEDQGGKYVMYPIAVSGDHENNKMFSNCSKQSIYKTIESKAQECFQERSNKVCGNSRVDEGEECDPGIMYLNNDTCCNSDCTLKEGVQCSDRNSPCCKNCQFETAQKKCQEAINATCKGVSYCTGNSSECPPPGNAEDDTVCLDLGKCKDGKCIPFCEREQQLESCACNETDNSCKVCCRDLSGRCVPYVDAEQKNLFLRKGKPCTVGFCDMNGKCEKRVQDVIERFWDFIDQLSINTFGKFLADNIVGSVLVFSLIFWIPFSILVHCVDKKLDKQYESLSLFHPSNVEMLSSMDSASVRIIKPFPAPQTPGRLQPAPVIPSAPAAPKLDHQRMDTIQEDPSTDSHMDEDGFEKDPFPNSSTAAKSFEDLTDHPVTRSEKAASFKLQRQNRVDSKETEC

SEQ ID NO: 254 - protein, 285 aa, Homo Sapiens
MRQSLLFLTSVVPFVLAPRPPDDPGFGPHQRLEKLDSLLSDYDILSLSNIQQHSVRKRDLQTSTHVETLLTFSALKRHFKLYLTSSTERFSQNFKVVVVDGKNESEYTVKWQDFFTGHVVGEPDSRVLAHIRDDDVIIRINTDGAEYNIEPLWRFVNDTKDKRMLVYKSEDIKNVSRLQSPKVCGYLKVDNEELLPKGLVDREPPEELVHRVKRRADPDPMKNTCKLLVVADHRFYRYMGRGEESTTTNYLIELIDRVDDIYRNTSWDNAGFKGYGIQIEQLLFE

SEQ ID NO: 255 - protein, 258 aa, Homo Sapiens
MRQSLLFLTSVVPFVLAPRPPDDPGFGPHQRLEKLDSLLSDYDILSLSNIQQHSVRKRDLQTSTHVETLLTFSALKRHFKLYLTSSTERFSQNFKVVVVDGKNESEYTVKWQDFFTGHVVGEPDSRVLAHIRDDDVIIRINTDGAEYNIEPLWRFVNDTKDKRMLVYKSEDIKNVSRLQSPKVCGYLKVDNEELLPKGLVDREPPEELVHRVKRRADPDPMKNTCKLLVVADHRFYRYMGRGEESTTTNYLIHTDRAN

SEQ ID NO: 256 - protein, 115 aa, Homo Sapiens
MFLLLALLTELGRLQAHEGSEGIFLHVTVPRKIKSNDSEVSERKMIYIITIDGQPYTLHLGKQSFLPQNFLVYTYNETGSLHSVSPYFMMHCHYQGYAAEFPNSFVTLSICSGLR

SEQ ID NO: 257 - protein, 715 aa, Homo Sapiens
MFLLLALLTELGRLQAHEGSEGIFLHVTVPRKIKSNDSEVSERKMIYIITIDGQPYTLHLGKQSFLPQNFLVYTYNETGSLHSVSPYFMMHCHYQGYAAEFPNSFVTLSICSGLRGFLQFENISYGIEPVESSARFEHIIYQMKNNDPNVSILAVNYSHIWQKDQPYKVPLNSQIKNLSKLLPQYLEIYIIVEKALMFTQFKLTVILSSLELWSNENQISTSGDADDILQRFLAWKRDYLILRPHDIAYLLVYRKHPKYVGATFPGTVCNKSYDAGIAMYPDAIGLEGFSVIIAQLLGLNVGLTYDDITQCFCLRATCIMNHEAVSASGRKIFSNCSMHDYRYFVSKFETKCLQKLSNLQPLHQNQPVCGNGILESNEECDCGNKNECQFKKCCDYNTCKLKGSVKCGSGPCCTSKCELSIAGTPCRKSIDPECDFTEYCNGTSSNCVPDTYALNGRLCKLGTAYCYNGQCQTTDNQCAKIFGKGAQGAPFACFKEVNSLHERSENCGFKNSQPLPCERKDVLCGKLACVQPHKNANKSDAQSTVYSYIQDHVCVSIATGSSMRSDGTDNAYVADGTMCGPEMYCVNKTCRKVHLMGYNCNATTKCKGKGICNNFGNCQCFPGHRPPDCKFQFGSPGGSIDDGNFQKSGDFYTEKGYNTHWNNWFILSFCIFLPFFIVFTTVIFKRNEISKSCNRENAEYNRNSSVVSESDDVGH

SEQ ID NO: 258 - protein, 739 aa, Homo Sapiens
MFLLLALLTELGRLQAHEGSEGIFLHVTVPRKIKSNDSEVSERKMIYIITIDGQPYTLHLGKQSFLPQNFLVYTYNETGSLHSVSPYFMMHCHYQGYAAEFPNSFVTLSICSGLRGFLQFENISYGIEPVESSARFEHIIYQMKNNDPNVSILAVNYSHIWQKDQPYKVPLNSQIKNLSKLLPQYLEIYIIVEKALYDYMGSEMMAVTQKIVQVIGLVNTMFTQFKLTVILSSLELWSNENQISTSGDADDILQRFLAWKRDYLILRPHDIAYLLVYRKHPKYVGATFPGTVCNKSYDAGIAMYPDAIGLEGFSVIIAQLLGLNVGLTYDDITQCFCLRATCIMNHEAVSASGRKIFSNCSMHDYRYFVSKFETKCLQKLSNLQPLHQNQPVCGNGILESNEECDCGNKNECQFKKCCDYNTCKLKGSVKCGSGPCCTSKCELSIAGTPCRKSIDPECDFTEYCNGTSSNCVPDTYALNGRLCKLGTAYCYNGQCQTTDNQCAKIFGKGAQGAPFACFKEVNSLHERSENCGFKNSQPLPCERKDVLCGKLACVQPHKNANKSDAQSTVYSYIQDHVCVSIATGSSMRSDGTDNAYVADGTMCGPEMYCVNKTCRKVHLMGYNCNATTKCKGKGICNNFGNCQCFPGHRPPDCKFQFGSPGGSIDDGNFQKSGDFYTEKGYNTHWNNWFILSFCIFLPFFIVFTTVIFKRNEISKSCNRENAEYNRNSSVVSESDDVGH

SEQ ID NO: 259 - protein, 182 aa, Homo Sapiens
MFLLLALLTELGRLQAHEGSEGIFLHVTVPRKIKSNDSEVSERKMIYIITIDGQPYTLHLGKQSFLPQNFLVYTYNETGSLHSVSPYFMMHCHYQGYAAEFPNSFVTLSICSGLRGFLQFENISYGIEPVESSARFEHIIYQMKNNDPNVSILAVNYSHIWQKDQPYKVPLNSQVTVIILML

SEQ ID NO: 260 - protein, 62 aa, Homo Sapiens
MFLLLALLTELGRLQAHEGSEGIFLHVTVPRKIKSNDSEVSERKVFGEQVVFGYMNDLHHYN

SEQ ID NO: 261 - protein, 330 aa, Homo Sapiens
EEDVDLGYVEDGTPCGPQMMCLEHRCLPVASFNFSTCLSSKEGTICSGNGVCSNELKCVCNRHWIGSDCNTYFPHNDDAKTGITLSGNGVAGTNIIIGIIAGTILVLALILGITAWGYKNYREQRQLPQGDYVKKPGDGDSFYSDIPPGVSTNSASSSKKRSNGLSHSWSERIPDTKHISDICENGRPRSNSWQGNLGGNKKKIRGKRFRPRSNSTEREPQAPEPGHSLAQTVPSQGISPGGSDSPQTGSLDHRYLNPWFKRDYNVAKWVEDVNKNTEGPYFRTLSPAKSPSSSTGSIASSRKYPYPMPPLPDEDKKVNRQSARLWETSI

SEQ ID NO: 262 - protein, 804 aa, Homo Sapiens
MELEKRKENRFVERQSIVPLRLIYRSGGEDESRHDALDTRVRGDLGGPQLTHVDQASFQVDAFGTSFILDVVLNHDLLSSEYIERHIEHGGKTVEVKGGEHCYYQGHIRGNPDSFVALSTCHGLHGMFYDGNHTYLIEPEENDTTQEDFHFHSVYKSRLFEFSLDDLPSEFQQVNITPSKFILKPRPKRSKRQLRRYPRNVEEETKYIELMIVNDHLMFKKHRLSVVHTNTYAKSVVNMADLIYKDQLKTRIVLVAMETWATDNKFAISENPLITLREFMKYRRDFIKEKSDAVHLFSGSQFESSRSGAAYIGGICSLLKGGGVNEFGKTDLMAVTLAQSLAHNIGIISDKRKLASGECKCEDTWSGCIMGDTGYYLPKKFTQCNIEEYHDFLNSGGGACLFNKPSKLLDPPECGNGFIETGEECDCGTPAECVLEGAECCKKCTLTQDSQCSDGLCCKKCKFQPMGTVCREAVNDCDIRETCSGNSSQCAPNIHKMDGYSCDGVQGICFGGRCKTRDRQCKYIWGQKVTASDKYCYEKLNIEGTEKGNCGKDKDTWIQCNKRDVLCGYLLCTNIGNIPRLGELDGEITSTLVVQQGRTLNCSGGHVKLEEDVDLGYVEDGTPCGPQMMCLEHRCLPVASFNFSTCLSSKEGTICSGNGVCSNELKCVCNRHWIGSDCNTYFPHNDDAKTGITLSGNGVAGTNIIIGIIAGTILVLALILGITAWGYKNYREQRQLPQGDYVKKPGDGDSFYSDIPPGVSTNSASSSKKRSNGLSHSWSERIPDTKHISDICENGRPRSNSWQG

SEQ ID NO: 263 - protein, 196 aa, Homo Sapiens
MQAAVAVSVPFLLLCVLGTCPPARCGQAGDASLMELEKRKENRFVERQSIVPLRLIYRSGGEDESRHDALDTRVRGDLGGPQIQMFLKSESQKTIYQIQLTHVDQASFQVDAFGTSFILDVVLNHDLLSSEYIERHIEHGGKTVEVKGGEHCYYQGHIRGNPDSFVALSTCHGLHGMFYDGNHTYLIEPEENDTTQ

SEQ ID NO: 264 - protein, 906 aa, Homo Sapiens
MQAAVAVSVPFLLLCVLGTCPPARCGQAGDASLMELEKRKENRFVERQSIVPLRLIYRSGGEDESRHDALDTRVRGDLGGPQLTHVDQASFQVDAFGTSFILDVVLNHDLLSSEYIERHIEHGGKTVEVKGGEHCYYQGHIRGNPDSFVALSTCHGLHGMFYDGNHTYLIEPEENDTTQEDFHFHSVYKSRLFEFSLDDLPSEFQQVNITPSKFILKPRPKRSKRQLRRYPRNVEEETKYIELMIVNDHLMFKKHRLSVVHTNTYAKSVVNMADLIYKDQLKTRIVLVAMETWATDNKFAISENPLITLREFMKYRRDFIKEKSDAVHLFSGSQFESSRSGAAYIGGICSLLKGGGVNEFGKTDLMAVTLAQSLAHNIGIISDKRKLASGECKCEDTWSGCIMGDTGYYLPKKFTQCNIEEYHDFLNSGGGACLFNKPSKLLDPPECGNGFIETGEECDCGTPAECVLEGAECCKKCTLTQDSQCSDGLCCKKCKFQPMGTVCREAVNDCDIRETCSGNSSQCAPNIHKMDGYSCDGVQGICFGGRCKTRDRQCKYIWGQKVTASDKYCYEKLNIEGTEKGNCGKDKDTWIQCNKRDVLCGYLLCTNIGNIPRLGELDGEITSTLVVQQGRTLNCSGGHVKLEEDVDLGYVEDGTPCGPQMMCLEHRCLPVASFNFSTCLSSKEGTICSGNGVCSNELKCVCNRHWIGSDCNTYFPHNDDAKTGITLSGNGVAGTNIIIGIIAGTILVLALILGITAWGYKNYREQRQLPQGDYVKKPGDGDSFYSDIPPGVSTNSASSSKKRSNGLSHSWSERIPDTKHISDICENGRPRSNSWQGNLGGNKKKIRGKRFRPRSNSTETLSPAKSPSSSTGSIASSRKYPYPMPPLPDEDKKVNRQSARLWETSI

SEQ ID NO: 265 - protein, 859 aa, Homo Sapiens
MQAAVAVSVPFLLLCVLGTCPPARCGQAGDASLMELEKRKENRFVERQSIVPLRLIYRSGGEDESRHDALDTRVRGDLGGPQLTHVDQASFQVDAFGTSFILDVVLNHDLLSSEYIERHIEHGGKTVEVKGGEHCYYQGHIRGNPDSFVALSTCHGLHGMFYDGNHTYLIEPEENDTTQEDFHFHSVYKSRLFEFSLDDLPSEFQQVNITPSKFILKPRPKRSKRQLRRYPRNVEEETKYIELMIVNDHLMFKKHRLSVVHTNTYAKSVVNMADLIYKDQLKTRIVLVAMETWATDNKFAISENPLITLREFMKYRRDFIKEKSDAVHLFSGSQFESSRSGAAYIGGICSLLKGGGVNEFGKTDLMAVTLAQSLAHNIGIISDKRKLASGECKCEDTWSGCIMGDTGYYLPKKFTQCNIEEYHDFLNSGGGACLFNKPSKLLDPPECGNGFIETGEECDCGTPAECVLEGAECCKKCTLTQDSQCSDGLCCKKCKFQPMGTVCREAVNDCDIRETCSGNSSQCAPNIHKMDGYSCDGVQGICFGGRCKTRDRQCKYIWGQKVTASDKYCYEKLNIEGTEKGNCGKDKDTWIQCNKRDVLCGYLLCTNIGNIPRLGELDGEITSTLVVQQGRTLNCSGGHVKLEEDVDLGYVEDGTPCGPQMMCLEHRCLPVASFNFSTCLSSKEGTICSGNGVCSNELKCVCNRHWIGSDCNTYFPHNDDAKTGITLSGNGVAGTNIIIGIIAGTILVLALILGITAWGYKNYREQRQLPQGDYVKKPGDGDSFYSDIPPGVSTNSASSSKKRSNGLSHSWSERIPDTKHISDICENGRPRSNSWQGNLGGNKKKIRGKRFRPRSNSTE

SEQ ID NO: 266 - protein, 899 aa, Homo Sapiens
MQAAVAVSVPFLLLCVLGTCPPARCGQAGDASLMELEKRKENRFVERQSIVPLRLIYRSGGEDESRHDALDTRVRGDLGGPQLTHVDQASFQVDAFGTSFILDVVLNHDLLSSEYIERHIEHGGKTVEVKGGEHCYYQGHIRGNPDSFVALSTCHGLHGMFYDGNHTYLIEPEENDTTQEDFHFHSVYKSRLFEFSLDDLPSEFQQVNITPSKFILKPRPKRSKRQLRRYPRNVEEETKYIELMIVNDHLMFKKHRLSVVHTNTYAKSVVNMADLIYKDQLKTRIVLVAMETWATDNKFAISENPLITLREFMKYRRDFIKEKSDAVHLFSGSQFESSRSGAAYIGGICSLLKGGGVNEFGKTDLMAVTLAQSLAHNIGIISDKRKLASGECKCEDTWSGCIMGDTGYYLPKKFTQCNIEEYHDFLNSGGGACLFNKPSKLLDPPECGNGFIETGEECDCGTPAECVLEGAECCKKCTLTQDSQCSDGLCCKKCKFQPMGTVCREAVNDCDIRETCSGNSSQCAPNIHKMDGYSCDGVQGICFGGRCKTRDRQCKYIWGQKVTASDKYCYEKLNIEGTEKGNCGKDKDTWIQCNKRDVLCGYLLCTNIGNIPRLGELDGEITSTLVVQQGRTLNCSGGHVKLEEDVDLGYVEDGTPCGPQMMCLEHRCLPVASFNFSTCLSSKEGTICSGNGVCSNELKCVCNRHWIGSDCNTYFPHNDDAKTGITLSGNGVAGTNIIIGIIAGTILVLALILGITAWGYKNYREQRSNGLSHSWSERIPDTKHISDICENGRPRSNSWQGNLGGNKKKIRGKRFRPRSNSTEYLNPWFKRDYNVAKWVEDVNKNTEGPYFRTLSPAKSPSSSTGSIASSRKYPYPMPPLPDEDKKVNRQSARLWETSI

SEQ ID NO: 267 - protein, 870 aa, Homo Sapiens
MQAAVAVSVPFLLLCVLGTCPPARCGQAGDASLMELEKRKENRFVERQSIVPLRLIYRSGGEDESRHDALDTRVRGDLGGPQLTHVDQASFQVDAFGTSFILDVVLNHDLLSSEYIERHIEHGGKTVEVKGGEHCYYQGHIRGNPDSFVALSTCHGLHGMFYDGNHTYLIEPEENDTTQEDFHFHSVYKSRLFEFSLDDLPSEFQQVNITPSKFILKPRPKRSKRQLRRYPRNVEEETKYIELMIVNDHLMFKKHRLSVVHTNTYAKSVVNMADLIYKDQLKTRIVLVAMETWATDNKFAISENPLITLREFMKYRRDFIKEKSDAVHLFSGSQFESSRSGAAYIGGICSLLKGGGVNEFGKTDLMAVTLAQSLAHNIGIISDKRKLASGECKCEDTWSGCIMGDTGYYLPKKFTQCNIEEYHDFLNSGGGACLFNKPSKLLDPPECGNGFIETGEECDCGTPAECVLEGAECCKKCTLTQDSQCSDGLCCKKCKFQPMGTVCREAVNDCDIRETCSGNSSQCAPNIHKMDGYSCDGVQGICFGGRCKTRDRQCKYIWGQKVTASDKYCYEKLNIEGTEKGNCGKDKDTWIQCNKRDVLCGYLLCTNIGNIPRLGELDGEITSTLVVQQGRTLNCSGGHVKLEEDVDLGYVEDGTPCGPQMMCLEHRCLPVASFNFSTCLSSKEGTICSGNGVCSNELKCVCNRHWIGSDCNTYFPHNDDAKTGITLSGNGVAGTNIIIGIIAGTILVLALILGITAWGYKNYREQRSNGLSHSWSERIPDTKHISDICENGRPRSNSWQGNLGGNKKKIRGKRFRPRSNSTETLSPAKSPSSSTGSIASSRKYPYPMPPLPDEDKKVNRQSARLWETSI

SEQ ID NO: 268 - protein, 342 aa, Homo Sapiens
MQAAVAVSVPFLLLCVLGTCPPARCGQAGDASLMELEKRKENRFVERQSIVPLRLIYRSGGEDESRHDALDTRVRGDLGGPQLTHVDQASFQVDAFGTSFILDVVLNHDLLSSEYIERHIEHGGKTVEVKGGEHCYYQGHIRGNPDSFVALSTCHGLHGMFYDGNHTYLIEPEENDTTQEDFHFHSVYKSRLFEFSLDDLPSEFQQVNITPSKFILKPRPKRSKRQLRRYPRNVEEETKYIELMIVNDHLMFKKHRLSVVHTNTYAKSVVNMADLIYKDQLKTRIVLVAMETWATDNKFAISENPLITLREFMKYRRDFIKEKSDAVHLFSYVTSVMMYYFF

SEQ ID NO: 269 - protein, 264 aa, Homo Sapiens
  misc_feature (1)..(1): Xaa can be any naturally occurring amino acid
XCNRHWIGSDCNTYFPHNDDAKTGITLSGNGVAGTNIIIGIIAGTILVLALILGITAWGYKNYREQRQLPQGDYVKKPGDGDSFYSDIPPGVSTNSASSSKKRSAFLSHFQISTCSITHYSISQNISLFCSRSNGLSHSWSERIPDTKHISDICENGRPRSNSWQGNLGGNKKKIRGKRFRPRSNSTEYLNPWFKRDYNVAKWVEDVNKNTEGPYFRTLSPAKSPSSSTGSIASSRKYPYPMPPLPDEDKKVNRQSARLWETSI

SEQ ID NO: 270 - protein, 217 aa, Homo Sapiens
MLQGLLPVSLLLSVAVSAIKELPGVKKYEVVYPIRLHPLHKREAKEPEQQEQFETELKYKMTINGKIAVLYLKKNKNLLAPGYTETYYNSTGKEITTSPQIMDDCYYQGHILNEKVSDASISTCRGLRGYFSQGDQRYFIEPLSPIHRDGQEHALFKYNPDEKNYDSTCGMDGVLWAHDLQQNIALPATKLVKLKDRKVQEHEKYIEYYLVLDNGEF

SEQ ID NO: 271 - protein, 775 aa, Homo Sapiens
MLQGLLPVSLLLSVAVSAIKELPGVKKYEVVYPIRLHPLHKREAKEPEQQEQFETELKYKMTINGKIAVLYLKKNKNLLAPGYTETYYNSTGKEITTSPQIMDDCYYQGHILNEKVSDASISTCRGLRGYFSQGDQRYFIEPLSPIHRDGQEHALFKYNPDEKNYDSTCGMDGVLWAHDLQQNIALPATKLVKLKDRKVQEHEKYIEYYLVLDNGEFKRYNENQDEIRKRVFEMANYVNMLYKKLNTHVALVGMEIWTDKDKIKITPNASFTLENFSKWRGSVLSRRKRHDIAQLITATELAGTTVGLAFMSTMCSPYSVGVVQDHSDNLLRVAGTMAHEMGHNFGMFHDDYSCKCPSTICVMDKALSFYIPTDFSSCSRLSYDKFFEDKLSNCLFNAPLPTDIISTPICGNQLVEMGEDCDCGTSEECTNICCDAKTCKIKATFQCALGECCEKCQFKKAGMVCRPAKDECDLPEMCNGKSGNCPDDRFQVNGFPCHHGKGHCLMGTCPTLQEQCTELWGPGTEVADKSCYNRNEGGSKYGYCRRVDDTLIPCKANDTMCGKLFCQGGSDNLPWKGRIVTFLTCKTFDPEDTSQEIGMVANGTKCGDNKVCINAECVDIEKAYKSTNCSSKCKGHAVCDHELQCQCEEGWIPPDCDDSSVVFHFSIVVGVLFPMAVIFVVVAMVIRHQSSREKQKKDQRPLSTTGTRPHKQKRKPQMVKAVQPQEMSQMKPHVYDLPVEGNEPPASFHKDTNALPPTVFKDNPVSTPKDSNPKA

SEQ ID NO: 272 - protein, 540 aa, Homo Sapiens
MLQGLLPVSLLLSVAVSAIKELPGVKKYEVVYPIRLHPLHKREAKEPEQQEQFETELKYKMTINGKIAVLYLKKNKNLLAPGYTETYYNSTGKEITTSPQIMDDCYYQGHILNEKVSDASISTCRGLRGYFSQGDQRYFIEPLSPIHRDGQEHALFKYNPDEKNYDSTCGMDGVLWAHDLQQNIALPATKLVKLKDRKVQEHEKYIEYYLVLDNGEFKRYNENQDEIRKRVFEMANYVNMLYKKLNTHVALVGMEIWTDKDKIKITPNASFTLENFSKWRGSVLSRRKRHDIAQLITATELAGTTVGLAFMSTMCSPYSVGVVQDHSDNLLRVAGTMAHEMGHNFGMFHDDYSCKCPSTICVMDKALSFYIPTDFSSCSRLSYDKFFEDKLSNCLFNAPLPTDIISTPICGNQLVEMGEDCDCGTSEECTNICCDAKTCKIKATFQCALGECCEKCQFKKAGMVCRPAKDECDLPEMCNGKSGNCPDDRFQVNGFPCHHGKGHCLMGTCPTLQEQCTELWGPGRRTNPFPCACAKENHFR

SEQ ID NO: 273 - protein, 58 aa, Homo Sapiens
MLQGLLPVSLLLSVAVSAIKELPGVKKYEVVYPIRLHPLHKREAKEPEQQFLSSMKIS

SEQ ID NO: 274 - protein, 387 aa, Homo Sapiens
  misc_feature (1)..(1): Xaa can be any naturally occurring amino acid
XFYIPTDFSSCSRLSYDKFFEDKLSNCLFNAPLPTDIISTPICGNQLVEMGEDCDCGTSEECTNICCDAKTCKIKATFQCALGECCEKCQFKKAGMVCRPAKDECDLPEMCNGKSGNCPDDRFQVNGFPCHHGKGHCLMGTCPTLQEQCTELWGPGTEVADKSCYNRNEGGSKYGYCRRVDDTLIPCKANDTMCGKLFCQGGSDNLPWKGRIVTFLTCKTFDPEDTSQEIGMVANGTKCGDNKVCINAECVDIEKAYKSTNCSSKCKGHAVCDHELQCQCEEGWIPPDCDDSSVVFHFSIVVGVLFPMAVIFVVVAMVIRHQSSREKQKKDQRPLSTTGTRPHKQKRKPQMVKAVQPQEMSQMKPHVYDLPVEGNEPPASFDSNPKA

SEQ ID NO: 275 - protein, 174 aa, Homo Sapiens
  misc_feature (1)..(1): Xaa can be any naturally occurring amino acid
XKGRIVTFLTCKTFDPEDTSQEIGMVANGTKCGDNKVCINAECVDIEKAYKSTNCSSKCKGHAVCDHELQCQCEEGWIPPDCDDSSVVFHFSIVVGVLFPMAVIFVVVAMVIRHQSSREKQKKDQRPLSTTGTRPHKQKRKPQMVKAVQPQEVNYIVWAVITMAPLCVSLTLLS

SEQ ID NO: 276 - protein, 14 aa, Homo Sapiens
MKMLLLLHCLGVFL

SEQ ID NO: 277 - protein, 44 aa, Homo Sapiens
MKMLLLLHCLGVFLSCSGHIQDEHPQYHSPPDVVIPVRITGTTR

SEQ ID NO: 278 - protein, 90 aa, Homo Sapiens
MKMLLLLHCLGVFLSCSGHIQDEHPQYHSPPDVVIPVRITGTTRGMTPPGWLSYILPFGGQKHIIHIKVKKLLFSKHLPVFTYTDQGAIL

SEQ ID NO: 279 - protein, 820 aa, Homo Sapiens
MKMLLLLHCLGVFLSCSGHIQDEHPQYHSPPDVVIPVRITGTTRGMTPPGWLSYILPFGGQKHIIHIKVKKLLFSKHLPVFTYTDQGAILEDQPFVQNNCYYHGYVEGDPESLVSLSTCFGGFQGILQINDFAYEIKPLAFSTTFEHLVYKMDSEEKQFSTMRSGFMQNEITCRMEFEEIDNSTQKQSSYVGWWIHFRIVEIVVVIDNYLYIRYERNDSKLLEDLYVIVNIVDSILDVIGVKVLLFGLEIWTNKNLIVVDDVRKSVHLYCKWKSENITPRMQHDTSHLFTTLGLRGLSGIGAFRGMCTPHRSCAIVTFMNKTLGTFSIAVAHHLGHNLGMNHDEDTCRCSQPRCIMHEGNPPITKFSNCSYGDFWEYTVERTKCLLETVHTKDIFNVKRCGNGVVEEGEECDCGPLKHCAKDPCCLSNCTLTDGSTCAFGLCCKDCKFLPSGKVCRKEVNECDLPEWCNGTSHKCPDDFYVEDGIPCKERGYCYEKSCHDRNEQCRRIFGAGANTASETCYKELNTLGDRVGHCGIKNATYIKCNISDVQCGRIQCENVTEIPNMSDHTTVHWARFNDIMCWSTDYHLGMKGPDIGEVKDGTECGIDHICIHRHCVHITILNSNCSPAFCNKRGICNNKHHCHCNYLWDPPNCLIKGYGGSVDSGPPPKRKKKKKFCYLCILLLIVLFILLCCLYRLCKKSKPIKKQQDVQTPSAKEEEKIQRRPHELPPQSQPWVMPSQSQPPVTPSQSHPQVMPSQSQPPVTPSQSQPRVMPSQSQPPVMPSQSHPQLTPSQSQPPVTPSQRQPQLMPSQSQPPVTPS

SEQ ID NO: 280 - protein, 820 aa, Homo Sapiens; identical to SEQ ID NO: 279

SEQ ID NO: 281 - protein, 820 aa, Homo Sapiens; identical to SEQ ID NO: 279

SEQ ID NO: 282 - protein, 820 aa, Homo Sapiens; identical to SEQ ID NO: 279

SEQ ID NO: 283 - protein, 820 aa, Homo Sapiens; identical to SEQ ID NO: 279

SEQ ID NO: 284 - protein, 820 aa, Homo Sapiens; identical to SEQ ID NO: 279

SEQ ID NO: 285 - protein, 787 aa, Homo Sapiens
MFRLWLLLAGLCGLLASRPGFQNSLLQIVIPEKIQTNTNDSSEIEYEQISYIIPIDEKLYTVHLKQRYFLADNFMIYLYNQGSMNTYSSDIQTQCYYQGNIEGYPDSMVTLSTCSGLRGILQFENVSYGIEPLESAVEFQHVLYKLKNEDNDIAIFIDRSLKEQPMDDNIFISEKSEPAVPDLFPLYLEMHIVVDKTLYDYWGSDSMIVTNKVIEIVGLANSMFTQFKVTIVLSSLELWSDENKISTVGEADELLQKFLEWKQSYLNLRPHDIAYLLIYMDYPRYLGAVFPGTMCITRYSAGVALYPKEITLEAFAVIVTQMLALSLGISYDDPKKCQCSESTCIMNPEVVQSNGVKTFSSCSLRSFQNFISNVGVKCLQNKPQMQKKSPKPVCGNGRLEGNEICDCGTEAQCGPASCCDFRTCVLKDGAKCYKGLCCKDCQILQSGVECRPKAHPECDIAENCNGTSPECGPDITLINGLSCKNNKFICYDGDCHDLDARCESVFGKGSRNAPFACYEEIQSQSDRFGNCGRDRNNKYVFCGWRNLICGRLVCTYPTRKPFHQENGDVIYAFVRDSVCITVDYKLPRTVPDPLAVKNGSQCDIGRVCVNRECVESRIIKASAHVCSQQCSGHGVCDSRNKCHCSPGYKPPNCQIRSKGFSIFPEEDMGSIMERASGKTENTWLLGFLIALPILIVTTAIVLARKQLKKWFAKEEEFPSSESKSEGSTQTYASQSSSEGSTQTYASQTRSESSSQADTSKSKSEDSAEAYTSRSKSQDSTQTQSSSN

SEQ ID NO: 286 - protein, 629 aa, Homo Sapiens
MFRLWLLLAGLCGLLASRPGFQNSLLQIVIPEKIQTNTNDSSEIEYEQISYIIPIDEKLYTVHLKQRYFLADNFMIYLYNQGSMNTYSSDIQTQCYYQGNIEGYPDSMVTLSTCSGLRGILQFENVSYGIEPLESAVEFQHVLYKLKNEDNDIAIFIDRSLKEQPMDDNIFISEKSEPAVPDLFPLYLEMHIVVDKTLYDYWGSDSMIVTNKVIEIVGLANSMFTQFKVTIVLSSLELWSDENKISTVGEADELLQKFLEWKQSYLNLRPHDIAYLLIYMDYPRYLGAVFPGTMCITRYSAGVALQCGPASCCDFRTCVLKDGAKCYKGLCCKDCQILQSGVECRPKAHPECDIAENCNGTSPECGPDITLINGLSCKNNKFICYDGDCHDLDARCESVFGKGSRNAPFACYEEIQSQSDRFGNCGRDRNNKYVFCGWRNLICGRLVCTYPTRKPFHQENGDVIYAFVRDSVCITVDYKLPRTVPDPLAVKNGSQCDIGRVCVNRECVESRIIKASAHVCSQQCSGHGVCDSRNKCHCSPGYKPPNCQIRSKGFSIFPEEDMGSIMERASGKTENTWLLGFLIALPILIVTTAIVLARKQLKKWFAKEEEFPSSESKSQDSTQTQSSSN

SEQ ID NO: 287 - protein, 184 aa, Homo Sapiens
MFRLWLLLAGLCGLLASRPGFQNSLLQIVIPEKIQTNTNDSSEIEYEQISYIIPIDEKLYTVHLKQRYFLADNFMIYLYNQGSMNTYSSDIQTQCYYQGNIEGYPDSMVTLSTCSGLRGILQFENVSYGIEPLESAVEFQHVLYKLKNEDNDIAIFIDRSLKEQPMDDNIFISEKYDYWGSDSM

SEQ ID NO: 288 - protein, 155 aa, Homo Sapiens
MFRLWLLLAGLCGLLASRPGFQNSLLQIVIPEKIQTNTNDSSEIEYEQISYIIPIDEKLYTVHLKQRYFLADNFMIYLYNQGSMNTYSSDIQTQCYYQGNIEGYPDSMVTLSTCSGLRSLKEQPMDDNIFISEKSEPAVPDLFPLYLEMHIVVDK

SEQ ID NO: 289 - protein, 53 aa, Homo Sapiens
MIYLYNQGSMNTYSSDIQTQCYYQGNIEGYPDSMVTLSTCSGLRGILQFENVS

SEQ ID NO: 290 - protein, 688 aa, Homo Sapiens
MNVRGAAPGVRASPRPWQFPTSQRLPAGSPEAAPCSASGCCWPGSAASWRQDPEQISYIIPIDEKLYTVHLKQRYFLADNFMIYLYNQGSMNTYSSDIQTQCYYQGNIEGYPDSMVTLSTCSGLRGILQFENVSYGIEPLESAVEFQHVLYKLKNEDNDIAIFIDRSLKEQPMDDNIFISEKSEPAVPDLFPLYLEMHIVVDKTLYDYWGSDSMIVTNKVIEIVGLANSMFTQFKVTIVLSSLELWSDENKISTVGEADELLQKFLEWKQSYLNLRPHDIAYLLIYMDYPRYLGAVFPGTMCITRYSAGVALQCGPASCCDFRTCVLKDGAKCYKGLCCKDCQILQSGVECRPKAHPECDIAENCNGTSPECGPDITLINGLSCKNNKFICYDGDCHDLDARCESVFGKGSRNAPFACYEEIQSQSDRFGNCGRDRNNKYVFCGWRNLICGRLVCTYPTRKPFHQENGDVIYAFVRDSVCITVDYKLPRTVPDPLAVKNGSQCDIGRVCVNRECVESRIIKASAHVCSQQCSGHGVCDSRNKCHCSPGYKPPNCQIRSKGFSIFPEEDMGSIMERASGKTENTWLLGFLIALPILIVTTAIVLARKQLKKWFAKEEEFPSSESKSEGSTQTYASQSSSEGSTQTYASQTRSESSSQADTSKSKSEDSAEAYTSRSKSQDSTQTQSSSN

SEQ ID NO: 291 - protein, 173 aa, Homo Sapiens [sequence omitted]

SEQ ID NO: 292 - protein, 787 aa, Homo Sapiens
MGWRPRRARGTPLLLLLLLLLLWPVPGAGVLQGHIPGQPVTPHWVLDGQPWRTVSLEEPVSKPDMGLVALEAEGQELLLELEKNHRLLAPGYIETHYGPDGQPVVLAPNHTDHCHYQGRVRGFPDSWVVLCTCSGMSGLITLSRNASYYLRPWPPRGSKDFSTHEIFRMEQLLTWKGTCGHRDPGNKAGMTSLPGGPQSRGRREARRTRKYLELYIVADHTLFLTRHRNLNHTKQRLLEVANYVDQLLRTLDIQVALTGLEVWTERDRSRVTQDANATLWAFLQWRRGLWAQRPHDSAQLLTGRAFQGATVGLAPVEGMCRAESSGGVSTDHSELPIGAAATMAHEIGHSLGLSHDPDGCCVEAAAESGGCVMAAATGHPFPRVFSACSRRQLRAFFRKGGGACLSNAPDPGLPVPPALCGNGFVEAGEECDCGPGQECRDLCCFAHNCSLRPGAQCAHGDCCVRCLLKPAGALCRQAMGDCDLPEFCTGTSSHCPPDVYLLDGSPCARGSGYCWDGACPTLEQQCQQLWGPGSHPAPEACFQVVNSAGDAHGNCGQDSEGHFLPCAGRDALCGKLQCQGGKPSLLAPHMVPVDSTVHLDGQEVTCRGALALPSAQLDLLGLGLVEPGTQCGPRMVCNSNHNCHCAPGWAPPFCDKPGFGGSMDSGPVQAENHDTFLLAMLLSVLLPLLPGAGLAWCCYRLPGAHLQRCSWGCRRDPACSGPKDGPHRDHPLGGVHPMELGPTATGQPWPLDPENSHEPSSHPEKPLPAVSPDPQADQVQMPRSCLW

SEQ ID NO: 293 - protein, 813 aa, Homo Sapiens
MGWRPRRARGTPLLLLLLLLLLWPVPGAGVLQGHIPGQPVTPHWVLDGQPWRTVSLEEPVSKPDMGLVALEAEGQELLLELEKNHRLLAPGYIETHYGPDGQPVVLAPNHTDHCHYQGRVRGFPDSWVVLCTCSGMSGLITLSRNASYYLRPWPPRGSKDFSTHEIFRMEQLLTWKGTCGHRDPGNKAGMTSLPGGPQSRGRREARRTRKYLELYIVADHTLFLTRHRNLNHTKQRLLEVANYVDQLLRTLDIQVALTGLEVWTERDRSRVTQDANATLWAFLQWRRGLWAQRPHDSAQLLTGRAFQGATVGLAPVEGMCRAESSGGVSTDHSELPIGAAATMAHEIGHSLGLSHDPDGCCVEAAAESGGCVMAAATGHPFPRVFSACSRRQLRAFFRKGGGACLSNAPDPGLPVPPALCGNGFVEAGEECDCGPGQECRDLCCFAHNCSLRPGAQCAHGDCCVRCLLKPAGALCRQAMGDCDLPEFCTGTSSHCPPDVYLLDGSPCARGSGYCWDGACPTLEQQCQQLWGPGSHPAPEACFQVVNSAGDAHGNCGQDSEGHFLPCAGRDALCGKLQCQGGKPSLLAPHMVPVDSTVHLDGQEVTCRGALALPSAQLDLLGLGLVEPGTQCGPRMVCQSRRCRKNAFQELQRCLTACHSHGVCNSNHNCHCAPGWAPPFCDKPGFGGSMDSGPVQAENHDTFLLAMLLSVLLPLLPGAGLAWCCYRLPGAHLQRCSWGCRRDPACSGPKDGPHRDHPLGGVHPMELGPTATGQPWPLDPENSHEPSSHPEKPLPAVSPDPQADQVQMPRSCLW

SEQ ID NO: 294 - protein, 812 aa, Homo Sapiens
MGWRPRRARGTPLLLLLLLLLLWPVPGAGVLQGHIPGQPVTPHWVLDGQPWRTVSLEEPVSKPDMGLVALEAEGQELLLELEKNHRLLAPGYIETHYGPDGQPVVLAPNHTDHCHYQGRVRGFPDSWVVLCTCSGMSGLITLSRNASYYLRPWPPRGSKDFSTHEIFRMEQLLTWKGTCGHRDPGNKAGMTSLPGGPQSRGRREARRTRKYLELYIVADHTLFLTRHRNLNHTKQRLLEVANYVDQLLRTLDIQVALTGLEVWTERDRSRVTQDANATLWAFLQWRRGLWAQRPHDSAQLLTGRAFQGATVGLAPVEGMCRAESSGGVSTDHSELPIGAAATMAHEIGHSLGLSHDPDGCCVEAAAESGGCVMAAATGHPFPRVFSACSRRQLRAFFRKGGGACLSNAPDPGLPVPPALCGNGFVEAGEECDCGPGQECRDLCCFAHNCSLRPGAQCAHGDCCVRCLLKPAGALCRQAMGDCDLPEFCTGTSSHCPPDVYLLDGSPCARGSGYCWDGACPTLEQQCQQLWGPGSHPAPEACFQVVNSAGDAHGNCGQDSEGHFLPCAGRDALCGKLQCQGGKPSLLAPHMVPVDSTVHLDGQEVTCRGALALPSAQLDLLGLGLVEPGTQCGPRMVCQSRRCRKNAFQELQRCLTACHSHGVCNSNHNCHCAPGWAPPFCDKPGFGGSMDSGPVQAENHDTFLLAMLLSVLLPLLPGAGLAWCCYRLPGAHLQRCSWGCRRDPACSGPKDGPHRDHPLGGVHPMELGPTATGQPWPLDPENSHEPSSHPEKPLPAVSPDPQDQVQMPRSCLW

SEQ ID NO: 295 - protein, 692 aa, Homo Sapiens
MGWRPRRARGTPLLLLLLLLLLWPVPGAGVLQGHIPGQPVTPHWVLDGQPWRTVSLEEPVSKPDMGLVALEAEGQELLLELEKNHRLLAPGYIETHYGPDGQPVVLAPNHTDHCHYQGRVRGFPDSWVVLCTCSGMSGLITLSRNASYYLRPWPPRGSKDFSTHEIFRMEQLLTWKGTCGHRDPGNKAGMTSLPGGPQSRGRREARRTRKYLELYIVADHTLFLTRHRNLNHTKQRLLEVANYVDQLLRTLDIQVALTGLEVWTERDRSRRQLRAFFRKGGGACLSNAPDPGLPVPPALCGNGFVEAGEECDCGPGQECRDLCCFAHNCSLRPGAQCAHGDCCVRCLLKPAGALCRQAMGDCDLPEFCTGTSSHCPPDVYLLDGSPCARGSGYCWDGACPTLEQQCQQLWGPGSHPAPEACFQVVNSAGDAHGNCGQDSEGHFLPCAGRDALCGKLQCQGGKPSLLAPHMVPVDSTVHLDGQEVTCRGALALPSAQLDLLGLGLVEPGTQCGPRMVCQSRRCRKNAFQELQRCLTACHSHGVCNSNHNCHCAPGWAPPFCDKPGFGGSMDSGPVQAENHDTFLLAMLLSVLLPLLPGAGLAWCCYRLPGAHLQRCSWGCRRDPACSGPKDGPHRDHPLGGVHPMELGPTATGQPWPLDPENSHEPSSHPEKPLPAVSPDPQDQVQMPRSCLW

SEQ ID NO: 296 - protein, 138 aa, Homo Sapiens
MGWRPRRARGTPLLLLLLLLLLWPVPGAGVLQGHIPGQPVTPHWVLDGQPWRTVSLEEPVSKPDMGLVALEAEGQELLLELEKNHRLLAPGYIETHYGPDGQPVVLAPNHTVRCFHGLWDAPPEVPPHHSYPYSSLHS

SEQ ID NO: 297 - protein, 754 aa, Homo Sapiens
MLPGCIFLMILLIPQVKEKFILGVEGQQLVRPKKLPLIQKRDTGHTHDDDILKTYEEELLYEIKLNRKTLVLHLLRSREFLGSNYSETFYSMKGEAFTRHPQIMDHCFYQGSIVHEYDSAASISTCNGLRGFFRINDQRYLIEPVKYSDEGEHLVFKYNLRVPYGANYSCTELNFTRKTVPGDNESEEDSKIKGIHDEKYVELFIVADDTVYRRNGHPHNKLRNRIWGMVNFVNMIYKTLNIHVTLVGIEIWTHEDKIELYSNIETTLLRFSFWQEKILKTRKDFDHVVLLSGKWLYSHVQGISYPGGMCLPYYSTSIIKDLLPDTNIIANRMAHQLGHNLGMQHDEFPCTCPSGKCVMDSDGSIPALKFSKCSQNQYHQYLKDYKPTCMLNIPFPYNFHDFQFCGNKKLDEGEECDCGPAQECTNPCCDAHTCVLKPGFTCAEGECCESCQIKKAGSICRPAKDECDFPEMCTGHSPACPKDQFRVNGFPCKNSEGYCFMGKCPTREDQCSELFDDEAIESHDICYKMNTKGNKFGYCKNKENRFLPCEEKDVRCGKIYCTGGELSSLLGEDKTYHLKDPQKNATVKCKTIFLYHDSTDIGLVASGTKCGEGMVCNNGECLNMEKVYISTNCPSQCNENPVDGHGLQCHCEEGQAPVACEETLHVTNITILVVVLVLVIVGIGVLILLVRYRKCIKLKQVQSPPTETLGVENKGYFGDEQQIRTEPILPEIHFLNKPASKDSRGIADPNQSAK

SEQ ID NO: 298 - protein, 776 aa, Homo Sapiens
MLPGCIFLMILLIPQVKEKFILGVEGQQLVRPKKLPLIQKRDTGHTHDDDILKTYEEELLYEIKLNRKTLVLHLLRSREFLGSNYSETFYSMKGEAFTRHPQIMDHCFYQGSIVHEYDSAASISTCNGLRGFFRINDQRYLIEPVKYSDEGEHLVFKYNLRVPYGANYSCTELNFTRKTVPGDNESEEDSKIKGIHDEKYVELFIVADDTVYRRNGHPHNKLRNRIWGMVNFVNMIYKTLNIHVTLVGIEIWTHEDKIELYSNIETTLLRFSFWQEKILKTRKDFDHVVLLSGKWLYSHVQGISYPGGMCLPYYSTSIIKDLLPDTNIIANRMAHQLGHNLGMQHDEFPCTCPSGKCVMDSDGSIPALKFSKCSQNQYHQYLKDYKPTCMLNIPFPYNFHDFQFCGNKKLDEGEECDCGPAQECTNPCCDAHTCVLKPGFTCAEGECCESCQIKKAGSICRPAKDECDFPEMCTGHSPACPKDQFRVNGFPCKNSEGYCFMGKCPTREDQCSELFDDEAIESHDICYKMNTKGNKFGYCKNKENRFLPCEEKDVRCGKIYCTGGELSSLLGEDKTYHLKDPQKNATVKCKTIFLYHDSTDIGLVASGTKCGEGMVCNNGECLNMEKVYISTNCPSQCNENPVDGHGLQCHCEEGQAPVACEETLHVTNITILVVVLVLVIVGIGVLILLVRYRKCIKLKQVQSPPTETLGVENKGYFGDEQQIRTEPILPEIHFLNQRTPESLESLPTSFSSPHYITLKPASKDSRGIADPNQSAK

SEQ ID NO: 299 - protein, 210 aa, Homo Sapiens
MLPGCIFLMILLIPQVKEKFILGVEGQQLVRPKKLPLIQKRDTGHTHDDDILKTYEEELLYEIKLNRKTLVLHLLRSREFLGSNYSETFYSMKGEAFTRHPQIMDHCFYQGSIVHEYDSAASISTCNGLRGFFRINDQRYLIEPVKYSDEGEHLVFKYNLRVPYGANYSCTELNFTRKTVPGDNESEEDSKIKVSTLLLSLPQMKHLLFS

SEQ ID NO: 300 - protein, 516 aa, Homo Sapiens
MVNFVNMIYKTLNIHVTLVGIEIWTHEDKIELYSNIETTLLRFSFWQEKILKTRKDFDHVVLLSGKWLYSHVQGISYPGGMCLPYYSTSIIKDLLPDTNIIANRMAHQLGHNLGMQHDEFPCTCPSGKCVMDSDGSIPALKFSKCSQNQYHQYLKDYKPTCMLNIPFPYNFHDFQFCGNKKLDEGEECDCGPAQECTNPCCDAHTCVLKPGFTCAEGECCESCQIKKAGSICRPAKDECDFPEMCTGHSPACPKDQFRVNGFPCKNSEGYCFMGKCPTREDQCSELFDDEAIESHDICYKMNTKGNKFGYCKNKENRFLPCEEKDVRCGKIYCTGGELSSLLGEDKTYHLKDPQKNATVKCKTIFLYHDSTDIGLVASGTKCGEGMVCNNGECLNMEKVYISTNCPSQCNENPVDGHGLQCHCEEGQAPVACEETLHVTNITILVVVLVLVIVGIGVLILLVRYRKCIKLKQVQSPPTETLGVENKGYFGDEQQIRTEPILPEIHFLNHLLYGRHQ

SEQ ID NO: 301 - protein, 245 aa, Homo Sapiens
MRGLGLWLLGAMMLPAIAPSRPWALMEQYEVVLPWRLPGPRVRRALPSHLGGQFRPQPCPYLSIRGTYYRPARCPGLIQPVAQLRLSQSSAGRAPACTWGLEMQWSSRRLCRHHQGLHPERVSYVLGATGHNFTLHLRKNRDLLGSGYTETYTAANGSEVTEQPRGQDHCFYQGHVEGYPDSAASLSTCAGLRGFFQVGSDLHLIEPLDEGGEGGRHAVYQAEHLLQTAGTCGVSDDSLGSLLGP

SEQ ID NO: 302 - protein, 742 aa, Homo Sapiens
MRGLGLWLLGAMMLPAIAPSRPWALMEQYEVVLPWRLPGPRVRRALPSHLGLHPERVSYVLGATGHNFTLHLRKNRDLLGSGYTETYTAANGSEVTEQPRGQDHCFYQGHVEGYPDSAASLSTCAGLRGFFQVGSDLHLIEPLDEGGEGGRHAVYQAEHLLQTAGTCGVSDDSLGSLLGPRTAAVFRPRPGDSLPSRETRYVELYVVVDNAEFQMLGSEAAVRHRVLEVVNHVDKLYQKLNFRVVLVGLEIWNSQDRFHVSPDPSVTLENLLTWQARQRTRRHLHDNVQLITGVDFTGTTVGFARVSAMCSHSSGAVNQDHSKNPVGVACTMAHEMGHNLGMDHDENVQGCRCQERFEAGRCIMAGSIGSSFPRMFSDCSQAYLESFLERPQSVCLANAPDLSHLVGGPVCGNLFVERGEQCDCGPPEDCRNRCCNSTTCQLAEGAQCAHGTCCQECKVKPAGELCRPKKDMCDLEEFCDGRHPECPEDAFQENGTPCSGGYCYNGACPTLAQQCQAFWGPGGQAAEESCFSYDILPGCKASRYRADMCGVLQCKGGQQPLGRAICIVDVCHALTTEDGTAYEPVPEGTRCGPEKVCWKGRCQDLHVYRSSNCSAQCHNHGVCNHKQECHCHAGWAPPHCAKLLTEVHAGCQPRAGQGRGSSPIQGPPRAGPHHPPGPARPTPGLLGGSEEAAPCSSGHCVQPTLPSSCLHPAGTKAGHQANVRTPSAPSQTRGWCGQPWSS

SEQ ID NO: 303 - protein, 824 aa, Homo Sapiens
MRGLGLWLLGAMMLPAIAPSRPWALMEQYEVVLPWRLPGPRVRRALPSHLGLHPERVSYVLGATGHNFTLHLRKNRDLLGSGYTETYTAANGSEVTEQPRGQDHCFYQGHVEGYPDSAASLSTCAGLRGFFQVGSDLHLIEPLDEGGEGGRHAVYQAEHLLQTAGTCGVSDDSLGSLLGPRTAAVFRPRPGDSLPSRETRYVELYVVVDNAEFQMLGSEAAVRHRVLEVVNHVDKLYQKLNFRVVLVGLEIWNSQDRFHVSPDPSVTLENLLTWQARQRTRRHLHDNVQLITGVDFTGTTVGFARVSAMCSHSSGAVNQDHSKNPVGVACTMAHEMGHNLGMDHDENVQGCRCQERFEAGRCIMAGSIGSSFPRMFSDCSQAYLESFLERPQSVCLANAPDLSHLVGGPVCGNLFVERGEQCDCGPPEDCRNRCCNSTTCQLAEGAQCAHGTCCQECKVKPAGELCRPKKDMCDLEEFCDGRHPECPEDAFQENGTPCSGGYCYNGACPTLAQQCQAFWGPGGQAAEESCFSYDILPGCKASRYRADMCGVLQCKGGQQPLGRAICIVDVCHALTTEDGTAYEPVPEGTRCGPEKVCWKGRCQDLHVYRSSNCSAQCHNHGVCNHKQECHCHAGWAPPHCAKLLTEVHAASGSLPVFVVVVLVLLAVVLVTLAGIIVYRKARSRILSRNVAPKTTMGRSNPLFHQAASRVPAKGGAPAPSRGPQELVPTTHPGQPARHPASSVALKRPPPAPPVTVSSPPFPVPVYTRQAPKQVIKPTFAPPVPPVKPGAGAANPGPAEGAVGPKVALKPPIQRKQGAGAPTAP

SEQ ID NO: 304 - protein, 109 aa, Homo Sapiens
MRGLGLWLLGAMMLPGPAPREGELRPWGHRAQLHPPPAEEQGPAGLRLHRDLYGCQWLRGDGAASRAGPLLLPGPRRGVPGLSRQPQHLCRPQGFLPGGVRPAPDRAPG

SEQ ID NO: 305 - protein, 733 aa, Homo Sapiens
MRGLGLWLLGAMMLPGPAPREGELRPWGHRAQLHPPPAEEQGPAGLRLHRDLYGCQWLRGDGAASRAGPLLLPGPRRGVPGLSRQPQHLCRPQVGSDLHLIEPLDEGGEGGRHAVYQAEHLLQTAGTCGVSDDSLGSLLGPRTAAVFRPRPGDSLPSRETRYVELYVVVDNAEFQMLGSEAAVRHRVLEVVNHVDKLYQKLNFRVVLVGLEIWNSQDRFHVSPDPSVTLENLLTWQARQRTRRHLHDNVQLITGVDFTGTTVGFARVSAMCSHSSGAVNQDHSKNPVGVACTMAHEMGHNLGMDHDENVQGCRCQERFEAGRCIMAGSIGSSFPRMFSDCSQAYLESFLERPQSVCLANAPDLSHLVGGPVCGNLFVERGEQCDCGPPEDCRNRCCNSTTCQLAEGAQCAHGTCCQECKVKPAGELCRPKKDMCDLEEFCDGRHPECPEDAFQENGTPCSGGYCYNGACPTLAQQCQAFWGPGGQAAEESCFSYDILPGCKASRYRADMCGVLQCKGGQQPLGRAICIVDVCHALTTEDGTAYEPVPEGTRCGPEKVCNHKQECHCHAGWAPPHCAKLLTEVHAASGSLPVFVVVVLVLLAVVLVTLAGIIVYRKARSRILSRNVAPKTTMGRSNPLFHQAASRVPAKGGAPAPSRGPQELVPTTHPGQPARHPASSVALKRPPPAPPVTVSSPPFPVPVYTRQAPKQGAVGPKVALKPPIQRKQGAGAPTAP

SEQ ID NO: 306 - protein, 655 aa, Homo Sapiens
MGSGARFPSGTLRVRWLLLLGLVGPVLGAARPGFQQTSHLSSYEIITPWRLTRERREAPRPYSKQVSYVIQAEGKEHIIHLERNKDLLPEDFVVYTYNKEGTLITDHPNIQNHCHYRGYVEGVHNSSIALSDCFGLRGLLHLENASYGIEPLQNSSHFEHIIYRMDDVYKEPLKCGVSNKDIEKETAKDEEEEPPSMTQLLRRRRAVLPQTRYVELFIVVDKERYDMMGRNQTAVREEMILLANYLDSMYIMLNIRIVLVGLEIWTNGNLINIVGGAGDVLGNFVQWREKFLITRRRHDSAQLVLKKGFGGTAGMAFVGTVCSRSHAGGINVFGQITVETFASIVAHELGHNLGMNHDDGRDCSCGAKSCIMNSGASGSRNFSSCSAEDFEKLTLNKGGNCLLNIPKPDEAYSAPSCGNKLVDAGEECDCGTPKECELDPCCEGSTCKLKSFAECAYGDCCKDCRFLPGGTLCRGKTSECDVPEYCNGSSQFCQPDVFIQNGYPCQNNKAYCYNGMCQYYDAQCQVIFGSKAKAAPKDCFIEVNSKGDRFGNCGFSGNEYKKCATGNALCGKLQCENVQEIPVFGIVPAIIQTPSRGTKCWGVDFQLGSDVPDPGMVNEGTKCGAGKICRNFQCVDASVLNYDCDVQKKCHGHGK

SEQ ID NO: 307 - protein, 628 aa, Homo Sapiens
MGSGARFPSGTLRVRWLLLLGLVGPVLGAARPGFQQTSHLSSYEIITPWRLTRERREAPRPYSKQVSYVIQAEGKEHIIHLERNKDLLPEDFVVYTYNKEGTLITDHPNIQNHCHYRGYVEGVHNSSIALSDCFGLRGLLHLENASYGIEPLQNSSHFEHIIYRMDDVYKEPLKCGVSNKDIEKETAKDEEEEPPSMTQLLRRRRAVLPQTRYVELFIVVDKERYDMMGRNQTAVREEMILLANYLDSMYIMLNIRIVLVGLEIWTNGNLINIVGGAGDVLGNFVQWREKFLITRRRHDSAQLVLKKGFGGTAGMAFVGTVCSRSHAGGINVFGQITVETFASIVAHELGHNLGMNHDDGRDCSCGAKSCIMNSGASGSRNFSSCSAEDFEKLTLNKGGNCLLNIPKPDEAYSAPSCGNKLVDAGEECDCGTPKECELDPCCEGSTCKLKSFAECAYGDCCKDCRFLPGGTLCRGKTSECDVPEYCNGSSQFCQPDVFIQNGYPCQNNKAYCYNGMCQYYDAQCQVIFGSKAKAAPKDCFIEVNSKGDRFGNCGFSGNEYKKCATGNALCGKLQCENVQEIPVFGIVPAIIQTPSRGTKCWGVDFQLGSDVPDPGMVNEGTKCGAGKK

SEQ ID NO: 308 - protein, 819 aa, Homo Sapiens
MGSGARFPSGTLRVRWLLLLGLVGPVLGAARPGFQQTSHLSSYEIITPWRLTRERREAPRPYSKQVSYVIQAEGKEHIIHLERNKDLLPEDFVVYTYNKEGTLITDHPNIQNHCHYRGYVEGVHNSSIALSDCFGLRGLLHLENASYGIEPLQNSSHFEHIIYRMDDVYKEPLKCGVSNKDIEKETAKDEEEEPPSMTQLLRRRRAVLPQTRYVELFIVVDKERYDMMGRNQTAVREEMILLANYLDSMYIMLNIRIVLVGLEIWTNGNLINIVGGAGDVLGNFVQWREKFLITRRRHDSAQLVLKKGFGGTAGMAFVGTVCSRSHAGGINVFGQITVETFASIVAHELGHNLGMNHDDGRDCSCGAKSCIMNSGASGSRNFSSCSAEDFEKLTLNKGGNCLLNIPKPDEAYSAPSCGNKLVDAGEECDCGTPKECELDPCCEGSTCKLKSFAECAYGDCCKDCRFLPGGTLCRGKTSECDVPEYCNGSSQFCQPDVFIQNGYPCQNNKAYCYNGMCQYYDAQCQVIFGSKAKAAPKDCFIEVNSKGDRFGNCGFSGNEYKKCATGNALCGKLQCENVQEIPVFGIVPAIIQTPSRGTKCWGVDFQLGSDVPDPGMVNEGTKCGAGKICRNFQCVDASVLNYDCDVQKKCHGHGVCNSNKNCHCENGWAPPNCETKGYGGSVDSGPTYNEMNTALRDGLLVFFFLIVPLIVCAIFIFIKRDQLWRSYFRKKRSQTYESDGKNQANPSRQPGSVPRHVSPVTPPREVPIYANRFAVPTYAAKQPQQFPSRPPPPQPKVSSQGNLIPARPAPAPPLYSSLT

SEQ ID NO: 309 - protein, 712 aa, Homo Sapiens
MGSGARFPSGTLRVRWLLLLGLVGPVLGAARPGFQQTSHLSSYEIITPWRLTRERREAPRPYSKQVSYVIQAEGKEHIIHLERNKDLLPEDFVVYTYNKEGTLITDHPNIQNHCHYRGYVEGVHNSSIALSDCFGLRGLLHLENASYGIEPLQNSSHFEHIIYRMDDVYKEPLKCGVSNKDIEKETAKDEEEEPPSMTQLLRRRRAVLPQTRYVELFIVVDKERYDMMGRNQTAVREEMILLANYLDSMYIMLNIRIVLVGLEIWTNGNLINIVGGAGDVLGNFVQWREKFLITRRRHDSAQLVLKKGFGGTAGMAFVGTVCSRSHAGGINVFGQITVETFASIVAHELGHNLGMNHDDGRDCSCGAKSCIMNSGASGSRNFSSCSAEDFEKLTLNKGGNCLLNIPKPDEAYSAPSCGNKLVDAGEECDCGTPKECELDPCCEGSTCKLKSFAECAYGDCCKDCRFLPGGTLCRGKTSECDVPEYCNGSSQFCQPDVFIQNGYPCQNNKAYCYNGMCQYYDAQCQVIFGSKAKAAPKDCFIEVNSKGDRFGNCGFSGNEYKKCATGNALCGKLQCENVQEIPVFGIVPAIIQTPSRGTKCWGVDFQLGSDVPDPGMVNEGTKCGAGKICRNFQCVDASVLNYDCDVQKKCHGHGVCNSNKNCHCENGWAPPNCETKGYGGSVDSGPTYNGQMAKIKQTLLDSRGVFLDMFLQ

SEQ ID NO: 310 - protein, 147 aa, Homo Sapiens
MGSGARFPSGTLRVRWLLLLGLVGPVLGAARPGFQQTSHLSSYEIITPWRLTRERREAPRPYSKQVSYVIQAEGKEHIIHLERNKDLLPEDFVVYTYNKEGTLITDHPNIQRCGPLCIREQSTPGDRAGQNTQNNWQMSNLAFCVYY

SEQ ID NO: 311 - protein, 128 aa, Homo Sapiens
MGSGARFPSGTLRVRWLLLLGLVGPVLGAARPGFQQTSHLSSYEIITPWRLTRERREAPRPYSKQVSYVIQAEGKEHIIHLERNKDLLPEDFVVYTYNKEGTLITDHPNIQVMYFSLDPIANFKTIII

SEQ ID NO: 312 - protein, 391 aa, Homo Sapiens
MILNGEEIILSLQKTKHLLGPDYTETLYSPRGEEITTKPENMEHCYYKGNILNEKNSVASISTCDGLRGYFTHHHQRYQIKPLKSTDEKEHAVFTSNQEEQDPANHTCGVKSTDGKQGPIRISRSLKSPEKEDFLRAQKYIDLYLVLDNAFYKNYNENLTLIRSFVFDVMNLLNVIYNTIDVQVALVGMEIWSDGDKIKVVPSASTTFDNFLRWHSSNLGKKIHDHAQLLSGISFNNRRVGLAASNSLCSPSSVAVIEAKKKNNVALVGVMSHELGHVLGMPDVPFNTKCPSGSCVMNQYLSSKFPKDFSTSCRAHFERYLLSQKPKCLLQAPIPTNIMTTPVCGNHLLEVGEDCDCGSPKECTNLCCEALTCKLKPGTDCGGDAPNHTTE

SEQ ID NO: 313 - protein, 470 aa, Homo Sapiens
MLRGISQLPAVATMSWVLLPVLWLIVQTQAIAIKQTPELTLHEIVCPKKLHILHKREIKNNQTEKHGKEERYEPEVQYQMILNGEEIILSLQKTKHLLGPDYTETLYSPRGEEITTKPENMEHCYYKGNILNEKNSVASISTCDGLRGYFTHHHQRYQIKPLKSTDEKEHAVFTSNQEEQDPANHTCGVKSTDGKQGPIRISRSLKSPEKEDFLRAQKYIDLYLVLDNAFYKNYNENLTLIRSFVFDVMNLLNVIYNTIDVQVALVGMEIWSDGDKIKVVPSASTTFDNFLRWHSSNLGKKIHDHAQLLSGISFNNRRVGLAASNSLCSPSSVAVIEAKKKNNVALVGVMSHELGHVLGMPDVPFNTKCPSGSCVMNQYLSSKFPKDFSTSCRAHFERYLLSQKPKCLLQAPIPTNIMTTPVCGNHLLEVGEDCDCGSPKECTNLCCEALTCKLKPGTDCGGDAPNHTTE

SEQ ID NO: 314 - protein, 41 aa, Homo Sapiens
MLRGISQLPAVATMSWVLLPVLWLIVQTQASNCAWPKVSIQ

SEQ ID NO: 315 - protein, 171 aa, Homo Sapiens
MLVADQSMAEFHGSGLKHYLLTLFSVAARLYKHPSIRNSVSLVVVKILVIHDEQKGPEVTSNAALTLRNFCNWQKQHNPPSDRDAEHYDTAILFTRQDLCGSQTCDTLGMADVGTVCDPSRSCSVIEDDGLQAAFTTAHELGHVFNMPHDDAKQCASLNGVNQDSHMMASM

SEQ ID NO: 316 - protein, 967 aa, Homo Sapiens
MQRAVPEGFGRRKLGSDMGNAERAPGSRSFGPVPTLLLLAAALLAVSDALGRPSEEDEELVVPELERAPGHGTTRLRLHAFDQQLDLELRPDSSFLAPGFTLQNVGRKSGSETPLPETDLAHCFYSGTVNGDPSSAAALSLCEGVRGAFYLLGEAYFIQPLPAASERLATAAPGEKPPAPLQFHLLRRNRQGDVGGTCGVVDDEPRPTGKAETEDEDEGTEGEDEGAQWSPQDPALQGVGQPTGTGSIRKKRFVSSHRYVETMLVADQSMAEFHGSGLKHYLLTLFSVAARLYKHPSIRNSVSLVVVKILVIHDEQKGPEVTSNAALTLRNFCNWQKQHNPPSDRDAEHYDTAILFTRQDLCGSQTCDTLGMADVGTVCDPSRSCSVIEDDGLQAAFTTAHELGHVFNMPHDDAKQCASLNGVNQDSHMMASMLSNLDHSQPWSPCSAYMITSFLDNGHGECLMDKPQNPIQLPGDLPGTSYDANRQCQFTFGEDSKHCPDAASTCSTLWCTGTSGGVLVCQTKHFPWADGTSCGEGKWCINGKCVNKTDRKHFDTPFHGSWGMWGPWGDCSRTCGGGVQYTMRECDNPVPKNGGKYCEGKRVRYRSCNLEDCPDNNGKTFREEQCEAHNEFSKASFGSGPAVEWIPKYAGVSPKDRCKLICQAKGIGYFFVLQPKVVDGTPCSPDSTSVCVQGQCVKAGCDRIIDSKKKFDKCGVCGGNGSTCKKISGSVTSAKPGYHDIITIPTGATNIEVKQRNQRGSRNNGSFLAIKAADGTYILNGDYTLSTLEQDIMYKGVVLRYSGSSAALERIRSFSPLKEPLTIQVLTVGNALRPKIKYTYFVKKKKESFNAIPTFSAWVIEEWGECSKSCELGWQRRLVECRDINGQPASECAKEVKPASTRPCADHPCPQWQLGEWSSCSKTCGKGYKKRSLKCLSHDGGVLSHESCDPLKKPKHFIDFCTMAECS

SEQ ID NO: 317 - protein, 128 aa, Homo Sapiens
MVTWEGTGSIRKKRFVSSHRYVETMLVADQSMAEFHGSGLKHYLLTLFSVAARLYKHPSIRNSVSLVVVKILVIHDEQKGPEVTSNAALTLRNFCNWQKQHNPPSDRDAEHYDTAILFTRQDLCGSQT

SEQ ID NO: 318 - protein, 200 aa, Homo Sapiens
  misc_feature (1)..(1): Xaa can be any naturally occurring amino acid
XCRSFLLRPSLCAVLILQFFLFHHFGTGSIRKKRFVSSHRYVETMLVADQSMAEFHGSGLKHYLLTLFSVAARLYKHPSIRNSVSLVVVKILVIHDEQKGPEVTSNAALTLRNFCNWQKQHNPPSDRDAEHYDTAILFTRQDLCGSQTCDTLGMADVGTVCDPSRSCSVIEDDGLQAAFTTAHELGHVFNMPHDDAKQCA

SEQ ID NO: 319 - protein, 1103 aa, Homo Sapiens
MAPACQILRWALALGLGLMFEVTHAFRSQDEFLSSLESYEIAFPTRVDHNGALLAFSPPPPRRQRRGTGATAESRLFYKVASPSTHFLLNLTRSSRLLAGHVSVEYWTREGLAWQRAARPHCLYAGHLQGQASSSHVAISTCGGLHGLIVADEEEYLIEPLHGGPKGSRSPEESGPHVVYKRSSLRHPHLDTACGVRDEKPWKGRPWWLRTLKPPPARPLGNETERGQPGLKRSVSRERYVETLVVADKMMVAYHGRRDVEQYVLAIMNIVAKLFQDSSLGSTVNILVTRLILLTEDQPTLEITHHAGKSLDSFCKWQKSIVNHSGHGNAIPENGVANHDTAVLITRYDICIYKNKPCGTLGLAPVGGMCERERSCSVNEDIGLATAFTIAHEIGHTFGMNHDGVGNSCGARGQDPAKLMAAHITMKTNPFVWSSCSRDYITSFLDSGLGLCLNNRPPRQDFVYPTVAPGQAYDADEQCRFQHGVKSRQCKYGEVCSELWCLSKSNRCITNSIPAAEGTLCQTHTIDKGWCYKRVCVPFGSRPEGVDGAWGPWTPWGDCSRTCGGGVSSSSRHCDSPRPTIGGKYCLGERRRHRSCNTDDCPPGSQDFREVQCSEFDSIPFRGKFYKWKTYRGGGVKACSLTCLAEGFNFYTERAAAVVDGTPCRPDTVDICVSGECKHVGCDRVLGSDLREDKCRVCGGDGSACETIEGVFSPASPGAGYEDVVWIPKGSVHIFIQDLNLSLSHLALKGDQESLLLEGLPGTPQPHRLPLAGTTFQLRQGPDQVQSLEALGPINASLIVMVLARTELPALRYRFNAPIARDSLPPYSWHYAPWTKCSAQCAGGSQVQAVECRNQLDSSAVAPHYCSAHSKLPKRQRACNTEPCPPDWVVGNWSLCSRSCDAGVRSRSVVCQRRVSAAEEKALDDSACPQPRPPVLEACHGPTCPPEWAALDWSECTPSCGPGLRHRVVLCKSADHRATLPPAHCSPAAKPPATMRCNLRRCPPARWVAGEWGECSAQCGVGQRQRSVRCTSHTGQASHECTEALRPPTTQQCEAKCDSPTPGDGPEECKDVNKVAYCPLVLKFQFCSRAYFRQMCCKTCHGH

SEQ ID NO: 320 - protein, 289 aa, Homo Sapiens
MAPACQILRWALALGLGLMFEVTHAFRSQDEFLSSLESYEIAFPTRVDHNGALLAFSPPPPRRQRRGTGATAESRLFYKVASPSTHFLLNLTRSSRLLAGHVSVEYWTREGLAWQRAARPHCLYAGHLQGQASSSHVAISTCGGLHGLIVADEEEYLIEPLHGGPKGSRSPEESGPHVVYKRSSLRHPHLDTACGVRDEKPWKGRPWWLRTLKPPPARPLGNETERGQPGLKRSVSRERYVETLVVADKMMVAYHGRRDVEQYVLAIMNIVRLPNFSRTRVWEAPLTSS

SEQ ID NO: 321 - protein, 289 aa, Homo Sapiens; identical to SEQ ID NO: 320

SEQ ID NO: 322 - protein, 1103 aa, Homo Sapiens; identical to SEQ ID NO: 319

SEQ ID NO: 323 - protein, 590 aa, Homo Sapiens
MGPTSVLRAGLTPSCLPPPSGATNGSVSPLGRAQRVWTEPGGRGLHGATAAGPVAAACPLLAVTATAPGQPSGASTVWVREGGTAPATRMTVPLAPRTSEKCSVLNLTASLSVGNSTSGKRTGEACSLTCLAEGFNFYTERAAAVVDGTPCRPDTVDICVSGECKHVGCDRVLGSDLREDKCRVCGGDGSACETIEGVFSPASPGAGYEDVVWIPKGSVHIFIQDLNLSLSHLALKGDQESLLLEGLPGTPQPHRLPLAGTTFQLRQGPDQVQSLEALGPINASLIVMVLARTELPALRYRFNAPIARDSLPPYSWHYAPWTKCSAQCAGGSQVQAVECRNQLDSSAVAPHYCSAHSKLPKRQRACNTEPCPPDWVVGNWSLCSRSCDAGVRSRSVVCQRRVSAAEEKALDDSACPQPRPPVLEACHGPTCPPEWAALDWSECTPSCGPGLRHRVVLCKSADHRATLPPAHCSPAAKPPATMRCNLRRCPPARWVAGEWGECSAQCGVGQRQRSVRCTSHTGQASHECTEALRPPTTQQCEAKCDSPTPGDGPEECKDVNKVAYCPLVLKFQFCSRAYFRQMCCKTCHGH

SEQ ID NO: 324 - protein, 126 aa, Homo Sapiens
MGPTSVLRAGLTPSCLPPPSGATNGSVSPLGRAQRVWTEPGGRGLHGATAAGPVAAACPLLAVTATAPGQPSGASTVWVREGGTAPATRMTVPLAPRTSEKCSVLNLTASLSVGNSTSGKRTGEGA

SEQ ID NO: 325 - protein, 1509 aa, Homo Sapiens
MPCAQRSWLANLSVVAQLLNFGALCYGRQPQPGPVRFPDRRQEHFIKGLPEYHVVGPVRVDASGHFLSYGLHYPITSSRRKRDLDGSEDWVYYRISHEEKDLFFNLTVNQGFLSNSYIMEKRYGNLSHVKMMASSAPLCHLSGTVLQQGTRVGTAALSACHGLTGFFQLPHGDFFIEPVKKHPLVEGGYHPHIVYRRQKVPETKEPTCGLKDSVNISQKQELWREKWERHNLPSRSLSRRSISKERWVETLVVADTKMIEYHGSENVESYILTIMNMVTGLFHNPSIGNAIHIVVVRLILLEEEEQGLKIVHHAEKTLSSFCKWQKSINPKSDLNPVHHDVAVLLTRKDICAGFNRPCETLGLSHLSGMCQPHRSCNINEDSGLPLAFTIAHELGHSFGIQHDGKENDCEPVGRHPYIMSRQLQYDPTPLTWSKCSEEYITRFLDRGWGFCLDDIPKKKGLKSKVIAPGVIYDVHHQCQLQYGPNATFCQEVENVCQTLWCSVKGFCRSKLDAAADGTQCGEKKWCMAGKCITVGKKPESIPGGWGRWSPWSHCSRTCGAGVQSAERLCNNPEPKFGGKYCTGERKRYRLCNVHPCRSEAPTFRQMQCSEFDTVPYKNELYHWFPIFNPGYVDIGLIPKGARDIRVMEIEGAGNFLAIRSEDPEKYYLNGGFIIQWNGNYKLAGTVFQYDRKGDLEKLMATGPTNESVWIQLLFQVTNPGIKYEYTIQKDGLDNDVEQQMYFWQYGHWTECSVTCGTGIRRQTAHCIKKGRGMVKATFCDPETQPNGRQKKCHEKACPPRWWAGEWEACSATCGPHGEKKRTVLCIQTMVSDEQALPPTDCQHLLKPKTLLSCNRDILCPSDWTVGNWSECSVSCGGGVRIRSVTCAKNHDEPCDVTRKPNSRALCGLQQCPSSRRVLKPNKGTISNGKNPPTLKPVPPPTSRPRMLTTPTGPESMSTSTPAISSPSPTTASKEGDLGGKQWQDSSTQPELSSRYLISTGSTSQPILTSQSLSIQPSEENVSSSDTGPTSEGGLVATTTSGSGLSSSRNPITWPVTPFYNTLTKGPEMEIHSGSGEEREQPEDKDESNPVIWTKIRVPGNDAPVESTEMPLAPPLTPDLSRESWWPPFSTVMEGLLPSQRPTTSETGTPRVEGMVTEKPANTLLPLGGDHQPEPSGKTANRNHLKLPNNMNQTKSSEPVLTEEDATSLITEGFLLNASNYKQLTNGHGSAHWIVGNWSECSTTCGLGAYWRRVECSTQMDSDCAAIQRPDPAKRCHLRPCAGWKVGNWSKCSRNCSGGFKIREIQCVDSRDHRNLRPFHCQFLAGIPPPLSMSCNPEPCEAWQVEPWSQCSRSCGGGVQERGVFCPGGLCDWTKRPTSTMSCNEHLCCHWATGNWDLCSTSCGGGFQKRTVQCVPSEGNKTEDQDQCLCDHKPRPPEFKKCNQQACKKSADLLCTKDKLSASFCQTLKAMKKCSVPTVRAECCFSCPQTHITHTQRQRRQRLLQKSKEL

SEQ ID NO: 326 - protein, 1594 aa, Homo Sapiens
MPCAQRSWLANLSVVAQLLNFGALCYGRQPQPGPVRFPDRRQEHFIKGLPEYHVVGPVRVDASGHFLSYGLHYPITSSRRKRDLDGSEDWVYYRISHEEKDLFFNLTVNQGFLSNSYIMEKRYGNLSHVKMMASSAPLCHLSGTVLQQGTRVGTAALSACHGLTGFFQLPHGDFFIEPVKKHPLVEGGYHPHIVYRRQKVPETKEPTCGLKDSVNISQKQELWREKWERHNLPSRSLSRRSISKERWVETLVVADTKMIEYHGSENVESYILTIMNMVTGLFHNPSIGNAIHIVVVRLILLEEEEQGLKIVHHAEKTLSSFCKWQKSINPKSDLNPVHHDVAVLLTRKDICAGFNRPCETLGLSHLSGMCQPHRSCNINEDSGLPLAFTIAHELGHSFGIQHDGKENDCEPVGRHPYIMSRQLQYDPTPLTWSKCSEEYITRFLDRGWGFCLDDIPKKKGLKSKVIAPGVIYDVHHQCQLQYGPNATFCQEVENVCQTLWCSVKGFCRSKLDAAADGTQCGEKKWCMAGKCITVGKKPESIPGGWGRWSPWSHCSRTCGAGVQSAERLCNNPEPKFGGKYCTGERKRYRLCNVHPCRSEAPTFRQMQCSEFDTVPYKNELYHWFPIFNPAHPCELYCRPIDGQFSEKMLDAVIDGTPCFEGGNSRNVCINGICKMVGCDYEIDSNATEDRCGVCLGDGSSCQTVRKMFKQKEGSGYVDIGLIPKGARDIRVMEIEGAGNFLAIRSEDPEKYYLNGGFIIQWNGNYKLAGTVFQYDRKGDLEKLMATGPTNESVWIQLLFQVTNPGIKYEYTIQKDGLDNDVEQQMYFWQYGHWTECSVTCGTGIRRQTAHCIKKGRGMVKATFCDPETQPNGRQKKCHEKACPPRWWAGEWEACSATCGPHGEKKRTVLCIQTMVSDEQALPPTDCQHLLKPKTLLSCNRDILCPSDWTVGNWSECSVSCGGGVRIRSVTCAKNHDEPCDVTRKPNSRALCGLQQCPSSRRVLKPNKGTISNGKNPPTLKPVPPPTSRPRMLTTPTGPESMSTSTPAISSPSPTTASKEGDLGGKQWQDSSTQPELSSRYLISTGSTSQPILTSQSLSIQPSEENVSSSDTGPTSEGGLVATTTSGSGLSSSRNPITWPVTPFYNTLTKGPEMEIHSGSGEEREQPEDKDESNPVIWTKIRVPGNDAPVESTEMPLAPPLTPDLSRESWWPPFSTVMEGLLPSQRPTTSETGTPRVEGMVTEKPANTLLPLGGDHQPEPSGKTANRNHLKLPNNMNQTKSSEPVLTEEDATSLITEGFLLNASNYKQLTNGHGSAHWIVGNWSECSTTCGLGAYWRRVECSTQMDSDCAAIQRPDPAKRCHLRPCAGWKVGNWSKCSRNCSGGFKIREIQCVDSRDHRNLRPFHCQFLAGIPPPLSMSCNPEPCEAWQVEPWSQCSRSCGGGVQERGVFCPGGLCDWTKRPTSTMSCNEHLCCHWATGNWDLCSTSCGGGFQKRTVQCVPSEGNKTEDQDQCLCDHKPRPPEFKKCNQQACKKSADLLCTKDKLSASFCQTLKAMKKCSVPTVRAECCFSCPQTHITHTQRQRRQRLLQKSKEL

SEQ ID NO: 327 - protein, 232 aa, Homo Sapiens
MPCAQRSWLANLSVVAQLLNFGALCYGRQPQPGPVRFPDRRQEHFIKGLPEYHVVGPVRVDASGHFLSYGLHYPITSSRRKRDLDGSEDWVYYRISHEEKDLFFNLTVNQGFLSNSYIMEKRYGNLSHVKMMASSAPLCHLSGTVLQQGTRVGTAALSACHGLTGFFQLPHGDFFIEPVKKHPLVEGGYHPHIVYRRQKVPETKEPTCGLKGIVTHMSSWVEESVLFFWLFY

SEQ ID NO: 328 - protein, 444 aa, Homo Sapiens
MASDGAAPRAGLAWSPCSRRQLLSLLSAGRARCVWDPPRPQPGSAGHPPDAQPGLYYSANEQCRVAFGPKAVACTFAREHLDMCQALSCHTDPLDQSSCSRLLVPLLDGTECGVEKWCSKGRCRSLVELTPIAAVHGRWSSWGPRSPCSRSCGGGVVTRRRQCNNPRPAFGGRACVGADLQAEMCNTQACEKTQLEFMSQQCARTDGQPLRSSPGGASFYHWGAAVPHSQGDALCRHMCRAIGESFIMKRGDSFLDGTRCMPSGPREDGTLSLCVSGSCRTFGCDGRMDSQQVWDRCQVCGGDNSTCSPRKGSFTAGRAREYVTFLTVTPNLTSVYIANHRPLFTHLAVRIGGRYVVAGKMSISPNTTYPSLLEDGRVEYRVALTEDRLPRLEEIRIWGPLQEDADIQVGGVRAQLMHISWWSRPGLGERDLCARGRWPGGSSD

SEQ ID NO: 329 - protein, 276 aa, Homo Sapiens
MHQRHPRARCPPLCVAGILACGFLLGCWGPSHFQQSCLQALEPQAVSSYLSPGAPLKGRPPSPGFQRQRQRQRRAAGGILHLELLVAVGPDVFQAHQEDTERYVLTNLNIGAELLRDPSLGAQFRVHLVKMVILTEPEGAPNITANLTSSLLSVCGWSQTINPEDDTDPGHADLVLYITRFDLELPDGNRQVRGVTQLGGACSPTWSCLITEDTGFDLGVTIAHEIGHRICARPSPATQTRWTKAAAAASSFLSWMGQNVAWRSGAPRVAAAPWWS

SEQ ID NO: 330 - protein, 1371 aa, Homo Sapiens
MHQRHPRARCPPLCVAGILACGFLLGCWGPSHFQQSCLQALEPQAVSSYLSPGAPLKGRPPSPGFQRQRQRQRRAAGGILHLELLVAVGPDVFQAHQEDTERYVLTNLNIGAELLRDPSLGAQFRVHLVKMVILTEPEGAPNITANLTSSLLSVCGWSQTINPEDDTDPGHADLVLYITRFDLELPDGNRQVRGVTQLGGACSPTWSCLITEDTGFDLGVTIAHEIGHSFGLEHDGAPGSGCGPSGHVMASDGAAPRAGLAWSPCSRRQLLSLLSAGRARCVWDPPRPQPGSAGHPPDAQPGLYYSANEQCRVAFGPKAVACTFAREHLDMCQALSCHTDPLDQSSCSRLLVPLLDGTECGVEKWCSKGRCRSLVELTPIAAVHGRWSSWGPRSPCSRSCGGGVVTRRRQCNNPRPAFGGRACVGADLQAEMCNTQACEKTQLEFMSQQCARTDGQPLRSSPGGASFYHWGAAVPHSQGDALCRHMCRAIGESFIMKRGDSFLDGTRCMPSGPREDGTLSLCVSGSCRTFGCDGRMDSQQVWDRCQVCGGDNSTCSPRKGSFTAGRAREYVTFLTVTPNLTSVYIANHRPLFTHLAVRIGGRYVVAGKMSISPNTTYPSLLEDGRVEYRVALTEDRLPRLEEIRIWGPLQEDADIQVYRRYGEEYGNLTRPDITFTYFQPKPRQAWVWAAVRGPCSVSCGAGLRWVNYSCLDQARKELVETVQCQGSQQPPAWPEACVLEPCPPYWAVGDFGPCSASCGGGLRERPVRCVEAQGSLLKTLPPARCRAGAQQPAVALETCNPQPCPARWEVSEPSSCTSAGGAGLALENETCVPGADGLEAPVTEGPGSVDEKLPAPEPCVGMSCPPGWGHLDATSAGEKAPSPWGSIRTGAQAAHVWTPAAGSCSVSCGRGLMELRFLCMDSALRVPVQEELCGLASKPGSRREVCQAVPCPARWQYKLAACSVSCGRGVVRRILYCARAHGEDDGEEILLDTQCQGLPRPEPQEACSLEPCPPRWKVMSLGPCSASCGLGTARRSVACVQLDQGQDVEVDEAACAALVRPEASVPCLIADCTYRWHVGTWMECSVSCGDGIQRRRDTCLGPQAQAPVPADFCQHLPKPVTVRGCWAGPCVGQGACGRQHLEPTGTIDMRGPGQADCAVAIGRPLGEVVTLRVLESSLNCSAGDMLLLWGRLTWRKMCRKLLDMTFSSKTNTLVVRQRCGRPGGGVLLRYGSQLAPETFYRECDMQLFGPWGEIVSPSLSPATSNAGGCRLFINVAPHARIAIHALATNMGAGTEGANASYILIRDTHSLRTTAFHGQQVLYWESESSQAEMEFSEGFLKAQASLRGQYWTLQSWVPEMQDPQSWKGKEGT

SEQ ID NO: 331 - protein, 1340 aa, Homo Sapiens
MHQRHPRARCPPLCVAGILACGFLLGCWGPSHFQQSCLQALEPQAVSSYLSPGAPLKGRPPSPGFQRQRQRQRRAAGGILHLELLVAVGPDVFQAHQEDTERYVLTNLNIGAELLRDPSLGAQFRVHLVKMVILTEPEGAPNITANLTSSLLSVCGWSQTINPEDDTDPGHADLVLYITRFDLELPDGNRQVRGVTQLGGACSPTWSCLITEDTGFDLGVTIAHEIGHSFGLEHDGAPGSGCGPSGHVMASDGAAPRAGLAWSPCSRRQLLSLLSANEQCRVAFGPKAVACTFAREHLDMCQALSCHTDPLDQSSCSRLLVPLLDGTECGVEKWCSKGRCRSLVELTPIAAVHGRWSSWGPRSPCSRSCGGGVVTRRRQCNNPRPAFGGRACVGADLQAEMCNTQACEKTQLEFMSQQCARTDGQPLRSSPGGASFYHWGAAVPHSQGDALCRHMCRAIGESFIMKRGDSFLDGTRCMPSGPREDGTLSLCVSGSCRTFGCDGRMDSQQVWDRCQVCGGDNSTCSPRKGSFTAGRAREYVTFLTVTPNLTSVYIANHRPLFTHLAVRIGGRYVVAGKMSISPNTTYPSLLEDGRVEYRVALTEDRLPRLEEIRIWGPLQEDADIQVYRRYGEEYGNLTRPDITFTYFQPKPRQAWVWAAVRGPCSVSCGAGLRWVNYSCLDQARKELVETVQCQGSQQPPAWPEACVLEPCPPYWAVGDFGPCSASCGGGLRERPVRCVEAQGSLLKTLPPARCRAGAQQPAVALETCNPQPCPARWEVSEPSSCTSAGGAGLALENETCVPGADGLEAPVTEGPGSVDEKLPAPEPCVGMSCPPGWGHLDATSAGEKAPSPWGSIRTGAQAAHVWTPAAGSCSVSCGRGLMELRFLCMDSALRVPVQEELCGLASKPGSRREVCQAVPCPARWQYKLAACSVSCGRGVVRRILYCARAHGEDDGEEILLDTQCQGLPRPEPQEACSLEPCPPRWKVMSLGPCSASCGLGTARRSVACVQLDQGQDVEVDEAACAALVRPEASVPCLIADCTYRWHVGTWMECSVSCGDGIQRRRDTCLGPQAQAPVPADFCQHLPKPVTVRGCWAGPCVGQGACGRQHLEPTGTIDMRGPGQADCAVAIGRPLGEVVTLRVLESSLNCSAGDMLLLWGRLTWRKMCRKLLDMTFSSKTNTLVVRQRCGRPGGGVLLRYGSQLAPETFYRECDMQLFGPWGEIVSPSLSPATSNAGGCRLFINVAPHARIAIHALATNMGAGTEGANASYILIRDTHSLRTTAFHGQQVLYWESESSQAEMEFSEGFLKAQASLRGQYWTLQSWVPEMQDPQSWKGKEGT

SEQ ID NO: 332 - protein, 1427 aa, Homo Sapiens
MHQRHPRARCPPLCVAGILACGFLLGCWGPSHFQQSCLQALEPQAVSSYLSPGAPLKGRPPSPGFQRQRQRQRRAAGGILHLELLVAVGPDVFQAHQEDTERYVLTNLNIGAELLRDPSLGAQFRVHLVKMVILTEPEGAPNITANLTSSLLSVCGWSQTINPEDDTDPGHADLVLYITRFDLELPDGNRQVRGVTQLGGACSPTWSCLITEDTGFDLGVTIAHEIGHSFGLEHDGAPGSGCGPSGHVMASDGAAPRAGLAWSPCSRRQLLSLLSAGRARCVWDPPRPQPGSAGHPPDAQPGLYYSANEQCRVAFGPKAVACTFAREHLDMCQALSCHTDPLDQSSCSRLLVPLLDGTECGVEKWCSKGRCRSLVELTPIAAVHGRWSSWGPRSPCSRSCGGGVVTRRRQCNNPRPAFGGRACVGADLQAEMCNTQACEKTQLEFMSQQCARTDGQPLRSSPGGASFYHWGAAVPHSQGDALCRHMCRAIGESFIMKRGDSFLDGTRCMPSGPREDGTLSLCVSGSCRTFGCDGRMDSQQVWDRCQVCGGDNSTCSPRKGSFTAGRAREYVTFLTVTPNLTSVYIANHRPLFTHLAVRIGGRYVVAGKMSISPNTTYPSLLEDGRVEYRVALTEDRLPRLEEIRIWGPLQEDADIQVYRRYGEEYGNLTRPDITFTYFQPKPRQAWVWAAVRGPCSVSCGAGLRWVNYSCLDQARKELVETVQCQGSQQPPAWPEACVLEPCPPYWAVGDFGPCSASCGGGLRERPVRCVEAQGSLLKTLPPARCRAGAQQPAVALETCNPQPCPARWEVSEPSSCTSAGGAGLALENETCVPGADGLEAPVTEGPGSVDEKLPAPEPCVGMSCPPGWGHLDATSAGEKAPSPWGSIRTGAQAAHVWTPAAGSCSVSCGRGLMELRFLCMDSALRVPVQEELCGLASKPGSRREVCQAVPCPARWQYKLAACSVSCGRGVVRRILYCARAHGEDDGEEILLDTQCQGLPRPEPQEACSLEPCPPRWKVMSLGPCSASCGLGTARRSVACVQLDQGQDVEVDEAACAALVRPEASVPCLIADCTYRWHVGTWMECSVSCGDGIQRRRDTCLGPQAQAPVPADFCQHLPKPVTVRGCWAGPCVGQGTPSLVPHEEAAAPGRTTATPAGASLEWSQARGLLFSPAPQPRRLLPGPQENSVQSSACGRQHLEPTGTIDMRGPGQADCAVAIGRPLGEVVTLRVLESSLNCSAGDMLLLWGRLTWRKMCRKLLDMTFSSKTNTLVVRQRCGRPGGGVLLRYGSQLAPETFYRECDMQLFGPWGEIVSPSLSPATSNAGGCRLFINVAPHARIAIHALATNMGAGTEGANASYILIRDTHSLRTTAFHGQQVLYWESESSQAEMEFSEGFLKAQASLRGQYWTLQSWVPEMQDPQSWKGKEGT

SEQ ID NO: 333 - protein, 344 aa, Homo Sapiens
MHQRHPRARCPPLCVAGILACGFLLGCWGPSHFQQSCLQALEPQAVSSYLSPGAPLKGRPPSPGFQRQRQRQRRAAGGILHLELLVAVGPDVFQAHQEDTERYVLTNLNIGAELLRDPSLGAQFRVHLVKMVILTEPEGAPNITANLTSSLLSVCGWSQTINPEDDTDPGHADLVLYITRFDLELPDGNRQVRGVTQLGGACSPTWSCLITEDTGFDLGVTIAHEIGHSFGLEHDGAPGSGCGPSGHVMASDGAAPRAGLAWSPCSRRQLLSLLRPVPPSPLPLLATHLCAGRSLSLGPSQEPAPGGGRGPRTPVPTHKRPRFQTLPSSCPLLRPASSRCTPRD

SEQ ID NO: 334 - protein, 344 aa, Homo Sapiens; identical to SEQ ID NO: 333

SEQ ID NO: 335 - protein, 223 aa, Homo Sapiens
MRGPGQADCAVAIGRPLGEVVTLRVLESSLNCSAGDMLLLWGRLTWRKMCRKLLDMTFSSKTNTLVVRQRCGRPGGGVLLRYGSQLAPETFYRECDMQLFGPWGEIVSPSLSPATSNAGGCRLFINVAPHARIAIHALATNMGAGTEGANASYILIRDTHSLRTTAFHGQQVLYWESESSQAEMEFSEGFLKAQASLRGQYWTLQSWVPEMQDPQSWKGKEGT

SEQ ID NO: 336 - protein, 1226 aa, Homo Sapiens
MAPLRALLSYLLPLHCALCAAAGSRTPELHLSGKLSDYGVTVPCSTDFRGRFLSHVVSGPAAASAGSMVVDTPPTLPRHSSHLRVARSPLHPGGTLWPGRVGRHSLYFNVTVFGKELHLRLRPNRRLVVPGSSVEWQEDFRELFRQPLRQECVYTGGVTGMPGAAVAISNCDGLAGLIRTDSTDFFIEPLERGQQEKEASGRTHVVYRREAVQQEWAEPDGDLHNEAFGLGDLPNLLGLVGDQLGDTERKRRHAKPGSYSIEVLLVVDDSVVRFHGKEHVQNYVLTLMNIVDEIYHDESLGVHINIALVRLIMVGYRQSLSLIERGNPSRSLEQVCRWAHSQQRQDPSHAEHHDHVVFLTRQDFGPSGMQGYAPVTGMCHPLRSCALNHEDGFSSAFVIAHETGHVLGMEHDGQGNGCADETSLGSVMAPLVQAAFHRFHWSRCSKLELSRYLPSYDCLLDDPFDPAWPQPPELPGINYSMDEQCRFDFGSGYQTCLAFRTFEPCKQLWCSHPDNPYFCKTKKGPPLDGTECAPGKWCFKGHCIWKSPEQTYGQDGGWSSWTKFGSCSRSCGGGVRSRSRSCNNPSPAYGGRLCLGPMFEYQVCNSEECPGTYEDFRAQQCAKRNSYYVHQNAKHSWVPYEPDDDAQKCELICQSADTGDVVFMNQVVHDGTRCSYRDPYSVCARGECVPVGCDKEVGSMKADDKCGVCGGDNSHCRTVKGTLGKASKQAGALKLVQIPAGARHIQIEALEKSPHRIVVKNQVTGSFILNPKGKEATSRTFTAMGLEWEDAVEDAKESLKTSGPLPEAIAILALPPTEGGPRSSLAYKYVIHEDLLPLIGSNNVLLEEMDTYEWALKSWAPCSKACGGGIQFTKYGCRRRRDHHMVQRHLCDHKKRPKPIRRRCNQHPCSQPVWVTEEWGACSRSCGKLGVQTRGIQCLLPLSNGTHKVMPAKACAGDRPEARRPCLRVPCPAQWRLGAWSQCSATCGEGIQQRQVVCRTNANSLGHCEGDRPDTVQVCSLPACGGNHQNSTVRADVWELGTPEGQWVPQSEPLHPINKISSTEPCTGDRSVFCQMEVLDRYCSIPGYHRLCCVSCIKKASGPNPGPDPGPTSLPPFSTPGSPLPGPQDPADAAEPPGKPTGSEDHQHGRATQLPGALDTSSPGTQHPFAPETPIPGASWSISPTTPGGLPWGWTQTPTPVPEDKGQPGEDLRHPGTSLPAASPVT

SEQ ID NO: 337 - protein, 1223 aa, Homo Sapiens
MAPLRALLSYLLPLHCALCAAAGSRTPELHLSGKLSDYGVTVPCSTDFRGRFLSHVVSGPAAASAGSMVVDTPPTLPRHSSHLRVARSPLHPGGTLWPGRVGRHSLYFNVTVFGKELHLRLRPNRRLVVPGSSVEWQEDFRELFRQPLRQECVYTGGVTGMPGAAVAISNCDGLAGLIRTDSTDFFIEPLERGQQEKEASGRTHVVYRREAVQQEWAEPDGDLHNEAFGLGDLPNLLGLVGDQLGDTERKRRHAKPGSYSIEVLLVVDDSVVRFHGKEHVQNYVLTLMNIVDEIYHDESLGVHINIALVRLIMVGYRQSLSLIERGNPSRSLEQVCRWAHSQQRQDPSHAEHHDHVVFLTRQDFGPSGYAPVTGMCHPLRSCALNHEDGFSSAFVIAHETGHVLGMEHDGQGNGCADETSLGSVMAPLVQAAFHRFHWSRCSKLELSRYLPSYDCLLDDPFDPAWPQPPELPGINYSMDEQCRFDFGSGYQTCLAFRTFEPCKQLWCSHPDNPYFCKTKKGPPLDGTECAPGKWCFKGHCIWKSPEQTYGQDGGWSSWTKFGSCSRSCGGGVRSRSRSCNNPSPAYGGRLCLGPMFEYQVCNSEECPGTYEDFRAQQCAKRNSYYVHQNAKHSWVPYEPDDDAQKCELICQSADTGDVVFMNQVVHDGTRCSYRDPYSVCARGECVPVGCDKEVGSMKADDKCGVCGGDNSHCRTVKGTLGKASKQAGALKLVQIPAGARHIQIEALEKSPHRIVVKNQVTGSFILNPKGKEATSRTFTAMGLEWEDAVEDAKESLKTSGPLPEAIAILALPPTEGGPRSSLAYKYVIHEDLLPLIGSNNVLLEEMDTYEWALKSWAPCSKACGGGIQFTKYGCRRRRDHHMVQRHLCDHKKRPKPIRRRCNQHPCSQPVWVTEEWGACSRSCGKLGVQTRGIQCLLPLSNGTHKVMPAKACAGDRPEARRPCLRVPCPAQWRLGAWSQCSATCGEGIQQRQVVCRTNANSLGHCEGDRPDTVQVCSLPACGGNHQNSTVRADVWELGTPEGQWVPQSEPLHPINKISSTEPCTGDRSVFCQMEVLDRYCSIPGYHRLCCVSCIKKASGPNPGPDPGPTSLPPFSTPGSPLPGPQDPADAAEPPGKPTGSEDHQHGRATQLPGALDTSSPGTQHPFAPETPIPGASWSISPTTPGGLPWGWTQTPTPVPEDKGQPGEDLRHPGTSLPAASPVT

SEQ ID NO: 338 - protein, 950 aa, Homo Sapiens
MLLLGILTLAFAGRTAGGSEPEREVVVPIRLDPDINGRRYYWRGPEDSGDQGLIFQITAFQEDFYLHLTPDAQFLAPAFSTEHLGVPLQGLTGGSSDLRRCFYSGDVNAEPDSFAAVSLCGGLRGAFGYRGAEYVISPLPNASAPAAQRNSQGAHLLQRRGVPGGPSGDPTSRCGVASGWNPAILRALDPYKPRRAGFGESRSRRRSGRAKRFVSIPRYVETLVVADESMVKFHGADLEHYLLTLLATAARLYRHPSILNPINIVVVKVLLLRDRDSGPKVTGNAALTLRNFCAWQKKLNKVSDKHPEYWDTAILFTRQDLCGATTCDTLGMADVGTMCDPKRSCSVIEDDGLPSAFTTAHELGHVFNMPHDNVKVCEEVFGKLRANHMMSPTLIQIDRANPWSACSAAIITDFLDSGHGDCLLDQPSKPISLPEDLPGASYTLSQQCELAFGVGSKPCPYMQYCTKLWCTGKAKGQMVCQTRHFPWADGTSCGEGKLCLKGACVERHNLNKHRVDGSWAKWDPYGPCSRTCGGGVQLARRQCTNPTPANGGKYCEGVRVKYRSCNLEPCPSSASGKSFREEQCEAFNGYNHSTNRLTLAVAWVPKYSGVSPRDKCKLICRANGTGYFYVLAPKVVDGTLCSPDSTSVCVQGKCIKAGCDGNLGSKKRFDKCGVCGGDNKSCKKVTGLFTKPMHGYNFVVAIPAGASSIDIRQRGYKGLIGDDNYLALKNSQGKYLLNGHFVVSAVERDLVVKGSLLRYSGTGTAVESLQASRPILEPLTVEVLSVGKMTPPRVRYSFYLPKEPREDKSSHPKDPRGPSVLHNSVLSLSNQVEQPDDRPPARWVAGSWGPCSASCGSGLQKRAVDCRGSAGQRTVPACDAAHRPVETQACGEPCPTWELSAWSPCSKSCGRGFQRRSLKCVGHGGRLLARDQCNLHRKPQELDFCVLRPC

SEQ ID NO: 339 - protein, 1224 aa, Homo Sapiens
MKPRARGWRGLAALWMLLAQVAEQAPACAMGPAAAAPGSPSVPRPPPPAERPGWMEKGEYDLVSAYEVDHRGDYVSHEIMHHQRRRRAVPVSEVESLHLRLKGSRHDFHMDLRTSSSLVAPGFIVQTLGKTGTKSVQTLPPEDFCFYQGSLRSHRNSSVALSTCQGLSGMIRTEEADYFLRPLPSHLSWKLGRAAQGSSPSHVLYKRSTEPHAPGASEVLVTSRTWELAHQPLHSSDLRLGLPQKQHFCGRRKKYMPQPPKEDLFILPDEYKSCLRHKRSLLRSHRNEELNVETLVVVDKKMMQNHGHENITTYVLTILNMVSALFKDGTIGGNINIAIVGLILLEDEQPGLVISHHADHTLSSFCQWQSGLMGKDGTRHDHAILLTGLDICSWKNEPCDTLGFAPISGMCSKYRSCTINEDTGLGLAFTIAHESGHNFGMIHDGEGNMCKKSEGNIMSPTLAGRNGVFSWSPCSRQYLHKFLSTAQAICLADQPKPVKEYKYPEKLPGELYDANTQCKWQFGEKAKLCMLDFKKDICKALWCHRIGRKCETKFMPAAEGTICGHDMWCRGGQCVKYGDEGPKPTHGHWSDWSSWSPCSRTCGGGVSHRSRLCTNPKPSHGGKFCEGSTRTLKLCNSQKCPRDSVDFRAAQCAEHNSRRFRGRHYKWKPYTQVEDQDLCKLYCIAEGFDFFFSLSNKVKDGTPCSEDSRNVCIDGICERVGCDNVLGSDAVEDVCGVCNGNNSACTIHRGLYTKHHHTNQYYHMVTIPSGARSIRIYEMNVSTSYISVRNALRRYYLNGHWTVDWPGRYKFSGTTFDYRRSYNEPENLIATGPTNETLIVELLFQGRNPGVAWEYSMPRLGTEKQPPAQPSYTWAIVRSECSVSCGGGQMTVREGCYRDLKFQVNMSFCNPKTRPVTGLVPCKVSACPPSWSVGNWSACSRTCGGGAQSRPVQCTRRVHYDSEPVPASLCPQPAPSSRQACNSQSCPPAWSAGPWAECSHTCGKGWRKRAVACKSTNPSARAQLLPDAVCTSEPKPRMHEACLLQRCHKPKKLQWLVSAWSQCSVTCERGTQKRFLKCAEKYVSGKYRELASKKCSHLPKPSLELERACAPLPCPRHPPFAAAGPSRGSWFASPWSQCTASCGGGVQTRSVQCLAGGRPASGCLLHQKPSASLACNTHFCPIAEKKDAFCKDYFHWCYLVPQHGMCSHKFYGKQCCKTCSKSNL

SEQ ID NO: 340 - protein, 570 aa, Homo Sapiens
MKPRARGWRGLAALWMLLAQVAEQAPACAMGPAAAAPGSPSVPRPPPPAERPGWMEKGEYDLVSAYEVDHRGDYVSHEIMHHQRRRRAVPVSEVESLHLRLKGSRHDFHMDLRTSSSLVAPGFIVQTLGKTGTKSVQTLPPEDFCFYQGSLRSHRNSSVALSTCQGLSGMIRTEEADYFLRPLPSHLSWKLGRAAQGSSPSHVLYKRSTEPHAPGASEVLVTSRTWELAHQPLHSSDLRLGLPQKQHFCGRRKKYMPQPPKEDLFILPDEYKSCLRHKRSLLRSHRNEELNVETLVVVDKKMMQNHGHENITTYVLTILNMVSALFKDGTIGGNINIAIVGLILLEDEQPGLVISHHADHTLSSFCQWQSGLMGKDGTRHDHAILLTGLDICSWKNEPCDTLGFAPISGMCSKYRSCTINEDTGLGLAFTIAHESGHNFGMIHDGEGNMCKKSEGNIMSPTLAGRNGVFSWSPCSRQYLHKFLSTAQAICLADQPKPVKEYKYPEKLPGELYDANTQCKWQFGEKAKLCMLDFKKDICKALWCHRIGRKCETKFMPAAEGTICGHDMVRS

SEQ ID NO: 341 - protein, 1095 aa, Homo Sapiens
MCDGALLPPLVLPVLLLLVWGLDPGTAVGDAAADVEVVLPWRVRPDDVHLPPLPAAPGPRRRRRPRTPPAAPRARPGERALLLHLPAFGRDLYLQLRRDLRFLSRGFEVEEAGAARRRGRPAELCFYSGRVLGHPGSLVSLSACGAAGGLVGLIQLGQEQVLIQPLNNSQGPFSGREHLIRRKWSLTPSPSAEAQRPEQLCKVLTEKKKPTWGRPSRDWRERRNAIRLTSEHTVETLVVADADMVQYHGAEAAQRFILTVMNMVYNMFQHQSLGIKINIQVTKLVLLRQRPAKLSIGHHGERSLESFCHWQNEEYGGARYLGNNQVPGGKDDPPLVDAAVFVTRTDFCVHKDEPCDTVGIAYLGGVCSAKRKCVLAEDNGLNLAFTIAHELGHNLGMNHDDDHSSCAGRSHIMSGEWVKGRNPSDLSWSSCSRDDLENFLKSKVSTCLLVTDPRSQHTVRLPHKLPGMHYSANEQCQILFGMNATFCRNMEHLMCAGLWCLVEGDTSCKTKLDPPLDGTECGADKWCRAGECVSKTPIPEHVDGDWSPWGAWSMCSRTCGTGARFRQRKCDNPPPGPGGTHCPGASVEHAVCENLPCPKGLPSFRDQQCQAHDRLSPKKKGLLTAVVVDDKPCELYCSPLGKESPLLVADRVLDGTPCGPYETDLCVHGKCQKIGCDGIIGSAAKEDRCGVCSGDGKTCHLVKGDFSHARGTALKDSGKGSINSDWKIELPGEFQIAGTTVRYVRRGLWEKISAKGPTKLPLHLMVLLFHDQDYGIHYEYTVPVNRTAENQSEPEKPQDSLFIWTHSGWEGCSVQCGGGERRTIVSCTRIVNKTTTLVNDSDCPQASRPEPQVRRCNLHPCQSRWVAGPWSPCSATCEKGFQHREVTCVYQLQNGTHVATRPLYCPGPRPAAVQSCEGQDCLSIWEASEWSQCSASCGKGVWKRTVACTNSQGKCDASTRPRAEEACEDYSGCYEWKTGDWSTCSSTCGKGLQSRVVQCMHKVTGRHGSECPALSKPAPYRQCYQEVCNDRINANTITSPRLAALTYKCTRDQWTVYCRVIREKNLCQDMRWYQRCCQTCRDFYANKMRQPPPNS

SEQ ID NO: 342 - protein, 68 aa, Homo Sapiens
MCDGALLPPLVLPVLLLLVWGLDPGTGWPHSAWAGAGANPAPQQLPGPIQWTRTSDQAQMVLDPQPFC

SEQ ID NO: 343 - protein, 214 aa, Homo Sapiens
  misc_feature (1)..(1): Xaa can be any naturally occurring amino acid
XELYCSPLGKESPLLVADRVLDGTPCGPYETDLCVHGKCQKIGCDGIIGSAAKEDRCGVCSGDGKTCHLVKGDFSHARGTGYIEAAVIPAGARRIRVVEDKPAHSFLALKDSGKGSINSDWKIELPGEFQIAGTTVRYVRRGLWEKISAKGPTKLPLHLMVLLFHDQDYGIHYEYTVPVNRTAENQSEPEKPQDSLFIWTHSGWEGCSVQCGGG

SEQ ID NO: 344 - protein, 120 aa, Homo Sapiens
  misc_feature (1)..(1): Xaa can be any naturally occurring amino acid
XGRPAELCFYSGRVLGHPGSLVSLSACGAAGGLVGLIQLGQEQVLIQPLNNSQGPFSGREHLIRRKWSLTPSPSAEAQRPEQLCKVLTVPQCLGLTWEDLKSGGWSDLEVPHSCVWPGGG

SEQ ID NO: 345 - protein, 1221 aa, Homo Sapiens
MECALLLACAFPAAGSGPPRGLAGLGRVAKALQLCCLCCASVAAALASDSSSGASGLNDDYVFVTPVEVDSAGSYISHDILHNGRKKRSAQNARSSLHYRFSAFGQELHLELKPSAILSSHFIVQVLGKDGASETQKPEVQQCFYQGFIRNDSSSSVAVSTCAGLSGLIRTRKNEFLISPLPQLLAQEHNYSSPAGHHPHVLYKRTAEEKIQRYRGYPGSGRNYPGYSPSHIPHASQSRETEYHHRRLQKQHFCGRRKKYAPKPPTEDTYLRFDEYGSSGRPRRSAGKSQKGLNVETLVVADKKMVEKHGKGNVTTYILTVMNMVSGLFKDGTIGSDINVVVVSLILLEQEPGGLLINHHADQSLNSFCQWQSALIGKNGKRHDHAILLTGFDICSWKNEPCDTLGFAPISGMCSKYRSCTINEDTGLGLAFTIAHESGHNFGMIHDGEGNPCRKAEGNIMSPTLTGNNGVFSWSSCSRQYLKKFLSTPQAGCLVDEPKQAGQYKYPDKLPGQIYDADTQCKWQFGAKAKLCSLGFVKDICKSLWCHRVGHRCETKFMPAAEGTVCGLSMWCRQGQCVKFGELGPRPIHGQWSAWSKWSECSRTCGGGVKFQERHCNNPKPQYGGLFCPGSSRIYQLCNINPCNENSLDFRAQQCAEYNSKPFRGWFYQWKPYTKVEEEDRCKLYCKAENFEFFFAMSGKVKDGTPCSPNKNDVCIDGVCELVGCDHELGSKAVSDACGVCKGDNSTCKFYKGLYLNQHKANEYYPVVLIPAGARSIEIQELQVSSSYLAVRSLSQKYYLTGGWSIDWPGEFPFAGTTFEYQRSFNRPERLYAPGPTNETLVFEILMQGKNPGIAWKYALPKVMNGTPPATKRPAYTWSIVQSECSVSCGGGYINVKAICLRDQNTQVNSSFCSAKTKPVTEPKICNAFSCPAYWMPGEWSTCSKACAGGQQSRKIQCVQKKPFQKEEAVLHSLCPVSTPTQVQACNSHACPPQWSLGPWSQCSKTCGRGVRKRELLCKGSAAETLPESQCTSLPRPELQEGCVLGRCPKNSRLQWVASSWSECSATCGLGVRKREMKCSEKGFQGKLITFPERRCRNIKKPNLDLEETCNRRACPAHPVYNMVAGWYSLPWQQCTVTCGGGVQTRSVHCVQQGRPSSSCLLHQKPPVLRACNTNFCPAPEKREDPSCVDFFNWCHLVPQHGVCNHKFYGKQCCKSCTRKI

SEQ ID NO: 346 - protein, 274 aa, Homo Sapiens
MECALLLACAFPAAGSGPPRGLAGLGRVAKALQLCCLCCASVAAALASDSSSGASGLNDDYVFVTPVEVDSAGSYISHDILHNGRKKRSAQNARSSLHYRFSAFGQELHLELKPSAILSSHFIVQVLGKDGASETQKPEVQQCFYQGFIRNDSSSSVAVSTCAGLSGLIRTRKNEFLISPLPQLLAQEHNYSSPAGHHPHVLYKRTAEEKIQRYRGYPGSGRNYPGYSPSHIPHASQSRETEYHHRRLQKQHFCGRRKKCICSQASHRGHLSKV

SEQ ID NO: 347 - protein, 62 aa, Homo Sapiens
  misc_feature (1)..(1): Xaa can be any naturally occurring amino acid
XQGRPSSSCLLHQKPPVLRACNTNFCPAPEKRDSAGSQLPCCDGPQAVHEEGLRFPDNHWAM

SEQ ID NO: 348 - protein, 186 aa, Homo Sapiens
  misc_feature (1)..(1): Xaa can be any naturally occurring amino acid
XVDSAGSYISHDILHNGRKKRSAQNARSSLHYRFSAFGQELHLELKPSAILSSHFIVQVLGKDGASETQKPEVQQCFYQGFIRNDSSSSVAVSTCAGLLLAQEHNYSSPAGHHPHVLYKRTAEEKIQRYRGYPGSGRNYPGYSPSHIPHASQSRETEYHHRRLQKQHFCGRRKKCICSQASHRGHL

SEQ ID NO: 349 - protein, 37 aa, Homo Sapiens
MGKNREMRLTHICCCCLLYQLGFLSNGIVSDGIYTAQ

SEQ ID NO: 350 - protein, 1213 aa, Homo Sapiens
MGKNREMRLTHICCCCLLYQLGFLSNGIVSELQFAPDREEWEVVFPALWRREPVDPAGGSGGSADPGWVRGVGGGGSARAQAAGSSREVRSVAPVPLEEPVEGRSESRLRPPPPSEGEEDEELESQELPRGSSGAAALSPGAPASWQPPPPPQPPPSPPPAQHAEPDGDEVLLRIPAFSRDLYLLLRRDGRFLAPRFAVEQRPNPGPGPTGAASAPQPPAPPDAGCFYTGAVLRHPGSLASFSTCGGGLMGFIQLNEDFIFIEPLNDTMAITGHPHRVYRQKRSMEEKVTEKSALHSHYCGIISDKGRPRSRKIAESGRGKRYSYKLPQEYNIETVVVADPAMVSYHGADAARRFILTILNMVFNLFQHKSLSVQVNLRVIKLILLHETPPELYIGHHGEKMLESFCKWQHEEFGKKNDIHLEMSTNWGEDMTSVDAAILITRKDFCVHKDEPCDTVGIAYLSGMCSEKRKCIIAEDNGLNLAFTIAHEMGHNMGINHDNDHPSCADGLHIMSGEWIKGQNLGDVSWSRCSKEDLERFLRSKASNCLLQTNPQSVNSVMVPSKLPGMTYTADEQCQILFGPLASFCQEMQHVICTGLWCKVEGEKECRTKLDPPMDGTDCDLGKWCKAGECTSRTSAPEHLAGEWSLWSPCSRTCSAGISSRERKCPGLDSEARDCNGPRKQYRICENPPCPAGLPGFRDWQCQAYSVRTSSPKHILQWQAVLDEEKPCALFCSPVGKEQPILLSEKVMDGTSCGYQGLDICANGRCQKVGCDGLLGSLAREDHCGVCNGNGKSCKIIKGDFNHTRGAGYVEVLVIPAGARRIKVVEEKPAHSYLALRDAGKQSINSDWKIEHSGAFNLAGTTVHYVRRGLWEKISAKGPTTAPLHLLVLLFQDQNYGLHYEYTIPSDPLPENQSSKAPEPLFMWTHTSWEDCDATCGGGERKTTVSCTKIMSKNISIVDNEKCKYLTKPEPQIRKCNEQPCQTRWMMTEWTPCSRTCGKGMQSRQVACTQQLSNGTLIRARERDCIGPKPASAQRCEGQDCMTVWEAGVWSECSVKCGKGIRHRTVRCTNPRKKCVLSTRPREAEDCEDYSKCYVWRMGDWSKCSITCGKGMQSRVIQCMHKITGRHGNECFSSEKPAAYRPCHLQPCNEKINVNTITSPRLAALTFKCLGDQWPVYCRVIREKNLCQDMRWYQRCCETCRDFYAQKLQQKS

SEQ ID NO: 351 - protein, 1207 aa, Homo Sapiens
MRLTHICCCCLLYQLGFLSNGIVSELQFAPDREEWEVVFPALWRREPVDPAGGSGGSADPGWVRGVGGGGSARAQAAGSSREVRSVAPVPLEEPVEGRSESRLRPPPPSEGEEDEELESQELPRGSSGAAALSPGAPASWQPPPPPQPPPSPPPAQHAEPDGDEVLLRIPAFSRDLYLLLRRDGRFLAPRFAVEQRPNPGPGPTGAASAPQPPAPPDAGCFYTGAVLRHPGSLASFSTCGGGLMGFIQLNEDFIFIEPLNDTMAITGHPHRVYRQKRSMEEKVTEKSALHSHYCGIISDKGRPRSRKIAESGRGKRYSYKLPQEYNIETVVVADPAMVSYHGADAARRFILTILNMVFNLFQHKSLSVQVNLRVIKLILLHETPPELYIGHHGEKMLESFCKWQHEEFGKKNDIHLEMSTNWGEDMTSVDAAILITRKDFCVHKDEPCDTVGIAYLSGMCSEKRKCIIAEDNGLNLAFTIAHEMGHNMGINHDNDHPSCADGLHIMSGEWIKGQNLGDVSWSRCSKEDLERFLRSKASNCLLQTNPQSVNSVMVPSKLPGMTYTADEQCQILFGPLASFCQEMQHVICTGLWCKVEGEKECRTKLDPPMDGTDCDLGKWCKAGECTSRTSAPEHLAGEWSLWSPCSRTCSAGISSRERKCPGLDSEARDCNGPRKQYRICENPPCPAGLPGFRDWQCQAYSVRTSSPKHILQWQAVLDEEKPCALFCSPVGKEQPILLSEKVMDGTSCGYQGLDICANGRCQKVGCDGLLGSLAREDHCGVCNGNGKSCKIIKGDFNHTRGAGYVEVLVIPAGARRIKVVEEKPAHSYLALRDAGKQSINSDWKIEHSGAFNLAGTTVHYVRRGLWEKISAKGPTTAPLHLLVLLFQDQNYGLHYEYTIPSDPLPENQSSKAPEPLFMWTHTSWEDCDATCGGGERKTTVSCTKIMSKNISIVDNEKCKYLTKPEPQIRKCNEQPCQTRWMMTEWTPCSRTCGKGMQSRQVACTQQLSNGTLIRARERDCIGPKPASAQRCEGQDCMTVWEAGVWSECSVKCGKGIRHRTVRCTNPRKKCVLSTRPREAEDCEDYSKCYVWRMGDWSKCSITCGKGMQSRVIQCMHKITGRHGNECFSSEKPAAYRPCHLQPCNEKINVNTITSPRLAALTFKCLGDQWPVYCRVIREKNLCQDMRWYQRCCETCRDFYAQKLQQKS

SEQ ID NO: 352 - protein, 145 aa, Homo Sapiens
  misc_feature (1)..(1): Xaa can be any naturally occurring amino acid
XDAGCFYTGAVLRHPGSLASFSTCGGGLMGFIQLNEDFIFIEPLNDTMAITGHPHRVYRQKRSMEEKVTEKSALHSHYCGIISDKGRPRSRKIAESGRGKRYSYKLPQEYNIETVVVADPAMVSYHGADAARRFILTILNMVGKL

SEQ ID NO: 353 - protein, 1211 aa, Homo Sapiens
MDPPAGAARRLLCPALLLLLLLLPPPLLPPPPPPANARLAAAADPPGGPLGHGAERILAVPVRTDAQGRLVSHVVSAATSRAGVRARRAAPVRTPSFPGGNEEEPGSHLFYNVTVFGRDLHLRLRPNARLVAPGATMEWQGEKGTTRVEPLLGSCLYVGDVAGLAEASSVALSNCDGLAGLIRMEEEEFFIEPLEKGLAAQEAEQGRVHVVYRRPPTSPPLGGPQALDTGASLDSLDSLSRALGVLEEHANSSRRRARRHAADDDYNIEVLLGVDDSVVQFHGKEHVQKYLLTLMNIVNEIYHDESLGAHINVVLVRIILLSYGKSMSLIEIGNPSQSLENVCRWAYLQQKPDTGHDEYHDHAIFLTRQDFGPSGMQGYAPVTGMCHPVRSCTLNHEDGFSSAFVVAHETGHVLGMEHDGQGNRCGDEVRLGSIMAPLVQAAFHRFHWSRCSQQELSRYLHSYDCLLDDPFAHDWPALPQLPGLHYSMNEQCRFDFGLGYMMCTAFRTFDPCKQLWCSHPDNPYFCKTKKGPPLDGTMCAPGKHCFKGHCIWLTPDILKRDGSWGAWSPFGSCSRTCGTGVKFRTRQCDNPHPANGGRTCSGLAYDFQLCSRQDCPDSLADFREEQCRQWDLYFEHGDAQHHWLPHEHRDAKERCHLYCESRETGEVVSMKRMVHDGTRCSYKDAFSLCVRGDCRKVGCDGVIGSSKQEDKCGVCGGDNSHCKVVKGTFTRSPKKHGYIKMFEIPAGARHLLIQEVDATSHHLAVKNLETGKFILNEENDVDASSKTFIAMGVEWEYRDEDGRETLQTMGPLHGTITVLVIPVGDTRVSLTYKYMIHEDSLNVDDNNVLEEDSVVYEWALKKWSPCSKPCGGGSQFTKYGCRRRLDHKMVHRGFCAALSKPKAIRRACNPQECSQPVWVTGEWEPCSQTCGRTGMQVRSVRCIQPLHDNTTRSVHAKHCNDARPESRRACSRELCPGRWRAGPWSQCSVTCGNGTQERPVLCRTADDSFGICQEERPETARTCRLGPCPRNISDPSKKSYVVQWLSRPDPDSPIRKISSKGHCQGDKSIFCRMEVLSRYCSIPGYNKLCCKSCNLYNNLTNVEGRIEPPPGKHNDIDVFMPTLPVPTVAMEVRPSPSTPLEVPLNASSTNATEDHPETNAVDEPYKIHGLEDEVQPPNLIPRRPSPYEKTRNQRIQELIDEMRKKEMLGKF

SEQ ID NO: 354 - protein, 566 aa, Homo Sapiens
MDPPAGAARRLLCPALLLLLLLLPPPLLPPPPPPANARLAAAADPPGGPLGHGAERILAVPVRTDAQGRLVSHVVSAATSRAGVRARRAAPVRTPSFPGGNEEEPGSHLFYNVTVFGRDLHLRLRPNARLVAPGATMEWQGEKGTTRVEPLLGSCLYVGDVAGLAEASSVALSNCDGLAGLIRMEEEEFFIEPLEKGLAAQEAEQGRVHVVYRRPPTSPPLGGPQALDTGASLDSLDSLSRALGVLEEHANSSRRRARRHAADDDYNIEVLLGVDDSVVQFHGKEHVQKYLLTLMNIVNEIYHDESLGAHINVVLVRIILLSYGKSMSLIEIGNPSQSLENVCRWAYLQQKPDTGHDEYHDHAIFLTRQDFGPSGMQGYAPVTGMCHPVRSCTLNHEDGFSSAFVVAHETGHVLGMEHDGQGNRCGDEVRLGSIMAPLVQAAFHRFHWSRCSQQELSRYLHSYDCLLDDPFAHDWPALPQLPGLHYSMNEQCRFDFGLGYMMCTAFRTFDPCKQLWCSHPDNPYFCKTKKGPPLDGTMCAPGKFRPGAVAHACYPSTLGGQGRWIA

SEQ ID NO: 355 - protein, 106 aa, Homo Sapiens
VTCGNGTQERPVLCRTADDSFGICQEERPETARTCRLGPCPRNISDPSKKSYVVQWLSRPDPDSPIRKISSSNRPVYNSASALQCMPCALWSLPWAPLLSVYGKLP

SEQ ID NO: 356 - protein, 1910 aa, Homo Sapiens
MWVAKWLTGLLYHLSLFITRSWEVDFHPRQEALVRTLTSYEVVIPERVNEFGEVFPQSHHFSRQKRSSEALEPMPFRTHYRFTAYGQLFQLNLTADASFLAAGYTEVHLGTPERGAWESDAGPSDLRHCFYRGQVNSQEDYKAVVSLCGGLTGTFKGQNGEYFLEPIMKADGNEYEDGHNKPHLIYRQDLNNSFLQTLKYCSVSESQIKETSLPFHTYSNMNEDLNVMKERVLGHTSKNVPLKDERRHSRKKRLISYPRYIEIMVTADAKVVSAHGSNLQNYILTLMSIVATIYKDPSIGNLIHIVVVKLVMIHREEEGPVINFDGATTLKNFCSWQQTQNDLDDVHPSHHDTAVLITREDICSSKEKCNMLGLSYLGTICDPLQSCFINEEKGLISAFTIAHELGHTLGVQHDDNPRCKEMKVTKYHVMAPALSFHMSPWSWSNCSRKYVTEFLDTGYGECLLDKPDEEIYNLPSELPGSRYDGNKQCELAFGPGSQMCPHINICMHLWCTSTEKLHKGCFTQHVPPADGTDCGPGMHCRHGLCVNKETETRPVNGEWGPWEPYSSCSRTCGGGIESATRRCNRPEPRNGGNYCVGRRMKFRSCNTDSCPKGTQDFREKQCSDFNGKHLDISGIPSNVRWLPRYSGIGTKDRCKLYCQVAGTNYFYLLKDMVEDGTPCGTETHDICVQGQCMAAGCDHVLNSSAKIDKCGVCGGDNSSCKTITGVFNSSHYGYNVVVKIPAGATNVDIRQYSYSGQPDDSYLALSDAEGNFLFNGNFLLSTSKKEINVQGTRTVIEYSGSNNAVERINSTNRQEKELILQVLCVGNLYNPDVHYSFNIPLEERSDMFTWDPYGPWEGCTKMCQGLQRRNITCIHKSDHSVVSDKECDHLPLPSFVTQSCNTDCELRWHVIGKSECSSQCGQGYRTLDIHCMKYSIHEGQTVQVDDHYCGDQLKPPTQELCHGNCVFTRWHYSEWSQCSRSCGGGERSRESYCMNNFGHRLADNECQELSRVTRENCNEFSCPSWAASEWSECLVTCGKGTKQRQVWCQLNVDHLSDGFCNSSTKPESLSPCELHTCASWQVGPWGPCTTTCGHGYQMRDVKCVNELASAVLEDTECHEASRPSDRQSCVLTPCSFISKLETALLPTVLIKKMAQWRHGSWTPCSVSCGRGTQARYVSCRDALDRIADESYCAHLPRPAEIWDCFTPCGEWQAGDWSPCSASCGHGKTTRQVLCMNYHQPIDENYCDPEVRPLMEQECSLAACPPAHSHFPSSPVQPSYYLSTNLPLTQKLEDNENQVVHPSVRGNQWRTGPWGSCSSSCSGGLQHRAVVCQDENGQSASYCDAASKPPELQQCGPGPCPQWNYGNWGECSQTCGGGIKSRLVICQFPNGQILEDHNCEIVNKPPSVIQCHMHACPADVSWHQEPWTSCSASCGKGRKYREVFCIDQFQRKLEDTNCSQVQKPPTHKACRSVRCPSWKANSWNECSVTCGSGVQQRDVYCRLKGVGQVVEEMCDQSTRPCSQRRCWSQDCVQHKGMERGRLNCSTSCERKDSHQRMECTDNQIRQVNEIVYNSSTISLTSKNCRNPPCNYIVVTADSSQCANNCGFSYRQRITYCTEIPSTKKHKLHRLRPIVYQECPVVPSSQVYQCINSCLHLATWKVGKWSKCSVTCGIGIMKRQVKCITKHGLSSDLCLNHLKPGAQKKCYANDCKSFTTCKEIQVKNHIRKDGDYYLNIKGRIIKIYCADMYLENPKEYLTLVQGEENFSEVYGFRLKNPYQCPFNGSRREDCECDNGHLAAGYTVFSKIRIDLTSMQIKTTDLLFSKTIFGNAVPFATAGDCYSAFRCPQGQFSINLSGTGMKISSTAKWLTQGSYTSVSIRRSEDGTRFFGKCGGYCGKCLPHMTTGLPIQVI

SEQ ID NO: 357 - protein, 1504 aa, Homo Sapiens
MWVAKWLTGLLYHLSLFITRSWEVDFHPRQEALVRTLTSYEVVIPERVNEFGEVFPQSHHFSRQKRSSEALEPMPFRTHYRFTAYGQLFQLNLTADASFLAAGYTEVHLGTPERGAWESDAGPSDLRHCFYRGQVNSQEDYKAVVSLCGGLTGTFKGQNGEYFLEPIMKADGNEYEDGHNKPHLIYRQDLNNSFLQTLKYCSVSESQIKETSLPFHTYSNMNEDLNVMKERVLGHTSKNVPLKDERRHSRKKRLISYPRYIEIMVTADAKVVSAHGSNLQNYILTLMSIVATIYKDPSIGNLIHIVVVKLVMIHREEEGPVINFDGATTLKNFCSWQQTQNDLDDVHPSHHDTAVLITREDICSSKEKCNMLGLSYLGTICDPLQSCFINEEKGLISAFTIAHELGHTLGVQHDDNPRCKEMKVTKYHVMAPALSFHMSPWSWSNCSRKYVTEFLDTGYGECLLDKPDEEIYNLPSELPGSRYDGNKQCELAFGPGSQMCPHINICMHLWCTSTEKLHKGCFTQHVPPADGTDCGPGMHCRHGLCVNKETETRPVNGEWGPWEPYSSCSRTCGGGIESATRRCNRPEPRNGGNYCVGRRMKFRSCNTDSCPKGTQDFREKQCSDFNGKHLDISGIPSNVRWLPRYSGIGTKDRCKLYCQVAGTNYFYLLKDMVEDGTPCGTETHDICVQGQCMAAGCDHVLNSSAKIDKCGVCGGDNSSCKTITGVFNSSHYGYNVVVKIPAGATNVDIRQYSYSGQPDDSYLALSDAEGNFLFNGNFLLSTSKKEINVQGTRTVIEYSGSNNAVERINSTNRQEKELILQVLCVGNLYNPDVHYSFNIPLEERSDMFTWDPYGPWEGCTKMCQGLQRRNITCIHKSDHSVVSDKECDHLPLPSFVTQSCNTDCELRWHVIGKSECSSQCGQGYRTLDIHCMKYSIHEGQTVQVDDHYCGDQLKPPTQELCHGNCVFTRWHYSEWSQCSRSCGGGERSRESYCMNNFGHRLADNECQELSRVTRENCNEFSCPSWAASEWSECLVTCGKGTKQRQVWCQLNVDHLSDGFCNSSTKPESLSPCELHTCASWQVGPWGPCTTTCGHGYQMRDVKCVNELASAVLEDTECHEASRPSDRQSCVLTPCSFISKLETALLPTVLIKKMAQWRHGSWTPCSVSCGRGTQARYVSCRDALDRIADESYCAHLPRPAEIWDCFTPCGEWQAGDWSPCSASCGHGKTTRQVLCMNYHQPIDENYCDPEVRPLMEQECSLAACPPAHSHFPSSPVQPSYYLSTNLPLTQKLEDNENQVVHPSVRGNQWRTGPWGSCSSSCSGGLQHRAVVCQDENGQSASYCDAASKPPELQQCGPGPCPQWNYGNWGECSQTCGGGIKSRLVICQFPNGQILEDHNCEIVNKPPSVIQCHMHACPADVSWHQEPWTSEDLKVKLLPQRTIILWELMKNIFCHGKHSHMYLINVVTDHLLYPRHCDPETIETYFLSLWSLQFTWGDLKYYKNSL

SEQ ID NO: 358 - protein, 1504 aa, Homo Sapiens [sequence omitted]

SEQ ID NO: 359 - protein, 634 aa, Homo Sapiens
YSFNIPLEERSDMFTWDPYGPWEGCTKMCQGLQRRNITCIHKSDHSVVSDKECDHLPLPSFVTQSCNTDCELRWHVIGKSECSSQCGQGYRTLDIHCMKYSIHEGQTVQVDDHYCGDQLKPPTQELCHGNCVFTRWHYSEWSQCSRSCGGGERSRESYCMNNFGHRLADNECQELSRVTRENCNEFSCPSWAASEWSECLVTCGKGTKQRQVWCQLNVDHLSDGFCNSSTKPESLSPCELHTCASWQVGPWGPCTTTCGHGYQMRDVKCVNELASAVLEDTECHEASRPSDRQCSVSCGRGTQARYVSCRDALDRIADESYCAHLPRPAEIWDCFTPCGEWQAGDWSPCSASCGHGKTTRQVLCMNYHQPIDENYCDPEVRPLMEQECSLAACPPAHSHFPSSPVQPSYYLSTNLPLTQKLEDNENQVVHPSVRGNQWRTGPWGSCSSSCSGGLQHRAVVCQDENGQSASYCDAASKPPELQQCGPGPCPQWNYGNWGECSQTCGGGIKSRLVICQFPNGQILEDHNCEIVNKPPSVIQCHMHACPADVSWHQEPWTSEDLKVKLLPQRTIILWELMKNIFCHGKHSHMYLINVVTDHLLYPRHCDPETIETYFLSLWSLQFTWGDLKYYKNSL

SEQ ID NO: 360 - protein, 1205 aa, Homo Sapiens
MVLLSLWLIAAALVEVRTSADGQAGNEEMVQIDLPIKRYREYELVTPVSTNLEGRYLSHTLSASHKKRSARDVSSNPEQLFFNITAFGKDFHLRLKPNTQLVAPGAVVEWHETSLVPGNITDPINNHQPGSATYRIRRTEPLQTNCAYVGDIVDIPGTSVAISNCDGLAGMIKSDNEEYFIEPLERGKQMEEEKGRIHVVYKRSAVEQAPIDMSKDFHYRESDLEGLDDLGTVYGNIHQQLNETMRRRRHAGENDYNIEVLLGVDDSVVRFHGKEHVQNYLLTLMNIVNEIYHDESLGVHINVVLVRMIMLGYAKSISLIERGNPSRSLENVCRWASQQQRSDLNHSEHHDHAIFLTRQDFGPAGMQGYAPVTGMCHPVRSCTLNHEDGFSSAFVVAHETGHVLGMEHDGQGNRCGDETAMGSVMAPLVQAAFHRYHWSRCSGQELKRYIHSYDCLLDDPFDHDWPKLPELPGINYSMDEQCRFDFGVGYKMCTAFRTFDPCKQLWCSHPDNPYFCKTKKGPPLDGTECAAGKWCYKGHCMWKNANQQKQDGNWGSWTKFGSCSRTCGTGVRFRTRQCNNPMPINGGQDCPGVNFEYQLCNTEECQKHFEDFRAQQCQQRNSHFEYQNTKHHWLPYEHPDPKKRCHLYCQSKETGDVAYMKQLVHDGTHCSYKDPYSICVRGECVKVGCDKEIGSNKVEDKCGVCGGDNSHCRTVKGTFTRTPRKLGYLKMFDIPPGARHVLIQEDEASPHILAIKNQATGHYILNGKGEEAKSRTFIDLGVEWDYNIEDDIESLHTDGPLHDPVIVLIIPQENDTRSSLTYKYIIHEDSVPTINSNNVIQEELDTFEWALKSWSQCSKPCGGGFQYTKYGCRRKSDNKMVHRSFCEANKKPKPIRRMCNIQECTHPLWVAEEWEHCTKTCGSSGYQLRTVRCLQPLLDGTNRSVHSKYCMGDRPESRRPCNRVPCPAQWKTGPWSECSVTCGEGTEVRQVLCRAGDHCDGEKPESVRACQLPPCNDEPCLGDKSIFCQMEVLARYCSIPGYNKLCCESCSKRSSTLPPPYLLEAAETHDDVISNPSDLPRSLVMPTSLVPYHSETPAKKMSLSSISSVGGPNAYAAFRPNSKPDGANLRQRSAQQAGSKTVRLVTVPSSPPTKRVHLSSASQMAAASFFAASDSIGASSQARTSKKDGKIIDNRRPTRSSTLER

SEQ ID NO: 361 - protein, 1205 aa, Homo Sapiens; identical to SEQ ID NO: 360

SEQ ID NO: 362 - protein, 930 aa, Homo Sapiens
MLLGWASLLLCAFRLPLAAVGPAATPAQDKAGQPPTAAAAAQPRRRQGEEVQERAEPPGHPHPLAQRRRSKGLVQNIDQLYSGGGKVGYLVYAGGRRFLLDLERDGSVGIAGFVPAGGGTSAPWRHRSHCFYRGTVDGSPRSLAVFDLCGGLDGFFAVKHARYTLKPLLRGPWAEEEKGRVYGDGSARILHVYTREGFSFEALPPRASCETPASTPEAHEHAPAHSNPSGRAALASQLLDQSALSPAGGSGPQTWWRRRRRSISRARQVELLLVADASMARLYGRGLQHYLLTLASIANRLYSHASIENHIRLAVVKVVVLGDKDKSLEVSKNAATTLKNFCKWQHQHNQLGDDHEEHYDAAILFTREDLCGHHSCDTLGMADVGTICSPERSCAVIEDDGLHAAFTVAHEIGHLLGLSHDDSKFCEETFGSTEDKRLMSSILTSIDASKPWSKCTSATITEFLDDGHGNCLLDLPRKQILGPEELPGQTYDATQQCNLTFGPEYSVCPGMDVCARLWCAVVRQGQMVCLTKKLPAVEGTPCGKGRICLQGKCVDKTKKKYYSTSSHGNWGSWGSWGQCSRSCGGGVQFAYRHCNNPAPRNNGRYCTGKRAIYRSCSLMPCPPNGKSFRHEQCEAKNGYQSDAKGVKTFVEWVPKYAGVLPADVCKLTCRAKGTGYYVVFSPKVTDGTECRLYSNSVCVRGKCVRTGCDGIIGSKLQYDKCGVCGGDNSSCTKIVGTFNKKSKGYTDVVRIPEGATHIKVRQFKAKDQTRFTAYLALKKKNGEYLINGKYMISTSETIIDINGTVMNYSGWSHRDDFLHGMGYSATKEILIVQILATDPTKPLDVRYSFFVPKKSTPKVNSVTSHGSNKVGSHTSQPQWVTGPWLACSRTCDTGWHTRTVQCQDGNRKLAKGCPLSQRPSAFKQCLLKKC

SEQ ID NO: 363 - protein, 292 aa, Homo Sapiens
MEILWKTLTWILSLIMASSEFHSDHRLSYSSQEEFLTYLEHYQLTIPIRVDQNGAFLSFTVKNDKHSRRRRSMDPIDPQQAVSKLFFKLSAYGKHFHLNLTLNTDFVSKHFTVEYWGKDGPQWKHDFLDNCHYTGYLQDQRSTTKVALSNCVGLHGVIATEDEEYFIEPLKNTTEDSKHFSYENGHPHVIYKKSALQQRHLYDHSHCGVSDFTRSGKPWWLNDTSTVSYSLPINNTHIHHRQKRSVSIERFVETLVVADKMMVGYHGRKDIEHYILSVMNIVRLPNFTVIPA

SEQ ID NO: 364 - protein, 1117 aa, Homo Sapiens
MEILWKTLTWILSLIMASSEFHSDHRLSYSSQEEFLTYLEHYQLTIPIRVDQNGAFLSFTVKNDKHSRRRRSMDPIDPQQAVSKLFFKLSAYGKHFHLNLTLNTDFVSKHFTVEYWGKDGPQWKHDFLDNCHYTGYLQDQRSTTKVALSNCVGLHGVIATEDEEYFIEPLKNTTEDSKHFSYENGHPHVIYKKSALQQRHLYDHSHCGVSDFTRSGKPWWLNDTSTVSYSLPINNTHIHHRQKRSVSIERFVETLVVADKMMVGYHGRKDIEHYILSVMNIVAKLYRDSSLGNVVNIIVARLIVLTEDQPNLEINHHADKSLDSFCKWQKSILSHQSDGNTIPENGIAHHDNAVLITRYDICTYKNKPCGTLGLASVAGMCEPERSCSINEDIGLGSAFTIAHEIGHNFGMNHDGIGNSCGTKGHEAAKLMAAHITANTNPFSWSACSRDYITSFLDSGRGTCLDNEPPKRDFLYPAVAPGQVYDADEQCRFQYGATSRQCKYGEVCRELWCLSKSNRCVTNSIPAAEGTLCQTGNIEKGWCYQGDCVPFGTWPQSIDGGWGPWSLWGECSRTCGGGVSSSLRHCDSPAPSGGGKYCLGERKRYRSCNTDPCPLGSRDFREKQCADFDNMPFRGKYYNWKPYTGGGVKPCALNCLAEGYNFYTERAPAVIDGTQCNADSLDICINGECKHVGCDNILGSDAREDRCRVCGGDGSTCDAIEGFFNDSLPRGGYMEVVQIPRGSVHIEVREVAMSKNYIALKSEGDDYYINGAWTIDWPRKFDVAGTAFHYKRPTDEPESLEALGPTSENLIVMVLLQEQNLGIRYKFNVPITRTGSGDNEVGFTWNHQPWSECSATCAGGVQRQEVVCKRLDDNSIVQNNYCDPDSKPPENQRACNTEPCPPEWFIGDWLECSKTCDGGMRTRAVLCIRKIGPSEEETLDYSGCLTHRPVEKEPCNNQSCPPQWVALDWSECTPKCGPGFKHRIVLCKSSDLSKTFPAAQCPEESKPPVRIRCSLGRCPPPRWVTGDWGQCSAQCGLGQQMRTVQCLSYTGQASSDCLETVRPPSMQQCESKCDSTPISNTEECKDVNKVAYCPLVLKFKFCSRAYFRQMCCKTCQGH

SEQ ID NO: 365 - protein, 1686 aa, Homo Sapiens
MPGGPSPRSPAPLLRPLLLLLCALAPGAPGPAPGRATEGRAALDIVHPVRVDAGGSFLSYELWPRALRKRDVSVRRDAPAFYELQYRGRELRFNLTANQHLLAPGFVSETRRRGGLGRAHIRAHTPACHLLGEVQDPELEGGLAAISACDGLKGVFQLSNEDYFIEPLDSAPARPGHAQPHVVYKRQAPERLAQRGDSSAPSTCGVQVYPELESRRERWEQRQQWRRPRLRRLHQRSVSKEKWVETLVVADAKMVEYHGQPQVESYVLTIMNMVAGLFHDPSIGNPIHITIVRLVLLEDEEEDLKITHHADNTLKSFCKWQKSINMKGDAHPLHHDTAILLTRKDLCAAMNRPCETLGLSHVAGMCQPHRSCSINEDTGLPLAFTVAHELGHSFGIQHDGSGNDCEPVGKRPFIMSPQLLYDAAPLTWSRCSRQYITRFLDRGWGLCLDDPPAKDIIDFPSVPPGVLYDVSHQCRLQYGAYSAFCEDMDNVCHTLWCSVGTTCHSKLDAAVDGTRCGENKWCLSGECVPVGFRPEAVDGGWSGWSAWSICSRSCGMGVQSAERQCTQPTPKYKGRYCVGERKRFRLCNLQACPAGRPSFRHVQCSHFDAMLYKGQLHTWVPVVNDVNPCELHCRPANEYFAEKLRDAVVDGTPCYQVRASRDLCINGICKNVGCDFEIDSGAMEDRCGVCHGNGSTCHTVSGTFEEAEGLGYVDVGLIPAGAREIRIQEVAEAANFLALRSEDPEKYFLNGGWTIQWNGDYQVAGTTFTYARRGNWENLTSPGPTKEPVWIQLLFQESNPGVHYEYTIHREAGGHDEVPPPVFSWHYGPWTKCTVTCGRGVQRQNVYCLERQAGPVDEEHCDPLGRPDDQQRKCSEQPCPARWWAGEWQLCSSSCGPGGLSRRAVLCIRSVGLDEQSALEPPACEHLPRPPTETPCNRHVPCPATWAVGNWSQCSVTCGEGTQRRNVLCTNDTGVPCDEAQQPASEVTCSLPLCRWPLGTLGPEGSGSGSSSHELFNEADFIPHHLAPRPSPASSPKPGTMGNAIEEEAPELDLPGPVFVDDFYYDYNFINFHEDLSYGPSEEPDLDLAGTGDRTPPPHSHPAAPSTGSPVPATEPPAAKEEGVLGPWSPSPWPSQAGRSPPPPSEQTPGNPLINFLPEEDTPIGAPDLGLPSLSWPRVSTDGLQTPATPESQNDFPVGKDSQSQLPPPWRDRTNEVFKDDEEPKGRGAPHLPPRPSSTLPPLSPVGSTHSSPSPDVAELWTGGTVAWEPALEGGLGPVDSELWPTVGVASLLPPPIAPLPEMKVRDSSLEPGTPSFPTPGPGSWDLQTVAVWGTFLPTTLTGLGHMPEPALNPGPKGQPESLSPEVPLSSRLLSTPAWDSPANSHRVPETQPLAPSLAEAGPPADPLVVRNAGWQAGNWSECSTTCGLGAVWRPVRCSSGRDEDCAPAGRPQPARRCHLRPCATWHSGNWSKCSRSCGGGSSVRDVQCVDTRDLRPLRPFHCQPGPAKPPAHRPCGAQPCLSWYTSSWRECSEACGGGEQQRLVTCPEPGLCEEALRPNTTRPCNTHPCTQWVVGPWGQCSGPCGGGVQRRLVKCVNTQTGLPEEDSDQCGHEAWPESSRPCGTEDCEPVEPPRCERDRLSFGFCETLRLLGRCQLPTIRTQCCRSCSPPSHGAPSRGHQRVARR

SEQ ID NO: 366 - protein, 889 aa, Homo Sapiens
MLPAPAAPRWPPLLLLLLLLLPLARGAPARPAAGGQASELVVPTRLPGSAGELALHLSAFGKGFVLRLAPDDSFLAPEFKIERLGGSGRATGGERGLRGCFFSGTVNGEPESLAAVSLCRGLSGSFLLDGEEFTIQPQGAGGSLAQPHRLQRWGPAGARPLPRGPEWEVETGEGQRQERGDHQEDSEEESQEEEAEGASEPPPPLGATSRTKRFVSEARFVETLLVADASMAAFYGADLQNHILTLMSVAARIYKHPSIKNSINLMVVKVLIVEDEKWGPEVSDNGGLTLRNFCNWQRRFNQPSDRHPEHYDTAILLTRQNFCGQEGLCDTLGVADIGTICDPNKSCSVIEDEGLQAAHTLAHELGHVLSMPHDDSKPCTRLFGPMGKHHVMAPLFVHLNQTLPWSPCSAMYLTELLDGGHGDCLLDAPAAALPLPTGLPGRMALYQLDQQCRQIFGPDFRHCPNTSAQDVCAQLWCHTDGAEPLCHTKNGSLPWADGTPCGPGHLCSEGSCLPEEEVERPKPVADGGWAPWGPWGECSRTCGGGVQFSHRECKDPEPQNGGRYCLGRRAKYQSCHTEECPPDGKSFREQQCEKYNAYNYTDMDGNLLQWVPKYAGVSPRDRCKLFCRARGRSEFKVFEAKVIDGTLCGPETLAICVRGQCVKAGCDHVVDSPRKLDKCGVCGGKGNSCRKVSGSLTPTNYGYNDIVTIPAGATNIDVKQRSHPGVQNDGNYLALKTADGQYLLNGNLAISAIEQDILVKGTILKYSGSIATLERLQSFRPLPEPLTVQLLTVPGEVFPPKVKYTFFVPNDVDFSMQSSKERATTNIIQPLLHAQWVLGDWSECSSTCGAGWQRRTVECRDPSGQASATCNKALKPEDAKPCESQLCPL

SEQ ID NO: 367 - protein, 69 aa, Homo Sapiens
AKCPQGRFSINLYGTGLSLTESARWISQGNYAVSDIKKSPDGTRVVGKCGGYCGKCTPSSGTGLEVRVL

SEQ ID NO: 368 - protein, 1907 aa, Homo Sapiens
MQFVSWATLLTLLVRDLAEMGSPDAAAAVRKDRLHPRQVKLLETLSEYEIVSPIRVNALGEPFPTNVHFKRTRRSINSATDPWPAFASSSSSSTSSQAHYRLSAFGQQFLFNLTANAGFIAPLFTVTLLGTPGVNQTKFYSEEEAELKHCFYKGYVNTNSEHTAVISLCSGMLGTFRSHDGDYFIEPLQSMDEQEDEEEQNKPHIIYRRSAPQREPSTGRHACDTSEHKNRHSKDKKKTRARKWGERINLAGDVAALNSGLATEAFSAYGNKTDNTREKRTHRRTKRFLSYPRFVEVLVVADNRMVSYHGENLQHYILTLMSIDGPSISFNAQTTLKNFCQWQHSKNSPGGIHHDTAVLLTRQDICRAHDKCDTLGLAELGTICDPYRSCSISEDSGLSTAFTIAHELGHVFNMPHDDNNKCKEEGVKSPQHVMAPTLNFYTNPWMWSKCSRKYITEFLDTGYGECLLNEPESRPYPLPVQLPGILYNVNKQCELIFGPGSQVCPYMMQCRRLWCNNVNGVHKGCRTQHTPWADGTECEPGKHCKYGFCVPKEMDVPVTDGSWGSWSPFGTCSRTCGGGIKTAIRECNRPEPKNGGKYCVGRRMKFKSCNTEPCLKQKRDFRDEQCAHFDGKHFNINGLLPNVRWVPKYSGILMKDRCKLFCRVAGNTAYYQLRDRVIDGTPCGQDTNDICVQGLCRQAGCDHVLNSKARRDKCGVCGGDNSSCKTVAGTFNTVHYGYNTVVRIPAGATNIDVRQHSFSGETDDDNYLALSSSKGEFLLNGNFVVTMAKREIRIGNAVVEYSGSETAVERINSTDRIEQELLLQVLSVGKLYNPDVRYSFNIPIEDKPQQFYWNSHGPWQACSKPCQGERKRKLVCTRESDQLTVSDQRCDRLPQPGHITEPCGTDCDLRWHVASRSECSAQCGLGYRTLDIYCAKYSRLDGKTEKVDDGFCSSHPKPSNREKCSGECNTGGWRYSAWTECSKSCDGGTQRRRAICVNTRNDVLDDSKCTHQEKVTIQRCSEFPCPQWKSGDWSECLVTCGKGHKHRQVWCQFGEDRLNDRMCDPETKPTSMQTCQQPECASWQAGPWGQCSVTCGQGYQLRAVKCIIGTYMSVVDDNDCNAATRPTDTQDCELPSCHPPPAAPETRRSTYSAPRTQWRFGSWTPCSATCGKGTRMRYVSCRDENGSVADESACATLPRPVAKEECSVTPCGQWKALDWSSCSVTCGQGRATRQVMCVNYSDHVIDRSECDQDYIPETDQDCSMSPCPQRTPDSGLAQHPFQNEDYRPRSASPSRTHVLGGNQWRTGPWGACSSTCAGGSQRRVVVCQDENGYTANDCVERIKPDEQRACESGPCPQWAYGNWGECTKLCGGGIRTRLVVCQRSNGERFPDLSCEILDKPPDREQCNTHACPHDAAWSTGPWSSCSVSCGRGHKQRNVYCMAKDGSHLESDYCKHLAKPHGHRKCRGGRCPKWKAGAWSQCSVSCGRGVQQRHVGCQIGTHKIARETECNPYTRPESERDCQGPRCPLYTWRAEEWQECTKTCGEGSRYRKVVCVDDNKNEVHGARCDVSKRPVDRESCSLQPCEYVWITGEWSECSVTCGKGYKQRLVSCSEIYTGKENYEYSYQTTINCPGTQPPSVHPCYLRDCPVSATWRVGNWGSCSVSCGVGVMQRSVQCLTNEDQPSHLCHTDLKPEERKTCRNVYNCELPQNCKEVKRLKGASEDGEYFLMIRGKLLKIFCAGMHSDHPKEYVTLVHGDSENFSEVYGHRLHNPTECPYNGSRRDDCQCRKDYTAAGFSSFQKIRIDLTSMQIITTDLQFARTSEGHPVPFATAGDCYSAAKCPQGRFSINLYGTGLSLTESARWISQGNYAVSDIKKSPDGTRVVGKCGGYCGKCTPSSGTGLEVRVL

SEQ ID NO: 369 - protein, 1935 aa, Homo Sapiens
MQFVSWATLLTLLVRDLAEMGSPDAAAAVRKDRLHPRQVKLLETLSEYEIVSPIRVNALGEPFPTNVHFKRTRRSINSATDPWPAFASSSSSSTSSQAHYRLSAFGQQFLFNLTANAGFIAPLFTVTLLGTPGVNQTKFYSEEEAELKHCFYKGYVNTNSEHTAVISLCSGMLGTFRSHDGDYFIEPLQSMDEQEDEEEQNKPHIIYRRSAPQREPSTGRHACDTSEHKNRHSKDKKKTRARKWGERINLAGDVAALNSGLATEAFSAYGNKTDNTREKRTHRRTKRFLSYPRFVEVLVVADNRMVSYHGENLQHYILTLMSIVASIYKDPSIGNLINIVIVNLIVIHNEQDGPSISFNAQTTLKNFCQWQHSKNSPGGIHHDTAVLLTRQDICRAHDKCDTLGLAELGTICDPYRSCSISEDSGLSTAFTIAHELGHVFNMPHDDNNKCKEEGVKSPQHVMAPTLNFYTNPWMWSKCSRKYITEFLDTGYGECLLNEPESRPYPLPVQLPGILYNVNKQCELIFGPGSQVCPYMMQCRRLWCNNVNGVHKGCRTQHTPWADGTECEPGKHCKYGFCVPKEMDVPVTDGSWGSWSPFGTCSRTCGGGIKTAIRECNRPEPKNGGKYCVGRRMKFKSCNTEPCLKQKRDFRDEQCAHFDGKHFNINGLLPNVRWVPKYSGILMKDRCKLFCRVAGNTAYYQLRDRVIDGTPCGQDTNDICVQGLCRQAGCDHVLNSKARRDKCGVCGGDNSSCKTVAGTFNTVHYGYNTVVRIPAGATNIDVRQHSFSGETDDDNYLALSSSKGEFLLNGNFVVTMAKREIRIGNAVVEYSGSETAVERINSTDRIEQELLLQVLSVGKLYNPDVRYSFNIPIEDKPQQFYWNSHGPWQACSKPCQGERKRKLVCTRESDQLTVSDQRCDRLPQPGHITEPCGTDCDLRWHVASRSECSAQCGLGYRTLDIYCAKYSRLDGKTEKVDDGFCSSHPKPSNREKCSGECNTGGWRYSAWTECSKSCDGGTQRRRAICVNTRNDVLDDSKCTHQEKVTIQRCSEFPCPQWKSGDWSECLVTCGKGHKHRQVWCQFGEDRLNDRMCDPETKPTSMQTCQQPECASWQAGPWGQCSVTCGQGYQLRAVKCIIGTYMSVVDDNDCNAATRPTDTQDCELPSCHPPPAAPETRRSTYSAPRTQWRFGSWTPCSATCGKGTRMRYVSCRDENGSVADESACATLPRPVAKEECSVTPCGQWKALDWSSCSVTCGQGRATRQVMCVNYSDHVIDRSECDQDYIPETDQDCSMSPCPQRTPDSGLAQHPFQNEDYRPRSASPSRTHVLGGNQWRTGPWGACSSTCAGGSQRRVVVCQDENGYTANDCVERIKPDEQRACESGPCPQWAYGNWGECTKLCGGGIRTRLVVCQRSNGERFPDLSCEILDKPPDREQCNTHACPHDAAWSTGPWSSCSVSCGRGHKQRNVYCMAKDGSHLESDYCKHLAKPHGHRKCRGGRCPKWKAGAWSQCSVSCGRGVQQRHVGCQIGTHKIARETECNPYTRPESERDCQGPRCPLYTWRAEEWQECTKTCGEGSRYRKVVCVDDNKNEVHGARCDVSKRPVDRESCSLQPCEYVWITGEWSECSVTCGKGYKQRLVSCSEIYTGKENYEYSYQTTINCPGTQPPSVHPCYLRDCPVSATWRVGNWGSCSVSCGVGVMQRSVQCLTNEDQPSHLCHTDLKPEERKTCRNVYNCELPQNCKEVKRLKGASEDGEYFLMIRGKLLKIFCAGMHSDHPKEYVTLVHGDSENFSEVYGHRLHNPTECPYNGSRRDDCQCRKDYTAAGFSSFQKIRIDLTSMQIITTDLQFARTSEGHPVPFATAGDCYSAAKCPQGRFSINLYGTGLSLTESARWISQGNYAVSDIKKSPDGTRVVGKCGGYCGKCTPSSGTGLEVRVL

SEQ ID NO: 370 - protein, 488 aa, Homo Sapiens
MQFVSWATLLTLLVRDLAEMGSPDAAAAVRKDRLHPRQVKLLETLSEYEIVSPIRVNALGEPFPTNVHFKRTRRSINSATDPWPAFASSSSSSTSSQAHYRLSAFGQQFLFNLTANAGFIAPLFTVTLLGTPGVNQTKFYSEEEAELKHCFYKGYVNTNSEHTAVISLCSGMLGTFRSHDGDYFIEPLQSMDEQEDEEEQNKPHIIYRRSAPQREPSTGRHACDTSEHKNRHSKDKKKTRARKWGERINLAGDVAALNSGLATEAFSAYGNKTDNTREKRTHRRTKRFLSYPRFVEVLVVADNRMVSYHGENLQHYILTLMSIVASIYKDPSIGNLINIVIVNLIVIHNEQDGPSISFNAQTTLKNFCQWQHSKNSPGGIHHDTAVLLTRQDICRAHDKCDTLGLAELGTICDPYRSCSISEDSGLSTAFTIAHELGHVFNMPHDDNNKCKEEGVKSPQHVMAPTLNFYTNPWMWSKCSRKYITEFLE

SEQ ID NO: 371 - protein, 991 aa, Homo Sapiens
  misc_feature (1)..(1): Xaa can be any naturally occurring amino acid
XECSAQCGLGYRTLDIYCAKYSRLDGKTEKVDDGFCSSHPKPSNREKCSGECNTGGWRYSAWTECSKSCDGGTQRRRAICVNTRNDVLDDSKCTHQEKVTIQRCSEFPCPQWKSGDWSECLVTCGKGHKHRQVWCQFGEDRLNDRMCDPETKPTSMQTCQQPECASWQAGPWGQCSVTCGQGYQLRAVKCIIGTYMSVVDDNDCNAATRPTDTQDCELPSCHPPPAAPETRRSTYSAPRTQWRFGSWTPCSATCGKGTRMRYVSCRDENGSVADESACATLPRPVAKEECSVTPCGQWKALDWSSCSVTCGQGRATRQVMCVNYSDHVIDRSECDQDYIPETDQDCSMSPCPQRTPDSGLAQHPFQNEDYRPRSASPSRTHVLGGNQWRTGPWGACSSTCAGGSQRRVVVCQDENGYTANDCVERIKPDEQRACESGPCPQWAYGNWGECTKLCGGGIRTRLVVCQRSNGERFPDLSCEILDKPPDREQCNTHACPHDAAWSTGPWSSCSVSCGRGHKQRNVYCMAKDGSHLESDYCKHLAKPHGHRKCRGGRCPKWKAGAWSQCSVSCGRGVQQRHVGCQIGTHKIARETECNPYTRPESERDCQGPRCPLYTWRAEEWQECTKTCGEGSRYRKVVCVDDNKNEVHGARCDVSKRPVDRESCSLQPCEYVWITGEWSECSVTCGKGYKQRLVSCSEIYTGKENYEYSYQTTINCPGTQPPSVHPCYLRDCPVSATWRVGNWGSCSVSCGVGVMQRSVQCLTNEDQPSHLCHTDLKPEERKTCRNVYNCELPQNCKEVKRLKGASEDGEYFLMIRGKLLKIFCAGMHSDHPKEYVTLVHGDSENFSEVYGHRLHNPTECPYNGSRRDDCQCRKDYTAAGFSSFQKIRIDLTSMQIITTDLQFARTSEGHPVPFATAGDCYSAAKCPQGRFSINLYGTGLSLTESARWISQGNYAVSDIKKSPDGTRVVGKCGGYCGKCTPSSGTGLEVRVL

SEQ ID NO: 372 - protein, 127 aa, Homo Sapiens
MARLEAPQCPGFLARLLGGTWCLLCIAGQVCGDQSQGAVFLREFTLIRRESLHEDFLSDLLNSHKTEDSSSRTARSEEDRDGLWDAWGPWSECSRTCGGGASYSLRRCLSSKSCEGRNIRYRTCSNV

SEQ ID NO: 373 - protein, 219 aa, Homo Sapiens
MECCRRATPGTLLLFLAFLLLSSRTARSEEDRDGLWDAWGPWSECSRTCGGGASYSLRRCLSSKSCEGRNIRYRTCSNVDCPPEAGDFRAQQCSAHNDVKHHGQFYEWLPVSNDPDNPCSLKCQAKGTTLVVELAPKVLDGTRCYTESLDMCISGLCQIVGCDHQLGSTVKEDNCGVCNGDGSTCRLVRGQYKSQLSATKCKTHRDGRPLDLLTYPLLA

SEQ ID NO: 374 - protein, 683 aa, Homo Sapiens
MECCRRATPGTLLLFLAFLLLSSRTARSEEDRDGLWDAWGPWSECSRTCGGGASYSLRRCLSSKSCEGRNIRYRTCSNVDCPPEAGDFRAQQCSAHNDVKHHGQFYEWLPVSNDPDNPCSLKCQAKGTTLVVELAPKVLDGTRCYTESLDMCISGLCQIVGCDHQLGSTVKEDNCGVCNGDGSTCRLVRGQYKSQLSATKSDDTVVAIPYGSRHIRLVLKGPDHLYLETKTLQGTKGENSLSSTGTFLVDNSSVDFQKFPDKEILRMAGPLTADFIVKIRNSGSADSTVQFIFYQPIIHRWRETDFFPCSATCGGGYQLTSAECYDLRSNRVVADQYCHYYPENIKPKPKLQECNLDPCPASDGYKQIMPYDLYHPLPRWEATPWTACSSSCGGGIQSRAVSCVEEDIQGHVTSVEEWKCMYTPKMPIAQPCNIFDCPKWLAQEWSPCTVTCGQGLRYRVVLCIDHRGMHTGGCSPKTKPHIKEECIVPTPCYKPKEKLPVEAKLPWFKQAQELEEGAAVSEEPSFIPEAWSACTVTCGVGTQVRIVRCQVLLSFSQSVADLPIDECEGPKPASQRACYAGPCSGEIPEFNPDETDGLFGGLQDFDELYDWEYEGFTKCSESCGGGVQEAVVSCLNKQTREPAEENLCVTSRRPPQLLKSCNLDPCPARSSIDSAWNACNVLC

SEQ ID NO: 375 - protein, 525 aa, Homo Sapiens
MECCRRATPGTLLLFLAFLLLSSRTARSEEDRDGLWDAWGPWSECSRTCGGGASYSLRRCLSSKSCEGRNIRYRTCSNVDCPPEAGDFRAQQCSAHNDVKHHGQFYEWLPVSNDPDNPCSLKCQAKGTTLVVELAPKVLDGTRCYTESLDMCISGLCQIVGCDHQLGSTVKEDNCGVCNGDGSTCRLVRGQYKSQLSATKSDDTVVAIPYGSRHIRLVLKGPDHLYLETKTLQGTKGENSLSSTGTFLVDNSSVDFQKFPDKEILRMAGPLTADFIVKIRNSGSADSTVQFIFYQPIIHRWRETDFFPCSATCGGGYQLTSAECYDLRSNRVVADQYCHYYPENIKPKPKLQECNLDPCPASDGYKQIMPYDLYHPLPRWEATPWTACSSSCGGGIQSRAVSCVEEDIQGHVTSVEEWKCMYTPKMPIAQPCNIFDCPKWLAQEWSPCTVTCGQGLRYRVVLCIDHRGMHTGGCSPKTKPHIKEECIVPTPCYKPKEKLPVEAKLPWFKQAQELEEGAAVSEEPS

SEQ ID NO: 376 - protein, 1762 aa, Homo Sapiens
MECCRRATPGTLLLFLAFLLLSSRTARSEEDRDGLWDAWGPWSECSRTCGGGASYSLRRCLSSKSCEGRNIRYRTCSNVDCPPEAGDFRAQQCSAHNDVKHHGQFYEWLPVSNDPDNPCSLKCQAKGTTLVVELAPKVLDGTRCYTESLDMCISGLCQIVGCDHQLGSTVKEDNCGVCNGDGSTCRLVRGQYKSQLSATKSDDTVVAIPYGSRHIRLVLKGPDHLYLETKTLQGTKGENSLSSTGTFLVDNSSVDFQKFPDKEILRMAGPLTADFIVKIRNSGSADSTVQFIFYQPIIHRWRETDFFPCSATCGGGYQLTSAECYDLRSNRVVADQYCHYYPENIKPKPKLQECNLDPCPASDGYKQIMPYDLYHPLPRWEATPWTACSSSCGGGIQSRAVSCVEEDIQGHVTSVEEWKCMYTPKMPIAQPCNIFDCPKWLAQEWSPCTVTCGQGLRYRVVLCIDHRGMHTGGCSPKTKPHIKEECIVPTPCYKPKEKLPVEAKLPWFKQAQELEEGAAVSEEPSFIPEAWSACTVTCGVGTQVRIVRCQVLLSFSQSVADLPIDECEGPKPASQRACYAGPCSGEIPEFNPDETDGLFGGLQDFDELYDWEYEGFTKCSESCGGGVQEAVVSCLNKQTREPAEENLCVTSRRPPQLLKSCNLDPCPARWEIGKWSPCSLTCGVGLQTRDVFCSHLLSREMNETVILADELCRQPKPSTVQACNRFNCPPAWYPAQWQPCSRTCGGGVQKREVLCKQRMADGSFLELPETFCSASKPACQQACKKDDCPSEWLLSDWTECSTSCGEGTQTRSAICRKMLKTGLSTVVNSTLCPPLPFSSSIRPCMLATCARPGRPSTKHSPHIAAARKVYIQTRRQRKLHFVVGGFAYLLPKTAVVLRCPARRVRKPLITWEKDGQHLISSTHVTVAPFGYLKIHRLKPSDAGVYTCSAGPAREHFVIKLIGGNRKLVARPLSPRSEEEVLAGRKGGPKEALQTHKHQNGIFSNGSKAEKRGLAANPGSRYDDLVSRLLEQGGWPGELLASWEAQDSAERNTTSEEDPGAEQVLLHLPFTMVTEQRRLDDILGNLSQQPEELRDLYSKHLVAQLAQEIFRSHLEHQDTLLKPSERRTSPVTLSPHKHVSGFSSSLRTSSTGDAGGGSRRPHRKPTILRKISAAQQLSASEVVTHLGQTVALASGTLSVLLHCEAIGHPRPTISWARNGEEVQFSDRILLQPDDSLQILAPVEADVGFYTCNATNALGYDSVSIAVTLAGKPLVKTSRMTVINTEKPAVTVDIGSTIKTVQGVNVTINCQVAGVPEAEVTWFRNKSKLGSPHHLHEGSLLLTNVSSSDQGLYSCRAANLHGELTESTQLLILDPPQVPTQLEDIRALLAATGPNLPSVLTSPLGTQLVLDPGNSALLGCPIKGHPVPNITWFHGGQPIVTATGLTHHILAAGQILQVANLSGGSQGEFSCLAQNEAGVLMQKASLVIQDYWWSVDRLATCSASCGNRGVQQPRLRCLLNSTEVNPAHCAGKVRPAVQPIACNRRDCPSRWMVTSWSACTRSCGGGVQTRRVTCQKLKASGISTPVSNDMCTQVAKRPVDTQACNQQLCVEWAFSSWGQCNGPCIGPHLAVQHRQVFCQTRDGITLPSEQCSALPRPVSTQNCWSEACSVHWRVSLWTLCTATCGNYGFQSRRVECVHARTNKAVPEHLCSWGPRPANWQRCNITPCENMECRDTTRYCEKVKQLKLCQLSQFKSRCCGTCGKA

SEQ ID NO: 377 - protein, 439 aa, Homo Sapiens
MECCRRATPGTLLLFLAFLLLSSRTARSEEDRDGLWDAWGPWSECSRTCGGGASYSLRRCLSSKSCEGRNIRYRTCSNVDCPPEAGDFRAQQCSAHNDVKHHGQFYEWLPVSNDPDNPCSLKCQAKGTTLVVELAPKVLDGTRCYTESLDMCISGLCQIVGCDHQLGSTVKEDNCGVCNGDGSTCRLVRGQYKSQLSATKSDDTVVAIPYGSRHIRLVLKGPDHLYLETKTLQGTKGENSLSSTGTFLVDNSSVDFQKFPDKEILRMAGPLTADFIVKIRNSGSADSTVQFIFYQPIIHRWRETDFFPCSATCGGGYQLTSAECYDLRSNRVVADQYCHYYPENIKPKPKLQECNLDPCPARWEATPWTACSSSCGGGIQSRAVSCVEEDIQGHVTSVEEWKCMYTPKMPIAQPCNIFDCPKWLAQEWSPVTVPSFFVH

SEQ ID NO: 378 - protein, 185 aa, Homo Sapiens
MECCRRATPGTLLLFLAFLLLSSRTARSEEDRDGLWDAWGPWSECSRTCGGGASYSLRRCLSSKSCEGRNIRYRTCSNVDCPPEAGDFRAQQCSAHNDVKHHGQFYEWLPVSNDPDNPCSLKCQAKGTTLVVELAPKVLDGTRCYTESLDMCISGLCQVSADLFSFNLSRGFQCLCVNGLHSLTL

SEQ ID NO: 379 - protein, 258 aa, Homo Sapiens
MSGVFCFFFFFLGVPEAEVTWFRNKSKLGSPHHLHEGSLLLTNVSSSDQGLYSCRAANLHGELTESTQLLILDPPQVPTQLEDIRALLAATGPNLPSVLTSPLGTQLVLDPGNSALLGCPIKGHPVPNITWFHGGQPIVTATGLTHHILAAGQILQVANLSGGSQGEFSCLAQNEAGVLMQKASLVIQDYWWSVDRLATCSASCGNRGVQQPRLRCLLNSTEVNPAHCAGKVRPAVQPIACNRRDCPSRAMGLASGLT

SEQ ID NO: 380 - protein, 463 aa, Homo Sapiens
MSGVFCFFFFFLGVPEAEVTWFRNKSKLGSPHHLHEGSLLLTNVSSSDQGLYSCRAANLHGELTESTQLLILDPPQVPTQLEDIRALLAATGPNLPSVLTSPLGTQLVLDPGNSALLGCPIKGHPVPNITWFHGGQPIVTATGLTHHILAAGQILQVANLSGGSQGEFSCLAQNEAGVLMQKASLVIQDYWWSVDRLATCSASCGNRGVQQPRLRCLLNSTEVNPAHCAGKVRPAVQPIACNRRDCPSRWMVTSWSACTRSCGGGVQTRRVTCQKLKASGISTPVSNDMCTQVAKRPVDTQACNQQLCVEWAFSSWGQCNGPCIGPHLAVQHRQVFCQTRDGITLPSEQCSALPRPVSTQNCWSEACSVHWRVSLWTLCTATCGNYGFQSRRVECVHARTNKAVPEHLCSWGPRPANWQRCNITPCENMECRDTTRYCEKVKQLKLCQLSQFKSRCCGTCGKA

SEQ ID NO: 381 - protein, 275 aa, Homo Sapiens
MSGVFCFFFFFLGVPEAEVTWFRNKSKLGSPHHLHEGSLLLTNVSSSDQGLYSCRAANLHGELTESTQLLILDPPQVPTQLEDIRALLAATGPNLPSVLTSPLGTQLVLDPGNSALLGCPIKGHPVPNITWFHGGQPIVTATGLTHHILAAGQILQVANLSGGSQGEFSCLAQNEAGVLMQKASLVIQVQWALHRASPSCATQTSLLPDTGWHHLTIRAVQCSSEACEHPELLVRGLQCTLESQPVDPVHSYLWQLRLPVPACGVCACPHQQGSA

SEQ ID NO: 382 - protein, 150 aa, Homo Sapiens
TSPLGTQLVLDPGNSALLGCPIKGHPVPNITWFHGGQPIVTATGLTHHILAAGQILQVANLSGGSQGEFSCLAQNEAGVLMQKASLVIQDYWWSVDRLATCSASCGNRGVQQPRLRCLLNSTEVNPAHCAGKVRPAVQPIACNRRDCPSR

SEQ ID NO: 383 - protein, 951 aa, Homo Sapiens
MDGRWQCSCWAWFLLVLAVVAGDTVSTGSTDNSPTSNSLEGGTDATAFWWGEWTKWTACSRSCGGGVTSQERHCLQQRRKSVPGPGNRTCTGTSKRYQLCRVQECPPDGRSFREEQCVSFNSHVYNGRTHQWKPLYPDDYVHISSKPCDLHCTTVDGQRQLMVPARDGTSCKLTDLRGVCVSGKCEPIGCDGVLFSTHTLDKCGICQGDGSSCTHVTGNYRKGNAHLGYSLVTHIPAGARDIQIVERKKSADVLALADEAGYYFFNGNYKVDSPKNFNIAGTVVKYRRPMDVYETGIEYIVAQGPTNQGLNVMVWNQNGKSPSITFEYTLLQPPHESRPQPIYYGFSESAESQGLDGAGLMGFVPHNGSLYGQASSERLGLDNRLFGHPGLDMELGPSQGQETNEVCEQAGGGACEGPPRGKGFRDRNVTGTPLTGDKDDEEVDTHFASQEFFSANAISDQLLGAGSDLKDFTLNETVNSIFAQGAPRSSLAESFFVDYEENEGAGPYLLNGSYLELSSDRVANSSSEAPFPNVSTSLLTSAGNRTHKARTRPKARKQGVSPADMYRWKLSSHEPCSATCTTGVMSAYAMCVRYDGVEVDDSYCDALTRPEPVHEFCAGRECQPRWETSSWSECSRTCGEGYQFRVVRCWKMLSPGFDSSVYSDLCEAAEAVRPEERKTCRNPACGPQWEMSEWSECTAKCGERSVVTRDIRCSEDEKLCDPNTRPVGEKNCTGPPCDRQWTVSDWGPCSGSCGQGRTIRHVYCKTSDGRVVPESQCQMETKPLAIHPCGDKNCPAHWLAQDWERCNTTCGRGVKKRLVLCMELANGKPQTRSGPECGLAKKPPEESTCFERPCFKWYTSPWSECTKTCGVGVRMRDVKCYQGTDIVRGCDPLVKPVGRQACDLQPCPTEPPDDSCQDQPGTNCALAIKVNLCGHWYYSKACCRSCRPPHS

SEQ ID NO: 384 - protein, 951 aa, Homo Sapiens; identical to SEQ ID NO: 383

SEQ ID NO: 385 - protein, 1060 aa, Homo Sapiens
MLFEVGEGGGAGEEGKGRGRPGRSLCTHAAPARTAHLAPSALRSARPFLWEDNLLTRSQGLPDNHDQLVPDNLEAWALAGPRGLFPKRTLVIWKRIGAGLVVTVALLPRMDGRWQCSCWAWFLLVLAVVAGDTVSTGSTDNSPTSNSLEGGTDATAFWWGEWTKWTACSRSCGGGVTSQERHCLQQRRKSVPGPGNRTCTGTSKRYQLCRVQECPPDGRSFREEQCVSFNSHVYNGRTHQWKPLYPDDYVHISSKPCDLHCTTVDGQRQLMVPARDGTSCKLTDLRGVCVSGKCEPIGCDGVLFSTHTLDKCGICQGDGSSCTHVTGNYRKGNAHLGYSLVTHIPAGARDIQIVERKKSADVLALADEAGYYFFNGNYKVDSPKNFNIAGTVVKYRRPMDVYETGIEYIVAQGPTNQGLNVMVWNQNGKSPSITFEYTLLQPPHESRPQPIYYGFSESAESQGLDGAGLMGFVPHNGSLYGQASSERLGLDNRLFGHPGLDMELGPSQGQETNEVCEQAGGGACEGPPRGKGFRDRNVTGTPLTGDKDDEEVDTHFASQEFFSANAISDQLLGAGSDLKDFTLNETVNSIFAQGAPRSSLAESFFVDYEENEGAGPYLLNGSYLELSSDRVANSSSEAPFPNVSTSLLTSAGNRTHKARTRPKARKQGVSPADMYRWKLSSHEPCSATCTTGVMSAYAMCVRYDGVEVDDSYCDALTRPEPVHEFCAGRECQPRWETSSWSECSRTCGEGYQFRVVRCWKMLSPGFDSSVYSDLCEAAEAVRPEERKTCRNPACGPQWEMSEWSECTAKCGERSVVTRDIRCSEDEKLCDPNTRPVGEKNCTGPPCDRQWTVSDWGPCSGSCGQGRTIRHVYCKTSDGRVVPESQCQMETKPLAIHPCGDKNCPAHWLAQDWERCNTTCGRGVKKRLVLCMELANGKPQTRSGPECGLAKKPPEESTCFERPCFKWYTSPWSECTKTCGVGVRMRDVKCYQGTDIVRGCDPLVKPVGRQACDLQPCPTEPPDDSCQDQPGTNCALAIKVNLCGHWYYSKACCRSCRPPHS

SEQ ID NO: 386 - protein, 1691 aa, Homo Sapiens
MASWTSPWWVLIGMVFMHSPLPQTTAEKSPGAYFLPEFALSPQGSFLEDTTGEQFLTYRYDDQTSRNTRSDEDKDGNWDAWGDWSDCSRTCGGGASYSLRRCLTGRNCEGQNIRYKTCSNHDCPPDAEDFRAQQCSAYNDVQYQGHYYEWLPRYNDPAAPCALKCHAQGQNLVVELAPKVLDGTRCNTDSLDMCISGICQAVGCDRQLGSNAKEDNCGVCAGDGSTCRLVRGQSKSHVSPEKREENVIAVPLGSRSVRITVKGPAHLFIESKTLQGSKGEHSFNSPGVFLVENTTVEFQRGSERQTFKIPGPLMADFIFKTRYTAAKDSVVQFFFYQPISHQWRQTDFFPCTVTCGGGYQLNSAECVDIRLKRVVPDHYCHYYPENVKPKPKLKECSMDPCPSSDGFKEIMPYDHFQPLPRWEHNPWTACSVSCGGGIQRRSFVCVEESMHGEILQVEEWKCMYAPKPKVMQTCNLFDCPKWIAMEWSQCTVTCGRGLRYRVVLCINHRGEHVGGCNPQLKLHIKEECVIPIPCYKPKEKSPVEAKLPWLKQAQELEETRIATEEPTFIPEPWSACSTTCGPGVQVREVKCRVLLTFTQTETELPEEECEGPKLPTERPCLLEACDESPASRELDIPLPEDSETTYDWEYAGFTPCTATCVGGHQEAIAVCLHIQTQQTVNDSLCDMVHRPPAMSQACNTEPCPPRWHVGSWGPCSATCGVGIQTRDVYCLHPGETPAPPEECRDEKPHALQACNQFDCPPGWHIEEWQQCSRTCGGGTQNRRVTCRQLLTDGSFLNLSDELCQGPKASSHKSCARTDCPPHLAVGDWSKCSVSCGVGIQRRKQVCQRLAAKGRRIPLSEMMCRDLPGLPLVRSCQMPECSKIKSEMKTKLGEQGPQILSVQRVYIQTREEKRINLTIGSRAYLLPNTSVIIKCPVRRFQKSLIQWEKDGRCLQNSKRLGITKSGSLKIHGLAAPDIGVYRCIAGSAQETVVLKLIGTDNRLIARPALREPMREYPGMDHSEANSLGVTWHKMRQMWNNKNDLYLDDDHISNQPFLRALLGHCSNSAGSTNSWELKNKQFEAAVKQGAYSMDTAQFDELIRNMSQLMETGEVSDDLASQLIYQLVAELAKAQPTHMQWRGIQEETPPAAQLRGETGSVSQSSHAKNSGKLTFKPKGPVLMRQSQPPSISFNKTINSRIGNTVYITKRTEVINILCDLITPSEATYTWTKDGTLLQPSVKIILDGTGKIQIQNPTRKEQGIYECSVANHLGSDVESSSVLYAEAPVILSVERNITKPEHNHLSVVVGGIVEAALGANVTIRCPVKGVPQPNITWLKRGGSLSGNVSLLFNGSLLLQNVSLENEGTYVCIATNALGKAVATSVLHLLERRWPESRIVFLQGHKKYILQATNTRTNSNDPTGEPPPQEPFWEPGNWSHCSATCGHLGARIQRPQCVMANGQEVSEALCDHLQKPLAGFEPCNIRDCPARWFTSVWSQCSVSCGEGYHSRQVTCKRTKANGTVQVVSPRACAPKDRPLGRKPCFGHPCVQWEPGNRCPGRCMGRAVRMQQRHTACQHNSSDSNCDDRKRPTLRRNCTSGACDVCWHTGPWKPCTAACGRGFQSRKVDCIHTRSCKPVAKRHCVQKKKPISWRHCLGPSCDRDCTDTTHYCMFVKHLNLCSLDRYKQRCCQSCQEG

SEQ ID NO: 387 - protein, 1682 aa, Homo Sapiens
MASWTSPWWVLIGMVFMHSPLPQTTAEKSPGAYFLPEFALSPQGSFLEDTTGEQFLTYRYDDQTSRNTRSDEDKDGNWDAWGDWSDCSRTCGGGASYSLRRCLTGRNCEGQNIRYKTCSNHDCPPDAEDFRAQQCSAYNDVQYQGHYYEWLPRYNDPAAPCALKCHAQGQNLVVELAPKVLDGTRCNTDSLDMCISGICQAVGCDRQLGSNAKEDNCGVCAGDGSTCRLVRGQSKSHVSPEKREENVIAVPLGSRSVRITVKGPAHLFIESKTLQGSKGEHSFNSPGVFLVENTTVEFQRGSERQTFKIPGPLMADFIFKTRYTAAKDSVVQFFFYQPISHQWRQTDFFPCTVTCGGGYQLNSAECVDIRLKRVVPDHYCHYYPENVKPKPKLKECSMDPCPSSDGFKEIMPYDHFQPLPRWEHNPWTACSVSCGGGIQRRSFVCVEESMHGEILQVEEWKCMYAPKPKVMQTCNLFDCPKWIAMEWSQCTVTCGRGLRYRVVLCINHRGEHVGGCNPQLKLHIKEECVIPIPCYKPKEKSPVEAKLPWLKQAQELEETRIATEEPTFIPEPWSACSTTCGPGVQVREVKCRVLLTFTQTETELPEEECEGPKLPTERPCLLEACDESPASRELDIPLPEDSETTYDWEYAGFTPCTATCVGGHQEAIAVCLHIQTQQTVNDSLCDMVHRPPAMSQACNTEPCPPRWHVGSWGPCSATCGVGIQTRDVYCLHPGETPAPPEECRDEKPHALQACNQFDCPPGWHIEEWQQCSRTCGGGTQNRRVTCRQLLTDGSFLNLSDELCQGPKASSHKSCARTDCPPHLAVGDWSKCSVSCGVGIQRRKQVCQRLAAKGRRIPLSEMMCRDLPGLPLVRSCQMPECSKIKSEMKTKLGEQGPQILSVQRVYIQTREEKRINLTIGSRAYLLPNTSVIIKCPVRRFQKSLIQWEKDGRCLQNSKRLGITKSGSLKIHGLAAPDIGVYRCIAGSAQETVVLKLIGTDNRLIARPALREPMREYPGMDHSEANSLGVTWHKMRQMWNNKNDLYLDDDHISNQPFLRALLGHCSNSAGSTNSWELKNKQFEAAVKQGAYSMDTAQFDELIRNMSQLMETGEVSDDLASQLIYQLVAELAKAQPTHMQWRGIQEETPPAAQLRGETGSVSQSSHAKNSGKLTFKPKGPVLMRQSQPPSISFNKTINSRIGNTVYITKRTEVINILCDLITPSEATYTWTKDGTLLQPSVKIILDGTGKIQIQNPTRKEQGIYECSVANHLGSDVESSSVLYAEAPVILSVERNITKPEHNHLSVVVGGIVEAALGANVTIRCPVKGVPQPNITWLKRGGSLSGNVSLLFNGSLLLQNVSLENEGTYVCIATNALGKAVATSVLHLLERRWPESRIVFLQGHKKYILQATNTRTNSNDPTGEPPPQEPFWEPGNWSHCSATCGHLGARIQRPQCVMANGQEVSEALCDHLQKPLAGFEPCNIRDCPARWFTSVWSQCSVSCGEGYHSRQVTCKRTKANGTVQVVSPRACAPKDRPLGRKPCFGHPCVQWEPGNRCPGRCMGRAVRMQQRHTACQHNSSDSNCDDRKRPTLRRNCTSGACDVCWHTGPWKPCTAACGRGFQSRKVDCIHTRSCKPVAKRHCVQKKKPISWRHCLGPSCDSTYTSQTATNKGAASHVKRDKPLEGS

SEQ ID NO: 388 - protein, 1074 aa, Homo Sapiens
MENWTGRPWLYLLLLLSLPQLCLDQEVLSGHSLQTPTEEGQGPEGVWGPWVQWASCSQPCGVGVQRRSRTCQLPTVQLHPSLPLPPRPPRHPEALLPRGQGPRPQTSPETLPLYRTQSRGRGGPLRGPASHLGREETQEIRAARRSRLRDPIKPGMFGYGRVPFALPLHRNRRHPRSPPRSELSLISSRGEEAIPSPTPRAEPFSANGSPQTELPPTELSVHTPSPQAEPLSPETAQTEVAPRTRPAPLRHHPRAQASGTEPPSPTHSLGEGGFFRASPQPRRPSSQGWASPQVAGRRPDPFPSVPRGRGQQGQGPWGTGGTPHGPRLEPDPQHPGAWLPLLSNGPHASSLWSLFAPSSPIPRCSGESEQLRACSQAPCPPEQPDPRALQCAAFNSQEFMGQLYQWEPFTEVQGSQRCELNCRPRGFRFYVRHTEKVQDGTLCQPGAPDICVAGRCLSPGCDGILGSGRRPDGCGVCGGDDSTCRLVSGNLTDRGGPLGYQKILWIPAGALRLQIAQLRPSSNYLALRGPGGRSIINGNWAVDPPGSYRAGGTVFRYNRPPREEGKGESLSAEGPTTQPVDVYMIFQEENPGVFYQYVISSPPPILENPTPEPPVPQLQPEILRVEPPLAPAPRPARTPGTLQRQVRIPQMPAPPHPRTPLGSPAAYWKRVGHSACSASCGKGVWRPIFLCISRESGEELDERSCAAGARPPASPEPCHGTPCPPYWEAGEWTSCSRSCGPGTQHRQLQCRQEFGGGGSSVPPERCGHLPRPNITQSCQLRLCGHWEVGSPWSQCSVRCGRGQRSRQVRCVGNNGDEVSEQECASGPPQPPSREACDMGPCTTAWFHSDWSSKCSAECGTGIQRRSVVCLGSGAALGPGQGEAGAGTGQSCPTGSRPPDMRACSLGPCERTWRWYTGPWGECSSECGSGTQRRDIICVSKLGTEFNVTSPSNCSHLPRPPALQPCQGQACQDRWFSTPWSPCSRSCQGGTQTREVQCLSTNQTLSTRCPPQLRPSRKRPCNSQPCSQRPDDQCKDSSPHCPLVVQARLCVYPYYTATCCRSCAHVLERSPQDPS

SEQ ID NO: 389 - protein, 1097 aa, Homo Sapiens
MENWTGRPWLYLLLLLSLPQLCLDQEVLSGHSLQTPTEEGQGPEGVWGPWVQWASCSQPCGVGVQRRSRTCQLPTVQLHPSLPLPPRPPRHPEALLPRGQGPRPQTSPETLPLYRTQSRGRGGPLRGPASHLGREETQEIRAARRSRLRDPIKPGMFGYGRVPFALPLHRNRRHPRSPPRSELSLISSRGEEAIPSPTPRAEPFSANGSPQTELPPTELSVHTPSPQAEPLSPETAQTEVAPRTRPAPLRHHPRAQASGTEPPSPTHSLGEGGFFRASPQPRRPSSQGWASPQVAGRRPDPFPSVPRGRGQQGQGPWGTGGTPHGPRLEPDPQHPGAWLPLLSNGPHASSLWSLFAPSSPIPRCSGESEQLRACSQAPCPPEQPDPRALQCAAFNSQEFMGQLYQWEPFTEAPLLPLRHAFFLLPGAGSGDSTGVQGSQRCELNCRPRGFRFYVRHTEKVQDGTLCQPGAPDICVAGRCLSPGCDGILGSGRRPDGCGVCGGDDSTCRLVSGNLTDRGGPLGYQKILWIPAGALRLQIAQLRPSSNYLALRGPGGRSIINGNWAVDPPGSYRAGGTVFRYNRPPREEGKGESLSAEGPTTQPVDVYMIFQEENPGVFYQYVISSPPPILENPTPEPPVPQLQPEILRVEPPLAPAPRPARTPGTLQRQVRIPQMPAPPHPRTPLGSPAAYWKRVGHSACSASCGKGVWRPIFLCISRESGEELDERSCAAGARPPASPEPCHGTPCPPYWEAGEWTSCSRSCGPGTQHRQLQCRQEFGGGGSSVPPERCGHLPRPNITQSCQLRLCGHWEVGSPWSQCSVRCGRGQRSRQVRCVGNNGDEVSEQECASGPPQPPSREACDMGPCTTAWFHSDWSSKCSAECGTGIQRRSVVCLGSGAALGPGQGEAGAGTGQSCPTGSRPPDMRACSLGPCERTWRWYTGPWGECSSECGSGTQRRDIICVSKLGTEFNVTSPSNCSHLPRPPALQPCQGQACQDRWFSTPWSPCSRSCQGGTQTREVQCLSTNQTLSTRCPPQLRPSRKRPCNSQPCSQRPDDQCKDSSPHCPLVVQARLCVYPYYTATCCRSCAHVLERSPQDPS

SEQ ID NO: 390 - protein, 1074 aa, Homo Sapiens; identical to SEQ ID NO: 388

SEQ ID NO: 391 - protein, 877 aa, Homo Sapiens
MENWTGRPWLYLLLLLSLPQLCLDQEVLSGHSLQTPTEEGQGPEGVWGPWVQWASCSQPCGVGVQRRSRTCQLPTVQLHPSLPLPPRPPRHPEALLPRGQGPRPQTSPETLPLYRTQSRGRGGPLRGPASHLGREETQEIRAARRSRLRDPIKPGMFGYGRVPFALPLHRNRRHPRSPPRSELSLISSRGEEAIPSPTPRAEPFSANGSPQTELPPTELSVHTPSPQAEPLSPETAQTEVAPRTRPAPLRHHPRAQASGTEPPSPTHSLGEGGFFRASPQPRRPSSQGWASPQVAGRRPDPFPSVPRGRGQQGQGPWGTGGTPHGPRLEPDPQHPGAWLPLLSNGPHASSLWSLFAPSSPIPRCSGESEQLRACSQAPCPPEQPDPRALQCAAFNSQEFMGQLYQWEPFTEVQGSQRCELNCRPRGFRFYVRHTEKVQDGTLCQPGAPDICVAGRCLSPGCDGILGSGRRPDGCGVCGGDDSTCRLVSGNLTDRGGPLGYQKILWIPAGALRLQIAQLRPSSNYLALRGPGGRSIINGNWAVDPPGSYRAGGTVFRYNRPPREEGKGESLSAEGPTTQPVDVYMIFQEENPGVFYQYVISSPPPILENPTPEPPVPQLQPEILRVEPPLAPAPRPARTPGTLQRQVRIPQMPAPPHPRTPLGSPAAYWKRVGHSACSASCGKGVWRPIFLCISRESGEELDERSCAAGARPPASPEPCHGTPCPPYWEAGEWTSCSRSCGPGTQHRQLQCRQEFGGGGSSVPPERCGHLPRPNITQSCQLRLCGHWEVGSPWSQCSVRCGRGQRSRQVRCVGNNGDEVSEQECASGPPQPPSREACDMGPCTTAWFHSDWSSKVSPEPPAISCILGNHAQDTSAFPA

SEQ ID NO: 392 - protein, 471 aa, Homo Sapiens
MDSAPLFPRPHLFQNLLLFLWALLNCGLGVSAQGPGEWTPWVSWTRCSSSCGRGVSVRSRRCLRLPGEEPCWGDSHEYRLCQLPDCPPGAVPFRDLQCALYNGRPVLGTQKTYQWVPFHGAPNQCDLNCLAEGHAFYHSFGRVLDGTACSPGAQGVCVAGRCLSAGCDGLLGSGALEDRCGRCGGANDSCLFVQRVFRDAGAFAGYWNVTLIPEGARHIRVEHRSRNHLALMGGDGRYVLNGHWVVSPPGTYEAAGTHVVYTRDTGPQETLQAAGPTSHDLLLQVLLQEPNPGIEFEFWLPRERYSPFQARVQALGWPLRQPQPRGVEPQPPAAPAVTPAQTPTLAPDPCPPCPDTRGRAHRLLHYCGSDFVFQARVLGHHHQAQETRYEVRIQLVYKNRSPLRAREYVWAPGHCPCPMLAPHRDYLMAVQRLVSPDGTQDQLLLPHAGYARPWSPAEDSRIRLTARRCPG

SEQ ID NO: 393 - protein, 131 aa, Homo Sapiens
MGGDGRYVLNGHWVVSPPGTYEAAGTHVVYTRDTGPQETLQAAGPTSHDLLLQVLLQEPNPGIEFEFWLPRERYSPFQARVQALGWPLRQPQPRGVEPQPPAAPAVTPAQTPTLAPGPSAGPPPPGPGDPL

SEQ ID NO: 394 - protein, 130 aa, Homo Sapiens
MGKLRPGRVEWLASGHTERPHLFQNLLLFLWALLNCGLGVSAQGPGEWTPWVSWTRCSSSCGRGVSVRSRRCLRLPGEEPCWGDSHEYRLCQLPDCPPGAVPFRDLQCALYNGRPVLGTQKTYQWVPFHG

SEQ ID NO: 395 - protein, 141 aa, Homo Sapiens
MGKLRPGRVEWLASGHTERPHLFQNLLLFLWALLNCGLGVSAQGPGEWTPWVSWTRCSSSCGRGVSVRSRRCLRLPGEEPCWGDSHEYRLCQLPDCPPGAVPFRDLQCALYNGRPVLGTQKTYQWVPFHGAPNQCDLNCLA

SEQ ID NO: 396 - protein, 210 aa, Homo Sapiens
MGKLRPGRVEWLASGHTERPHLFQNLLLFLWALLNCGLGVSAQGPGEWTPWVSWTRCSSSCGRGVSVRSRRCLRLPGEEPCWGDSHEYRLCQLPDCPPGAVPFRDLQCALYNGRPVLGTQKTYQWVPFHGAPNQCDLNCLAEGHAFYHSFGRVLDGTACSPGAQGVCVAGRCLSAGCDGLLGSGALEDRCGRCGGANDSCLFVQRVFRDA

SEQ ID NO: 397 - protein, 135 aa, Homo Sapiens
RHIRVEHRSRNHLGILGSLMGGDGRYVLNGHWVVSPPGTYEAAGTHVVYTRDTGPQETLQAAGPTSHDLLLQVLLQEPNPGIEFEFWLPRERYSPFQARVQALGWPLRQPQPRGVEPQPPAAPAVTPAQTPTLAP

SEQ ID NO: 398 - protein, 455 aa, Homo Sapiens
MARKALKLASWTSMALAASGIYFYSNKYLDPNDFGAVRVGRAVATTAVISYDYLTSLKSVPYGSEEYLQLRSKIHDLFQSFDDTPLGTASLAQVHKAVLHDGRTVAVKVQHPKVRAQSSKDILLMEVLVLAVKQLFPEFEFMWLVDEAKKNLPLELDFLNEGRNAEKVSQMLRHFDFLKVPRIHWDLSTERVLLMEFVDGGQVNDRDYMERNKIDVNEISRHLGKMYSEMIFVNGFVHCDPHPGNVLVRKHPGTGKAEIVLLDHGLYQMLTEEFRLNYCHLWQSLIWTDMKRVKEYSQRLGAGDLYPLFACMLTARSWDSVNRGISQAPVTATEDLEIRNNAANYLPQISHLLNHVPRQMLLILKTNDLLRGIEAALGTRASASSFLNMSRCCIRALAEHKKKNTCSFFRRTQISFSEAFNLWQINLHELILRVKGLKLADRVLALICWLFPAPL

SEQ ID NO: 399 - protein, 122 aa, Homo Sapiens
MARKALKLASWTSMALAASGIYFYSNKYLDPNDFGAVRVGRAVATTAVISYDYLTSLKSVPYGSEEYLQLRSKSLAVSPRLECIGVISAHCNLYLLGSSDSPASASQVAGTTGAPSLCQASL

SEQ ID NO: 400 - protein, 266 aa, Homo Sapiens
MARKALKLASWTSMALAASGIYFYSNKYLDPNDFGAVRVGRAVATTAVISYDYLTSLKSVPYGSEEYLQLRSKVHLRSARRLCELCCANRGTFIKVGQHLGALDYLLPEEYTSTLKVLHSQAPQSSMQEIRQVIREDLGKEIHDLFQSFDDTPLGTASLAQVHKAVLHDGRTVAVKVQHPKVRAQSSKDILLMEVLVLAVKQLFPEFEFMWLVDEAKKNLPLELDFLNEGRNAEKVSQMLRHFDFLKISRHLGKMYSEMIFVNGFV

SEQ ID NO: 401 - protein, 523 aa, Homo Sapiens
MARKALKLASWTSMALAASGIYFYSNKYLDPNDFGAVRVGRAVATTAVISYDYLTSLKSVPYGSEEYLQLRSKVHLRSARRLCELCCANRGTFIKVGQHLGALDYLLPEEYTSTLKVLHSQAPQSSMQEIRQVIREDLGKEIHDLFQSFDDTPLGTASLAQVHKAVLHDGRTVAVKVQHPKVRAQSSKDILLMEVLVLAVKQLFPEFEFMWLVDEAKKNLPLELDFLNEGRNAEKVSQMLRHFDFLKVPRIHWDLSTERVLLMEFVDGGQVNDRDYMERNKIDVNEISRHLGKMYSEMIFVNGFVHCDPHPGNVLVRKHPGTGKAEIVLLDHGLYQMLTEEFRLNYCHLWQSLIWTDMKRVKEYSQRLGAGDLYPLFACMLTARSWDSVNRGISQAPVTATEDLEIRNNAANYLPQISHLLNHVPRQMLLILKTNDLLRGIEAALGTRASASSFLNMSRCCIRALAEHKKKNTCSFFRRTQISFSEAFNLWQINLHELILRVKGLKLADRVLALICWLFPAPL

SEQ ID NO: 402 - protein, 218 aa, Homo Sapiens
MARKALKLASWTSMALAASGIYFYSNKYLDPNDFGAVRVGRAVATTAVISYDYLTSLKSVPYGSEEYLQLRSKVHLRSARRLCELCCANRGTFIKVGQHLGALDYLLPEEYTSTLKVLHSQAPQSSMQEIRQVIREDLGKEVLVLAVKQLFPEFEFMWLVDEAKKNLPLELDFLNEGRNAEKVSQMLRHFDFLKPGQQSETASQGTTTTTKKKWDRKL

SEQ ID NO: 403 - protein, 176 aa, Homo Sapiens
MTMCSGARLALLVYGIIMHSSVYSSPAAAGLRFPGIRPEEEAYGEDGNPLPDFDGSEPPGAGSPASAPRAAAAWYRPAGRRDVAHGILNEAYRKVLDQLSAGKHLQSLVARGVGGSLGGGAGDDAEPLSKRHSDGIFTDSYSRYRKQMAVKKYLAAVLGKRYKQRVKNKGRRIAYL

SEQ ID NO: 404 - protein, 176 aa, Homo Sapiens; identical to SEQ ID NO: 403

SEQ ID NO: 405 - protein, 74 aa, Homo Sapiens
MAGVVHVSLAALLLLPMAPAMHSDCIFKKEQAMCLEKIQRANELMGFNDSSPGCPGMWDNITCWKPAHVGEMVL

SEQ ID NO: 406 - protein, 447 aa, Homo Sapiens
MAGVVHVSLAALLLLPMAPAMHSDCIFKKEQAMCLEKIQRANELMGFNDSSPGCPGMWDNITCWKPAHVGEMVLVSCPELFRIFNPDQDMGVVSRNCTEDGWSEPFPHYFDACGFDEYESETGDQDYYYLSVKALYTVGYSTSLVTLTTAMVILCRFRKLHCTRNFIHMNLFVSFMLRAISVFIKDWILYAEQDSNHCFISTVECKAVMVFFHYCVVSNYFWLFIEGLYLFTLLVETFFPERRYFYWYTIIGWGTPTVCVTVWATLRLYFDDTGCWDMNDSTALWWVIKGPVVGSIMVNFVLFIGIIVILVQKLQSPDMGGNESSIYLRLARSTLLLIPLFGIHYTVFAFSPENVSKRERLVFELGLGSFQGFVVAVLYCFLNGEVQAEIKRKWRSWKVNRYFAVDFKHRHPSLASSGVNGGTQLSILSKSSSQIRMSGLPADNLAT

SEQ ID NO: 407 - protein, 468 aa, Homo Sapiens
MAGVVHVSLAALLLLPMAPAMHSDCIFKKEQAMCLEKIQRANELMGFNDSSPGCPGMWDNITCWKPAHVGEMVLVSCPELFRIFNPDQVWETETIGESDFGDSNSLDLSDMGVVSRNCTEDGWSEPFPHYFDACGFDEYESETGDQDYYYLSVKALYTVGYSTSLVTLTTAMVILCRFRKLHCTRNFIHMNLFVSFMLRAISVFIKDWILYAEQDSNHCFISTVECKAVMVFFHYCVVSNYFWLFIEGLYLFTLLVETFFPERRYFYWYTIIGWGTPTVCVTVWATLRLYFDDTGCWDMNDSTALWWVIKGPVVGSIMVNFVLFIGIIVILVQKLQSPDMGGNESSIYLRLARSTLLLIPLFGIHYTVFAFSPENVSKRERLVFELGLGSFQGFVVAVLYCFLNGEVQAEIKRKWRSWKVNRYFAVDFKHRHPSLASSGVNGGTQLSILSKSSSQIRMSGLPADNLAT

SEQ ID NO: 408 - protein, 524 aa, Homo Sapiens
MAGVVHVSLAALLLLPMAPAMHSDCIFKKEQAMCLEKIQRANELMGFNDSSPGCPGMWDNITCWKPAHVGEMVLVSCPELFRIFNPDQVWETETIGESDFGDSNSLDLSDMGVVSRNCTEDGWSEPFPHYFDACGFDEYESETGDQDYYYLSVKALYTVGYSTSLVTLTTAMVILCRFRKLHCTRNFIHMNLFVSFMLRAISVFIKDWILYAEQDSNHCFISTVECKAVMVFFHYCVVSNYFWLFIEGLYLFTLLVETFFPERRYFYWYTIIGWGTPTVCVTVWATLRLYFDDTGCWDMNDSTALWWVIKGPVVGSIMVNFVLFIGIIVILVQKLQSPDMGGNESSIYLTNLSPRVPKKAREDPLPVPSDQHSLPFLSCVQKCYCKPQRAQQHSCKMSELSTITLRLARSTLLLIPLFGIHYTVFAFSPENVSKRERLVFELGLGSFQGFVVAVLYCFLNGEVQAEIKRKWRSWKVNRYFAVDFKHRHPSLASSGVNGGTQLSILSKSSSQIRMSGLPADNLAT

SEQ ID NO: 409 - protein, 496 aa, Homo Sapiens
MAGVVHVSLAALLLLPMAPAMHSDCIFKKEQAMCLEKIQRANELMGFNDSSPGCPGMWDNITCWKPAHVGEMVLVSCPELFRIFNPDQVWETETIGESDFGDSNSLDLSDMGVVSRNCTEDGWSEPFPHYFDACGFDEYESETGDQDYYYLSVKALYTVGYSTSLVTLTTAMVILCRFRKLHCTRNFIHMNLFVSFMLRAISVFIKDWILYAEQDSNHCFISTVECKAVMVFFHYCVVSNYFWLFIEGLYLFTLLVETFFPERRYFYWYTIIGWGTPTVCVTVWATLRLYFDDTGCWDMNDSTALWWVIKGPVVGSIMVNFVLFIGIIVILVQKLQSPDMGGNESSIYFSCVQKCYCKPQRAQQHSCKMSELSTITLRLARSTLLLIPLFGIHYTVFAFSPENVSKRERLVFELGLGSFQGFVVAVLYCFLNGEVQAEIKRKWRSWKVNRYFAVDFKHRHPSLASSGVNGGTQLSILSKSSSQIRMSGLPADNLAT

SEQ ID NO: 410 - protein, 496 aa, Homo Sapiens; identical to SEQ ID NO: 409

SEQ ID NO: 411 - protein, 148 aa, Homo Sapiens
  misc_feature (1)..(1): Xaa can be any naturally occurring amino acid
XATLRLYFDDTGCWDMNDSTALWWVIKGPVVGSIMVNFVLFIGIIVILVQKLQSPDMGGNESSIYLTNLSPRVPKKAREDPLPVPSDQHSLPFLRLARSTLLLIPLFGIHYTVFAFSPENVSKRERLVFELGLGSFQGFVVAVLYCFL

SEQ ID NO: 412 - protein, 97 aa, Homo Sapiens
MASYIDQDMQVLWYQDGRIVETDESQGIFVEKNMIHNCSLIASALTISNIQAGSTGNWGCHVQTKRGNNTRTVDIVVLESSAQYCPPERVVNNKGDF

SEQ ID NO: 413 - protein, 1321 aa, Homo Sapiens
MEPPGRRRGRAQPPLLLPLSLLALLALLGGGGGGGAAALPAGCKHDGRPRGAGRAAGAAEGKVVCSSLELAQVLPPDTLPNRTVTLILSNNKISELKNGSFSGLSLLERLDLRNNLISSIDPGAFWGLSSLKRLDLTNNRIGCLNADIFRGLTNLVRLNLSGNLFSSLSQGTFDYLASLRSLEFQTEYLLCDCNILWMHRWVKEKNITVRDTRCVYPKSLQAQPVTGVKQELLTCDPPLELPSFYMTPSHRQVVFEGDSLPFQCMASYIDQDMQVLWYQDGRIVETDESQGIFVEKNMIHNCSLIASALTISNIQAGSTGNWGCHVQTKRGNNTRTVDIVVLESSAQYCPPERVVNNKGDFRWPRTLAGITAYLQCTRNTHGSGIYPGNPQDERKAWRRCDRGGFWADDDYSRCQYANDVTRVLYMFNQMPLNLTNAVATARQLLAYTVEAANFSDKMDVIFVAEMIEKFGRFTKEEKSKELGDVMVDIASNIMLADERVLWLAQREAKACSRIVQCLQRIATYRLAGGAHVYSTYSPNIALEAYVIKSTGFTGMTCTVFQKVAASDRTGLSDYGRRDPEGNLDKQLSFKCNVSNTFSSLALKNTIVEASIQLPPSLFSPKQKRELRPTDDSLYKLQLIAFRNGKLFPATGNSTNLADDGKRRTVVTPVILTKIDGVNVDTHHIPVNVTLRRIAHGADAVAARWDFDLLNGQGGWKSDGCHILYSDENITTIQCYSLSNYAVLMDLTGSELYTQAASLLHPVVYTTAIILLLCLLAVIVSYIYHHSLIRISLKSWHMLVNLCFHIFLTCVVFVGGITQTRNASICQAVGIILHYSTLATVLWVGVTARNIYKQVTKKAKRCQDPDEPPPPPRPMLRFYLIGGGIPIIVCGITAAANIKNYGSRPNAPYCWMAWEPSLGAFYGPASFITFVNCMYFLSIFIQLKRHPERKYELKEPTEEQQRLAANENGEINHQDSMSLSLISTSALENEHTFHSQLLGASLTLLLYVALWMFGALAVSLYYPLDLVFSFVFGATSLSFSAFFVVHHCVNREDVRLAWIMTCCPGRSSYSVQVNVQPPNSNGTNGEAPKCPNSSAESSCTNKSASSFKNSSQGCKLTNLQAAAAQCHANSLPLNSTPQLDNSLTEHSMDNDIKMHVAPLEVQFRTNVHSSRHHKNRSKGHRASRLTVLREYAYDVPTSVEGSVQNGLPKSRLGNNEGHSRSRRAYLAYRERQYNPPQQDSSDACSTLPKSSRNFEKPVSTTSKKDALRKPAVVELENQQKSYGLNLAIQNGPIKSNGQEGPLLGTDSTGNVRTGLWKHETTV

SEQ ID NO: 414 - protein, 616 aa, Homo Sapiens
MEPPGRRRGRAQPPLLLPLSLLALLALLGGGGGGGAAALPAGCKHDGRPRGAGRAAGAAEGKVVCSSLELAQVLPPDTLPNRTVTLILSNNKISELKNGSFSGLSLLERLDLRNNLISSIDPGAFWGLSSLKRLDLTNNRIGCLNADIFRGLTNLVRLNLSGNLFSSLSQGTFDYLASLRSLEFQTEYLLCDCNILWMHRWVKEKNITVRDTRCVYPKSLQAQPVTGVKQELLTCDPPLELPSFYMTPSHRQVVFEGDSLPFQCMASYIDQDMQVLWYQDGRIVETDESQGIFVEKNMIHNCSLIASALTISNIQAGSTGNWGCHVQTKRGNNTRTVDIVVLESSAQYCPPERVVNNKGDFRWPRTLAGITAYLQCTRNTHGSGIYPGNPQDERKAWRRCDRGGFWADDDYSRCQYANDVTRVLYMFNQMPLNLTNAVATARQLLAYTVEAANFSDKMDVIFVAEMIEKFGRFTKEEKSKELGDVMVDIASNIMLADERVLWLAQREAKACSRIVQCLQRIATYRLAGGAHVYSTYSPNIALEAYVIKSTGFTGMTCTVFQKVAASDRTGLSDYGRRDPEGNLDKQLSFKCNVSNTFSSLALKVCYILQSFKTIYS

SEQ ID NO: 415 - protein, 34 aa, Homo Sapiens
MLRFYLIGGGIPIIVCGITAAANIKNYGSRPNAP

SEQ ID NO: 416 - protein, 381 aa, Homo Sapiens
MPLKRNNSKYPPLELPSFYMTPSHRQVVFEGDSLPFQCMASYIDQDMQVLWYQDGRIVETDESQGIFVEKNMIHNCSLIASALTISNIQAGSTGNWGCHVQTKRGNNTRTVDIVVLESSAQYCPPERVVNNKGDFRWPRTLAGITAYLQCTRNTHGSGIYPGNPQDERKAWRRCDRGGFWADDDYSRCQYANDVTRVLYMFNQMPLNLTNAVATARQLLAYTVEAANFSDKMDVIFVAEMIEKFGRFTKEEKSKELGDVMVDIASNIMLADERVLWLAQREAKACSRIVQCLQRIATYRLAGGAHVYSTYSPNIALEAYVIKSTGFTGMTCTVFQKVAASDRTGLSDYGRRDPEGNLDKQLSFKCNVSNTFSSLALKGKFR

SEQ ID NO: 417 - protein, 847 aa, Homo Sapiens
GKGHRMTPACPLLLSVILSLRLATAFDPAPSACSALASGVLYGAFSLQDLFPTIASGCSWTLENPDPTKYSLYLRFNRQEQVCAHFAPRLLPLDHYLVNFTCLRPSPEEAVAQAESEVGRPEEEEAEAAAGLELCSGSGPFTFLHFDKNFVQLCLSAEPSEAPRLLAPAALAFRFVEVLLINNNNSSQFTCGVLCRWSEECGRAAGRACGFAQPGCSCPGEAGAGSTTTTSPGPPAAHTLSNALVPGGPAPPAEADLHSGSSNDLFTTEMRYGEEPEEEPKVKTQWPRSADEPGLYMAQTGDPAAEEWSPWSVCSLTCGQGLQVRTRSCVSSPYGTLCSGPLRETRPCNNSATCPVEGQWLEWGPWGPCSTSCANGTQQRSRKCSVAGPAWATCTGALTDTRECSNLECPATDSKWGPWNAWSLCSKTCDTGWQRRFRMCQATGTQGYPCEGTGEEVKPCSEKRCPAFHEMCRDEYVMLMTWKKAAAGEIIYNKCPPNASGSASRRCLLSAQGVAYWGLPSFARCISHEYRYLYLSLREHLAKGQRMLAGEGMSQVVRSLQELLARRTYYSGDLLFSVDILRNVTDTFKRATYVPSADDVQRFFQVVSFMVDAENKEKWDDAQQVSPGSVHLLRVVEDFIHLVGDALKAFQSSLIVTDNLVISIQREPVSAVSSDITFPMRGRRGMKDWVRHSEDRLFLPKEVLSLSSPGKPATSGAAGSPGRGRGPGTVPPGPGHSHQRLLPADPDESSYFVIGAVLYRTLGLILPPPRPPLAVTSRVMTVTVRPPTQPPAEPLITVELSYIINGTTDPHCASWDYSRADASSGDWDTENCQTLETQAAHTRCQCQ

SEQ ID NO: 418 - protein, 1585 aa, Homo Sapiens
MENTGWMGKGHRMTPACPLLLSVILSLRLATAFDPAPSACSALASGVLYGAFSLQDLFPTIASGCSWTLENPDPTKYSLYLRFNRQEQVCAHFAPRLLPLDHYLVNFTCLRPSPEEAVAQAESEVGRPEEEEAEAAAGLELCSGSGPFTFLHFDKNFVQLCLSAEPSEAPRLLAPAALAFRFVEVLLINNNNSSQFTCGVLCRWSEECGRAAGRACGFAQPGCSCPGEAGAGSTTTTSPGPPAAHTLSNALVPGGPAPPAEADLHSGSSNDLFTTEMRYGEEPEEEPKVKTQWPRSADEPGLYMAQTGDPAAEEWSPWSVCSLTCGQGLQVRTRSCVSSPYGTLCSGPLRETRPCNNSATCPVHGVWEEWGSWSLCSRSCGRGSRSRMRTCVPPQHGGKACEGPELQTKLCSMAACPVEGQWLEWGPWGPCSTSCANGTQQRSRKCSVAGPAWATCTGALTDTRECSNLECPATDSKWGPWNAWSLCSKTCDTGWQRRFRMCQATGTQGYPCEGTGEEVKPCSEKRCPAFHEMCRDEYVMLMTWKKAAAGEIIYNKCPPNASGSASRRCLLSAQGVAYWGLPSFARCISHEYRYLYLSLREHLAKGQRMLAGEGMSQVVRSLQELLARRTYYSGDLLFSVDILRNVTDTFKRATYVPSADDVQRFFQVVSFMVDAENKEKWDDAQQVSPGSVHLLRVVEDFIHLVGDALKAFQSSLIVTDNLVISIQREPVSAVSSDITFPMRGRRGMKDWVRHSEDRLFLPKEVLSLSSPGKPATSGAAGSPGRGRGPGTVPPGPGHSHQRLLPADPDESSYFVIGAVLYRTLGLILPPPRPPLAVTSRVMTVTVRPPTQPPAEPLITVELSYIINGTTDPHCASWDYSRADASSGDWDTENCQTLETQAAHTRCQCQHLSTFAVLAQPPKDLTLELAGSPSVPLVIGCAVSCMALLTLLAIYAAFWRFIKSERSIILLNFCLSILASNILILVGQSRVLSKGVCTMTAAFLHFFFLSSFCWVLTEAWQSYLAVIGRMRTRLVRKRFLCLGWGLPALVVAVSVGFTRTKGYGTSSYCWLSLEGGLLYAFVGPAAVIVLVNMLIGIIVFNKLMARDGISDKSKKQRAGSERCPWASLLLPCSACGAVPSPLLSSASARNAMASLWSSCVVLPLLALTWMSAVLAMTDRRSVLFQALFAVFNSAQGFVITAVHCFLRREVQDVVKCQMGVCRADESEDSPDSCKNGQLQILSDFEKDVDLACQTVLFKEVNTCNPSTITGTLSRLSLDEDEEPKSCLVGPEGSLSFSPLPGNILVPMAASPGLGEPPPPQEANPVYMCGEGGLRQLDLTWLRPTEPGSEGDYMVLPRRTLSLQPGGGGGGGEDAPRARPEGTPRRAAKTVAHTEGYPSFLSVDHSGLGLGPAYGSLQNPYGMTFQPPPPTPSARQVPEPGERSRTMPRTVPGSTMKMGSLERKKLRYSDLDFEKVMHTRKRHSELYHELNQKFHTFDRYRSQSTAKREKRWSVSSGGAAERSVCTDKPSPGERPSLSQHRRHQSWSTFKSMTLGSLPPKPRERLTLHRAAAWEPTEPPDGDFQTEV

SEQ ID NO: 419 - protein, 1584 aa, Homo Sapiens
MENTGWMGKGHRMTPACPLLLSVILSLRLATAFDPAPSACSALASGVLYGAFSLQDLFPTIASGCSWTLENPDPTKYSLYLRFNRQEQVCAHFAPRLLPLDHYLVNFTCLRPSPEEAVAQAESEVGRPEEEEAEAAAGLELCSGSGPFTFLHFDKNFVQLCLSAEPSEAPRLLAPAALAFRFVEVLLINNNNSSQFTCGVLCRWSEECGRAAGRACGFAQPGCSCPGEAGAGSTTTTSPGPPAAHTLSNALVPGGPAPPAEADLHSGSSNDLFTTEMRYGEEPEEEPKVKTQWPRSADEPGLYMAQTGDPAAEEWSPWSVCSLTCGQGLQVRTRSCVSSPYGTLCSGPLRETRPCNNSATCPVHGVWEEWGSWSLCSRSCGRGSRSRMRTCVPPQHGGKACEGPELQTKLCSMAACPVEGQWLEWGPWGPCSTSCANGTQQRSRKCSVAGPAWATCTGALTDTRECSNLECPATDSKWGPWNAWSLCSKTCDTGWQRRFRMCQATGTQGYPCEGTGEEVKPCSEKRCPAFHEMCRDEYVMLMTWKKAAAGEIIYNKCPPNASGSASRRCLLSAQGVAYWGLPSFARCISHEYRYLYLSLREHLAKGQRMLAGEGMSQVVRSLQELLARRTYYSGDLLFSVDILRNVTDTFKRATYVPSADDVQRFFQVVSFMVDAENKEKWDDAQQVSPGSVHLLRVVEDFIHLVGDALKAFQSSLIVTDNLVISIQREPVSAVSSDITFPMRGRRGMKDWVRHSEDRLFLPKEVLSLSSPGKPATSGAAGSPGRGRGPGTVPPGPGHSHQRLLPADPDESSYFVIGAVLYRTLGLILPPPRPPLAVTSRVMTVTVRPPTQPPAEPLITVELSYIINGTTDPHCASWDYSRADASSGDWDTENCQTLETQAAHTRCQCQHLSTFAVLAQPPKDLTLELAGSPSVPLVIGCAVSCMALLTLLAIYAAFWRFIKSERSIILLNFCLSILASNILILVGQSRVLSKGVCTMTAAFLHFFFLSSFCWVLTEAWQSYLAVIGRMRTRLVRKRFLCLGWGLPALVVAVSVGFTRTKGYGTSSYCWLSLEGGLLYAFVGPAAVIVLVNMLIGIIVFNKLMARDGISDKSKKQRAGSERCPWASLLLPCSACGAVPSPLLSSASARNAMASLWSSCVVLPLLALTWMSAVLAMTDRRSVLFQALFAVFNSAQGFVITAVHCFLRREVQDVVKCQMGVCRADESEDSPDSCKNGQLQILSDFEKDVDLACQTVLFKEVNTCNPSTITGTLSRLSLDEDEEPKSCLVGPEGSLSFSPLPGNILVPMAASPGLGEPPPPQEANPVYMCGEGGLRQLDLTWLRPTEPGSEGDYMVLPRRTLSLQPGGGGGGGEDAPRARPEGTPRRAAKTVAHTEGYPSFLSVDHSGLGLGPAYGSLQNPYGMTFQPPPPTPSARQVPEPGERSRTMPRTVPGSTMKMGSLERKKLRYSDLDFEVMHTRKRHSELYHELNQKFHTFDRYRSQSTAKREKRWSVSSGGAAERSVCTDKPSPGERPSLSQHRRHQSWSTFKSMTLGSLPPKPRERLTLHRAAAWEPTEPPDGDFQTEV

SEQ ID NO: 420 - protein, 1551 aa, Homo Sapiens
MENTGWMGKGHRMTPACPLLLSVILSLRLATAFDPAPSACSALASGVLYGAFSLQDLFPTIASGCSWTLENPDPTKYSLYLRFNRQEQVCAHFAPRLLPLDHYLVNFTCLRPSPEEAVAQAESEVGRPEEEEAEAAAGLELCSGSGPFTFLHFDKNFVQLCLSAEPSEAPRLLAPAALAFRFVEVLLINNNNSSQFTCGVLCRWSEECGRAAGRACGFAQPGCSCPGEAGAGSTTTTSPGPPAAHTLSNALVPGGPAPPAEADLHSGSSNDLFTTEMRYGEEPEEEPKVKTQWPRSADEPGLYMAQTGDPAAEEWSPWSVCSLTCGQGLQVRTRSCVSSPYGTLCSGPLRETRPCNNSATCPVHGVWEEWGSWSLCSRSCGRGSRSRMRTCVPPQHGGKACEGPELQTKLCSMAACPVEGQWLEWGPWGPCSTSCANGTQQRSRKCSVAGPAWATCTGALTDTRECSNLECPATDSKWGPWNAWSLCSKTCDTGWQRRFRMCQATGTQGYPCEGTGEEVKPCSEKRCPAFHEMCRDEYVMLMTWKKAAAGEIIYNKCPPNASGSASRRCLLSAQGVAYWGLPSFARCISHEYRYLYLSLREHLAKGQRMLAGEGMSQVVRSLQELLARRTYYSGDLLFSVDILRNVTDTFKRATYVPSADDVQRFFQVVSFMVDAENKEKWDDAQQVSPGSVHLLRVVEDFIHLVGDALKAFQSSLIVTDNLVISIQREPVSAVSSDITFPMRGRRGMKDWVRHSEDRLFLPKEVLSLSSPGKPATSGAAGSPGRGRGPGTVPPGPGHSHQRLLPADPDESSYFVIGAVLYRTLGLILPPPRPPLAVTSRVMTVTVRPPTQPPAEPLITVELSYIINGTTDPHCASWDYSRADASSGDWDTENCQTLETQAAHTRCQCQHLSTFAVLAQPPKDLTLELAGSPSVPLVIGCAVSCMALLTLLAIYAAFWRFIKSERSIILLNFCLSILASNILILVGQSRVLSKGVCTMTAAFLHFFFLSSFCWVLTEAWQSYLAVIGRMRTRLVRKRFLCLGWGLPALVVAVSVGFTRTKGYGTSSYCWLSLEGGLLYAFVGPAAVIVLVNMLIGIIVFNKLMARDGISDKSKKQRAGASLWSSCVVLPLLALTWMSAVLAMTDRRSVLFQALFAVFNSAQGFVITAVHCFLRREVQDVVKCQMGVCRADESEDSPDSCKNGQLQILSDFEKDVDLACQTVLFKEVNTCNPSTITGTLSRLSLDEDEEPKSCLVGPEGSLSFSPLPGNILVPMAASPGLGEPPPPQEANPVYMCGEGGLRQLDLTWLRPTEPGSEGDYMVLPRRTLSLQPGGGGGGGEDAPRARPEGTPRRAAKTVAHTEGYPSFLSVDHSGLGLGPAYGSLQNPYGMTFQPPPPTPSARQVPEPGERSRTMPRTVPGSTMKMGSLERKKLRYSDLDFEVMHTRKRHSELYHELNQKFHTFDRYRSQSTAKREKRWSVSSGGAAERSVCTDKPSPGERPSLSQHRRHQSWSTFKSMTLGSLPPKPRERLTLHRAAAWEPTEPPDGDFQTEV

SEQ ID NO: 421 - protein, 507 aa, Homo Sapiens
MHLPRQHGSAHLGHLYAYAKFSAHDWHLHAQGHAICNAHGKGKGHRMTPACPLLLSVILSLRLATAFDPAPSACSALASGVLYGAFSLQDLFPTIASGCSWTLENPDPTKYSLYLRFNRQEQVCAHFAPRLLPLDHYLVNFTCLRPSPEEAVAQAESEVGRPEEEEAEAAAGLELCSGSGPFTFLHFDKNFVQLCLSAEPSEAPRLLAPAALAFRFVEVLLINNNNSSQFTCGVLCRWSEECGRAAGRACGFAQPGCSCPGEAGAGSTTTTSPGPPAAHTLSNALVPGGPAPPAEADLHSGSSNDLFTTEMRYGEEPEEEPKVKTQWPRSADEPGLYMAQTVHGVWEEWGSWSLCSRSCGRGSRSRMRTCVPPQHGGKACEGPELQTKLCSMAACPVEGQWLEWGPWGPCSTSCANGTQQRSRKCSVAGPAWATCTGALTDTRECSNLECPATDSKWGPWNAWSLCSKTCDTGWQRRFRMCQATGTQGYPCEGTGEEVKPCSEKRCP

SEQ ID NO: 422 - protein, 1500 aa, Homo Sapiens
MLSLRGPDTHGKGHRMTPACPLLLSVILSLRLATAFDPAPSACSALASGVLYGAFSLQDLFPTIASGCSWTLENPDPTKYSLYLRFNRQEQVCAHFAPRLLPLDHYLVNFTCLRPSPEEAVAQAESEVGRPEEEEAEAAAGLELCSGSGPFTFLHFDKNFVQLCLSAEPSEAPRLLAPAALAFRFVEVLLINNNNSSQFTCGVLCRWSEECGRAAGRACGFAQPGCSCPGEAGAGSTTTTSPGPPAAHTLSNALVPGGPAPPAEADLHSGSSNDLFTTEMRYGEEPEEEPKVKTQWPRSADEPGLYMAQTVHGVWEEWGSWSLCSRSCGRGSRSRMRTCVPPQHGGKACEGPELQTKLCSMAACPVEGQWLEWGPWGPCSTSCANGTQQRSRKCSVAGPAWATCTGALTDTRECSNLECPATDSKWGPWNAWSLCSKTCDTGWQRRFRMCQATGTQGYPCEGTGEEVKPCSEKRCPAFHEMCRDEYVMLMTWKKAAAGEIIYNKCPPNASGSASRRCLLSAQGVAYWGLPSFARCISHEYRYLYLSLREHLAKGQRMLAGEGMSQVVRSLQELLARRTYYSGDLLFSVDILRNVTDTFKRATYVPSADDVQRFFQVVSFMVDAENKEKWDDAQQVSPGSVHLLRVVEDFIHLVGDALKAFQSSLIVTDNLVISIQREPVSAVSSDITFPMRGRRGMKDWVRHSEDRLFLPKEVLSLSSPGKPATSGAAGSPGRGRGPGTVPPGPGHSHQRLLPADPDESSYFVIGAVLYRTLGLILPPPRPPLAVTSRVMTVTVRPPTQPPAEPLITVELSYIINGTTDPHCASWDYSRADASSGDWDTENCQTLETQAAHTRCQCQHLSTFAVLAQPPKDLTLELAGSPSVPLVIGCAVSCMALLTLLAIYAAFWRFIKSERSIILLNFCLSILASNILILVGQSRVLSKGVCTMTAAFLHFFFLSSFCWVLTEAWQSYLAVIGRMRTRLVRKRFLCLGWGLPALVVAVSVGFTRTKGYGTSSYCWLSLEGGLLYAFVGPAAVIVLVNMLIGIIVFNKLMARDGISDKSKKQRAGASLWSSCVVLPLLALTWMSAVLAMTDRRSVLFQALFAVFNSAQGFVITAVHCFLRREVQDVVKCQMGVCRADESEDSPDSCKNGQLQILSDFEKDVDLACQTVLFKEVNTCNPSTITGTLSRLSLDEDEEPKSCLVGPEGSLSFSPLPGNILVPMAASPGLGEPPPPQEANPVYMCGEGGLRQLDLTWLRPTEPGSEGDYMVLPRRTLSLQPGGGGGGGEDAPRARPEGTPRRAAKTVAHTEGYPSFLSVDHSGLGLGPAYGSLQNPYGMTFQPPPPTPSARQVPEPGERSRTMPRTVPGSTMKMGSLERKKLRYSDLDFEKVMHTRKRHSELYHELNQKFHTFDRYRSQSTAKREKRWSVSSGGAAERSVCTDKPSPGERPSLSQHRRHQSWSTFKSMTLGSLPPKPRERLTLHRAAAWEPTEPPDGDFQTEV

SEQ ID NO: 423 - protein, 1554 aa, Homo Sapiens
MTPACPLLLSVILSLRLATAFDPAPSACSALASGVLYGAFSLQDLFPTIASGCSWTLENPDPTKYSLYLRFNRQEQVCAHFAPRLLPLDHYLVNFTCLRPSPEEAVAQAESEVGRPEEEEAEAAAGLELCSGSGPFTFLHFDKNFVQLCLSAEPSEAPRLLAPAALAFRFVEVLLINNNNSSQFTCGVLCRWSEECGRAAGRACGFAQPGCSCPGEAGAGSTTTTSPGPPAAHTLSNALVPGGPAPPAEADLHSGSSNDLFTTEMRYGEEPEEEPKVKTQWPRSADEPGLYMAQTGDPAAEEWSPWSVCSLTCGQGLQVRTRSCVSSPYGTLCSGPLRETRPCNNSATCPVHGVWEEWGSWSLCSRSCGRGSRSRMRTCVPPQHGGKACEGPELQTKLCSMAACPVEGQWLEWGPWGPCSTSCANGTQQRSRKCSVAGPAWATCTGALTDTRECSNLECPATDSKWGPWNAWSLCSKTCDTGWQRRFRMCQATGTQGYPCEGTGEEVKPCSEKRCPAFHEMCRDEYVMLMTWKKAAAGEIIYNKCPPNASGSASRRCLLSAQGVAYWGLPSFARCISHEYRYLYLSLREHLAKGQRMLAGEGMSQVVRSLQELLARRTYYSGDLLFSVDILRNVTDTFKRATYVPSADDVQRFFQVVSFMVDAENKEKWDDAQQVSPGSVHLLRVVEDFIHLVGDALKAFQSSLIVTDNLVISIQREPVSAVSSDITFPMRGRRGMKDWVRHSEDRLFLPKEVLSLSSPGKPATSGAAGSPGRGRGPGTVPPGPGHSHQRLLPADPDESSYFVIGAVLYRTLGLILPPPRPPLAVTSRVMTVTVRPPTQPPAEPLITVELSYIINGTTDPHCASWDYSRADASSGDWDTENCQTLETQAAHTRCQCQHLSTFAVLAQPPKDLTLELAGSPSVPLVIGCAVSCMALLTLLAIYAAFWRFIKSERSIILLNFCLSILASNILILVGQSRVLSKGVCTMTAAFLHFFFLSSFCWVLTEAWQSYLAVIGRMRTRLVRKRFLCLGWGLPALVVAVSVGFTRTKGYGTSSYCWLSLEGGLLYAFVGPAAVIVLVNMLIGIIVFNKLMARDGISDKSKKQRAGSERCPWASLLLPCSACGAVPSPLLSSASARNAMASLWSSCVVLPLLALTWMSAVLAMTDRRSVLFQALFAVFNSAQGFVITAVHCFLRREVQDVVKCQMGVCRADESEDSPDSCKNGQLQILSDFEKDVDLACQTVLFKEVNTCNPSTITGTLSRLSLDEDEEPKSCLVGPEGSLSFSPLPGNILVPMAASPGLGEPPPPQEANPVYMCGEGGLRQLDLTWLRPTEPGSEGDYMVLPRRTLSLQPGGGGGGGEDAPRARPEGTPRRAAKTVAHTEGYPSFLSVDHSGLGLGPAYGSLQNPYGMTFQPPPPTPSARQVPEPGERSRTMPRTVPGSTMKMGSLERKKLRYSDLDFEKVMHTRKRHSELYHELNQKFHTFDRYRSQSTAKDKPSPGERPSLSQHRRHQSWSTFKSMTLGSLPPKPRERLTLHRAAAWEPTEPPDGDFQTEV

SEQ ID NO: 424 - protein, 1499 aa, Homo Sapiens
MTPACPLLLSVILSLRLATAFDPAPSACSALASGVLYGAFSLQDLFPTIASGCSWTLENPDPTKYSLYLRFNRQEQVCAHFAPRLLPLDHYLVNFTCLRPSPEEAVAQAESEVGRPEEEEAEAAAGLELCSGSGPFTFLHFDKNFVQLCLSAEPSEAPRLLAPAALAFRFVEVLLINNNNSSQFTCGVLCRWSEECGRAAGRACGFAQPGCSCPGEAGAGSTTTTSPGPPAAHTLSNALVPGGPAPPAEADLHSGSSNDLFTTEMRYGEEPEEEPKVKTQWPRSADEPGLYMAQTVHGVWEEWGSWSLCSRSCGRGSRSRMRTCVPPQHGGKACEGPELQTKLCSMAACPVEGQWLEWGPWGPCSTSCANGTQQRSRKCSVAGPAWATCTGALTDTRECSNLECPATDSKWGPWNAWSLCSKTCDTGWQRRFRMCQATGTQGYPCEGTGEEVKPCSEKRCPAFHEMCRDEYVMLMTWKKAAAGEIIYNKCPPNASGSASRRCLLSAQGVAYWGLPSFARCISHEYRYLYLSLREHLAKGQRMLAGEGMSQVVRSLQELLARRTYYSGDLLFSVDILRNVTDTFKRATYVPSADDVQRFFQVVSFMVDAENKEKWDDAQQVSPGSVHLLRVVEDFIHLVGDALKAFQSSLIVTDNLVISIQREPVSAVSSDITFPMRGRRGMKDWVRHSEDRLFLPKEVLSLSSPGKPATSGAAGSPGRGRGPGTVPPGPGHSHQRLLPADPDESSYFVIGAVLYRTLGLILPPPRPPLAVTSRVMTVTVRPPTQPPAEPLITVELSYIINGTTDPHCASWDYSRADASSGDWDTENCQTLETQAAHTRCQCQHLSTFAVLAQPPKDLTLELAGSPSVPLVIGCAVSCMALLTLLAIYAAFWRFIKSERSIILLNFCLSILASNILILVGQSRVLSKGVCTMTAAFLHFFFLSSFCWVLTEAWQSYLAVIGRMRTRLVRKRFLCLGWGLPALVVAVSVGFTRTKGYGTSSYCWLSLEGGLLYAFVGPAAVIVLVNMLIGIIVFNKLMARDGISDKSKKQRAGSERCPWASLLLPCSACGAVPSPLLSSASARNAMASLWSSCVVLPLLALTWMSAVLAMTDRRSVLFQALFAVFNSAQGFVITAVHCFLRREVQDVVKCQMGVCRADESEDSPDSCKNGQLQILSDFEKDVDLACQTVLFKEVNTCNPSTITGTLSRLSLDEDEEPKSCLVGPEGSLSFSPLPGNILVPMAASPGLGEPPPPQEANPVYMCGEGGLRQLDLTWLRPTEPGSEGDYMVLPRRTLSLQPGGGGGGGEDAPRARPEGTPRRAAKTVAHTEGYPSFLSVDHSGLGLGPAYGSLQNPYGMTFQPPPPTPSARQVPEPGERSRTMPRTVPGSTMKMGSLERKKLRYSDLDFEKVMHTRKRHSELYHELNQKFHTFDRYRSQSTAKDKPSPGERPSLSQHRRHQSWSTFKSMTLGSLPPKPRERLTLHRAAAWEPTEPPDGDFQTEV

SEQ ID NO: 425 - protein, 1466 aa, Homo Sapiens
MTPACPLLLSVILSLRLATAFDPAPSACSALASGVLYGAFSLQDLFPTIASGCSWTLENPDPTKYSLYLRFNRQEQVCAHFAPRLLPLDHYLVNFTCLRPSPEEAVAQAESEVGRPEEEEAEAAAGLELCSGSGPFTFLHFDKNFVQLCLSAEPSEAPRLLAPAALAFRFVEVLLINNNNSSQFTCGVLCRWSEECGRAAGRACGFAQPGCSCPGEAGAGSTTTTSPGPPAAHTLSNALVPGGPAPPAEADLHSGSSNDLFTTEMRYGEEPEEEPKVKTQWPRSADEPGLYMAQTGDPAAEEWSPWSVCSLTCGQGLQVRTRSCVSSPYGTLCSGPLRETRPCNNSATCPVEGQWLEWGPWGPCSTSCANGTQQRSRKCSVAGPAWATCTGALTDTRECSNLECPATDSKWGPWNAWSLCSKTCDTGWQRRFRMCQATGTQGYPCEGTGEEVKPCSEKRCPAFHEMCRDEYVMLMTWKKAAAGEIIYNKCPPNASGSASRRCLLSAQGVAYWGLPSFARCISHEYRYLYLSLREHLAKGQRMLAGEGMSQVVRSLQELLARRTYYSGDLLFSVDILRNVTDTFKRATYVPSADDVQRFFQVVSFMVDAENKEKWDDAQQVSPGSVHLLRVVEDFIHLVGDALKAFQSSLIVTDNLVISIQREPVSAVSSDITFPMRGRRGMKDWVRHSEDRLFLPKEVLSLSSPGKPATSGAAGSPGRGRGPGTVPPGPGHSHQRLLPADPDESSYFVIGAVLYRTLGLILPPPRPPLAVTSRVMTVTVRPPTQPPAEPLITVELSYIINGTTDPHCASWDYSRADASSGDWDTENCQTLETQAAHTRCQCQHLSTFAVLAQPPKDLTLELAGSPSVPLVIGCAVSCMALLTLLAIYAAFWRFIKSERSIILLNFCLSILASNILILVGQSRVLSKGVCTMTAAFLHFFFLSSFCWVLTEAWQSYLAVIGRMRTRLVRKRFLCLGWGLPALVVAVSVGFTRTKGYGTSSYCWLSLEGGLLYAFVGPAAVIVLVNMLIGIIVFNKLMARDGISDKSKKQRAGASLWSSCVVLPLLALTWMSAVLAMTDRRSVLFQALFAVFNSAQGFVITAVHCFLRREVQDVVKCQMGVCRADESEDSPDSCKNGQLQILSDFEKDVDLACQTVLFKEVNTCNPSTITGTLSRLSLDEDEEPKSCLVGPEGSLSFSPLPGNILVPMAASPGLGEPPPPQEANPVYMCGEGGLRQLDLTWLRPTEPGSEGDYMVLPRRTLSLQPGGGGGGGEDAPRARPEGTPRRAAKTVAHTEGYPSFLSVDHSGLGLGPAYGSLQNPYGMTFQPPPPTPSARQVPEPGERSRTMPRTVPGSTMKMGSLERKKLRYSDLDFEKVMHTRKRHSELYHELNQKFHTFDRYRSQSTAKDKPSPGERPSLSQHRRHQSWSTFKSMTLGSLPPKPRERLTLHRAAAWEPTEPPDGDFQTEV

SEQ ID NO: 426 - protein, 906 aa, Homo Sapiens
MEKLLRLCCWYSWLLLFYYNFQVRGVYSRSQDHPGFQVLASASHYWPLENVDGIHELQDTTGASRTHKLTVLPSRNATFVYSNDSAYSNLSATVDIVEGKVNKGIYLKEEKGVTLLYYGRYNSSCISKPEQCGPEGVTFSFFWKTQGEQSRPIPSAYGGQVISNGFKVCSSGGRGSVELYTRDNSMTWEASFSPPGPYWTHVLFTWKSKEGLKVYVNGTLSTSDPSGKVSRDYGESNVNLVIGSEQDQAKCYENGAFDEFIIWERALTPDEIAMYFTAAIGKHALLSSTLPSLFMTSTASPVMPTDAYHPIITNLTEERKTFQSPGVILSYLQNVSLSLPSKSLSEQTALNLTKTFLKAVGEILLLPGWIALSEDSAVVLSLIDTIDTVMGHVSSNLHGSTPQVTVEGSSAMAEFSVAKILPKTVNSSHYRFPAHGQSFIQIPHEAFHRHAWSTVVGLLYHSMHYYLNNIWPAHTKIAEAMHHQDCLLFATSHLISLEVSPPPTLSQNLSGSPLITVHLKHRLTRKQHSEATNSSNRVFVYCAFLDFSSGEGVWSNHGCALTRGNLTYSVCRCTHLTNFAILMQVVPLELARGHQVALSSISYVGCSLSVLCLVATLVTFAVLSSVSTIRNQRYHIHANLSFAVLVAQVLLLISFRLEPGTTPCQVMAVLLHYFFLSAFAWMLVEGLHLYSMVIKVFGSEDSKHRYYYGMGWGFPLLICIISLSFAMDSYGTSNNCWLSLASGAIWAFVAPALFVIVVNIGILIAVTRVISQISADNYKIHGDPSAFKLTAKAVAVLLPILGTSWVFGVLAVNGCAVVFQYMFATLNSLQGLFIFLFHCLLNSEVRAAFKHKTKVWSLTSSSARTSNAKPFHSDLMNGTRPGMASTKLSPWDKSSHSAHRVDLSAV

SEQ ID NO: 427 - protein, 221 aa, Homo Sapiens
MEKLLRLCCWYSWLLLFYYNFQVRGVYSRSQDHPGFQVLASASHYWPLENVDGIHELQDTTGDIVEGKVNKGIYLKEEKGVTLLYYGRYNSSCISKPEQCGPEGPYWTHVLFTWKSKEGLKVYVNGTLSTSDPSGKVSRDYGESNVNLVIGSEQDQAKCYENGAFDEFIIWERALTPDEIAMYFTAAIGKHALLSSTLPSLFMTSTASPVMPTDAYHPIIT

SEQ ID NO: 428 - protein, 874 aa, Homo Sapiens
MEKLLRLCCWYSWLLLFYYNFQVRGVYSRSQDHPGFQVLASASHYWPLENVDGIHELQDTTGDIVEGKVNKGIYLKEEKGVTLLYYGRYNSSCISKPEQCGPEGVTFSFFWKTQGEQSRPIPSAYGGQVISNGFKVCSSGGRGSVELYTRDNSMTWEASFSPPGPYWTHVLFTWKSKEGLKVYVNGTLSTSDPSGKVSRDYGESNVNLVIGSEQDQAKCYENGAFDEFIIWERALTPDEIAMYFTAAIGKHALLSSTLPSLFMTSTASPVMPTDAYHPIITNLTEERKTFQSPGVILSYLQNVSLSLPSKSLSEQTALNLTKTFLKAVGEILLLPGWIALSEDSAVVLSLIDTIDTVMGHVSSNLHGSTPQVTVEGSSAMAEFSVAKILPKTVNSSHYRFPAHGQSFIQIPHEAFHRHAWSTVVGLLYHSMHYYLNNIWPAHTKIAEAMHHQDCLLFATSHLISLEVSPPPTLSQNLSGSPLITVHLKHRLTRKQHSEATNSSNRVFVYCAFLDFSSGEGVWSNHGCALTRGNLTYSVCRCTHLTNFAILMQVVPLELARGHQVALSSISYVGCSLSVLCLVATLVTFAVLSSVSTIRNQRYHIHANLSFAVLVAQVLLLISFRLEPGTTPCQVMAVLLHYFFLSAFAWMLVEGLHLYSMVIKVFGSEDSKHRYYYGMGWGFPLLICIISLSFAMDSYGTSNNCWLSLASGAIWAFVAPALFVIVVNIGILIAVTRVISQISADNYKIHGDPSAFKLTAKAVAVLLPILGTSWVFGVLAVNGCAVVFQYMFATLNSLQGLFIFLFHCLLNSEVRAAFKHKTKVWSLTSSSARTSNAKPFHSDLMNGTRPGMASTKLSPWDKSSHSAHRVDLSAV

SEQ ID NO: 429 - protein, 393 aa, Homo Sapiens
MHRVCFLSFQTRKQHSEATNSSNRVFVYCAFLDFSSGEGVWSNHGCALTRGNLTYSVCRCTHLTNFAILMQVVPLELARGHQVALSSISYVGCSLSVLCLVATLVTFAVLSSVSTIRNQRYHIHANLSFAVLVAQVLLLISFRLEPGTTPCQVMAVLLHYFFLSAFAWMLVEGLHLYSMVIKVFGSEDSKHRYYYGMGWGFPLLICIISLSFAMDSYGTSNNCWLSLASGAIWAFVAPALFVIVVNIGILIAVTRVISQISADNYKIHGDPSAFKLTAKAVAVLLPILGTSWVFGVLAVNGCAVVFQYMFATLNSLQGLFIFLFHCLLNSEVRAAFKHKTKVWSLTSSSARTSNAKPFHSDLMNGTRPGMASTKLSPWDKSSHSAHRVDLSAV

SEQ ID NO: 430 - protein, 345 aa, Homo Sapiens
MQVVPLELARGHQVALSSISYVGCSLSVLCLVATLVTFAVLSSVSTIRNQRYHIHANLSFAVLVAQVLLLISFRLEPGTTPCQVMAVLLHYFFLSAFAWMLVEGLHLYSMVIKVFGSEDSKHRYYYGMGWGFPLLICIISLSFAMDSYGTSNNCWLSLASGAIWAFVAPALFVIVVNIGILIAVTRVISQISADNYKIHGDPSAFKLTAKAVAVLLPILGTSWVFGVLAVNGCAVVFQYMFATLNSLQGLFIFLFHCLLNSEARWAKEGRAESLSRMVAGQKGCMITKPSDPLIATPSDPLQGLRWIPVAGRQCSHGSPPAHPPACPPRICLFASLSHSPRDIHC

SEQ ID NO: 431 - protein, 156 aa, Homo Sapiens
MQVVPLEVNIGILIAVTRVISQISADNYKIHGDPSAFKLTAKAVAVLLPILGTSWVFGVLAVNGCAVVFQYMFATLNSLQGLFIFLFHCLLNSEVRAAFKHKTKVWSLTSSSARTSNAKPFHSDLMNGTRPGMASTKLSPWDKSSHSAHRVDLSAV

SEQ ID NO: 432 - protein, 437 aa, Homo Sapiens
MNSMDIRCSDIIQGDTQGPSAIAFISYSSLGNIINATFFEEMDKKDQVYLNSQVVSAAIGPKRNVSLSKSVTLTFQHVKMTPSTKKVFCVYWKSTGQGSQWSRDGCFLIHVNKSHTMCNCSHLSSFAVLMALTSQEEDPVLTVITYVGLSVSLLCLLLAALTFLLCKAIRNTSTSLHLQLSLCLFLAHLLFLVGIDRTEPKVLCSIIAGALHYLYLAAFTWMLLEGVHLFLTARNLTVVNYSSINRLMKWIMFPVGYGVPAVTVAISAASWPHLYGTADRCWLHLDQGFMWSFLGPVCAIFSANLVLFILVFWILKRKLSSLNSEVSTIQNTRMLAFKATAQLFILGCTWCLGLLQVGPAAQVMAYLFTIINSLQGFFIFLVYCLLSQQVQKQYQKWFREIVKSKSESETYTLSSKMGPDSKPSEGDVFPGQVKRKY

SEQ ID NO: 433 - protein, 57 aa, Homo Sapiens
MQGPLLLPGLCFLLSLFGAVTQKTKSECSEPEQRTCGPRAGPGATHGLQWAGEKCLF

SEQ ID NO: 434 - protein, 526 aa, Homo Sapiens
MQGPLLLPGLCFLLSLFGAVTQKTKTSCAKCPPNASCVNNTHCTCNHGYTSGSGQKLFTFPLETCNAIETQAITDNCSEERKTFNLNVQMNSMDIRCSDIIQGDTQGPSAIAFISYSSLGNIINATFFEEMDKKDQVYLNSQVVSAAIGPKRNVSLSKSVTLTFQHVKMTPSTKKVFCVYWKSTGQGSQWSRDGCFLIHVNKSHTMCNCSHLSSFAVLMALTSQEEDPVLTVITYVGLSVSLLCLLLAALTFLLCKAIRNTSTSLHLQLSLCLFLAHLLFLVGIDRTEPKVLCSIIAGALHYLYLAAFTWMLLEGVHLFLTARNLTVVNYSSINRLMKWIMFPVGYGVPAVTVAISAASWPHLYGTADRCWLHLDQGFMWSFLGPVCAIFSANLVLFILVFWILKRKLSSLNSEVSTIQNTRMLAFKATAQLFILGCTWCLGLLQVGPAAQVMAYLFTIINSLQGFFIFLVYCLLSQQVQKQYQKWFREIVKSKSESETYTLSSKMGPDSKPSEGDVFPGQVKRKY

SEQ ID NO: 435 - protein, 652 aa, Homo Sapiens
MQGPLLLPGLCFLLSLFGAVTQKTKTSCAKCPPNASCVNNTHCTCNHGYTSGSGQKLFTFPLETCNDINECTPPYSVYCGFNAVCYNVEGSFYCQCVPGYRLHSGNEQFSNSNENTCQDTTSSKTTEGRKELQKIVDKFESLLTNQTLWRTEGRQEISSTATTILRDVESKVLETALKDPEQKVLKIQNDSVAIETQAITDNCSEERKTFNLNVQMNSMDIRCSDIIQGDTQGPSAIAFISYSSLGNIINATFFEEMDKKDQVYLNSQVVSAAIGPKRNVSLSKSVTLTFQHVKMTPSTKKVFCVYWKSTGQGSQWSRDGCFLIHVNKSHTMCNCSHLSSFAVLMALTSQEEDPVLTVITYVGLSVSLLCLLLAALTFLLCKAIRNTSTSLHLQLSLCLFLAHLLFLVGIDRTEPKVLCSIIAGALHYLYLAAFTWMLLEGVHLFLTARNLTVVNYSSINRLMKWIMFPVGYGVPAVTVAISAASWPHLYGTADRCWLHLDQGFMWSFLGPVCAIFSANLVLFILVFWILKRKLSSLNSEVSTIQNTRMLAFKATAQLFILGCTWCLGLLQVGPAAQVMAYLFTIINSLQGFFIFLVYCLLSQQVQKQYQKWFREIVKSKSESETYTLSSKMGPDSKPSEGDVFPGQVKRKY

SEQ ID NO: 436 - protein, 600 aa, Homo Sapiens
MQGPLLLPGLCFLLSLFGAVTQKTKTSCAKCPPNASCVNNTHCTCNHGYTSGSGQKLFTFPLETCNDTTSSKTTEGRKELQKIVDKFESLLTNQTLWRTEGRQEISSTATTILRDVESKVLETALKDPEQKVLKIQNDSVAIETQAITDNCSEERKTFNLNVQMNSMDIRCSDIIQGDTQGPSAIAFISYSSLGNIINATFFEEMDKKDQVYLNSQVVSAAIGPKRNVSLSKSVTLTFQHVKMTPSTKKVFCVYWKSTGQGSQWSRDGCFLIHVNKSHTMCNCSHLSSFAVLMALTSQEEDPVLTVITYVGLSVSLLCLLLAALTFLLCKAIRNTSTSLHLQLSLCLFLAHLLFLVGIDRTEPKVLCSIIAGALHYLYLAAFTWMLLEGVHLFLTARNLTVVNYSSINRLMKWIMFPVGYGVPAVTVAISAASWPHLYGTADRCWLHLDQGFMWSFLGPVCAIFSANLVLFILVFWILKRKLSSLNSEVSTIQNTRMLAFKATAQLFILGCTWCLGLLQVGPAAQVMAYLFTIINSLQGFFIFLVYCLLSQQVQKQYQKWFREIVKSKSESETYTLSSKMGPDSKPSEGDVFPGQVKRKY

SEQ ID NO: 437 - protein, 786 aa, Homo Sapiens
MGGRVFLAFCVWLTLPGAETQDSRGCARWCPQNSSCVNATACRCNPGFSSFSEIITTPTETCDDINECATPSKVSCGKFSDCWNTEGSYDCVCSPGYEPVSGAKTFKNESENTCQDVDECQQNPRLCKSYGTCVNTLGSYTCQCLPGFKFIPEDPKVCTDVDECSSGQHQCDSSTVCFNTVGSYSCRCRPGWKPRHGIPNNQKDTVCEDMTFSTWTPPPGVHSQTLSRFFDKVQDLGRDSKTSSAEVTIQNVIKLVDELMEAPGDVEALAPPVRHLIATQLLSNLEDIMRILAKSLPKGPFTYISPSNTELTLMIQERGDKNVTMGQSSARMKLNWAVAAGAEDPGPAVAGILSIQNMTTLLANASLNLHSKKQAELEEIYESSIRGVQLRRLSAVNSIFLSHNNTKELNSPILFAFSHLESSDGEAGRDPPAKDVMPGPRQELLCAFWKSDSDRGGHWATEGCQVLGSKNGSTTCQCSHLSSFAILMAHYDVEDWKLTLITRVGLALSLFCLLLCILTFLLVRPIQGSRTTIHLHLCICLFVGSTIFLAGIENEGGQVGLRCRLVAGLLHYCFLAAFCWMSLEGLELYFLVVRVFQGQGLSTRWLCLIGYGVPLLIVGVSAAIYSKGYGRPRYCWLDFEQGFLWSFLGPVTFIILCNAVIFVTTVWKLTQKFSEINPDMKKLKKARALTITAIAQLFLLGCTWVFGLFIFDDRSLVLTYVFTILNCLQGAFLYLLHCLLNKKVREEYRKWACLVAGGSKYSEFTSTTSGTGHNQTRALRASESGI

SEQ ID NO: 438 - protein, 835 aa, Homo Sapiens
MGGRVFLAFCVWLTLPGAETQDSRGCARWCPQNSSCVNATACRCNPGFSSFSEIITTPTETCDDINECATPSKVSCGKFSDCWNTEGSYDCVCSPGYEPVSGAKTFKNESENTCQDVDECQQNPRLCKSYGTCVNTLGSYTCQCLPGFKFIPEDPKVCTDVNECTSGQNPCHSSTHCLNNVGSYQCRCRPGWQPIPGSPNGPNNTVCEDVDECSSGQHQCDSSTVCFNTVGSYSCRCRPGWKPRHGIPNNQKDTVCEDMTFSTWTPPPGVHSQTLSRFFDKVQDLGRDSKTSSAEVTIQNVIKLVDELMEAPGDVEALAPPVRHLIATQLLSNLEDIMRILAKSLPKGPFTYISPSNTELTLMIQERGDKNVTMGQSSARMKLNWAVAAGAEDPGPAVAGILSIQNMTTLLANASLNLHSKKQAELEEIYESSIRGVQLRRLSAVNSIFLSHNNTKELNSPILFAFSHLESSDGEAGRDPPAKDVMPGPRQELLCAFWKSDSDRGGHWATEGCQVLGSKNGSTTCQCSHLSSFAILMAHYDVEDWKLTLITRVGLALSLFCLLLCILTFLLVRPIQGSRTTIHLHLCICLFVGSTIFLAGIENEGGQVGLRCRLVAGLLHYCFLAAFCWMSLEGLELYFLVVRVFQGQGLSTRWLCLIGYGVPLLIVGVSAAIYSKGYGRPRYCWLDFEQGFLWSFLGPVTFIILCNAVIFVTTVWKLTQKFSEINPDMKKLKKARALTITAIAQLFLLGCTWVFGLFIFDDRSLVLTYVFTILNCLQGAFLYLLHCLLNKKVREEYRKWACLVAGGSKYSEFTSTTSGTGHNQTRALRASESGI

SEQ ID NO: 439 - protein, 742 aa, Homo Sapiens
MGGRVFLAFCVWLTLPGAETQDSRGCARWCPQNSSCVNATACRCNPGFSSFSEIITTPTETCDDINECATPSKVSCGKFSDCWNTEGSYDCVCSPGYEPVSGAKTFKNESENTCQDVDECSSGQHQCDSSTVCFNTVGSYSCRCRPGWKPRHGIPNNQKDTVCEDMTFSTWTPPPGVHSQTLSRFFDKVQDLGRDSKTSSAEVTIQNVIKLVDELMEAPGDVEALAPPVRHLIATQLLSNLEDIMRILAKSLPKGPFTYISPSNTELTLMIQERGDKNVTMGQSSARMKLNWAVAAGAEDPGPAVAGILSIQNMTTLLANASLNLHSKKQAELEEIYESSIRGVQLRRLSAVNSIFLSHNNTKELNSPILFAFSHLESSDGEAGRDPPAKDVMPGPRQELLCAFWKSDSDRGGHWATEGCQVLGSKNGSTTCQCSHLSSFAILMAHYDVEDWKLTLITRVGLALSLFCLLLCILTFLLVRPIQGSRTTIHLHLCICLFVGSTIFLAGIENEGGQVGLRCRLVAGLLHYCFLAAFCWMSLEGLELYFLVVRVFQGQGLSTRWLCLIGYGVPLLIVGVSAAIYSKGYGRPRYCWLDFEQGFLWSFLGPVTFIILCNAVIFVTTVWKLTQKFSEINPDMKKLKKARALTITAIAQLFLLGCTWVFGLFIFDDRSLVLTYVFTILNCLQGAFLYLLHCLLNKKVREEYRKWACLVAGGSKYSEFTSTTSGTGHNQTRALRASESGI

SEQ ID NO: 440 - protein, 164 aa, Homo Sapiens
MGGRVFLAFCVWLTLPGAETQDSRGCARWCPQNSSCVNATACRCNPGFSSFSEIITTPTETCDDINECATPSKVSCGKFSDCWNTEGSYDCVCSPGYEPVSGAKTFKNESENTCQDVNECTSGQNPCHSSTHCLNNVGSYQCRCRPGWQPIPGSPNGPNNTVCE

SEQ ID NO: 441 - protein, 154 aa, Homo Sapiens
MGGRVFLAFCVWLTLPGAETQDSRGCARWCPQNSSCVNATACRCNPGFSSFSEIITTPTETCDDINECATPSKVSCGKFSDCWNTEGSYDCVCSPGYEPVSGAKTFKNESENTCQGKNHPTSSDFPSMRFGVTRAILAASREQGLGCRVSAWRL

SEQ ID NO: 442 - protein, 157 aa, Homo Sapiens [sequence omitted]

SEQ ID NO: 443 - protein, 160 aa, Homo Sapiens
EYQLLLQVTYRDSKEKRDLRNFLKLLKPPLLWSHGLIRIIRAKATTDCNSLNGVLQCTCEDSYTWFPPSCLDPQNCYLHTAGALPSCECHLNNLSQSVNFCERTKIWGTFKINERFTNDLLNSSSAIYSKYANGIEIQLKKAYERIQGFESVQVTQFRPV

SEQ ID NO: 444 - protein, 713 aa, Homo Sapiens
MDISIQRNGSIVAGYEVVGSSSASELLSAIEHVAEKAKTALHKLFPLEDGSFRVFGKAQCNDIVFGFGSKDDEYTLPCSSGYRGNITAKCESSGWQVIRETCVLSLLEELNKNFSMIVGNATEAAVSSFVQNLSVIIRQNPSTTVGNLASVVSILSNISSLSLASHFRVSNSTMEDVISIADNILNSASVTNWTVLLREEKYASSRLLETLENISTLVPPTALPLNFSRKFIDWKGIPVNKSQLKRGYSYQIKMCPQNTSIPIRGRVLIGSDQFQRSLPETIISMASLTLGNILPVSKNGNAQVNGPVISTVIQNYSINEVFLFFSKIESNLSQPHCVFWDFSHLQWNDAGCHLVNETQDIVTCQCTHLTSFSILMSPFVPSTIFPVVKWITYVGLGISIGSLILCLIIEALFWKQIKKSQTSHTRRICMVNIALSLLIADVWFIVGATVDTTVNPSGVCTAAVFFTHFFYLSLFFWMLMLGILLAYRIILVFHHMAQHLMMAVGFCLGYGCPLIISVITIAVTQPSNTYKRKDVCWLNWSNGSKPLLAFVVPALAIVAVNFVVVLLVLTKLWRPTVGERLSRDDKATIIRVGKSLLILTPLLGLTWGFGIGTIVDSQNLAWHVIFALLNAFQGFFILCFGILLDSKLRQLLFNKLSALSSWKQTEKQNSSDLSAKPKFSKPFNPLQNKGHYAFSHTGDSSDNIMLTQFVSNE

SEQ ID NO: 445 - protein, 218 aa, Homo Sapiens
MKVGVLWLISFFTFTDGHGGFLGKNDGIKTKKELIVNKKKHLGPVEEYQLLLQVTYRDSKEKRDLRNFLKLLKPPLLWSHGLIRIIRAKATTDCNSLNGVLQCTCEDSYTWFPPSCLDPQNCYLHTAGALPSCECHLNNLSQSVNFCERTKIWGTFKINERFTNDLLNSSSAIYSKYANGIEIQLKKAYERIQGFESVQVTQFRMSLLSPKLECNGTI

SEQ ID NO: 446 - protein, 910 aa, Homo Sapiens
MKVGVLWLISFFTFTDGHGGFLGKNDGIKTKKELIVNKKKHLGPVEEYQLLLQVTYRDSKEKRDLRNFLKLLKPPLLWSHGLIRIIRAKATTDCNSLNGVLQCTCEDSYTWFPPSCLDPQNCYLHTAGALPSCECHLNNLSQSVNFCERTKIWGTFKINERFTNDLLNSSSAIYSKYANGIEIQLKKAYERIQGFESVQVTQFRNGSIVAGYEVVGSSSASELLSAIEHVAEKAKTALHKLFPLEDGSFRVFGKAQCNDIVFGFGSKDDEYTLPCSSGYRGNITAKCESSGWQVIRETCVLSLLEELNKNFSMIVGNATEAAVSSFVQNLSVIIRQNPSTTVGNLASVVSILSNISSLSLASHFRVSNSTMEDVISIADNILNSASVTNWTVLLREEKYASSRLLETLENISTLVPPTALPLNFSRKFIDWKGIPVNKSQLKRGYSYQIKMCPQNTSIPIRGRVLIGSDQFQRSLPETIISMASLTLGNILPVSKNGNAQVNGPVISTVIQNYSINEVFLFFSKIESNLSQPHCVFWDFSHLQWNDAGCHLVNETQDIVTCQCTHLTSFSILMSPFVPSTIFPVVKWITYVGLGISIGSLILCLIIEALFWKQIKKSQTSHTRRICMVNIALSLLIADVWFIVGATVDTTVNPSGVCTAAVFFTHFFYLSLFFWMLMLGILLAYRIILVFHHMAQHLMMAVGFCLGYGCPLIISVITIAVTQPSNTYKRKDVCWLNWSNGSKPLLAFVVPALAIVAVNFVVVLLVLTKLWRPTVGERLSRDDKATIIRVGKSLLILTPLLGLTWGFGIGTIVDSQNLAWHVIFALLNAFQGFFILCFGILLDSKLRQLLFNKLSALSSWKQTEKQNSSDLSAKPKFSKPFNPLQNKGHYAFSHTGDSSDNIMLTQFVSNE

SEQ ID NO: 447 - protein, 137 aa, Homo Sapiens
  misc_feature (1)..(1): Xaa can be any naturally occurring amino acid
XWSHGLIRIIRAKATTDCNSLNGVLQCTCEDSYTWFPPSCLDPQNCYLHTAGALPSCECHLNNLSQSVNFCERTKIWGTFKINERFTNDLLNSSSAIYSKYANGIEIQLKKAYERIQGFESVQVTQFRTVIHLWNLV

SEQ ID NO: 448 - protein, 6 aa, Homo Sapiens
MTPQSL

SEQ ID NO: 449 - protein, 95 aa, Homo Sapiens
MTPQSLLQTTLFLLSLLFLVQAHPASRSFPDPRGLYHFCLYWNRHAGRLHLLYGKRDFLLSDKASSLLCFQHQEESLAQGPPLLATSVTSWWSPQ

SEQ ID NO: 450 - protein, 125 aa, Homo Sapiens
MTPQSLLQTTLFLLSLLFLVQAHPASRSFPDPRGLYHFCLYWNRHAGRLHLLYGKRDFLLSDKASSLLCFQHQEESLAQGPPLLATSVTSWWSPQNISLPSAASFTFSFHSPPHTAAHNASVDMC

SEQ ID NO: 451 - protein, 90 aa, Homo Sapiens
MTPQSLLQTTLFLLSLLFLVQAPATGSHLQPLPPQVPTAGATGKTFASAASGTRHTGAASTTNPHQTCASPSRTPKRPSQSMPLSLQPTL

SEQ ID NO: 452 - protein, 118 aa, Homo Sapiens
MTPQSLLQTTLFLLSLLFLVQAPATGSHLQPLPPQVPTAGATGKTFASAASGTRHTGAASTTNPHQTCASPSRTPKRPSQSMPLSLQPTLLPDPSLTPGASTTSASTGTDMLGDYIFS

SEQ ID NO: 453 - protein, 91 aa, Homo Sapiens
MTPQSLLQTTLFLLSLLFLVQASASSGAHGRGHREDFRFCSQRNQTHRSSLHYKPTPDLRISIENSEEALTVHAPFPAAHPASRSFPDPRG

SEQ ID NO: 454 - protein, 98 aa, Homo Sapiens
MTPQSLLQTTLFLLSLLFLVQASASSGAHGRGHREDFRFCSQRNQTHRSSLHYKPTPDLRISIENSEEALTVHAPFPAAHPASRSFPDPRGLYHFCLY

SEQ ID NO: 455 - protein, 103 aa, Homo Sapiens
MTPQSLLQTTLFLLSLLFLVQASASSGAHGRGHREDFRFCSQRNQTHRSSLHYKPTPDLRISIENSEEALTVHAPFPAAHPASRSFPDPRGLYHFCLYWNRHA

SEQ ID NO: 456 - protein, 114 aa, Homo Sapiens
MTPQSLLQTTLFLLSLLFLVQASASSGAHGRGHREDFRFCSQRNQTHRSSLHYKPTPDLRISIENSEEALTVHAPFPAAHPASRSFPDPRGLYHFCLYWNRHAGRLHLLYGKRD

SEQ ID NO: 457 - protein, 118 aa, Homo Sapiens
MTPQSLLQTTLFLLSLLFLVQASASSGAHGRGHREDFRFCSQRNQTHRSSLHYKPTPDLRISIENSEEALTVHAPFPAAHPASRSFPDPRGLYHFCLYWNRHAGRLHLLYGKRDFLLS

SEQ ID NO: 458 - protein, 118 aa, Homo Sapiens; identical to SEQ ID NO: 457

SEQ ID NO: 459 - protein, 125 aa, Homo Sapiens
MTPQSLLQTTLFLLSLLFLVQASASSGAHGRGHREDFRFCSQRNQTHRSSLHYKPTPDLRISIENSEEALTVHAPFPAAHPASRSFPDPRGLYHFCLYWNRHAGRLHLLYGKRDFLLSDKASSLL

SEQ ID NO: 460 - protein, 145 aa, Homo Sapiens
MTPQSLLQTTLFLLSLLFLVQASASSGAHGRGHREDFRFCSQRNQTHRSSLHYKPTPDLRISIENSEEALTVHAPFPAAHPASRSFPDPRGLYHFCLYWNRHAGRLHLLYGKRDFLLSDKASSLLCFQHQEESLAQGPPLLATSV

SEQ ID NO: 461 - protein, 146 aa, Homo Sapiens
MTPQSLLQTTLFLLSLLFLVQASASSGAHGRGHREDFRFCSQRNQTHRSSLHYKPTPDLRISIENSEEALTVHAPFPAAHPASRSFPDPRGLYHFCLYWNRHAGRLHLLYGKRDFLLSDKASSLLCFQHQEESLAQGPPLLATSVT

SEQ ID NO: 462 - protein, 164 aa, Homo Sapiens
MTPQSLLQTTLFLLSLLFLVQASASSGAHGRGHREDFRFCSQRNQTHRSSLHYKPTPDLRISIENSEEALTVHAPFPAAHPASRSFPDPRGLYHFCLYWNRHAGRLHLLYGKRDFLLSDKASSLLCFQHQEESLAQGPPLLATSVTSWWSPQNISLPSAASFTF

SEQ ID NO: 463 - protein, 168 aa, Homo Sapiens
MTPQSLLQTTLFLLSLLFLVQASASSGAHGRGHREDFRFCSQRNQTHRSSLHYKPTPDLRISIENSEEALTVHAPFPAAHPASRSFPDPRGLYHFCLYWNRHAGRLHLLYGKRDFLLSDKASSLLCFQHQEESLAQGPPLLATSVTSWWSPQNISLPSAASFTFSFHS

SEQ ID NO: 464 - protein, 198 aa, Homo Sapiens
MTPQSLLQTTLFLLSLLFLVQASASSGAHGRGHREDFRFCSQRNQTHRSSLHYKPTPDLRISIENSEEALTVHAPFPAAHPASRSFPDPRGLYHFCLYWNRHAGRLHLLYGKRDFLLSDKASSLLCFQHQEESLAQGPPLLATSVTSWWSPQNISLPSAASFTFSFHSPPHTAAHNASVDMCELKRDLQLLSQFLKHP

SEQ ID NO: 465 - protein, 692 aa, Homo Sapiens
MTPQSLLQTTLFLLSLLFLVQASASSGAHGRGHREDFRFCSQRNQTHRSSLHYKPTPDLRISIENSEEALTVHAPFPAAHPASRSFPDPRGLYHFCLYWNRHAGRLHLLYGKRDFLLSDKASSLLCFQHQEESLAQGPPLLATSVTSWWSPQNISLPSAASFTFSFHSPPHTAAHNASVDMCELKRDLQLLSQFLKHPQKASRRPSAAPASQQLQSLESKLTSVRFMGDMVSFEEDRINATVWKLQPTAGLQDLHIHSRQEEEQSEIMEYSVLLPRTLFQRTKGRSGEAEKRLLLVDFSSQALFQDKNSSQVLGEKVLGIVVQNTKVANLTEPVVLTFQHQLQPKNVTLQCVFWVEDPTLSSPGHWSSAGCETVRRETQTSCFCNHLTYFAVLMVSSVEVDAVHKHYLSLLSYVGCVVSALACLVTIAAYLCSRRKPRDYTIKVHMNLLLAVFLLDTSFLLSEPVALTGSEAGCRASAIFLHFSLLTCLSWMGLEGYNLYRLVVEVFGTYVPGYLLKLSAMGWGFPIFLVTLVALVDVDNYGPIILAVHRTPEGVIYPSMCWIRDSLVSYITNLGLFSLVFLFNMAMLATMVVQILRLRPHTQKWSHVLTLLGLSLVLGLPWALIFFSFASGTFQLVVLYLFSIITSFQGFLIFIWYWSMRLQARGGPSPLKSNSDSARLPISSGSTSSSRI

SEQ ID NO: 466 - protein, 97 aa, Homo Sapiens
MTPQSLLQTTLFLLSLLFLVQASGTRHTGAASTTNPHQTCASPSRTPKRPSQSMPLSLQPTLLPDPSLTPGASTTSASTGTDMLGDYIFSMASVTSC

SEQ ID NO: 467 - protein, 97 aa, Homo Sapiens; identical to SEQ ID NO: 466

SEQ ID NO: 468 - protein, 97 aa, Homo Sapiens; identical to SEQ ID NO: 466

SEQ ID NO: 469 - protein, 68 aa, Homo Sapiens
MTPQSLLQTTLFLLSLLFLVQASSLLCFQHQEESLAQGPPLLATSVTSWWSPQNISLPSAASFTFSFH

SEQ ID NO: 470 - protein, 42 aa, Homo Sapiens
MTPQSLLQTTLFLLSLLFLVQGAHGRGHREDFRFCSQRNQTH

SEQ ID NO: 471 - protein, 50 aa, Homo Sapiens
MTPQSLLQTTLFLLSLLFLVQGAHGRGHREDFRFCSQRNQTHRSSLHYKP

SEQ ID NO: 472 - protein, 55 aa, Homo Sapiens
MTPQSLLQTTLFLLSLLFLVQGAHGRGHREDFRFCSQRNQTHRSSLHYKPTPDLR

SEQ ID NO: 473 - protein, 56 aa, Homo Sapiens
MTPQSLLQTTLFLLSLLFLVQGAHGRGHREDFRFCSQRNQTHRSSLHYKPTPDLRI

SEQ ID NO: 474 - protein, 70 aa, Homo Sapiens
MTPQSLLQTTLFLLSLLFLVQGAHGRGHREDFRFCSQRNQTHRSSLHYKPTPDLRISIENSEEALTVHAP

SEQ ID NO: 475 - protein, 77 aa, Homo Sapiens
MTPQSLLQTTLFLLSLLFLVQGAHGRGHREDFRFCSQRNQTHRSSLHYKPTPDLRISIENSEEALTVHAPFPAAHPA

SEQ ID NO: 476 - protein, 84 aa, Homo Sapiens
MTPQSLLQTTLFLLSLLFLVQGAHGRGHREDFRFCSQRNQTHRSSLHYKPTPDLRISIENSEEALTVHAPFPAAHPASRSFPDP

SEQ ID NO: 477 - protein, 84 aa, Homo Sapiens; identical to SEQ ID NO: 476

SEQ ID NO: 478 - protein, 94 aa, Homo Sapiens
MTPQSLLQTTLFLLSLLFLVQGAHGRGHREDFRFCSQRNQTHRSSLHYKPTPDLRISIENSEEALTVHAPFPAAHPASRSFPDPRGLYHFCLYW

SEQ ID NO: 479 - protein, 94 aa, Homo Sapiens; identical to SEQ ID NO: 478

SEQ ID NO: 480 - protein, 100 aa, Homo Sapiens
MTPQSLLQTTLFLLSLLFLVQGAHGRGHREDFRFCSQRNQTHRSSLHYKPTPDLRISIENSEEALTVHAPFPAAHPASRSFPDPRGLYHFCLYWNRHAGR

SEQ ID NO: 481 - protein, 107 aa, Homo Sapiens
MTPQSLLQTTLFLLSLLFLVQGAHGRGHREDFRFCSQRNQTHRSSLHYKPTPDLRISIENSEEALTVHAPFPAAHPASRSFPDPRGLYHFCLYWNRHAGRLHLLYGK

SEQ ID NO: 482 - protein, 110 aa, Homo Sapiens
MTPQSLLQTTLFLLSLLFLVQGAHGRGHREDFRFCSQRNQTHRSSLHYKPTPDLRISIENSEEALTVHAPFPAAHPASRSFPDPRGLYHFCLYWNRHAGRLHLLYGKRDF

SEQ ID NO: 483 - protein, 111 aa, Homo Sapiens
MTPQSLLQTTLFLLSLLFLVQGAHGRGHREDFRFCSQRNQTHRSSLHYKPTPDLRISIENSEEALTVHAPFPAAHPASRSFPDPRGLYHFCLYWNRHAGRLHLLYGKRDFL

SEQ ID NO: 484 - protein, 113 aa, Homo Sapiens
MTPQSLLQTTLFLLSLLFLVQGAHGRGHREDFRFCSQRNQTHRSSLHYKPTPDLRISIENSEEALTVHAPFPAAHPASRSFPDPRGLYHFCLYWNRHAGRLHLLYGKRDFLLS

SEQ ID NO: 485 - protein, 116 aa, Homo Sapiens
MTPQSLLQTTLFLLSLLFLVQGAHGRGHREDFRFCSQRNQTHRSSLHYKPTPDLRISIENSEEALTVHAPFPAAHPASRSFPDPRGLYHFCLYWNRHAGRLHLLYGKRDFLLSDKA

SEQ ID NO: 486 - protein, 116 aa, Homo Sapiens; identical to SEQ ID NO: 485

SEQ ID NO: 487 - protein, 119 aa, Homo Sapiens
MTPQSLLQTTLFLLSLLFLVQGAHGRGHREDFRFCSQRNQTHRSSLHYKPTPDLRISIENSEEALTVHAPFPAAHPASRSFPDPRGLYHFCLYWNRHAGRLHLLYGKRDFLLSDKASSL

SEQ ID NO: 488 - protein, 119 aa, Homo Sapiens; identical to SEQ ID NO: 487

SEQ ID NO: 489 - protein, 122 aa, Homo Sapiens
MTPQSLLQTTLFLLSLLFLVQGAHGRGHREDFRFCSQRNQTHRSSLHYKPTPDLRISIENSEEALTVHAPFPAAHPASRSFPDPRGLYHFCLYWNRHAGRLHLLYGKRDFLLSDKASSLLCF

SEQ ID NO: 490 - protein, 131 aa, Homo Sapiens
MTPQSLLQTTLFLLSLLFLVQGAHGRGHREDFRFCSQRNQTHRSSLHYKPTPDLRISIENSEEALTVHAPFPAAHPASRSFPDPRGLYHFCLYWNRHAGRLHLLYGKRDFLLSDKASSLLCFQHQEESLAQ

SEQ ID NO: 491 - protein, 131 aa, Homo Sapiens; identical to SEQ ID NO: 490

SEQ ID NO: 492 - protein, 141 aa, Homo Sapiens
MTPQSLLQTTLFLLSLLFLVQGAHGRGHREDFRFCSQRNQTHRSSLHYKPTPDLRISIENSEEALTVHAPFPAAHPASRSFPDPRGLYHFCLYWNRHAGRLHLLYGKRDFLLSDKASSLLCFQHQEESLAQGPPLLATSVT

SEQ ID NO: 493 - protein, 153 aa, Homo Sapiens
MTPQSLLQTTLFLLSLLFLVQGAHGRGHREDFRFCSQRNQTHRSSLHYKPTPDLRISIENSEEALTVHAPFPAAHPASRSFPDPRGLYHFCLYWNRHAGRLHLLYGKRDFLLSDKASSLLCFQHQEESLAQGPPLLATSVTSWWSPQNISLPS

SEQ ID NO: 494 - protein, 154 aa, Homo Sapiens
MTPQSLLQTTLFLLSLLFLVQGAHGRGHREDFRFCSQRNQTHRSSLHYKPTPDLRISIENSEEALTVHAPFPAAHPASRSFPDPRGLYHFCLYWNRHAGRLHLLYGKRDFLLSDKASSLLCFQHQEESLAQGPPLLATSVTSWWSPQNISLPSA

SEQ ID NO: 495 - protein, 160 aa, Homo Sapiens
MTPQSLLQTTLFLLSLLFLVQGAHGRGHREDFRFCSQRNQTHRSSLHYKPTPDLRISIENSEEALTVHAPFPAAHPASRSFPDPRGLYHFCLYWNRHAGRLHLLYGKRDFLLSDKASSLLCFQHQEESLAQGPPLLATSVTSWWSPQNISLPSAASFTFS

SEQ ID NO: 496 - protein, 162 aa, Homo Sapiens
MTPQSLLQTTLFLLSLLFLVQGAHGRGHREDFRFCSQRNQTHRSSLHYKPTPDLRISIENSEEALTVHAPFPAAHPASRSFPDPRGLYHFCLYWNRHAGRLHLLYGKRDFLLSDKASSLLCFQHQEESLAQGPPLLATSVTSWWSPQNISLPSAASFTFSFH

SEQ ID NO: 497 - protein, 167 aa, Homo Sapiens
MTPQSLLQTTLFLLSLLFLVQGAHGRGHREDFRFCSQRNQTHRSSLHYKPTPDLRISIENSEEALTVHAPFPAAHPASRSFPDPRGLYHFCLYWNRHAGRLHLLYGKRDFLLSDKASSLLCFQHQEESLAQGPPLLATSVTSWWSPQNISLPSAASFTFSFHSPPHT

SEQ ID NO: 498 - protein, 167 aa, Homo Sapiens; identical to SEQ ID NO: 497

SEQ ID NO: 499 - protein, 199 aa, Homo Sapiens
MTPQSLLQTTLFLLSLLFLVQGAHGRGHREDFRFCSQRNQTHRSSLHYKPTPDLRISIENSEEALTVHAPFPAAHPASRSFPDPRGLYHFCLYWNRHAGRLHLLYGKRDFLLSDKASSLLCFQHQEESLAQGPPLLATSVTSWWSPQNISLPSAASFTFSFHSPPHTAAHNASVDMCELKRDLQLLSQFLKHPQKASRR

SEQ ID NO: 500 - protein, 687 aa, Homo Sapiens
MTPQSLLQTTLFLLSLLFLVQGAHGRGHREDFRFCSQRNQTHRSSLHYKPTPDLRISIENSEEALTVHAPFPAAHPASRSFPDPRGLYHFCLYWNRHAGRLHLLYGKRDFLLSDKASSLLCFQHQEESLAQGPPLLATSVTSWWSPQNISLPSAASFTFSFHSPPHTAAHNASVDMCELKRDLQLLSQFLKHPQKASRRPSAAPASQQLQSLESKLTSVRFMGDMVSFEEDRINATVWKLQPTAGLQDLHIHSRQEEEQSEIMEYSVLLPRTLFQRTKGRSGEAEKRLLLVDFSSQALFQDKNSSQVLGEKVLGIVVQNTKVANLTEPVVLTFQHQLQPKNVTLQCVFWVEDPTLSSPGHWSSAGCETVRRETQTSCFCNHLTYFAVLMVSSVEVDAVHKHYLSLLSYVGCVVSALACLVTIAAYLCSRRKPRDYTIKVHMNLLLAVFLLDTSFLLSEPVALTGSEAGCRASAIFLHFSLLTCLSWMGLEGYNLYRLVVEVFGTYVPGYLLKLSAMGWGFPIFLVTLVALVDVDNYGPIILAVHRTPEGVIYPSMCWIRDSLVSYITNLGLFSLVFLFNMAMLATMVVQILRLRPHTQKWSHVLTLLGLSLVLGLPWALIFFSFASGTFQLVVLYLFSIITSFQGFLIFIWYWSMRLQARGGPSPLKSNSDSARLPISSGSTSSSRI

SEQ ID NO: 501 - protein, 687 aa, Homo Sapiens; identical to SEQ ID NO: 500

SEQ ID NO: 502 - protein, 687 aa, Homo Sapiens; identical to SEQ ID NO: 500

SEQ ID NO: 503 - protein, 687 aa, Homo Sapiens; identical to SEQ ID NO: 500

SEQ ID NO: 504 - protein, 693 aa, Homo Sapiens
MTPQSLLQTTLFLLSLLFLVQGAHGRGHREDFRFCSQRNQTHRSSLHYKPTPDLRISIENSEEALTVHAPFPAAHPASRSFPDPRGLYHFCLYWNRHAGRLHLLYGKRDFLLSDKASSLLCFQHQEESLAQGPPLLATSVTSWWSPQNISLPSAASFTFSFHSPPHTAAHNASVDMCELKRDLQLLSQFLKHPQKASRRPSAAPASQQLQSLESKLTSVRFMGDMVSFEEDRINATVWKLQPTAGLQDLHIHSRQEEEQSEIMEYSVLLPRTLFQRTKGRSGEAEKRLLLVDFSSQALFQDKNSSQVLGEKVLGIVVQNTKVANLTEPVVLTFQHQLQPKNVTLQCVFWVEDPTLSSPGHWSSAGCETVRRETQTSCFCNHLTYFAVLMVSSVEVDAVHKHYLSLLSYVGCVVSALACLVTIAAYLCSRVPLPCRRKPRDYTIKVHMNLLLAVFLLDTSFLLSEPVALTGSEAGCRASAIFLHFSLLTCLSWMGLEGYNLYRLVVEVFGTYVPGYLLKLSAMGWGFPIFLVTLVALVDVDNYGPIILAVHRTPEGVIYPSMCWIRDSLVSYITNLGLFSLVFLFNMAMLATMVVQILRLRPHTQKWSHVLTLLGLSLVLGLPWALIFFSFASGTFQLVVLYLFSIITSFQGFLIFIWYWSMRLQARGGPSPLKSNSDSARLPISSGSTSSSRI

SEQ ID NO: 505 - protein, 693 aa, Homo Sapiens; identical to SEQ ID NO: 504

SEQ ID NO: 506 - protein, 687 aa, Homo Sapiens; identical to SEQ ID NO: 500

SEQ ID NO: 507 - protein, 256 aa, Homo Sapiens
MTPQSLLQTTLFLLSLLFLVQGAHGRGHREDFRFCSQRNQTHRSSLHYKPTPDLRISIENSEEALTVHAPFPAAHPASRSFPDPRGLYHFCLYWNRHAGRLHLLYGKRDFLLSDKASSLLCFQHQEESLAQGPPLLATSVTSWWSPQNISLPSAASFTFSFHSPPHTAAHNASVDMCELKRDLQLLSQFLKHPQKASRRPSAAPASQQLQSLESKLTSVRFMGDMVSFEEDRINATVWKLQPTAGLQDLHIHSRQE

SEQ ID NO: 508 - protein, 78 aa, Homo Sapiens
MTPQSLLQTTLFLLSLLFLVQGRCPRQGPQGRLSLLQPAEPDTQEQPPLQTHTRPAHLHRELRRGPHSPCPFPCSPPC

SEQ ID NO: 509 - protein, 81 aa, Homo Sapiens
MTPQSLLQTTLFLLSLLFLVQGRCPRQGPQGRLSLLQPAEPDTQEQPPLQTHTRPAHLHRELRRGPHSPCPFPCSPPCFPI

SEQ ID NO: 510 - protein, 97 aa, Homo Sapiens
MTPQSLLQTTLFLLSLLFLVQGSGTRHTGAASTTNPHQTCASPSRTPKRPSQSMPLSLQPTLLPDPSLTPGASTTSASTGTDMLGDYIFSMASVTSC

SEQ ID NO: 511 - protein, 97 aa, Homo Sapiens; identical to SEQ ID NO: 510

SEQ ID NO: 512 - protein, 187 aa, Homo Sapiens
  misc_feature (1)..(1): Xaa can be any naturally occurring amino acid
XSVDMCELKRDLQLLSQFLKHPQKASRRPSAAPASQQLQSLESKLTSVRFMGDMVSFEEDRINATVWKLQPTAGLQDLHIHSRQEEEQSEIMEYSVLLPRTLFQRTKGRSGEAEKRLLLVDFSSQALFQDKNSSQVLGEKVFGTYVPGYLLKLSAMGWGFPIFLVTLVALVDVDNYGPIILAVHRTP

SEQ ID NO: 513 - protein, 528 aa, Homo Sapiens
MDHCGALFLCLCLLTLQNATTETWEELLSYMENMQVSRGRSSVFSSRQLHQLEQMLLNTSFPGYNLTLQTPTIQSLAFKLSCDFSGLSLTSATLKRVPQAGGQHARGQHAMQFPAELTRDACKTRPRELRLICIYFSNTHFFKDENNSSLLNNYVLGAQLSHGHVNNLRDPVNISFWHNQSLEGYTLTCVFWKEGARKQPWGGWSPEGCRTEQPSHSQVLCRCNHLTYFAVLMQLSPALVPAELLAPLTYISLVGCSISIVASLITVLLHFHFRKQSDSLTRIHMNLHASVLLLNIAFLLSPAFAMSPVPGSACTALAAALHYALLSCLTWMAIEGFNLYLLLGRVYNIYIRRYVFKLGVLGWGAPALLVLLSLSVKSSVYGPCTIPVFDSWENGTGFQNMSICWVRSPVVHSVLVMGYGGLTSLFNLVVLAWALWTLRRLRERADAPSVRACHDTVTVLGLTVLLGTTWALAFFSFGVFLLPQLFLFTILNSLYGFFLFLWFCSQRCRSEAEAKAQIEAFSSSQTTQ

SEQ ID NO: 514 - protein, 528 aa, Homo Sapiens; identical to SEQ ID NO: 513

SEQ ID NO: 515 - protein, 221 aa, Homo Sapiens
MDHCGALFLCLCLLTLQNATTETWEELLSYMENMQVSRGRSSVFSSRQLHQLEQMLLNTSFPGYNLTLQTPTIQSLAFKLSCDFSGLSLTSATLKRVPQAGGQHARGQHAMQFPAELTRDACKTRPRELRLICIYFSNTHFFKDENNSSLLNNYVLGAQLSHGHVNNLRDPVNISFWHNQSLVLLGAPPFPLHPCPSVTLLLNTGLTRPKPVEPSWKSITL

SEQ ID NO: 516 - protein, 141 aa, Homo Sapiens
MFRSDRMWSCHWKWKPSPLLFLFALYIMCVPHSAVWGCANCRVVLSNPSGTFTSPCYPNDYPNSQACMWTLRAPTGYIIQITFNDFDIEEAPNCIYDSLSLDNGESQTKFCGATAKGLSFNSSANEMHVSFSSDFSIQKKG

SEQ ID NO: 517 - protein, 241 aa, Homo Sapiens
MFRSDRMWSCHWKWKPSPLLFLFALYIMCVPHSVWGCANCRVVLSNPSGTFTSPCYPNDYPNSQACMWTLRAPTGYIIQITFNDFDIEEAPNCIYDSLSLDNGESQTKFCGATAKGLSFNSSANEMHVSFSSDFSIQKKGFNASYIRVAVSLRNQKVILPQTSDAYQVSVAKSISIPELSAFTLCFEATKVGHEDSDWTAFSYSNASFTQLLSFGKAKSGYFLSISDSKCLLNNALPVKEK

SEQ ID NO: 518 - protein, 1221 aa, Homo Sapiens
MMFRSDRMWSCHWKWKPSPLLFLFALYIMCVPHSVWGCANCRVVLSNPSGTFTSPCYPNDYPNSQACMWTLRAPTGYIIQITFNDFDIEEAPNCIYDSLSLDNGESQTKFCGATAKGLSFNSSANEMHVSFSSDFSIQKKGFNASYIRVAVSLRNQKVILPQTSDAYQVSVAKSISIPELSAFTLCFEATKVGHEDSDWTAFSYSNASFTQLLSFGKAKSGYFLSISDSKCLLNNALPVKEKEDIFAESFEQLCLVWNNSLGSIGVNFKRNYETVPCDSTISKVIPGNGKLLLGSNQNEIVSLKGDIYNFRLWNFTMNAKILSNLSCNVKGNVVDWQNDFWNIPNLALKAESNLSCGSYLIPLPAAELASCADLGTLCQATVNSPSTTPPTVTTNMPVTNRIDKQRNDGIIYRISVVIQNILRHPEVKVQSKVAEWLNSTFQNWNYTVYVVNISFHLSAGEDKIKVKRSLEDEPRLVLWALLVYNATNNTNLEGKIIQQKLLKNNESLDEGLRLHTVNVRQLGHCLAMEEPKGYYWPSIQPSEYVLPCPDKPGFSASRICFYNATNPLVTYWGPVDISNCLKEANEVANQILNLTADGQNLTSANITNIVEQVKRIVNKEENIDITLGSTLMNIFSNILSSSDSDLLESSSEALKTIDELAFKIDLNSTSHVNITTRNLALSVSSLLPGTNAISNFSIGLPSNNESYFQMDFESGQVDPLASVILPPNLLENLSPEDSVLVRRAQFTFFNKTGLFQDVGPQRKTLVSYVMACSIGNITIQNLKDPVQIKIKHTRTQEVHHPICAFWDLNKNKSFGGWNTSGCVAHRDSDASETVCLCNHFTHFGVLMDLPRSASQLDARNTKVLTFISYIGCGISAIFSAATLLTYVAFEKLRRDYPSKILMNLSTALLFLNLLFLLDGWITSFNVDGLCIAVAVLLHFFLLATFTWMGLEAIHMYIALVKVFNTYIRRYILKFCIIGWGLPALVVSVVLASRNNNEVYGKESYGKEKGDEFCWIQDPVIFYVTCAGYFGVMFFLNIAMFIVVMVQICGRNGKRSNRTLREEVLRNLRSVVSLTFLLGMTWGFAFFAWGPLNIPFMYLFSIFNSLQGLFIFIFHCAMKENVQKQWRQHLCCGRFRLADNSDWSKTATNIIKKSSDNLGKSLSSSSIGSNSTYLTSKSKSSSTTYFKRNSHTDNVSYEHSFNKSGSLRQCFHGQVLVKTGPC

SEQ ID NO: 519 - protein, 1193 aa, Homo Sapiens
MMFRSDRMWSCHWKWKPSPLLFLFALYIMCVPHSVWGCANCRVVLSNPSGTFTSPCYPNDYPNSQACMWTLRAPTGYIIQITFNDFDIEEAPNCIYDSLSLDNGESQTKFCGATAKGLSFNSSANEMHVSFSSDFSIQKKGFNASYIRVAVSLRNQKVILPQTSDAYQVSVAKSISIPELSAFTLCFEATKVGHEDSDWTAFSYSNASFTQLLSFGKAKSGYFLSISDSKCLLNNALPVKEKEDIFAESFEQLCLVWNNSLGSIGVNFKRNYETVPCDSTISKVIPGNGKLLLGSNQNEIVSLKGDIYNFRLWNFTMNAKILSNLSCNVKGNVVDWQNDFWNIPNLALKAESNLSCGSYLIPLPAAELASCADLGTLCQDGIIYRISVVIQNILRHPEVKVQSKVAEWLNSTFQNWNYTVYVVNISFHLSAGEDKIKVKRSLEDEPRLVLWALLVYNATNNTNLEGKIIQQKLLKNNESLDEGLRLHTVNVRQLGHCLAMEEPKGYYWPSIQPSEYVLPCPDKPGFSASRICFYNATNPLVTYWGPVDISNCLKEANEVANQILNLTADGQNLTSANITNIVEQVKRIVNKEENIDITLGSTLMNIFSNILSSSDSDLLESSSEALKTIDELAFKIDLNSTSHVNITTRNLALSVSSLLPGTNAISNFSIGLPSNNESYFQMDFESGQVDPLASVILPPNLLENLSPEDSVLVRRAQFTFFNKTGLFQDVGPQRKTLVSYVMACSIGNITIQNLKDPVQIKIKHTRTQEVHHPICAFWDLNKNKSFGGWNTSGCVAHRDSDASETVCLCNHFTHFGVLMDLPRSASQLDARNTKVLTFISYIGCGISAIFSAATLLTYVAFEKLRRDYPSKILMNLSTALLFLNLLFLLDGWITSFNVDGLCIAVAVLLHFFLLATFTWMGLEAIHMYIALVKVFNTYIRRYILKFCIIGWGLPALVVSVVLASRNNNEVYGKESYGKEKGDEFCWIQDPVIFYVTCAGYFGVMFFLNIAMFIVVMVQICGRNGKRSNRTLREEVLRNLRSVVSLTFLLGMTWGFAFFAWGPLNIPFMYLFSIFNSLQGLFIFIFHCAMKENVQKQWRQHLCCGRFRLADNSDWSKTATNIIKKSSDNLGKSLSSSSIGSNSTYLTSKSKSSSTTYFKRNSHTDNVSYEHSFNKSGSLRQCFHGQVLVKTGPC

SEQ ID NO: 520 - protein, 1250 aa, Homo Sapiens
MMFRSDRMWSCHWKWKPSPLLFLFALYIMCVPHSVWGCANCRVVLSNPSGTFTSPCYPNDYPNSQACMWTLRAPTGYIIQITFNDFDIEEAPNCIYDSLSLDNGESQTKFCGATAKGLSFNSSANEMHVSFSSDFSIQKKGFNASYIRVAVSLRNQKVILPQTSDAYQVSVAKSISIPELSAFTLCFEATKVGHEDSDWTAFSYSNASFTQLLSFGKAKSGYFLSISDSKCLLNNALPVKEKEDIFAESFEQLCLVWNNSLGSIGVNFKRNYETVPCDSTISKVIPGNGKLLLGSNQNEIVSLKGDIYNFRLWNFTMNAKILSNLSCNVKGNVVDWQNDFWNIPNLALKAESNLSCGSYLIPLPAAELASCADLGTLCQATVNSPSTTPPTVTTNMPVTNRIDKQRNDGIIYRISVVIQNILRHPEVKVQSKVAEWLNSTFQNWNYTVYVVNISFHLSAGEDKIKVKRSLEDEPRLVLWALLVYNATNNTNLEGKIIQQKLLKNNESLDEGLRLHTVNVRQLGHCLAMEEPKGYYWPSIQPSEYVLPCPDKPGFSASRICFYNATNPLVTYWGPVDISNCLKEANEVANQILNLTADGQNLTSANITNIVEQVKRIVNKEENIDITLGSTLMNIFSNILSSSDSDLLESSSEALKTIDELAFKIDLNSTSHVNITTRNLALSVSSLLPGTNAISNFSIGLPSNNESYFQMDFESGQVDPLASVILPPNLLENLSPEDSVLVRRAQFTFFNKTGLFQDVGPQRKTLVSYVMACSIGNITIQNLKDPVQIKIKHTRTQEVHHPICAFWDLNKNKSFGGWNTSGCVAHRDSDASETVCLCNHFTHFGVLMDLPRSASQLDARNTKVLTFISYIGCGISAIFSAATLLTYVAFEKLRRDYPSKILMNLSTALLFLNLLFLLDGWITSFNVDGLCIAVAVLLHFFLLATFTWMGLEAIHMYIALVKVFNTYIRRYILKFCIIGWGLPALVVSVVLASRNNNEVYGKESYGKEKGDEFCWIQDPVIFYVTCAGYFGVMFFLNIAMFIVVMVQICGRNGKRSNRTLREEVLRNLRSVVSLTFLLGMTWGFAFFAWGPLNIPFMYLFSIFNSLQGLFIFIFHCAMKENVQKQWRQHLCCGRFRLADNSDWSKTATNIIKKSSDNLGKSLSSSSIGSNSTYLTSKSKSSSTTYFKRNSHTDSASMDKSLSKLAHADGDQTSIIPVHQVIDKVKGYCNAHSDNFYKNIIMSDTFSHSTKF

SEQ ID NO: 521 - protein, 1222 aa, Homo Sapiens
MMFRSDRMWSCHWKWKPSPLLFLFALYIMCVPHSVWGCANCRVVLSNPSGTFTSPCYPNDYPNSQACMWTLRAPTGYIIQITFNDFDIEEAPNCIYDSLSLDNGESQTKFCGATAKGLSFNSSANEMHVSFSSDFSIQKKGFNASYIRVAVSLRNQKVILPQTSDAYQVSVAKSISIPELSAFTLCFEATKVGHEDSDWTAFSYSNASFTQLLSFGKAKSGYFLSISDSKCLLNNALPVKEKEDIFAESFEQLCLVWNNSLGSIGVNFKRNYETVPCDSTISKVIPGNGKLLLGSNQNEIVSLKGDIYNFRLWNFTMNAKILSNLSCNVKGNVVDWQNDFWNIPNLALKAESNLSCGSYLIPLPAAELASCADLGTLCQDGIIYRISVVIQNILRHPEVKVQSKVAEWLNSTFQNWNYTVYVVNISFHLSAGEDKIKVKRSLEDEPRLVLWALLVYNATNNTNLEGKIIQQKLLKNNESLDEGLRLHTVNVRQLGHCLAMEEPKGYYWPSIQPSEYVLPCPDKPGFSASRICFYNATNPLVTYWGPVDISNCLKEANEVANQILNLTADGQNLTSANITNIVEQVKRIVNKEENIDITLGSTLMNIFSNILSSSDSDLLESSSEALKTIDELAFKIDLNSTSHVNITTRNLALSVSSLLPGTNAISNFSIGLPSNNESYFQMDFESGQVDPLASVILPPNLLENLSPEDSVLVRRAQFTFFNKTGLFQDVGPQRKTLVSYVMACSIGNITIQNLKDPVQIKIKHTRTQEVHHPICAFWDLNKNKSFGGWNTSGCVAHRDSDASETVCLCNHFTHFGVLMDLPRSASQLDARNTKVLTFISYIGCGISAIFSAATLLTYVAFEKLRRDYPSKILMNLSTALLFLNLLFLLDGWITSFNVDGLCIAVAVLLHFFLLATFTWMGLEAIHMYIALVKVFNTYIRRYILKFCIIGWGLPALVVSVVLASRNNNEVYGKESYGKEKGDEFCWIQDPVIFYVTCAGYFGVMFFLNIAMFIVVMVQICGRNGKRSNRTLREEVLRNLRSVVSLTFLLGMTWGFAFFAWGPLNIPFMYLFSIFNSLQGLFIFIFHCAMKENVQKQWRQHLCCGRFRLADNSDWSKTATNIIKKSSDNLGKSLSSSSIGSNSTYLTSKSKSSSTTYFKRNSHTDSASMDKSLSKLAHADGDQTSIIPVHQVIDKVKGYCNAHSDNFYKNIIMSDTFSHSTKF

SEQ ID NO: 522 - protein, 103 aa, Homo Sapiens
  misc_feature (1)..(1): Xaa can be any naturally occurring amino acid
XLGSTLMNIFSNILSSSDSDLLESSSEALKTIDELAFKIDLNSTSHVNITTRNLALSVSSLLPGTNAISNFSIGLPSNNESYFQLLSFTTCFEKTSKSAADGF

SEQ ID NO: 523 - protein, 135 aa, Homo Sapiens
  misc_feature (1)..(1): Xaa can be any naturally occurring amino acid
XVKVQSKVAEWLNSTFQNWNYTVYVVNISFHLSAGEDKIKVKRSLEDEPRLVLWALLVYNATNNTNLEGKIIQQKLLKNNESLDEGLRLHTVNVRQLGHCLAMEEPKGYYWPSIQPSEYVLPCPDKPGFSASRIW

SEQ ID NO: 524 - protein, 73 aa, Homo Sapiens
GQNLIRSIQINITRLAGTFGDVAVGLRISSDHKEQPIVTENAERQLVVKDGATYKVDVVPIKNQVVGCQSLPW

SEQ ID NO: 525 - protein, 123 aa, Homo Sapiens
MAAVTHYLYLCQFSWMLIQSVNFWYVLVMNDEHTERRYLLFFLLSWGLPAFVVILLIVILKGIYHQSMSQIYGLIHGDLCFIPNVYAALFTAALVPLTCLVVVFVVFIHAYQVKPQWKAYDDV

SEQ ID NO: 526 - protein, 123 aa, Homo Sapiens; identical to SEQ ID NO: 525

SEQ ID NO: 527 - protein, 334 aa, Homo Sapiens
MAAVTHYLYLCQFSWMLIQSVNFWYVLVMNDEHTERRYLLFFLLSWGLPAFVVILLIVILKGIYHQSMSQIYGLIHGDLCFIPNVYAALFTAALVPLTCLVVVFVVFIHAYQVKPQWKAYDDVFRGRTNAAEIPLILYLFALISVTWLWGGLHMAYRHFWMLVLFVIFNSLQGLYVFMVYFILHNQMCCPMKASYTVEMNGHPGPSTAFFTPGSGMPPAGGEISKSTQNLIGAMEEVPPDWERASFQQGSQASPDLKPSPQNGATFPSSGGYGQGSLIADEESQEFDDLIFALKTGAGLSVSDNESGQGSQEGGTLTDSQIVELRRIPIADTHL

SEQ ID NO: 528 - protein, 192 aa, Homo Sapiens
MAAVTHYLYLCQFSWMLIQSVNFWYVLVMNDEHTERRYLLFFLLSWGLPAFVVILLIVILKGIYHQSMSQIYGLIHGDLCFIPNVYAALFTAALVPLTCLVVVFVVFIHAYQVKPQWKAYDDVFRGRTNAAEIPLILYLFALISVTWLWGGLHMAYRHFWMLVLFVIFNSLQVLVSVSVIMNLVKAARRGAP

SEQ ID NO: 529 - protein, 148 aa, Homo Sapiens
MAKRSAAAAVPGMPSASLLVNLLSALLILFVFGETEIRFTGQTEFVVNETSTTVIRLIIERIGEPANVTAIVSLYGEDAGDFFDTYAAAFIPAGETNRTVYIAVCDDDLPEPDETFIFHLTLQLPSIAVSEPKGRNESMPLTLIREKG

SEQ ID NO: 530 - protein, 2038 aa, Homo Sapiens
MINESKGDAIYSAVYDVVRNRGNFGDVSVSWVVSPDFTQDVFPVQGTVVFGDQEFSKNITIYSLPDEIPEEMEEFTVILLNGTGGAKVGNRTTATLRIRRNDDPIYFAEPRVVRVQEGETANFTVLRNGSVDVTCMVQYATKDGKATARERDFIPVEKGETLIFEVGSRQQSISIFVNEDGIPETDEPFYIILLNSTGDTVVYQYGVATVIIEANDDPNGIFSLEPIDKAVEEGKTNAFWILRHRGYFGSVSVSWQLFQNDSALQPGQEFYETSGTVNFMDGEEAKPIILHAFPDKIPEFNEFYFLKLVNISGPGGQLAETNLQVTVMVPFNDDPFGVFILDPECLEREVAEDVLSEDDMSYITNFTILRQQGVFGDVQLGWEILSSEFPAGLPPMIDFLLVGIFPTTVHLQQHMRRHHSGTDALYFTGLEGAFGTVNPKYHPSRNNTIANFTFSAWVMPNANTNGFIIAKDDGNGSIYYGVKIQTNESHVTLSLHYKTLGSNATYIAKTTVMKYLEESVWLHLLIILEDGIIEFYLDGNAMPRGIKSLKGEAITDGPGILRIGAGINGNDRFTGLMQDVRSYERKLTLEEIYELHAMPAKSDLHPISGYLEFRQGETNKSFIISARDDNDEEGEELFILKLVSVYGGARISEENTTARLTIQKSDNANGLFGFTGACIPEIAEEGSTISCVVERTRGALDYVHVFYTISQIETDGINYLVDDFANASGTITFLPWQRSEVLNIYVLDDDIPELNEYFRVTLVSAIPGDGKLGSTPTSGASIDPEKETTDITIKASDHPYGLLQFSTGLPPQPKDAMTLPASSVPHITVEEEDGEIRLLVIRAQGLLGRVTAEFRTVSLTAFSPEDYQNVAGTLEFQPGERYKYIFINITDNSIPELEKSFKVELLNLEGGVAELFRVDGSGSGDGDMEFFLPTIHKRASLGVASQILVTIAASDHAHGVFEFSPESLFVSGTEPEDGYSTVTLNVIRHHGTLSPVTLHWNIDSDPDGDLAFTSGNITFEIGQTSANITVEILPDEDPELDKAFSVSVLSVSSGSLGAHINATLTVLASDDPYGIFIFSEKNRPVKVEEATQNITLSIIRLKGLMGKVLVSYATLDDMEKPPYFPPNLARATQGRDYIPASGFALFGANQSEATIAISILDDDEPERSESVFIELLNSTLVAKVQSRSIPNSPRLGPKVETIAQLIIIANDDAFGTLQLSAPIVRVAENHVGPIINVTRTGGAFADVSVKFKAVPITAIAGEDYSIASSDVVLLEGETSKAVPIYVINDIYPELEESFLVQLMNETTGGARLGALTEAVIIIEASDDPYGLFGFQITKLIVEEPEFNSVKVNLPIIRNSGTLGNVTVQWVATINGQLATGDLRVVSGNVTFAPGETIQTLLLEVLADDVPEIEEVIQVQLTDASGGGTIGLDRIANIIIPANDDPYGTVAFAQMVYRVQEPLERSSCANITVRRSGGHFGRLLLFYSTSDIDVVALAMEEGQDLLSYYESPIQGVPDPLWRTWMNVSAVGEPLYTCATLCLKEQACSAFSFFSASEGPQCFWMTSWISPAVNNSDFWTYRKNMTRVASLFSGQAVAGSDYEPVTRQWAIMQEGDEFANLTVSILPDDFPEMDESFLISLLEVHLMNISASLKNQPTIGQPNISTVVIALNGDAFGVFVIYNISPNTSEDGLFVEVQEQPQTLVELMIHRTGGSLGQVAVEWRVVGGTATEGLDFIGAGEILTFAEGETKKTVILTILDDSEPEDDESIIVSLVYTEGGSRILPSSDTVRVNILANDNVAGIVSFQTASRSVIGHEGEILQFHVIRTFPGRGNVTVNWKIIGQNLELNFANFSGQLFFPEGSLNTTLFVHLLDDNIPEEKEVYQVILYDVRTQGVPPAGIALLDAQGYAAVLTVEASDEPHGVLNFALSSRFVLLQEANITIQLFINREFGSLGAINVTYTTVPGMLSLKNQTVGNLAEPEVDFVPIIGFLILEEGETAAAINITILEDDVPELEEYFLVNLTYVGLTMAASTSFPPRL

SEQ ID NO: 531 - protein, 6306 aa, Homo Sapiens
MSVFLGPGMPSASLLVNLLSALLILFVFGETEIRFTGQTEFVVNETSTTVIRLIIERIGEPANVTAIVSLYGEDAGDFFDTYAAAFIPAGETNRTVYIAVCDDDLPEPDETFIFHLTLQKPSANVKLGWPRTVTVTILSNDNAFGIISFNMLPSIAVSEPKGRNESMPLTLIREKGTYGMVMVTFEVEGGPNPPDEDLSPVKGNITFPPGRATVIYNLTVLDDEVPENDEIFLIQLKSVEGGAEINTSRNSIEIIIKKNDSPVRFLQSIYLVPEEDHILIIPVVRGKDNNGNLIGSDEYEVSISYAVTTGNSTAHAQQNLDFIDLQPNTTVVFPPFIHESHLKFQIVDDTIPEIAESFHIMLLKDTLQGDAVLISPSVVQVTIKPNDKPYGVLSFNSVLFERTVIIDEDRISRYEEITVVRNGGTHGNVSANWVLTRNSTDPSPVTADIRPSSGVLHFAQGQMLATIPLTVVDDDLPEEAEAYLLQILPHTIRGGAEVSEPAELLFYIQDSDDVYGLITFFPMENQKIESSPGERYLSLSFTRLGGTKGDVRLLYSVLYIPAGAVDPLQAKEGILNISRRNDLIFPEQKTQVTTKLPIRNDAFLQNGAHFLVQLETVELLNIIPLIPPISPRFGEICNISLLVTPAIANGEIGFLSNLPIILHEPEDFAAEVVYIPLHRDGTDGQATVYWSLKPSGFNSKAVTPDDIGPFNGSVLFLSGQSDTTINITIKGDDIPEMNETVTLSLDRVNVENQVLKSGYTSRDLIILENDDPGGVFEFSPASRGPYVIKEGESVELHIIRSRGSLVKQFLHYRVEPRDSNEFYGNTGVLEFKPGEREIVITLLARLDGIPELDEHYWVVLSSHGERESKLGSATIVNITILKNDDPHGIIEFVSDGLIVMINESKGDAIYSAVYDVVRNRGNFGDVSVSWVVSPDFTQDVFPVQGTVVFGDQEFSKNITIYSLPDEIPEEMEEFTVILLNGTGGAKVGNRTTATLRIRRNDDPIYFAEPRVVRVQEGETANFTVLRNGSVDVTCMVQYATKDGKATARERDFIPVEKGETLIFEVGSRQQSISIFVNEDGIPETDEPFYIILLNSTGDTVVYQYGVATVIIEANDDPNGIFSLEPIDKAVEEGKTNAFWILRHRGYFGSVSVSWQLFQNDSALQPGQEFYETSGTVNFMDGEEAKPIILHAFPDKIPEFNEFYFLKLVNISGGSPGPGGQLAETNLQVTVMVPFNDDPFGVFILDPECLEREVAEDVLSEDDMSYITNFTILRQQGVFGDVQLGWEILSSEFPAGLPPMIDFLLVGIFPTTVHLQQHMRRHHSGTDALYFTGLEGAFGTVNPKYHPSRNNTIANFTFSAWVMPNANTNGFIIAKDDGNGSIYYGVKIQTNESHVTLSLHYKTLGSNATYIAKTTVMKYLEESVWLHLLIILEDGIIEFYLDGNAMPRGIKSLKGEAITDGPGILRIGAGINGNDRFTGLMQDVRSYERKLTLEEIYELHAMPAKSDLHPISGYLEFRQGETNKSFIISARDDNDEEGEELFILKLVSVYGGARISEENTTARLTIQKSDNANGLFGFTGACIPEIAEEGSTISCVVERTRGALDYVHVFYTISQIETDGINYLVDDFANASGTITFLPWQRSEVLNIYVLDDDIPELNEYFRVTLVSAIPGDGKLGSTPTSGASIDPEKETTDITIKASDHPYGLLQFSTGLPPQPKDAMTLPASSVPHITVEEEDGEIRLLVIRAQGLLGRVTAEFRTVSLTAFSPEDYQNVAGTLEFQPGERYKYIFINITDNSIPELEKSFKVELLNLEGGVAELFRVDGSGSGDGDMEFFLPTIHKRASLGVASQILVTIAASDHAHGVFEFSPESLFVSGTEPEDGYSTVTLNVIRHHGTLSPVTLHWNIDSDPDGDLAFTSGNITFEIGQTSANITVEILPDEDPELDKAFSVSVLSVSSGSLGAHINATLTVLASDDPYGIFIFSEKNRPVKVEEATQNITLSIIRLKGLMGKVLVSYATLDDMEKPPYFPPNLARATQGRDYIPASGFALFGANQSEATIAISILDDDEPERSESVFIELLNSTLVAKVQSRSIPNSPRLGPKVETIAQLIIIANDDAFGTLQLSAPIVRVAENHVGPIINVTRTGGAFADVSVKFKAVPITAIAGEDYSIASSDVVLLEGETSKAVPIYVINDIYPELEESFLVQLMNETTGGARLGALTEAVIIIEASDDPYGLFGFQITKLIVEEPEFNSVKVNLPIIRNSGTLGNVTVQWVATINGQLATGDLRVVSGNVTFAPGETIQTLLLEVLADDVPEIEEVIQVQLTDASGGGTIGLDRIANIIIPANDDPYGTVAFAQMVYRVQEPLERSSCANITVRRSGGHFGRLLLFYSTSDIDVVALAMEEGQDLLSYYESPIQGVPDPLWRTWMNVSAVGEPLYTCATLCLKEQACSAFSFFSASEGPQCFWMTSWISPAVNNSDFWTYRKNMTRVASLFSGQAVAGSDYEPVTRQWAIMQEGDEFANLTVSILPDDFPEMDESFLISLLEVHLMNISASLKNQPTIGQPNISTVVIALNGDAFGVFVIYNISPNTSEDGLFVEVQEQPQTLVELMIHRTGGSLGQVAVEWRVVGGTATEGLDFIGAGEILTFAEGETKKTVILTILDDSEPEDDESIIVSLVYTEGGSRILPSSDTVRVNILANDNVAGIVSFQTASRSVIGHEGEILQFHVIRTFPGRGNVTVNWKIIGQNLELNFANFSGQLFFPEGSLNTTLFVHLLDDNIPEEKEVYQVILYDVRTQGVPPAGIALLDAQGYAAVLTVEASDEPHGVLNFALSSRFVLLQEANITIQLFINREFGSLGAINVTYTTVPGMLSLKNQTVGNLAEPEVDFVPIIGFLILEEGETAAAINITILEDDVPELEEYFLVNLTYVGLTMAASTSFPPRLDSEGLTAQVIIDANDGARGVIEWQQSRFEVNETHGSLTLVAQRSREPLGHVSLFVYAQNLEAQVGLDYIFTPMILHFADGERYKNVNIMILDDDIPEGDEKFQLILTNPSPGLELGKNTIALIIVLANDDGPGVLSFNNSEHFFLREPTALYVQESVAVLYIVREPAQGLFGTVTVQFIVTEVNSSNESKDLTPSKGYIVLEEGVRFKALQISAILDTEPEMDEYFVCTLFNPTGGARLGVHVQTLITVLQNQAPLGLFSISAVENRATSIDIEEANRTVYLNVSRTNGIDLAVSVQWETVSETAFGMRGMDVVFSVFQSFLDESASGWCFFTLENLIYGIMLRKSSVTVYRWQGIFIPVEDLNIENPKTCEAFNIGFSPYFVITHEERNEEKPSLNSVFTFTSGFKLFLVQTIIILESSQVRYFTSDSQDYLIIASQRDDSELTQVFRWNGGSFVLHQKLPVRGVLTVALFNKGGSVFLAISQANARLNSLLFRWSGSGFINFQEVPVSGTTEVEALSSANDIYLIFAENVFLGDQNSIDIFIWEMGQSSFRYFQSVDFAAVNRIHSFTPASGIAHILLIGQDMSALYCWNSERNQFSFVLEVPSAYDVASVTVKSLNSSKNLIALVGAHSHIYELAYISSHSDFIPSSGELIFEPGEREATIAVNILDDTVPEKEESFKVQLKNPKGGAEIGINDSVTITILSNDDAYGIVAFAQNSLYKQVEEMEQDSLVTLNVERLKGTYGRITIAWEADGSISDIFPTSGVILFTEGQVLSTITLTILADNIPELSEVVIVTLTRITTEGVEDSYKGATIDQDRSKSVITTLPNDSPFGLVGWRAASVFIRVAEPKENTTTLQLQIARDKGLLGDIAIHLRAQPNFLLHVDNQATENEDYVLQETIIIMKENIKEAHAEVSILPDDLPELEEGFIVTITEVNLVNSDFSTGQPSVRRPGMEIAEIMIEENDDPRGIFMFHVTRGAGEVITAYEVPPPLNVLQVPVVRLAGSFGAVNVYWKASPDSAGLEDFKPSHGILEFADKQVTAMIEITIIDDAEFELTETFNISLISVAGGGRLGDDVVVTVVIPQNDSPFGVFGFEEKTVMIDESLSSDDPDSYVTLTVVRSPGGKGTVRLEWTIDEKAKHNLSPLNGTLHFDETESQKTIVLHTLQDTVLEEDRRFTIQLISIDEVEISPVKGSASIIIRGDKRASGEVGIAPSSRHILIGEPSAKYNGTAIISLVRGPGILGEVTVFWRIFPPSVGEFAETSGKLTMRDEQSAVIVVIQALNDDIPEEKSFYEFQLTAVSEGGVLSESSSTANITVVASDSPYGRFAFSHEQLRVSEAQRVNITIIRSSGDFGHVRLWYKTMSGTAEAGLDFVPAAGELLFEAGEMRKSLHVEILDDDYPEGPEEFSLTITKVELQGRGYDFTIQENGLQIDQPPEIGNISIVRIIIMKNDNAEGIIEFDPKYTAFEVEEDVGLIMIPVVRLHGTYGYVTADFISQSSSASPGGVDYILHGSTVTFQHGQNLSFINISIIDDNESEFEEPIEILLTGATGGAVLGRHLVSRIIIAKSDSPFGVIRFLNQSKISIANPNSTMILSLVLERTGGLLGEIQVNWETVGPNSQEALLPQNRDIADPVSGLFYFGEGEGGVRTIILTIYPHEEIEVEETFIIKLHLVKGEAKLDSRAKDVTLTIQEFGDPNGVVQFAPETLSKKTYSEPLALEGPLLITFFVRRVKGTFGEIMVYWELSSEFDITEDFLSTSGFFTIADGESEASFDVHLLPDEVPEIEEDYVIQLVSVEGGAELDLEKSITWFSVYANDDPHGVFALYSDRQSILIGQNLIRSIQINITRLAGTFGDVAVGLRISSDHKEQPIVTENAERQLVVKDGATYKVDVVPIKNQVFLSLGSNFTLQLVTVMLVGGRFYGMPTILQEAKSAVLPVSEKAANSQVGFESTAFQLMNITAGTSHVMISRRGTYGALSVAWTTGYAPGLEIPEFIVVGNMTPTLGSLSFSHGEQRKGVFLWTFPSPGWPEAFVLHLSGVQSSAPGGAQLRSGFIVAEIEPMGVFQFSTSSRNIIVSEDTQMIRLHVQRLFGFHSDLIKVSYQTTAGSAKPLEDFEPVQNGELFFQKFQTEVDFEITIINDQLSEIEEFFYINLTSVEIRGLQKFDVNWSPRLNLDFSVAVITILDNDDLAGMDISFPETTVAVAVDTTLIPVETESTTYLSTSKTTTILQPTNVVAIVTEATGVSAIPEKLVTLHGTPAVSEKPDVATVTANVSIHGTFSLGPSIVYIEEEMKNGTFNTAEVLIRRTGGFTGNVSITVKTFGERCAQMEPNALPFRGIYGISNLTWAVEEEDFEEQTLTLIFLDGERERKVSVQILDDDEPEGQEFFYVFLTNPQGGAQIVEEKDDTGFAAFAMVIITGSDLHNGIIGFSEESQSGLELREGAVMRRLHLIVTRQPNRAFEDVKVFWRVTLNKTVVVLQKDGVNLVEELQSVSGTTTCTMGQTKCFISIELKPEKVPQVEVYFFVELYEATAGAAINNSARFAQIKILESDESQSLVYFSVGSRLAVAHKKATLISLQVARDSGTGLMMSVNFSTQELRSAETIGRTIISPAISGKDFVITEGTLVFEPGQRSTVLDVILTPETGSLNSFPKRFQIVLFDPKGGARIDKVYGTANITLVSDADSQAIWGLADQLHQPVNDDILNRVLHTISMKVATENTDEQLSAMMHLIEKITTEGKIQAFSVASRTLFYEILCSLINPKRKDTRGFSHFAEVTENFAFSLLTNVTCGSPGEKSKTILDSCPYLSILALHWYPQQINGHKFEGKEGDYIRIPERLLDVQDAEIMAGKSTCKLVQFTEYSSQQWFISGNNLPTLKNKVLSLSVKGQSSQLLTNDNEVLYRIYAAEPRIIPQTSLCLLWNQAAASWLSDSQFCKVVEETADYVECACSHMSVYAVYARTDNLSSYNEAFFTSGFICISGLCLAVLSHIFCARYSMFAAKLLTHMMAASLGTQILFLASAYASPQLAEESCSAMAAVTHYLYLCQFSWMLIQSVNFWYVLVMNDEHTERRYLLFFLLSWGLPAFVVILLIVILKGIYHQSMSQIYGLIHGDLCFIPNVYAALFTAALVPLTCLVVVFVVFIHAYQVKPQWKAYDDVFRGRTNAAEIPLILYLFALISVTWLWGGLHMAYRHFWMLVLFVIFNSLQGLYVFMVYFILHNQMCCPMKASYTVEMNGHPGPSTAFFTPGSGMPPAGGEISKSTQNLIGAMEEVPPDWERASFQQGSQASPDLKPSPQNGATFPSSGGYGQGSLIADEESQEFDDLIFALKTGAGLSVSDNESGQGSQEGGTLTDSQIVELRRIPIADTHL

SEQ ID NO: 532 - protein, 6306 aa, Homo Sapiens; identical to SEQ ID NO: 531

SEQ ID NO: 533 - protein, 938 aa, Homo Sapiens
NSTMILSLVLERTGGLLGEIQVNWETVGPNSQEALLPQNRDIADPVSGLFYFGEGEGGVRTIILTIYPHEEIEVEETFIIKLHLVKGEAKLDSRAKDVTLTIQEFGDPNGVVQFAPETLSKKTYSEPLALEGPLLITFFVRRVKGTFGEIMVYWELSSEFDITEDFLSTSGFFTIADGESEASFDVHLLPDEVPEIEEDYVIQLVSVEGGAELDLEKSITWFSVYANDDPHGVFALYSDRQSILIGQNLIRSIQINITRLAGTFGDVAVGLRISSDHKEQPIVTENAERQLVVKDGATYKVDVVPIKNQVFLSLGSNFTLQLVTVMLVGGRFYGMPTILQEAKSAVLPVSEKAANSQVGFESTAFQLMNITAGTSHVMISRRGTYGALSVAWTTGYAPGLEIPEFIVVGNMTPTLGSLSFSHGEQRKGVFLWTFPSPGWPEAFVLHLSGVQSSAPGGAQLRSGFIVAEIEPMGVFQFSTSSRNIIVSEDTQMIRLHVQRLFGFHSDLIKVSYQTTAGSAKPLEDFEPVQNGELFFQKFQTEVDFEITIINDQLSEIEEFFYINLTSVEIRGLQKFDVNWSPRLNLDFSVAVITILDNDDLAGMDISFPETTVAVAVDTTLIPVETESTTYLSTSKTTTILQPTNVVAIVTEATGVSAIPEKLVTLHGTPAVSEKPDVATVTANVSIHGTFSLGPSIVYIEEEMKNGTFNTAEVLIRRTGGFTGNVSITVKTFGERCAQMEPNALPFRGIYGISNLTWAVEEEDFEEQTLTLIFLDGERERKVSVQILDDDEPEGQEFFYVFLTNPQGGAQIVEEKDDTGFAAFAMVIITGSDLHNGIIGFSEESQSGLELREGAVMRRLHLIVTRQPNRAFEDVKVFWRVTLNKTVVVLQKDGVNLVEELQSVSGTTTCTMGQTKCFISIELKPEKRNATEPIIKSFS

SEQ ID NO: 534 - protein, 2624 aa, Homo Sapiens
QLKNPKGGAEIGINDSVTITILSNDDAYGIVAFAQNSLYKQVEEMEQDSLVTLNVERLKGTYGRITIAWEADGSISDIFPTSGVILFTEGQVLSTITLTILADNIPELSEVVIVTLTRITTEGVEDSYKGATIDQDRSKSVITTLPNDSPFGLVGWRAASVFIRVAEPKENTTTLQLQIARDKGLLGDIAIHLRAQPNFLLHVDNQATENEDYVLQETIIIMKENIKEAHAEVSILPGAGEVITAYEVPPPLNVLQVPVVRLAGSFGAVNVYWKASPDSAGLEDFKPSHGILEFADKQVTAMIEITIIDDAEFELTETFNISLISVAGGGRLGDDVVVTVVIPQNDSPFGVFGFEEKTVMIDESLSSDDPDSYVTLTVVRSPGGKGTVRLEWTIDEKAKHNLSPLNGTLHFDETESQKTIVLHTLQDTVLEEDRRFTIQLISIDEVEISPVKGSASIIIRGDKRASGEVGIAPSSRHILIGEPSAKYNGTAIISLVRGPGILGEVTVFWRIFPPSVGEFAETSGKLTMRDEQSAVIVVIQALNDDIPEEKSFYEFQLTAVSEGGVLSESSSTANITVVASDSPYGRFAFSHEQLRVSEAQRVNITIIRSSGDFGHVRLWYKTMSGTAEAGLDFVPAAGELLFEAGEMRKSLHVEILDDDYPEGPEEFSLTITKVELQGRGYDFTIQENGLQIDQPPEIGNISIVRIIIMKNDNAEGIIEFDPKYTAFEVEEDVGLIMIPVVRLHGTYGYVTADFISQSSSASPGGVDYILHGSTVTFQHGQNLSFINISIIDDNESEFEEPIEILLTGATGGAVLGRHLVSRIIIAKSDSPFGVIRFLNQSKISIANPNSTMILSLVLERTGGLLGEIQVNWETVGPNSQEALLPQNRDIADPVSGLFYFGEGEGGVRTIILTIYPHEEIEVEETFIIKLHLVKGEAKLDSRAKDVTLTIQEFGDPNGVVQFAPETLSKKTYSEPLALEGPLLITFFVRRVKGTFGEIMVYWELSSEFDITEDFLSTSGFFTIADGESEASFDVHLLPDEVPEIEEDYVIQLVSVEGGAELDLEKSITWFSVYANDDPHGVFALYSDRQSILIGQNLIRSIQINITRLAGTFGDVAVGLRISSDHKEQPIVTENAERQLVVKDGATYKVDVVPIKNQVFLSLGSNFTLQLVTVMLVGGRFYGMPTILQEAKSAVLPVSEKAANSQVGFESTAFQLMNITAGTSHVMISRRGTYGALSVAWTTGYAPGLEIPEFIVVGNMTPTLGSLSFSHGEQRKGVFLWTFPSPGWPEAFVLHLSGVQSSAPGGAQLRSGFIVAEIEPMGVFQFSTSSRNIIVSEDTQMIRLHVQRLFGFHSDLIKVSYQTTAGSAKPLEDFEPVQNGELFFQKFQTEVDFEITIINDQLSEIEEFFYINLTSVEIRGLQKFDVNWSPRLNLDFSVAVITILDNDDLAGMDISFPETTVAVAVDTTLIPVETESTTYLSTSKTTTILQPTNVVAIVTEATGVSAIPEKLVTLHGTPAVSEKPDVATVTANVSIHGTFSLGPSIVYIEEEMKNGTFNTAEVLIRRTGGFTGNVSITVKTFGERCAQMEPNALPFRGIYGISNLTWAVEEEDFEEQTLTLIFLDGERERKVSVQILDDDEPEGQEFFYVFLTNPQGGAQIVEEKDDTGFAAFAMVIITGSDLHNGIIGFSEESQSGLELREGAVMRRLHLIVTRQPNRAFEDVKVFWRVTLNKTVVVLQKDGVNLVEELQSVSGTTTCTMGQTKCFISIELKPEKVPQVEVYFFVELYEATAGAAINNSARFAQIKILESDESQSLVYFSVGSRLAVAHKKATLISLQVARDSGTGLMMSVNFSTQELRSAETIGRTIISPAISGKDFVITEGTLVFEPGQRSTVLDVILTPETGSLNSFPKRFQIVLFDPKGGARIDKVYGTANITLVSDADSQAIWGLADQLHQPVNDDILNRVLHTISMKVATENTDEQLSAMMHLIEKITTEGKIQAFSVASRTLFYEILCSLINPKRKDTRGFSHFAEVTENFAFSLLTNVTCGSPGEKSKTILDSCPYLSILALHWYPQQINGHKFEGKEGDYIRIPERLLDVQDAEIMAGKSTCKLVQFTEYSSQQWFISGNNLPTLKNKVLSLSVKGQSSQLLTNDNEVLYRIYAAEPRIIPQTSLCLLWNQAAASWLSDSQFCKVVEETADYVECACSHMSVYAVYARTDNLSSYNEAFFTSGFICISGLCLAVLSHIFCARYSMFAAKLLTHMMAASLGTQILFLASAYASPQLAEESCSAMAAVTHYLYLCQFSWMLIQSVNFWYVLVMNDEHTERRYLLFFLLSWGLPAFVVILLIVILKGIYHQSMSQIYGLIHGDLCFIPNVYAALFTAALVPLTCLVVVFVVFIHAYQVKPQWKAYDDVFRGRTNAAEIPLILYLFALISVTWLWGGLHMAYRHFWMLVLFVIFNSLQGLYVFMVYFILHNQMCCPMKASYTVEMNGHPGPSTAFFTPGSGMPPAGGEISKSTQNLIGAMEEVPPDWERASFQQGSQASPDLKPSPQNGATFPSSGGYGQGSLIADEESQEFDDLIFALKTGAGLSVSDNESGQGSQEGGTLTDSQIVELRRIPIADTHL

SEQ ID NO: 535 - protein, 390 aa, Homo Sapiens
TFQHGQNLSFINISIIDDNESEFEEPIEILLTGATGGAVLGRHLVSRIIIAKSDSPFGVIRFLNQSKISIANPNSTMILSLVLERTGGLLGEIQVNWETVGPNSQEALLPQNRDIADPVSGLFYFGEGEGGVRTIILTIYPHEEIEVEETFIIKLHLVKGEAKLDSRAKDVTLTIQEFGDPNGVVQFAPETLSKKTYSEPLALEGPLLITFFVRRVKGTFGEIMVYWELSSEFDITEDFLSTSGFFTIADGESEASFDVHLLPDEVPEIEEDYVIQLVSVEGGAELDLEKSITWFSVYANDDPHGVFALYSDRQSILIGQNLIRSIQINITRLAGTFGDVAVGLRISSDHKEQPIVTENAERQLVVKDGATYKVDVVPIKNQVCGISSVS

SEQ ID NO: 536 - protein, 99 aa, Homo Sapiens
VPHITVEEEDGEIRLLVIRAQGLLGRVTAEFRTVSLTAFSPEDYQNVAGTLEFQPGERYKYIFINITDNSIPELEKSFKVELLNLEGGVCEFLVRAGDE

SEQ ID NO: 537 - protein, 80 aa, Homo Sapiens
  misc_feature (1)..(1): Xaa can be any naturally occurring amino acid
XDEQLSAMMHLIEKITTEGKIQAFSVASRTLFYEILCSLINPKRKDTRGFSHFAEVTENFAFSLLTNVTCGSPGEKSPAC

SEQ ID NO: 538 - protein, 72 aa, Homo Sapiens
  misc_feature (1)..(1): Xaa can be any naturally occurring amino acid
XEGSTISCVVERTRGALDYVHVFYTISQIETDGINYLVDDFANASGTITFLPWQRSELLIEVSLPIIIYNCN

SEQ ID NO: 539 - protein, 567 aa, Homo Sapiens
  misc_feature (1)..(1): Xaa can be any naturally occurring amino acid
XITVEEEDGEIRLLVIRAQGLLGRVTAEFRTVSLTAFSPEDYQNVAGTLEFQPGERYKYIFINITDNSIPELEKSFKVELLNLEGGAELFRVDGSGSGDGDMEFFLPTIHKRASLGVASQILVTIAASDHAHGVFEFSPESLFVSGTEPEDGYSTVTLNVIRHHGTLSPVTLHWNIDSDPDGDLAFTSGNITFEIGQTSANITVEILPDEDPELDKAFSVSVLSVSSGSLGAHINATLTVLASDDPYGIFIFSEKNRPVKVEEATQNITLSIIRLKGLMGKVLVSYATLDDMEKPPYFPPNLARATQGRDYIPASGFALFGANQSEATIAISILDDDEPERSESVFIELLNSTLVAKVQSRSIPNSPRLGPKVETIAQLIIIANDDAFGTLQLSAPIVRVAENHVGPIINVTRTGGAFADVSVKFKAVPITAIAGEDYSIASSDVVLLEGETSKAVPIYVINDIYPELEESFLVQLMNETTGGARLGALTEAVIIIEASDDPYGLFGFQITKLIVEEPEFNSVKVNLPIIRNSGTLGNVTVQWVATINGQLATGDLRVVSGYPSATN

SEQ ID NO: 540 - protein, 65 aa, Homo Sapiens
  misc_feature (1)..(1): Xaa can be any naturally occurring amino acid
XLPTIHKRASLGVASQILVTIAASDHAHGVFEFSPESLFVSGTEPEDGYSTVTLNFQILHVLGLR

SEQ ID NO: 541 - protein, 173 aa, Homo Sapiens
MSVKSSKLMFLCHGSSRSLHSGSLTSCNTGVCCSLDADKYENDPELEKIRRERNYSWMDIITICKDKLPNYEEKIKMFYEEHLHLDDEIRYILDGSGYFDVRDKEDQWIRIFMEKGDMVTLPAGIYHRFTVDEKNYTKAMRLFVGEPVWTAYNRPADHFEARGQYVKFLAQTA

SEQ ID NO: 542 - protein, 179 aa, Homo Sapiens
MVQAWYMDDAPGDPRQPHRPDPGRPVGLEQLRRLGVLYWKLDADKYENDPELEKIRRERNYSWMDIITICKDKLPNYEEKIKMFYEEHLHLDDEIRYILDGSGYFDVRDKEDQWIRIFMEKGDMVTLPAGIYHRFTVDEKNYTKAMRLFVGEPVWTAYNRPADHFEARGQYVKFLAQTA

SEQ ID NO: 543 - protein, 117 aa, Homo Sapiens
  misc_feature (1)..(1): Xaa can be any naturally occurring amino acid
XRWECCAFSPGPACVVALAVASLPLNCAASADSKRGRWARDSSTCASRRVCGAAGDVRGDSCPSVAASVAPACDPGGQNYTKAMRLFVGEPVWTAYNRPADHFEARGQYVKFLAQTA

SEQ ID NO: 544 - protein, 59 aa, Homo Sapiens
MKYPLMPLVNDLTFSFLVFWFCLPVGLLLLLIIWLRFLLSQDILQVRRYRYDANILTAS

SEQ ID NO: 545 - protein, 80 aa, Homo Sapiens
MKYPLMPLVNDLTFSFLVFWFCLPVGLLLLLIIWLRFLLSQDSEENDSSVCLDWEPWSKGPAEFCWKGTLHGQEKERPCW

SEQ ID NO: 546 - protein, 80 aa, Homo Sapiens; identical to SEQ ID NO: 545

SEQ ID NO: 547 - protein, 179 aa, Homo Sapiens
  misc_feature (1)..(1): Xaa can be any naturally occurring amino acid
XWFCLPVGLLLLLIIWLRFLLSQDSEENDSSVCLDWEPWSKGPAEFCWKGTLHGQEKERPCCLVFLESAGQWQWQKWMGETCQGGKRTLATVVPPWNPQLISSSDRHVKASRGPSPSPASQMTSSPAGSRSSLGGHGSSEQAHGEKLANLIQRGLKAGLGRRVWVHIKEARVFPYPGDP

SEQ ID NO: 548 - protein, 244 aa, Homo Sapiens
MLLLGAVLLLLALPGHDQETTTQGPGVLLPLPKGACTGWMAGIPGHPGHNGAPGRDGRDGTPGEKGEKGDPGLIGPKGDIGETGVPGAEGPRGFPGIQGRKGEPGEGAYVYRSAFSVGLETYVTIPNMPIRFTKIFYNQQNHYDGSTGKFHCNIPGLYYFAYHITVYMKDVKVSLFKKDKAMLFTYDQYQENNVDQASGSVLLHLEVGDQVWLQVYGEGERNGLYADNDNDSTFTGFLLYHDTN

SEQ ID NO: 549 - protein, 244 aa, Homo Sapiens; identical to SEQ ID NO: 548

SEQ ID NO: 550 - protein, 117 aa, Homo Sapiens
MGSQVAFLPPPPARSSPDAARIRVKRYRQSMNNFQGLRSFGCRFGTCTVQKLAHQIYQFTDKDKDNVAPRSKISPQGYGRRRRRSLPEAGPGRTLVSSKPQAHGAPAPPSGSAPHFL

SEQ ID NO: 551 - protein, 83 aa, Homo Sapiens
MKLVSVALMYLGSLAFLGADTARLDVASEFRKKWNKWALSRGKRELRMSSSYPTGLADVKAGPAQTLIRPQDMKGASRSPEDR

SEQ ID NO: 552 - protein, 83 aa, Homo Sapiens; identical to SEQ ID NO: 551

SEQ ID NO: 553 - protein, 139 aa, Homo Sapiens
MKLVSVALMYLGSLAFLGADTARLDVASEFRKKWNKWALSRGKRELRMSSSYPTGLADVKAGPAQTLIRPQDMKGASRSPEDSCLSSPSPRPQQSGCRPHPSQALPPEHEQLPGPPELWLPLRDVHGAEAGTPDLPVHR

SEQ ID NO: 554 - protein, 185 aa, Homo Sapiens
MKLVSVALMYLGSLAFLGADTARLDVASEFRKKWNKWALSRGKRELRMSSSYPTGLADVKAGPAQTLIRPQDMKGASRSPEDSSPDAARIRVKRYRQSMNNFQGLRSFGCRFGTCTVQKLAHQIYQFTDKDKDNVAPRSKISPQGYGRRRRRSLPEAGPGRTLVSSKPQAHGAPAPPSGSAPHFL

SEQ ID NO: 555 - protein, 185 aa, Homo Sapiens; identical to SEQ ID NO: 554

SEQ ID NO: 556 - protein, 185 aa, Homo Sapiens; identical to SEQ ID NO: 554

SEQ ID NO: 557 - protein, 138 aa, Homo Sapiens
MSSSYPTGLADVKAGPAQTLIRPQDMKGASRSPEDSSPDAARIRVKRYRQSMNNFQGLRSFGCRFGTCTVQKLAHQIYQFTDKDKDNVAPRSKISPQGYGRRRRRSLPEAGPGRTLVSSKPQAHGAPAPPSGSAPHFL

SEQ ID NO: 558 - protein, 148 aa, Homo Sapiens
MARIPTAALGCISLLCLQLPGSLSRSLGGDPRPVKPREPPARSPSSSLQPRHPAPRPVVWKLHRALQAQRGAGLAPVMGQPLRDGGRQHSGPRRHSGPRRTQAQLLRVGCVLGTCQVQNLSHRLWQLMGPAGRQDSAPVDPSSPHSYG

SEQ ID NO: 559 - protein, 148 aa, Homo Sapiens; identical to SEQ ID NO: 558

SEQ ID NO: 560 - protein, 153 aa, Homo Sapiens
MTIHILILLLLLAFSAQGDLDTAARRGQHQVPQHRGHVCYLGVCRTHRLAEIIYWIRCLHQGALGEGQPRAPGPLQLWAPPVARGGSPARFPGFRPAARGLAQCPARWVTSGTARPLLGFSLPICMLELLLHISSPLTPAPETVFPSPSPGCD

SEQ ID NO: 561 - protein, 57 aa, Homo Sapiens
LLEPELPGSALRSLWSSLCLGPAPAPPGPVSPEGRLAAAWDALIVRPVRRWRRVAVG

SEQ ID NO: 562 - protein, 222 aa, Homo Sapiens
MAASCRVVTSISDIPTGIPVHLELASMTNRELMSSIVHQVFPAVTSLGLNEQELLFLTQSASGPHSSLSSWNGVPDVGMVSDILFWILKEHGRSKSRASDLTRIHFHTLVYHILATVDGHWANQLAAVAAGARVAGTQACATETIDTSRVSLRAPQEFMTSHSEAGSRIVLNPNKPVVEWHREGISFHFTPVLVCKDPIRTVGLGDAISAEGLFYSEVHPHY

SEQ ID NO: 563 - protein, 78 aa, Homo Sapiens
MALWRGSAYAGFLALAVGCVFLLEPELPGSALRSLWSSLCLGPAPAPPGPVSPEGRLAAAWDALIVRPVRRWRRVAVG

SEQ ID NO: 564 - protein, 78 aa, Homo Sapiens; identical to SEQ ID NO: 563

SEQ ID NO: 565 - protein, 78 aa, Homo Sapiens; identical to SEQ ID NO: 563

SEQ ID NO: 566 - protein, 113 aa, Homo Sapiens
MALWRGSAYAGFLALAVGCVFLLEPELPGSALRSLWSSLCLGPAPAPPGPVSPEGRLAAAWDALIVRPVRRWRRVAVGFFFAVQLVQSYMSFLMTMSLFHQSHCRKWMSSTSF

SEQ ID NO: 567 - protein, 496 aa, Homo Sapiens
MALWRGSAYAGFLALAVGCVFLLEPELPGSALRSLWSSLCLGPAPAPPGPVSPEGRLAAAWDALIVRPVRRWRRVAVGVNACVDVVLSGVKLLQALGLSPGNGKDHSILHSRNDLEEAFIHFMGKGAAAERFFSDKETFHDIAQVASEFPGAQHYVGGNAALIGQKFAANSDLKVLLCGPVGPKLHELLDDNVFVPPESLQEVDEFHLILEYQAGEEWGQLKAPHANRFIFSHDLSNGAMNMLEVFVSSLEEFQPDLVVLSGLHMMEGQSKELQRKRLLEVVTSISDIPTGIPVHLELASMTNRELMSSIVHQVFPAVTSLGLNEQELLFLTQSASGPHSSLSSWNGVPDVGMVSDILFWILKEHGRSKSRASDLTRIHFHTLVYHILATVDGHWANQLAAVAAGARVAGTQACATETIDTSRVSLRAPQEFMTSHSEAGSRIVLNPNKPVVEWHREGISFHFTPVLVCKDPIRTVGLGDAISAEGLFYSEVHPHY

SEQ ID NO: 568 - protein, 154 aa, Homo Sapiens
MGKGAAAERFFSDKETFHDIAQVASEFPGAQHYVGGNAALIGQKFAANSDLKVLLCGPVGPKLHELLDDNVFVPPESLQEVDEFHLILEYQAGEEWGQLKAPHANRFIFSHDLSNGAMNMLEVFVSSLEEFQPDLVVLSGLHMMEGQSKELQRK

SEQ ID NO: 569 - protein, 204 aa, Homo Sapiens
  misc_feature (1)..(1): Xaa can be any naturally occurring amino acid
XEPELPGSALRSLWSSLCLGPAPAPPGPVSPEGRLAAAWDALIVRPVRRWRRVAVGVNACVDVVLSGVKLLQALGLSPGNGKDHSILHSRNDLEEAFIHFMGKGAAAERFFSDKETFHDIAQVASEFPGAQHYVGGNAALIGQKFAANSDLKVLLCGPVGPKLHELLDDNVFVPPESLQEVDEFHLILEYQAAGLSRGDFPWAE

SEQ ID NO: 570 - protein, 26 aa, Homo Sapiens
  misc_feature (1)..(1): Xaa can be any naturally occurring amino acid
XKRLLEVLASQGHILAAGCGACLLLQ

SEQ ID NO: 571 - protein, 363 aa, Homo Sapiens
MAAAAMAAAAGGGAGAARSLSRFRGCLAGALLGDCVGSFYEAHDTVDLTSVLRHVQSLEPDPGTPGSERTEALYYTDDTAMARALVQSLLAKEAFDEVDMAHRFAQEYKKDPDRGYGAGVVTVFKKLLNPKCRDVFEPARAQFNGKGSYGNGGAMRVAGISLAYSSVQDVQKFARLSAQLTHASSLGYNGAILQALAVHLALQGESSSEHFLKQLLGHMEDLEGDAQSVLDARELGMEERPYSSRLKKIGELLDQASVTREEVVSELGNGIAAFESVPTAIYCFLRCMEPDPEIPSAFNSLQRTLIYSISLGGDTDTIATMAGAIAGAYYGMDQVPESWQQSCEGYEETDILAQSLHRVFQKS

SEQ ID NO: 572 - protein, 69 aa, Homo Sapiens
KPDAERQTDEEKEELKKPKKEDSSPKEETDKWAVEKGKDHKEPRKGEELEEEWTPTEKVRPLCRRSPSG

SEQ ID NO: 573 - protein, 54 aa, Homo Sapiens
LMKVVNEECPTITRTYSLGKSSRGLKIYAMEISDNPGEHELGEGLWGPAAGLCC

SEQ ID NO: 574 - protein, 1158 aa, Homo Sapiens
MAAVRGAPLLSCLLALLALCPGGRPQTVLTDDEIEEFLEGFLSELEPEPREDDVEAPPPPEPTPRVRKAQAGGKPGKRPGTAAEVPPEKTKDKGKKGKKDKGPKVPKESLEGSPRPPKKGKEKPPKATKKPKEKPPKATKKPKEKPPKATKKPKEKPPKATKKPPSGKRPPILAPSETLEWPLPPPPSPGPEELPQEGGAPLSNNWQNPGEETHVEAREHQPEPEEETEQPTLDYNDQIEREDYEDFEYIRRQKQPRPPPSRRRRPERVWPEPPEEKAPAPAPEERIEPPVKPLLPPLPPDYGDGYVIPNYDDMDYYFGPPPPQKPDAERQTDEEKEELKKPKKEDSSPKEETDKWAVEKGKDHKEPRKGEELEEEWTPTEKVKCPPIGMESHRIEDNQIRASSMLRHGLGAQRGRLNMQTGATEDDYYDGAWCAEDDARTQWIEVDTRRTTRFTGVITQGRDSSIHDDFVTTFFVGFSNDSQTWVMYTNGYEEMTFHGNVDKDTPVLSELPEPVVARFIRIYPLTWNGSLCMRLEVLGCSVAPVYSYYAQNEVVATDDLDFRHHSYKDMRQLMKVVNEECPTITRTYSLGKSSRGLKIYAMEISDNPGEHELGEPEFRYTAGIHGNEVLGRELLLLLMQYLCREYRDGNPRVRSLVQDTRIHLVPSLNPDGYEVAAQMGSEFGNWALGLWTEEGFDIFEDFPDLNSVLWGAEERKWVPYRVPNNNLPIPERYLSPDATVSTEVRAIIAWMEKNPFVLGANLNGGERLVSYPYDMARTPTQEQLLAAAMAAARGEDEDEVSEAQETPDHAIFRWLAISFASAHLTLTEPYRGGCQAQDYTGGMGIVNGAKWNPRTGTINDFSYLHTNCLELSFYLGCDKFPHESELPREWENNKEALLTFMEQVHRGIKGVVTDEQGIPIANATISVSGINHGVKTASGGDYWRILNPGEYRVTAHAEGYTPSAKTCNVDYDIGATQCNFILARSNWKRIREIMAMNGNRPIPHIDPSRPMTPQQRRLQQRRLQHRLRLRAQMRLRRLNATTTLGPHTVPPTLPPAPATTLSTTIEPWGLIPPTTAGWEESETETYTEVVTEFGTEVEPEFGTKVEPEFETQLEPEFETQLEPEFEEEEEEEKEEEIATGQAFPFTTVETYTVNFGDF

SEQ ID NO: 575 - protein, 162 aa, Homo Sapiens
MPPEKTKDKGKKGKKDKGPKVPKESLEGSPRPPKKGKEKPPKATKKPKEKPPKATKKPKEKPPKATKKPKEKPPKATKKPPSGKRPPILAPSETLEWPLPPPPSPGPEELPQEGGAPLSNNWQNPGEETHVEAREHQPEPEEETEQPTLDYNDQIEREDYED

SEQ ID NO: 576 - protein, 733 aa, Homo Sapiens
MRKWWAPCPGSWLCSHCLGEGWALRGAGSTALRPASPQTFHGNVDKDTPVLSELPEPVVARFIRIYPLTWNGSLCMRLEVLGCSVARECGGLAGALSGGGVLGWASRHPAKDNPASLAAVYSYYAQNEVVATDDLDFRHHSYKDMRQLMKVVNEECPTITRTYSLGKSSRGLKIYAMEISDNPGEHELGEPEFRYTAGIHGNEVLGRELLLLLMQYLCREYRDGNPRVRSLVQDTRIHLVPSLNPDGYEVAAQMGSEFGNWALGLWTEEGFDIFEDFPDLNSVLWGAEERKWVPYRVPNNNLPIPERYLSPDATVSTEVRAIIAWMEKNPFVLGANLNGGERLVSYPYDMARTPTQEQLLAAAMAAARGEDEDEVSEAQETPDHAIFRWLAISFASAHLTLTEPYRGGCQAQDYTGGMGIVNGAKWNPRTGTINDFSYLHTNCLELSFYLGCDKFPHESELPREWENNKEALLTFMEQVHRGIKGVVTDEQGIPIANATISVSGINHGVKTASGGDYWRILNPGEYRVTAHAEGYTPSAKTCNVDYDIGATQCNFILARSNWKRIREIMAMNGNRPIPHIDPSRPMTPQQRRLQQRRLQHRLRLRAQMRLRRLNATTTLGPHTVPPTLPPAPATTLSTTIEPWGLIPPTTAGWEESETETYTEVVTEFGTEVEPEFGTKVEPEFETQLEPEFETQLEPEFEEEEEEEKEEEIATGQAFPFTTVETYTVNFGDF

SEQ ID NO: 577 - protein, 104 aa, Homo Sapiens
RTQWIEVDTRRTTRFTGVITQGRDSSIHDDFVTTFFVGFSNDSQTWVMYTNGYEEMVGTMPRLLALLPLSGRGVGSQRGWQYCSEACLSPDLSWERGQGHTRAE

SEQ ID NO: 578 - protein, 251 aa, Homo Sapiens
  misc_feature (1)..(1): Xaa can be any naturally occurring amino acid
XELEPEPREDDVEAPPPPEPTPRVRKAQAGGKPGKRPGTAAEVPPEKTKDKGKKGKKDKGPKVPKESLEGSPRPPKKGKEKPPKATKKPKEKPPKATKKPKEKPPKATKKPKEKPPKATKKPPSGKRPPILAPSETLEWPLPPPPSPGPEELPQEGGAPLSNNWQNPGEETHVEAREHQPEPPVKPLLPPLPPDYGDGYVIPNYDDMDYYFGPPPPQKPDAERQTDEEKEELKKPKKEDSSPKEETDKWAV

SEQ ID NO: 579 - protein, 66 aa, Homo Sapiens
  misc_feature (1)..(1): Xaa can be any naturally occurring amino acid
XFRHHSYKDMRQLMKVVNEECPTITRTYSLGKSSRGLKIYAMEISDNPGEHELGEGLWGPAAGLCC

SEQ ID NO: 580 - protein, 481 aa, Homo Sapiens
MAASWSLLVTLRPLAQSPLRGRCVGCGAWAAALAPLATAPGKPFWKAYTVQTSESMTPTATSETYLKALAVCHGPLDHYDFLIKAHELKDDEHQRRVIQCLQKLHEDLKGYNIEAEGLFSKLFSRSKPPRGLYVYGDVGTGKTMVMDMFYAYVEMKRKKRVHFHGFMLDVHKRIHRLKQSLPKRKPGFMAKSYDPIAPIAEEISEEACLLCFDEFQVTDIADAMILKQLFENLFKNGVVVVATSNRPPEDLYKNGLQRANFVPFIAVLKEYCNTVQLDSGIDYRKRELPAAGKLYYLTSEADVEAVMDKLFDELAQKQNDLTRPRILKVQGRELRLNKACGTVADCTFEELCERPLGASDYLELSKNFDTIFLRNIPQFTLANRTQGRRFITLIDNFYDLKVRIICSASTPISSLFLHQHHDSELEQSRILMDDLGLSQDSAEGLSMFTGEEEIFAFQRTISRLTEMQTEQYWNEGDRTKK

SEQ ID NO: 581 - protein, 160 aa, Homo Sapiens
MCATPPSLNFKKLAYTVQTSESMTPTATSETYLKALAVCHGPLDHYDFLIKAHELKDDEHQRRVIQCLQKLHEDLKGYNIEAEGLFSKLFSRSKPPRGLYVYGDVGTGKTMVMDMFYAYVEMKRKKRVHFHGFMLDVHKRIHRLKQSLPKRKPGFMAKSY

SEQ ID NO: 582 - protein, 80 aa, Homo Sapiens
  misc_feature (1)..(1): Xaa can be any naturally occurring amino acid
XIHRLKQSLPKRKPGFMAKSYDPIAPIAEEISEEACLLCFDEFQVTDIADAMILKQLFENLFKNGVVVVATSNRPPEGIL

SEQ ID NO: 583 - protein, 349 aa, Homo Sapiens
  misc_feature (1)..(1): Xaa can be any naturally occurring amino acid
XKPFWKGTGKTMVMDMFYAYVEMKRKKRVHFHGFMLDVHKRIHRLKQSLPKRKPGFMAKSYDPIAPIAEEISEEACLLCFDEFQVTDIADAMILKQLFENLFKNGVVVVATSNRPPEDLYKNGLQRANFVPFIAVLKEYCNTVQLDSGIDYRKRELPAAGKLYYLTSEADVEAVMDKLFDELAQKQNDLTRPRILKVQGRELRLNKACGTVADCTFEELCERPLGASDYLELSKNFDTIFLRNIPQFTLANRTQGRRFITLIDNFYDLKVRIICSASTPISSLFLHQHHDSELEQSRILMDDLGLSQDSAEGLSMFTGEEEIFAFQRTISRLTEMQTEQYWNEGDRTKK

SEQ ID NO: 584 - protein, 599 aa, Homo Sapiens
MKLLKLTGFIFFLFFLTESLTLPTQPRDIENFNSTQKFIEDNIEYITIIAFAQYVQEATFEEMEKLVKDMVEYKDRCMADKTLPECSKLPNNVLQEKICAMEGLPQKHNFSHCCSKVDAQRRLCFFYNKKSDVGFLPPFPTLDPEEKCQAYESNRESLLNHFLYEVARRNPFVFAPTLLTVAVHFEEVAKSCCEEQNKVNCLQTRAIPVTQYLKAFSSYQKHVCGALLKFGTKVVHFIYIAILSQKFPKIEFKELISLVEDVSSNYDGCCEGDVVQCIRDTSKVMNHICSKQDSISSKIKECCEKKIPERGQCIINSNKDDRPKDLSLREGKFTDSENVCQERDADPDTFFAKFTFEYSRRHPDLSIPELLRIVQIYKDLLRNCCNTENPPGCYRYAEDKFNETTEKSLKMVQQECKHFQNLGKDGLKYHYLIRLTKIAPQLSTEELVSLGEKMVTAFTTCCTLSEEFACVDNLADLVFGELCGVNENRTINPAVDHCCKTNFAFRRPCFESLKADKTYVPPPFSQDLFTFHADMCQSQNEELQRKTDRFLVNLVKLKHELTDEELQSLFTNFANVVDKCCKAESPEVCFNEESPKIGN

SEQ ID NO: 585 - protein, 622 aa, Homo Sapiens
MKWVESIFLIFLLNFTESRTLHRNEYGIASILDSYQCTAEISLADLATIFFAQFVQEATYKEVSKMVKDALTAIEKPTGDEQSSGCLENQLPAFLEELCHEKEILEKYGHSDCCSQSEEGRHNCFLAHKKPTPASIPLFQVPEPVTSCEAYEEDRETFMNKFIYEIARRHPFLYAPTILLWAARYDKIIPSCCKAENAVECFQTKAATVTKELRESSLLNQHACAVMKNFGTRTFQAITVTKLSQKFTKVNFTEIQKLVLDVAHVHEHCCRGDVLDCLQDGEKIMSYICSQQDTLSNKITECCKLTTLERGQCIIHAENDEKPEGLSPNLNRFLGDRDFNQFSSGEKNIFLASFVHEYSRRHPQLAVSVILRVAKGYQELLEKCFQTENPLECQDKGEEELQKYIQESQALAKRSCGLFQKLGEYYLQNAFLVAYTKKAPQLTSSELMAITRKMAATAATCCQLSEDKLLACGEGAADIIIGHLCIRHEMTPVNPGVGQCCTSSYANRRPCFSSLVVDETYVPPAFSDDKFIFHKDLCQAQGVALQTMKQEFLINLVKQKPQITEEQLEAVIADFSGLLEKCCQGQEQEVCFAEEGKRRQNESFIRCELFSLILTDLTLFVN

SEQ ID NO: 586 - protein, 609 aa, Homo Sapiens
MKWVESIFLIFLLNFTESRTLHRNEYGIASILDSYQCTAEISLADLATIFFAQFVQEATYKEVSKMVKDALTAIEKPTGDEQSSGCLENQLPAFLEELCHEKEILEKYGHSDCCSQSEEGRHNCFLAHKKPTPASIPLFQVPEPVTSCEAYEEDRETFMNKFIYEIARRHPFLYAPTILLWAARYDKIIPSCCKAENAVECFQTKAATVTKELRESSLLNQHACAVMKNFGTRTFQAITVTKLSQKFTKVNFTEIQKLVLDVAHVHEHCCRGDVLDCLQDGEKIMSYICSQQDTLSNKITECCKLTTLERGQCIIHAENDEKPEGLSPNLNRFLGDRDFNQFSSGEKNIFLASFVHEYSRRHPQLAVSVILRVAKGYQELLEKCFQTENPLECQDKGEEELQKYIQESQALAKRSCGLFQKLGEYYLQNAFLVAYTKKAPQLTSSELMAITRKMAATAATCCQLSEDKLLACGEGAADIIIGHLCIRHEMTPVNPGVGQCCTSSYANRRPCFSSLVVDETYVPPAFSDDKFIFHKDLCQAQGVALQTMKQEFLINLVKQKPQITEEQLEAVIADFSGLLEKCCQGQEQEVCFAEEGQKLISKTRAALGV

SEQ ID NO: 587 - protein, 346 aa, Homo Sapiens
MARKSNLPVLLVPFLLCQALVRCSSPLPLVVNTWPFKNATEAAWRALASGGSALDAVESGCAMCEREQCDGSVGFGGSPDELGETTLDAMIMDGTTMDVGAVGDLRRIKNAIGVARKVLEHTTHTLLVGESATTFAQSMGFINEDLSTTASQALHSDWLARNCQPNYWRNVIPDPSKYCGPYKPPGILKQDIPIHKETEDDRGHDTIGMVVIHKTGHIAAGTSTNGIKFKIHGRVGDSPIPGAGAYADDTAGAAAATGNGDILMRFLPSYQAVEYMRRGEDPTIACQKVISRIQKHFPEFFGAVICANVTGSYGAACNKLSTFTQFSFMVYNSEKNQPTEEKVDCI

SEQ ID NO: 588 - protein, 155 aa, Homo Sapiens
RKVLEHTTHTLLVGESATTFAQSMGFINEDLSTTASQALHSDWLARNCQPNYWRNVIPDPSKYCGPYKPPGILKQDIPIHKETEDDRGHDTIGDSPIPGAGAYADDTAGAAAATGNGDILMRFLPSYQAVEYMRRGEDPTIACQKVISRIQKHFP

SEQ ID NO: 589 - protein, 138 aa, Homo Sapiens
  misc_feature (1)..(1): Xaa can be any naturally occurring amino acid
XGDLRRIKNAIGVARKVLEHTTHTLLVGESATTFAQSMGFINEDLSTTASQALHSDWLARNCQPNYWRNVIPDPSKYCGPYKPPGILKQDIPIHKETEDDRGHDTIGMVVIHKTGHIAAGTSTNGDSPIPGAGAYADD

SEQ ID NO: 590 - protein, 342 aa, Homo Sapiens
MAAGTAVGAWVLVLSLWGAVVGAQNITARIGEPLVLKCKGAPKKPPQRLEWKLGGGPWDSVARVLPNGSLFLPAVGIQDEGIFRCQAMNRNGKETKSNYRVRVYQIPGKPEIVDSASELTAGVPNKVGTCVSEGSYPAGTLSWHLDGKPLVPNEKGVSVKEQTRRHPETGLFTLQSELMVTPARGGDPRPTFSCSFSPGLPRHRALRTAPIQPRVWEPVPLEEVQLVVEPEGGAVAPGGTVTLTCEVPAQPSPQIHWMKDVSDLERGAGRTRRGGANCRLCGRIRAGNSSPGPGDPGRPGDSRPAHWGHLVAKAATPRRGEEGPRKPGGRGGACRTESVGGT

SEQ ID NO: 591 - protein, 234 aa, Homo Sapiens
MAAGTAVGAWVLVLSLWGAVVGAQNITARIGEPLVLKCKGAPKKPPQRLEWKLNTGRTEAWKVLSPQGGGPWDSVARVLPNGSLFLPAVGIQDEGIFRCQAMNRNGKETKSNYRSLRTFTITASDWIFPPSEIPGKPEIVDSASELTAGVPNKVGTCVSEGSYPAGTLSWHLDGKPLVPNEKGVSVKEQTRRHPETGLFTLQSELMVTPARGGDPRPTFSCSFSPGLPRHRALR

SEQ ID NO: 592 - protein, 128 aa, Homo Sapiens
MAAGTAVGAWVLVLSLWGAVVGAQNITARIGEPLVLKCKGAPKKPPQRLEWKLNTGRTEAWKVLSPQGGGPWDSVARVLPNGSLFLPAVGIQDEGIFRCQAMNRNGKETKSNYRVRVYQFENLHNYSL

SEQ ID NO: 593 - protein, 404 aa, Homo Sapiens
MAAGTAVGAWVLVLSLWGAVVGAQNITARIGEPLVLKCKGAPKKPPQRLEWKLNTGRTEAWKVLSPQGGGPWDSVARVLPNGSLFLPAVGIQDEGIFRCQAMNRNGKETKSNYRVRVYQIPGKPEIVDSASELTAGVPNKVGTCVSEGSYPAGTLSWHLDGKPLVPNEKGVSVKEQTRRHPETGLFTLQSELMVTPARGGDPRPTFSCSFSPGLPRHRALRTAPIQPRVWEPVPLEEVQLVVEPEGGAVAPGGTVTLTCEVPAQPSPQIHWMKDGVPLPLPPSPVLILPEIGPQDQGTYSCVATHSSHGPQESRAVSISIIEPGEEGPTAGSVGGSGLGTLALALGILGGLGTAALLIGVILWQRRQRRGEERKAPENQEEEEERAELNQSEEPEAGESSTGGP

SEQ ID NO: 594 - protein, 347 aa, Homo Sapiens
MAAGTAVGAWVLVLSLWGAVVGAQNITARIGEPLVLKCKGAPKKPPQRLEWKLNTGRTEAWKVLSPQGGGPWDSVARVLPNGSLFLPAVGIQDEGIFRCQAMNRNGKETKSNYRVRVYQIPGKPEIVDSASELTAGVPNKVGTCVSEGSYPAGTLSWHLDGKPLVPNEKGVSVKEQTRRHPETGLFTLQSELMVTPARGGDPRPTFSCSFSPGLPRHRALRTAPIQPRVWEPVPLEEVQLVVEPEGGAVAPGGTVTLTCEVPAQPSPQIHWMKDGVPLPLPPSPVLILPEIGPQDQGTYSCVATHSSHGPQESRAVSISIIEPGEEGPTAGEGFDKVREAEDSPQHM

SEQ ID NO: 595 - protein, 233 aa, Homo Sapiens
MAAGTAVGAWVLVLSLWGAVVGAQNITARIGEPLVLKCKGAPKKPPQRLEWKLNTGRTEAWKVLSPQGGGPWDSVARVLPNGSLFLPAVGIQDEGIFRCQAMNRNGKETKSNYRVRVYQIPGKPEIVDSASELTAGVPNKVVEESRRSRKRPCEQEVGTCVSEGSYPAGTLSWHLDGKPLVPNEKGVSVKEQTRRHPETGLFTLQSELMVTPARGGDPRPTFSCSFSPGLPRH

SEQ ID NO: 596 - protein, 363 aa, Homo Sapiens
MAAGTAVGAWVLVLSLWGAVVGAQNITARIGEPLVLKCKGAPKKPPQRLEWKLNTGRTEAWKVLSPQGGGPWDSVARVLPNGSLFLPAVGIQDEGIFRCQAMNRNGKETKSNYRVRVYQIPGKPEIVDSASELTAGVPNKVVEESRRSRKRPCEQEVGTCVSEGSYPAGTLSWHLDGKPLVPNEKGVSVKEQTRRHPETGLFTLQSELMVTPARGGDPRPTFSCSFSPGLPRHRALRTAPIQPRVWEPVPLEEVQLVVEPEGGAVAPGGTVTLTCEVPAQPSPQIHWMKDGVPLPLPPSPVLILPEIGPQDQGTYSCVATHSSHGPQESRAVSISIIEPGEEGPTAGEGFDKVREAEDSPQHM

SEQ ID NO: 597 - protein, 420 aa, Homo Sapiens
MAAGTAVGAWVLVLSLWGAVVGAQNITARIGEPLVLKCKGAPKKPPQRLEWKLNTGRTEAWKVLSPQGGGPWDSVARVLPNGSLFLPAVGIQDEGIFRCQAMNRNGKETKSNYRVRVYQIPGKPEIVDSASELTAGVPNKVVEESRRSRKRPCEQEVGTCVSEGSYPAGTLSWHLDGKPLVPNEKGVSVKEQTRRHPETGLFTLQSELMVTPARGGDPRPTFSCSFSPGLPRHRALRTAPIQPRVWEPVPLEEVQLVVEPEGGAVAPGGTVTLTCEVPAQPSPQIHWMKDGVPLPLPPSPVLILPEIGPQDQGTYSCVATHSSHGPQESRAVSISIIEPGEEGPTAGSVGGSGLGTLALALGILGGLGTAALLIGVILWQRRQRRGEERKAPENQEEEEERAELNQSEEPEAGESSTGGP

SEQ ID NO: 598 - protein, 153 aa, Homo Sapiens
MAAGTAVGAWVLVLSLWGAVVGAQNITARIGEPLVLKCKGAPKKPPQRLEWKLNTGRTEAWKVLSPQGGGPWDSVARVLPNGSLFLPAVGIQDEGILGGLGTAALLIGVILWQRRQRRGEERKAPENQEEEEERAELNQSEEPEAGESSTGGP

SEQ ID NO: 599 - protein, 133 aa, Homo Sapiens
MKDGVPLPLPPSPVLILPEIGPQDQGTYSCVATHSSHGPQESRAVSISIIEPGEEGPTAGSVGGSGLGTLALALGILGGLGTAALLIGVILWQRRQRRGEERKAPENQEEEEERAELNQSEEPEAGESSTGGP

SEQ ID NO: 600 - protein, 294 aa, Homo Sapiens
MNRNGKETKSNYRVRVYQIPGKPEIVDSASELTAGVPNKVGTCVSEGSYPAGTLSWHLDGKPLVPNEKGVSVKEQTRRHPETGLFTLQSELMVTPARGGDPRPTFSCSFSPGLPRHRALRTAPIQPRVWEPVPLEEVQLVVEPEGGAVAPGGTVTLTCEVPAQPSPQIHWMKDGVPLPLPPSPVLILPEIGPQDQGTYSCVATHSSHGPQESRAVSISIIGSVGGSGLGTLALALGILGGLGTAALLIGVILWQRRQRRGEERKAPENQEEEEERAELNQSEEPEAGESSTGGP

SEQ ID NO: 601 - protein, 394 aa, Homo Sapiens
MENTDSDNLLRRAACQEAQVFGNQLIPPNAQVKKATVFLNPAACKGKARTLFEKNAAPILHLSGMDVTIVKTDYEGQAKKLLELMENTDVIIVAGGDGTLQEVVTGVLRRTDEATFSKIPIGFIPLGETSSLSHTLFAESGNKVQHITDATLAIVKGETVPLDVLQIKGEKEQPVFAMTGLRWGSFRDAGVKVSKYWYLGPLKIKAAHFFSTLKEWPQTHQASISYTGPTERPPNEPEETPVQRPSLYRRILRRLASYWAQPQDALSQEVSPEVWKDVQLSTIELSITTRNNQLDPTSKEDFLNICIEPDTISKGDFITIGSRKVRNPKLHVEGTECLQASQCTLLIPEGAGGSFSIDSEEYEAMPVEVKLLPRKLQFFCDPRKREQMLTSPTQ

SEQ ID NO: 602 - protein, 65 aa, Homo Sapiens
MTVFFKTLRNHWKKTTAGLCLLTWGGHWLYGKHCDNLLRRAACQEAQHYQDESRWEPTLSRTPGS

SEQ ID NO: 603 - protein, 422 aa, Homo Sapiens
MTVFFKTLRNHWKKTTAGLCLLTWGGHWLYGKHCDNLLRRAACQEAQVFGNQLIPPNAQVKKATVFLNPAACKGKARTLFEKNAAPILHLSGMDVTIVKTDYEGQAKKLLELMENTDVIIVAGGDGTLQEVVTGVLRRTDEATFSKIPIGFIPLGETSSLSHTLFAESGNKVQHITDATLAIVKGETVPLDVLQIKGEKEQPVFAMTGLRWGSFRDAGVKVSKYWYLGPLKIKAAHFFSTLKEWPQTHQASISYTGPTERPPNEPEETPVQRPSLYRRILRRLASYWAQPQDALSQEVSPEVWKDVQLSTIELSITTRNNQLDPTSKEDFLNICIEPDTISKGDFITIGSRKVRNPKLHVEGTECLQASQCTLLIPEGAGGSFSIDSEEYEAMPVEVKLLPRKLQFFCDPRKREQMLTSPTQ

SEQ ID NO: 604 - protein, 244 aa, Homo Sapiens
MTVFFKTLRNHWKKTTAGLCLLTWGGHWLYGKHCDNLLRRAACQEAQVFGNQLIPPNAQVKKATVFLNPAACKGTLFEKNAAPILHLSGMDVTIVKTDYEGQAKKLLELMENTDVIIVAGGDGTLQEVVTGVLRRTDEATFSKIPIGFIPLGETSSLSHTLFAESGNKVQHITDATLAIVKGETVPLDVLQIKGEKEQPVFAMTGLRWGSFRDAGVKVSKYWYLGPLKIKAAHFFSTLKPFPKR

SEQ ID NO: 605 - protein, 244 aa, Homo Sapiens; identical to SEQ ID NO: 604

SEQ ID NO: 606 - protein, 46 aa, Homo Sapiens
MTVFFKTLRNHWKKTTAGLCLLTWGGHWLYGKHWCLAINSFLPMHK

SEQ ID NO: 607 - protein, 189 aa, Homo Sapiens
MAEAAAAAGGTGLGAGASYGSAADRDRDPDPDRAGRRLRVLSGHLLGRPREALSTNECKARRAASAATAAPTATPAAQESGTIPKKRQEVMKWNGWGYNDSKFIFNKKGQIELTGKRGISDPLTVFEQTEAAAREEILANGGSLSHHHGVGKLRKQWLKESISDVGFGMLKSVKEYVDPNNIFGNRNLL

SEQ ID NO: 608 - protein, 658 aa, Homo Sapiens
MAEAAAAAGGTGLGAGASYGSAADRDRDPDPDRAGRRLRVLSGHLLGRPREALSTNECKARRAASAATAAPTATPAAQESGTIPKKRQEVMKWNGWGYNDSKFIFNKKGQIELTGKRYPLSGMGLPTFKEWIQNTLGVNVEHKTTSKASLNPSDTPPSVVNEDFLHDLKETNISYSQEADDRVFRAHGHCLHEIFLLREGMFERIPDIVLWPTCHDDVVKIVNLACKYNLCIIPIGGGTSVSYGLMCPADETRTIISLDTSQMNRILWVDENNLTAHVEAGITGQELERQLKESGYCTGHEPDSLEFSTVGGWVSTRASGMKKNIYGNIEDLVVHIKMVTPRGIIEKSCQGPRMSTGPDIHHFIMGSEGTLGVITEATIKIRPVPEYQKYGSVAFPNFEQGVACLREIAKQRCAPASIRLMDNKQFQFGHALKPQVSSIFTSFLDGLKKFYITKFKGFDPNQLSVATLLFEGDREKVLQHEKQVYDIAAKFGGLAAGEDNGQRGYLLTYVIAYIRDLALEYYVLGESFETSAPWDRVVDLCRNVKERITRECKEKGVQFAPFSTCRVTQTYDAGACIYFYFAFNYRGISDPLTVFEQTEAAAREEILANGGSLSHHHGVGKLRKQWLKESISDVGFGMLKSVKEYVDPNNIFGNRNLL

SEQ ID NO: 609 - protein, 543 aa, Homo Sapiens
  misc_feature (1)..(1): Xaa can be any naturally occurring amino acid
XQEVMKWNGWGYNDSKFIFNKKGQIELTGKRYPLSGMGLPTFKEWIQNTLGVNVEHKTTSKASLNPSDTPPSVVNEDFLHDLKETNISYSQEADDRVFRAHGHCLHEIFLLREGMFERIPDIVLWPTCHDDVVKIVNLACKYNLCIIPIGGGTSVSYGLMCPADETRTIISLDTSQMNRILWVDENNLTAHVEAGITGQELERQLKESGYCTGHEPDSLEFSTVGGWVSTRASGMKKNIYGNIEDLVVHIKMVTPRGIIEKSCQGPRMSTGPDIHHFIMGSEGTLGVITEATIKIRPVPEYQKYGSVAFPNFEQGVACLREIAKQRCAPASIRLMDNKQFQFGHALKPQVSSIFTSFLDGLKKFYITKFKGFDPNQLSVATLLFEGDREKVLQHEKQVYDIAAKFGGLAAGEDNGQRGYLLTYVIAYIRDLALEYYVLGESFETSAPWDRVVDLCRNVKERITRECKEKGVQFAPFSTCRVTQTYDAGACIYFYFAFNYRGISDPLTVFEQTEAAAREEILANGGSLSHHHGGLQLEGTCYES

SEQ ID NO: 610 - protein, 560 aa, Homo Sapiens
  misc_feature (1)..(1): Xaa can be any naturally occurring amino acid
XYPLSGMGLPTFKEWIQNTLGVNVEHKTTSKASLNPSDTPPSVVNEDFLHDLKETNISYSQEADDRVFRAHGHCLHEIFLLREGMFERIPDIVLWPTCHDDVVKIVNLACKYNLCIIPIGGGTSVSYGLMCPADETRTIISLDTSQMNRILWVDENNLTAHVEAGITGQELERQLKESGYCTGHEPDSLEFSTVGGWVSTRASGMKKNIYGNIEDLVVHIKMVTPRGIIEKSCQGPRMSTGPDIHHFIMGSEGTLGVITEATIKIRPVPEYQKYGSVAFPNFEQGVACLREIAKQRCAPASIRLMDNKQFQFGHALKPQVSSIFTSFLDGLKKFYITKFKGFDPNQLSVATLLFEGDREKVLQHEKQVYDIAAKFGGLAAGEDNGQRGYLLTYVIAYIRDLALEYYVLGESFETSAPWDRVVDLCRNVKERITRECKEKGVQFAPFSTCRVTQTYDAGACIYFYFAFNYRGISDPLTVFEQTEAAAREEILANGGSLSHHHGEHEPHSTSTHHGRYRIPQICGRSFPPLDNFQDSSRFLPEPSTQECISPWFHHIHSLPF

SEQ ID NO: 611 - protein, 131 aa, Homo Sapiens
MEKIPVSAFLLLVALSYTLARDTTVKPGAKKDTKDSRPKLPQTLSRGWGDQLIWTQTYEEALYKSKTSNKPLMIIHHLDECPHSQALKKVFAENKEIQKLAEQFVLLNLVYETTDKHLSPDGQYVPRIMFV

SEQ ID NO: 612 - protein, 188 aa, Homo Sapiens
MEKIPVSAFLLLVALSYTLARDTTVKPGAKKDTKDSRPKLPQTLSRGWGDQLIWTQTYEEALYKSKTSNKPLMIIHHLDECPHSQALKKVFAENKEIQKLAEQFVLLNLVYETTDKHLSPDGQYVPRIMFVDPSLTVRADITGRYSNRLYAYEPADTALCKCDLQFGCCPRVEHLYCCSDGTRGCMVR

SEQ ID NO: 613 - protein, 175 aa, Homo Sapiens
MEKIPVSAFLLLVALSYTLARDTTVKPGAKKDTKDSRPKLPQTLSRGWGDQLIWTQTYEEALYKSKTSNKPLMIIHHLDECPHSQALKKVFAENKEIQKLAEQFVLLNLVYETTDKHLSPDGQYVPRIMFVDPSLTVRADITGRYSNRLYAYEPADTALLLDNMKKALKLLKTEL

SEQ ID NO: 614 - protein, 119 aa, Homo Sapiens
PLMIIHHLDECPHSQALKKVFAENKEIQKLAEQFVLLNLVYETTDKHLSPDGQYVPRIMFVDPSLTVRADITGRYSNRLYAYEPADTALCKCDLQFGCCPRVEHLYCCSDGTRGCMVSA

SEQ ID NO: 615 - protein, 163 aa, Homo Sapiens
MMLHSALGLCLLLVTVSSNLAIAIKKEKRPPQTLSRGWGDDITWVQTYEEGLFYAQKSKKPLMVIHHLEDCQYSQALKKVFAQNEEIQEMAQNKFIMLNLMHETTDKNLSPDGQYVPRIMFVDPSLTVRADIAGRYSNRLYTYEPRDLPLCKYSQMISNSGHS

SEQ ID NO: 616 - protein, 166 aa, Homo Sapiens
MMLHSALGLCLLLVTVSSNLAIAIKKEKRPPQTLSRGWGDDITWVQTYEEGLFYAQKSKKPLMVIHHLEDCQYSQALKKVFAQNEEIQEMAQNKFIMLNLMHETTDKNLSPDGQYVPRIMFVDPSLTVRADIAGRYSNRLYTYEPRDLPLLIENMKKALRLIQSEL

SEQ ID NO: 617 - protein, 129 aa, Homo Sapiens
  misc_feature (1)..(1): Xaa can be any naturally occurring amino acid
XNIQNTFPTRALAKSGWGDDITWVQTYEEGLFYAQKSKKPLMVIHHLEDCQYSQALKKVFAQNEEIQEMAQNKFIMLNLMHETTDKNLSPDGQYVPRIMFVDPSLTVRADIAGRYSNRLYTYEPRDLPL

SEQ ID NO: 618 - protein, 2045 aa, Homo Sapiens
MAGRSHPGPLRPLLPLLVVAACVLPGAGGTCPERALERREEEANVVLTGTVEEILNVDPVQHTYSCKVRVWRYLKGKDLVARESLLDGGNKVVISGFGDPLICDNQVSTGDTRIFFVNPAPPYLWPAHKNELMLNSSLMRITLRNLEEVEFCVEDKPGTHFTPVPPTPPDACRGMLCGFGAVCEPNAEGPGRASCVCKKSPCPSVVAPVCGSDASTYSNECELQRAQCSQQRRIRLLSRGPCGSRDPCSNVTCSFGSTCARSADGLTASCLCPATCRGAPEGTVCGSDGADYPGECQLLRRACARQENVFKKFDGPCDPCQGALPDPSRSCRVNPRTRRPEMLLRPESCPARQAPVCGDDGVTYENDCVMGRSGAARGLLLQKVRSGQCQGRDQCPEPCRFNAVCLSRRGRPRCSCDRVTCDGAYRPVCAQDGRTYDSDCWRQQAECRQQRAIPSKHQGPCDQAPSPCLGVQCAFGATCAVKNGQAACECLQACSSLYDPVCGSDGVTYGSACELEATACTLGREIQVARKGPCDRCGQCRFGALCEAETGRCVCPSECVALAQPVCGSDGHTYPSECMLHVHACTHQISLHVASAGPCETCGDAVCAFGAVCSAGQCVCPRCEHPPPGPVCGSDGVTYGSACELREAACLQQTQIEEARAGPCEQAECGSGGSGSGEDGDCEQELCRQRGGIWDEDSEDGPCVCDFSCQSVPGSPVCGSDGVTYSTECELKKARCESQRGLYVAAQGACRGPTFAPLPPVAPLHCAQTPYGCCQDNITAARGVGLAGCPSACQCNPHGSYGGTCDPATGQCSCRPGVGGLRCDRCEPGFWNFRGIVTDGRSGCTPCSCDPQGAVRDDCEQMTGLCSCKPGVAGPKCGQCPDGRALGPAGCEADASAPATCAEMRCEFGARCVEESGSAHCVCPMLTCPEANATKVCGSDGVTYGNECQLKTIACRQGLQISIQSLGPCQEAVAPSTHPTSASVTVTTPGLLLSQALPAPPGALPLAPSSTAHSQTTPPPSSRPRTTASVPRTTVWPVLTVPPTAPSPAPSLVASAFGESGSTDGSSDEELSGDQEASGGGSGGLEPLEGSSVATPGPPVERASCYNSALGCCSDGKTPSLDAEGSNCPATKVFQGVLELEGVEGQELFYTPEMADPKSELFGETARSIESTLDDLFRNSDVKKDFRSVRLRDLGPGKSVRAIVDVHFDPTTAFRAPDVARALLRQIQVSRRRSLGVRRPLQEHVRFMDFDWFPAFITGATSGAIAAGATARATTASRLPSSAVTPRAPHPSHTSQPVAKTTAAPTTRRPPTTAPSRVPGRRPPAPQQPPKPCDSQPCFHGGTCQDWALGGGFTCSCPAGRGGAVCEKVLGAPVPAFEGRSFLAFPTLRAYHTLRLALEFRALEPQGLLLYNGNARGKDFLALALLDGRVQLRFDTGSGPAVLTSAVPVEPGQWHRLELSRHWRRGTLSVDGETPVLGESPSGTDGLNLDTDLFVGGVPEDQAAVALERTFVGAGLRGCIRLLDVNNQRLELGIGPGAATRGSGVGECGDHPCLPNPCHGGAPCQNLEAGRFHCQCPPGRVGPTCADEKSPCQPNPCHGAAPCRVLPEGGAQCECPLGREGTFCQTASGQDGSGPFLADFNGFSHLELRGLHTFARDLGEKMALEVVFLARGPSGLLLYNGQKTDGKGDFVSLALRDRRLEFRYDLGKGAAVIRSREPVTLGAWTRVSLERNGRKGALRVGDGPRVLGESPVPHTVLNLKEPLYVGGAPDFSKLARAAAVSSGFDGAIQLVSLGGRQLLTPEHVLRQVDVTSFAGHPCTRASGHPCLNGASCVPREAAYVCLCPGGFSGPHCEKGLVEKSAGDVDTLAFDGRTFVEYLNAVTESEKALQSNHFELSLRTEATQGLVLWSGKATERADYVALAIVDGHLQLSYNLGSQPVVLRSTVPVNTNRWLRVVAHREQREGSLQVGNEAPVTGSSPLGATQLDTDGALWLGGLPELPVGPALPKAYGTGFVGCLRDVVVGRHPLHLLEDAVTKPELRPCPTP

SEQ ID NO: 619 - protein, 86 aa, Homo Sapiens
MPPLPLARDTRQPPGASLLVRGFMVPCNACLILLATATLGFAVLLFLNNYKPGTHFTPVPPTPPDACRGMLCGFGAVCEPNAEGPG

SEQ ID NO: 620 - protein, 1930 aa, Homo Sapiens
MRITLRNLEEVEFCVEDKPGTHFTPVPPTPPDACRGMLCGFGAVCEPNAEGPGRASCVCKKSPCPSVVAPVCGSDASTYSNECELQRAQCSQQRRIRLLSRGPCGSRDPCSNVTCSFGSTCARSADGLTASCLCPATCRGAPEGTVCGSDGADYPGECQLLRRACARQENVFKKFDGPCDPCQGALPDPSRSCRVNPRTRRPEMLLRPESCPARQAPVCGDDGVTYENDCVMGRSGAARGLLLQKVRSGQCQGRDQCPEPCRFNAVCLSRRGRPRCSCDRVTCDGAYRPVCAQDGRTYDSDCWRQQAECRQQRAIPSKHQGPCDQAPSPCLGVQCAFGATCAVKNGQAACECLQACSSLYDPVCGSDGVTYGSACELEATACTLGREIQVARKGPCDRCGQCRFGALCEAETGRCVCPSECVALAQPVCGSDGHTYPSECMLHVHACTHQISLHVASAGPCETCGDAVCAFGAVCSAGQCVCPRCEHPPPGPVCGSDGVTYGSACELREAACLQQTQIEEARAGPCEQAECGSGGSGSGEDGDCEQELCRQRGGIWDEDSEDGPCVCDFSCQSVPGSPVCGSDGVTYSTECELKKARCESQRGLYVAAQGACRGPTFAPLPPVAPLHCAQTPYGCCQDNITAARGVGLAGCPSACQCNPHGSYGGTCDPATGQCSCRPGVGGLRCDRCEPGFWNFRGIVTDGRSGCTPCSCDPQGAVRDDCEQMTGLCSCKPGVAGPKCGQCPDGRALGPAGCEADASAPATCAEMRCEFGARCVEESGSAHCVCPMLTCPEANATKVCGSDGVTYGNECQLKTIACRQGLQISIQSLGPCQEAVAPSTHPTSASVTVTTPGLLLSQALPAPPGALPLAPSSTAHSQTTPPPSSRPRTTASVPRTTVWPVLTVPPTAPSPAPSLVASAFGESGSTDGSSDEELSGDQEASGGGSGGLEPLEGSSVATPGPPVERASCYNSALGCCSDGKTPSLDAEGSNCPATKVFQGVLELEGVEGQELFYTPEMADPKSELFGETARSIESTLDDLFRNSDVKKDFRSVRLRDLGPGKSVRAIVDVHFDPTTAFRAPDVARALLRQIQVSRRRSLGVRRPLQEHVRFMDFDWFPAFITGATSGAIAAGATARATTASRLPSSAVTPRAPHPSHTSQPVAKTTAAPTTRRPPTTAPSRVPGRRPPAPQQPPKPCDSQPCFHGGTCQDWALGGGFTCSCPAGRGGAVCEKVLGAPVPAFEGRSFLAFPTLRAYHTLRLALEFRALEPQGLLLYNGNARGKDFLALALLDGRVQLRFDTGSGPAVLTSAVPVEPGQWHRLELSRHWRRGTLSVDGETPVLGESPSGTDGLNLDTDLFVGGVPEDQAAVALERTFVGAGLRGCIRLLDVNNQRLELGIGPGAATRGSGVGECGDHPCLPNPCHGGAPCQNLEAGRFHCQCPPGRVGPTCADEKSPCQPNPCHGAAPCRVLPEGGAQCECPLGREGTFCQTASGQDGSGPFLADFNGFSHLELRGLHTFARDLGEKMALEVVFLARGPSGLLLYNGQKTDGKGDFVSLALRDRRLEFRYDLGKGAAVIRSREPVTLGAWTRVSLERNGRKGALRVGDGPRVLGESPKSRKVPHTVLNLKEPLYVGGAPDFSKLARAAAVSSGFDGAIQLVSLGGRQLLTPEHVLRQVDVTSFAGHPCTRASGHPCLNGASCVPREAAYVCLCPGGFSGPHCEKGLVEKSAGDVDTLAFDGRTFVEYLNAVTESELANEIPVPETLDSGALHSEKALQSNHFELSLRTEATQGLVLWSGKATERADYVALAIVDGHLQLSYNLGSQPVVLRSTVPVNTNRWLRVVAHREQREGSLQVGNEAPVTGSSPLGATQLDTDGALWLGGLPELPVGPALPKAYGTGFVGCLRDVVVGRHPLHLLEDAVTKPELRPCPTP

SEQ ID NO: 621 - protein, 287 aa, Homo Sapiens
  misc_feature (1)..(1): Xaa can be any naturally occurring amino acid
XKGDFVSLALRDRRLEFRYDLGKGAAVIRSREPVTLGAWTRVSLERNGRKGALRVGDGPRVLGESPKSRKVPHTVLNLKEPLYVGGAPDFSKLARAAAVSSGFDGAIQLVSLGGRQLLTPEHVLRQVDVTSFAGHPCTRASGHPCLNGASCVPREAAYVCLCPGGFSGPHCEKGLVEKSAGDVDTLAFDGRTFVEYLNAVTESELANEIPVPETLDSGALHSEKALQSNHFELSLRTEATQGLVLWSGKATERADYVALAIVDGHLQLSYNLGSQPVVLRSTVPVNT

SEQ ID NO: 622 - protein, 132 aa, Homo Sapiens
MLTAAVLSCALLLALPATRGAQMGLAPMEGIRRPDQALLPELPGLGLRAPLKKTTAEQAEEDLLQEAQALAEVLDLQDREPRSSRRCVRLHESCLGQQVPCCDPCATCYCRFFNAFCYCRKLGTAMNPCSRT

SEQ ID NO: 623 - protein, 485 aa, Homo Sapiens
MRKRAPQSEMAPAGVSLRATILCLLAWAGLAAGDRVYIHPFHLVIHNESTCEQLAKANAGKPKDPTFIPAPIQAKTSPVDEKALQDQLVLVAAKLDTEDKLRAAMVGMLANFLGFRIYGMHSELWGVVHGATVLSPTAVFGTLASLYLGALDHTADRLQAILGVPWKDKNCTSRLDAHKVLSALQAVQGLLVAQGRADSQAQLLLSTVVGVFTAPGLHLKQPFVQGLALYTPVVLPRSLDFTELDVAAEKIDRFMQAVTGWKTGCSLMGASVDSTLAFNTYVHFQGKMKGFSLLAEPQEFWVDNSTSVSVPMLSGMGTFQHWSDIQDNFSVTQVPFTESACLLLIQPHYASDLDKVEGLTFQQNSLNWMKKLSPRTIHLTMPQLVLQGSYDLQDLLAQAELPAILHTELNLQKLSNDRIRVGEVLNSIFFELEADEREPTESTQQLNKPEVLEVTLNRPFLFAVYDQSATALHFLGRVANPLSTA

SEQ ID NO: 624 - protein, 1278 aa, Homo Sapiens
MRTGSAASSAAAAAAAAAASASPATGVCMKTPGGGRRGIRRDPGAEPGAAALRGPRQRPILSRLTNNSRIVGLLAQLEKINAEPSESDTARYVTSKILHLAQSQEKTRREMTAKGSTGMEILLSTLENTKDLQTTLNILSILVELVSAGGGRRVSFLVTKGGSQILLQLLMNASKESPPHEDLMVQIHSILAKIGPKDKKFGVKARINGALNITLNLVKQNLQNHRLVLPCLQLLRVYSANSVNSVSLGKNGVVELMFKIIGPFSKKNSSLIKVALDTLAALLKSKTNARRAVDRGYVQVLLTIYVDWHRHDNRHRNMLIRKGILQSLKSVTNIKLGRKAFIDANGMKILYNTSQECLAVRTLDPLVNTSSLIMRKCFPKNRLPLPTIKSSFHFQLPVIPVTGPVAQLYSLPPEVDDVVDESDDNDDIDVEAENETENEDDLDQNFKNDDIETDINKLKPQQEPGRTIEDLKMYEHLFPELVDDFQDYDLISKEPKPFVFEGKVRGPIVVPTAGEETSGNSGNLRKVVMKENISSKGDEGEKKSTFMDLAKEDIKDNDRTLQQQPGDQNRTISSVHGLNNDIVKALDRITLQNIPSQTAPGFTAEMKKDCSLPLTVLTCAKACPHMATCGNVLFEGRTVQLGKLCCTGVETEDDEDTESNSSVEQASVEVPDGPTLHDPDLYIEIVKNTKSVPEYSEVAYPDYFGHIPPPFKEPILERPYGVQRTKIAQDIERLIHQSDIIDRVVYDLDNPNYTIPEEGDILKFNSKFESGNLRKVIQIRKNEYDLILNSDINSNHYHQWFYFEVSGMRPGVAYRFNIINCEKSNSQFNYGMQPLMYSVQEALNARPWWIRMGTDICYYKNHFSRSSVAAGGQKGKSYYTITFTVNFPHKDDVCYFAYHYPYTYSTLQMHLQKLESAHNPQQIYFRKDVLCETLSGNSCPLVTITAMPESNYYEHICHFRNRPYVFLSARVHPGETNASWVMKGTLEYLMSNNPTAQSLRESYIFKIVPMLNPDGVINGNHRCSLSGEDLNRQWQSPSPDLHPTIYHAKGLLQYLAAVKRLPLVYCDYHGHSRKKNVFMYGCSIKETVWHTNDNATSCDVVEDTGYRTLPKILSHIAPAFCMSSCSFVVEKSKESTARVVVWREIGVQRSYTMESTLCGCDQGKYKGLQIGTRELEEMGAKFCVGLLRLKRLTSPLEYNLPSSLLDFENDLIESSCKVTSPTTYVLDEDEPRFLEEVDYSAESNDELDIELAENVGDYEPSAQEEVLSDSELSRTYLP

SEQ ID NO: 625 - protein, 1238 aa, Homo Sapiens
MRTGSAASSAAAAAAAAAASASPATGVCMKTPGGGRRGIRRDPGAEPGAAALRGPRQRPILSRLTNNSRIVGLLAQLEKINAEPSESDTARYVTSKILHLAQSQEKTRREMTAKGSTGMEILLSTLENTKDLQTTLNILSILVELVSAGGGRRVSFLVTKGGSQILLQLLMNASKESPPHEDLMVQIHSILAKIGPKDKKFGVKARINGALNITLNLVKQNLQNHRLVLPCLQLLRVYSANSVNSVSLGKNGVVELMFKIIGPFSKKNSSLIKVALDTLAALLKSKTNARRAVDRGYVQVLLTIYVDWHRHDNRHRNMLIRKGILQSLKSVTNIKLGRKAFIDANGMKILYNTSQLPVIPVTGPVAQLYSLPPEVDDVVDESDDNDDIDVEAENETENEDDLDQNFKNDDIETDINKLKPQQEPGRTIEDLKMYEHLFPELVDDFQDYDLISKEPKPFVFEGKVRGPIVVPTAGEETSGNSGNLRKVVMKENISSKGDEGEKKSTFMDLAKEDIKDNDRTLQQQPGDQNRTISSVHGLNNDIVKALDRITLQNIPSQTAPGFTAEMKKDCSLPLTVLTCAKACPHMATCGNVLFEGRTVQLGKLCCTGVETEDDEDTESNSSVEQASVEVPDGPTLHDPDLYIEIVKNTKSVPEYSEVAYPDYFGHIPPPFKEPILERPYGVQRTKIAQDIERLIHQSDIIDRVVYDLDNPNYTIPEEGDILKFNSKFESGNLRKVIQIRKNEYDLILNSDINSNHYHQWFYFEVSGMRPGVAYRFNIINCEKSNSQFNYGMQPLMYSVQEALNARPWWIRMGTDICYYKNHFSRSSVAAGGQKGKSYYTITFTVNFPHKDDVCYFAYHYPYTYSTLQMHLQKLESAHNPQQIYFRKDVLCETLSGNSCPLVTITAMPESNYYEHICHFRNRPYVFLSARVHPGETNASWVMKGTLEYLMSNNPTAQSLRESYIFKIVPMLNPDGVINGNHRCSLSGEDLNRQWQSPSPDLHPTIYHAKGLLQYLAAVKRLPLVYCDYHGHSRKKNVFMYGCSIKETVWHTNDNATSCDVVEDTGYRTLPKILSHIAPAFCMSSCSFVVEKSKESTARVVVWREIGVQRSYTMESTLCGCDQGKYKGLQIGTRELEEMGAKFCVGLLRLKRLTSPLEYNLPSSLLDFENDLIESSCKVTSPTTYVLDEDEPRFLEEVDYSAESNDELDIELAENVGDYEPSAQEEVLSDSELSRTYLP

SEQ ID NO: 626 - protein, 1226 aa, Homo Sapiens
MSKLKVIPEKSLTNNSRIVGLLAQLEKINAEPSESDTARYVTSKILHLAQSQEKTRREMTAKGSTGMEILLSTLENTKDLQTTLNILSILVELVSAGGGRRVSFLVTKGGSQILLQLLMNASKESPPHEDLMVQIHSILAKIGPKDKKFGVKARINGALNITLNLVKQNLQNHRLVLPCLQLLRVYSANSVNSVSLGKNGVVELMFKIIGPFSKKNSSLIKVALDTLAALLKSKTNARRAVDRGYVQVLLTIYVDWHRHDNRHRNMLIRKGILQSLKSVTNIKLGRKAFIDANGMKILYNTSQECLAVRTLDPLVNTSSLIMRKCFPKNRLPLPTIKSSFHFQLPVIPVTGPVAQLYSLPPEVDDVVDESDDNDDIDVEAENETENEDDLDQNFKNDDIETDINKLKPQQEPGRTIEDLKMYEHLFPELVDDFQDYDLISKEPKPFVFEGKVRGPIVVPTAGEETSGNSGNLRKVVMKENISSKGDEGEKKSTFMDLAKEDIKDNDRTLQQQPGDQNRTISSVHGLNNDIVKALDRITLQNIPSQTAPGFTAEMKKDCSLPLTVLTCAKACPHMATCGNVLFEGRTVQLGKLCCTGVETEDDEDTESNSSVEQASVEVPDGPTLHDPDLYIEIVKNTKSVPEYSEVAYPDYFGHIPPPFKEPILERPYGVQRTKIAQDIERLIHQSDIIDRVVYDLDNPNYTIPEEGDILKFNSKFESGNLRKVIQIRKNEYDLILNSDINSNHYHQWFYFEVSGMRPGVAYRFNIINCEKSNSQFNYGMQPLMYSVQEALNARPWWIRMGTDICYYKNHFSRSSVAAGGQKGKSYYTITFTVNFPHKDDVCYFAYHYPYTYSTLQMHLQKLESAHNPQQIYFRKDVLCETLSGNSCPLVTITAMPESNYYEHICHFRNRPYVFLSARVHPGETNASWVMKGTLEYLMSNNPTAQSLRESYIFKIVPMLNPDGVINGNHRCSLSGEDLNRQWQSPSPDLHPTIYHAKGLLQYLAAVKRLPLVYCDYHGHSRKKNVFMYGCSIKETVWHTNDNATSCDVVEDTGYRTLPKILSHIAPAFCMSSCSFVVEKSKESTARVVVWREIGVQRSYTMESTLCGCDQGKYKGLQIGTRELEEMGAKFCVGLLRLKRLTSPLEYNLPSSLLDFENDLIESSCKVTSPTTYVLDEDEPRFLEEVDYSAESNDELDIELAENVGDYEPSAQEEVLSDSELSRTYLP

SEQ ID NO: 627 - protein, 1186 aa, Homo Sapiens
MSKLKVIPEKSLTNNSRIVGLLAQLEKINAEPSESDTARYVTSKILHLAQSQEKTRREMTAKGSTGMEILLSTLENTKDLQTTLNILSILVELVSAGGGRRVSFLVTKGGSQILLQLLMNASKESPPHEDLMVQIHSILAKIGPKDKKFGVKARINGALNITLNLVKQNLQNHRLVLPCLQLLRVYSANSVNSVSLGKNGVVELMFKIIGPFSKKNSSLIKVALDTLAALLKSKTNARRAVDRGYVQVLLTIYVDWHRHDNRHRNMLIRKGILQSLKSVTNIKLGRKAFIDANGMKILYNTSQLPVIPVTGPVAQLYSLPPEVDDVVDESDDNDDIDVEAENETENEDDLDQNFKNDDIETDINKLKPQQEPGRTIEDLKMYEHLFPELVDDFQDYDLISKEPKPFVFEGKVRGPIVVPTAGEETSGNSGNLRKVVMKENISSKGDEGEKKSTFMDLAKEDIKDNDRTLQQQPGDQNRTISSVHGLNNDIVKALDRITLQNIPSQTAPGFTAEMKKDCSLPLTVLTCAKACPHMATCGNVLFEGRTVQLGKLCCTGVETEDDEDTESNSSVEQASVEVPDGPTLHDPDLYIEIVKNTKSVPEYSEVAYPDYFGHIPPPFKEPILERPYGVQRTKIAQDIERLIHQSDIIDRVVYDLDNPNYTIPEEGDILKFNSKFESGNLRKVIQIRKNEYDLILNSDINSNHYHQWFYFEVSGMRPGVAYRFNIINCEKSNSQFNYGMQPLMYSVQEALNARPWWIRMGTDICYYKNHFSRSSVAAGGQKGKSYYTITFTVNFPHKDDVCYFAYHYPYTYSTLQMHLQKLESAHNPQQIYFRKDVLCETLSGNSCPLVTITAMPESNYYEHICHFRNRPYVFLSARVHPGETNASWVMKGTLEYLMSNNPTAQSLRESYIFKIVPMLNPDGVINGNHRCSLSGEDLNRQWQSPSPDLHPTIYHAKGLLQYLAAVKRLPLVYCDYHGHSRKKNVFMYGCSIKETVWHTNDNATSCDVVEDTGYRTLPKILSHIAPAFCMSSCSFVVEKSKESTARVVVWREIGVQRSYTMESTLCGCDQGKYKGLQIGTRELEEMGAKFCVGLLRLKRLTSPLEYNLPSSLLDFENDLIESSCKVTSPTTYVLDEDEPRFLEEVDYSAESNDELDIELAENVGDYEPSAQEEVLSDSELSRTYLP

SEQ ID NO: 628 - protein, 159 aa, Homo Sapiens
MELPAVNLKCASSSVPRNHPHVILLGHWLLTTCFWRHFSAKPRLETIELTCALCKLRSAAHRATAGLHCILRLLCLGQLHHPGLGRVGCGSAGLHRRHKHVSGWLAGHHLPGHRAHQHLLPAGQPHGHGPLWRGHGHPQLAAQAALLLLRLPHVPGARG

SEQ ID NO: 629 - protein, 111 aa, Homo Sapiens
MELPAVNLKGLHCILRLLCLGQLHHPGLGRVGCGSAGLHRRHKHVSGWLAGHHLPGHRAHQHLLPAGQPHGHGPLWRGHGHPQLAAQAALLLLRLPHVPGARGFPWVFSGP

SEQ ID NO: 630 - protein, 147 aa, Homo Sapiens
MELPAVNLKVILLGHWLLTTCFWRHFSAKPRLETIELTCALCKLRSAAHRATAGLHCILRLLCLGQLHHPGLGRVGCGSAGLHRRHKHVSGWLAGHHLPGHRAHQHLLPAGQPHGHGPLWRGHGHPQLAAQAALLLLRLPHVPGARG

SEQ ID NO: 631 - protein, 155 aa, Homo Sapiens
MELPAVNLKVILLGHWLLTTCFWRHFSAKPRLETIELTCALCKLRSAAHRATAGLHCILRLLCLGQLHHPGLGRVGCGSAGLHRRHKHVSGWLAGHHLPGHRAHQHLLPAGQPHGHGPLWRGHGHPQLAAQAALLLLRLPHVPGARGFPWVFSGP

SEQ ID NO: 632 - protein, 155 aa, Homo Sapiens
MELPAVNLKVILLGHWLLTTCFWVACWPPSSWTSCTSASSTRGSASRTRAALAWAWPSSACCSSRSPAASSTTCTGSAGVSSWSTLVSLGLLRTVVPTRRLTQQRRPQIPLQSQRAGVKMPEGTEASHAAPGPAPGLPRAWEVVLGMLLTSVSWT

SEQ ID NO: 633 - protein, 159 aa, Homo Sapiens
MELPAVNLKVILLGHWLLTTWGCIVFSGSYAWANFTILALGVWAVAQRDSIDAISMFLGGLLATIFLDIVHISIFYPRVSLTDTGRFGVGMAILSLLLKPLSCCFVYHMYRERGGELLVHTGFLGSSQDRSAYQTIDSAEAPADPFAVPEGRSQDARGY

SEQ ID NO: 634 - protein, 152 aa, Homo Sapiens
MELPAVNLKVILLGHWLLTTWGCIVFSGSYAWANFTILALGVWAVAQRDSIDAISMFLGGLLATIFLDIVHISIFYPRVSLTDTGRFGVGMAILSLLLKPLSCCFVYHMYRERGGFLGSSQDRSAYQTIDSAEAPADPFAVPEGRSQDARGY

SEQ ID NO: 635 - protein, 63 aa, Homo Sapiens
MELPAVNLKVILLGHWLLTTWHKDCTPCRSWEGDVEVLIRAPQGLPHSEASALQLDFHLYHLF

SEQ ID NO: 636 - protein, 508 aa, Homo Sapiens
MEKWDGNEGTSAFHMPEWMIQFADQKQEFNKRPTKIGRRSLSRSISQSSTDSYSSAASYTDSSDDETSPRDKQQKNSKGSSDFCVKNIKQAEFGRREIEIAEQEMPALMALRKRAQGEKPLAGAKIVGCTHITAQTAVLMETLGALGAQCRWAACNIYSTLNEVAAALAESGFPVFAWKGESEDDFWWCIDRCVNVEGWQPNMILDDGGDLTHWIYKKYPNMFKKIKGIVEESVTGVHRLYQLSKAGKLCVPAMNVNDSVTKQKFDNLYCCRESILDGLKRTTDMMFGGKQVVVCGYGEVGKGCCAALKAMGSIVYVTEIDPICALQACMDGFRLVKLNEVIRQVDIVITCTGNKNVVTREHLDRMKNSCIVCNMGHSNTEIDVASLRTPELTWERVRSQVDHVIWPDGKRIVLLAEGRLLNLSCSTVPTFVLSITATTQALALIELYNAPEGRYKQDVYLLPKKMDEYVASLHLPTFDAHLTELTDEQAKYLGLNKNGPFKPNYYRY

SEQ ID NO: 637 - protein, 75 aa, Homo Sapiens
MEKWDGNEGTSAFHMPEWMQIQFADQKQEFNKRPTKIGRRSLSRSISQSSTDSYSSAASYTDSSDDETSPRDKQQ

SEQ ID NO: 638 - protein, 508 aa, Homo Sapiens
MLGSKKKYIVNGNSGIKAQIQFADQKQEFNKRPTKIGRRSLSRSISQSSTDSYSSAASYTDSSDDETSPRDKQQKNSKGSSDFCVKNIKQAEFGRREIEIAEQEMPALMALRKRAQGEKPLAGAKIVGCTHITAQTAVLMETLGALGAQCRWAACNIYSTLNEVAAALAESGFPVFAWKGESEDDFWWCIDRCVNVEGWQPNMILDDGGDLTHWIYKKYPNMFKKIKGIVEESVTGVHRLYQLSKAGKLCVPAMNVNDSVTKQKFDNLYCCRESILDGLKRTTDMMFGGKQVVVCGYGEVGKGCCAALKAMGSIVYVTEIDPICALQACMDGFRLVKLNEVIRQVDIVITCTGNKNVVTREHLDRMKNSCIVCNMGHSNTEIDVASLRTPELTWERVRSQVDHVIWPDGKRIVLLAEGRLLNLSCSTVPTFVLSITATTQALALIELYNAPEGRYKQDVYLLPKKMDEYVASLHLPTFDAHLTELTDEQAKYLGLNKNGPFKPNYYRY

SEQ ID NO: 639 - protein, 183 aa, Homo Sapiens [sequence omitted]

SEQ ID NO: 640 - protein, 610 aa, Homo Sapiens
MSVQVVSAAAAAKVPEVELKDLSPSEAESQLGLSTAAVGAMAPPAGGGDPEAPAPAAERPPVPGPGSGPAAALSPAAGKVPQASAMKRSDPHHQHQRHRDGGEALVSPDGTVTEAPRTVKKIQFADQKQEFNKRPTKIGRRSLSRSISQSSTDSYSSAASYTDSSDDETSPRDKQQKNSKGSSDFCVKNIKQAEFGRREIEIAEQEMPALMALRKRAQGEKPLAGAKIVGCTHITAQTAVLMETLGALGAQCRWAACNIYSTLNEVAAALAESGFPVFAWKGESEDDFWWCIDRCVNVEGWQPNMILDDGGDLTHWIYKKYPNMFKKIKGIVEESVTGVHRLYQLSKAGKLCVPAMNVNDSVTKQKFDNLYCCRESILDGLKRTTDMMFGGKQVVVCGYGEVGKGCCAALKAMGSIVYVTEIDPICALQACMDGFRLVKLNEVIRQVDIVITCTGNKNVVTREHLDRMKNSCIVCNMGHSNTEIDVASLRTPELTWERVRSQVDHVIWPDGKRIVLLAEGRLLNLSCSTVPTFVLSITATTQALALIELYNAPEGRYKQDVYLLPKKMDEYVASLHLPTFDAHLTELTDEQAKYLGLNKNGPFKPNYYRY

SEQ ID NO: 641 - protein, 611 aa, Homo Sapiens
MSVQVVSAAAAAKVPEVELKDLSPSEAESQLGLSTAAVGAMAPPAGGGDPEAPAPAAERPPVPGPGSGPAAALSPAAGKVPQASAMKRSDPHHQHQRHRDGGEALVSPDGTVTEAPRTVKKQIQFADQKQEFNKRPTKIGRRSLSRSISQSSTDSYSSAASYTDSSDDETSPRDKQQKNSKGSSDFCVKNIKQAEFGRREIEIAEQEMPALMALRKRAQGEKPLAGAKIVGCTHITAQTAVLMETLGALGAQCRWAACNIYSTLNEVAAALAESGFPVFAWKGESEDDFWWCIDRCVNVEGWQPNMILDDGGDLTHWIYKKYPNMFKKIKGIVEESVTGVHRLYQLSKAGKLCVPAMNVNDSVTKQKFDNLYCCRESILDGLKRTTDMMFGGKQVVVCGYGEVGKGCCAALKAMGSIVYVTEIDPICALQACMDGFRLVKLNEVIRQVDIVITCTGNKNVVTREHLDRMKNSCIVCNMGHSNTEIDVASLRTPELTWERVRSQVDHVIWPDGKRIVLLAEGRLLNLSCSTVPTFVLSITATTQALALIELYNAPEGRYKQDVYLLPKKMDEYVASLHLPTFDAHLTELTDEQAKYLGLNKNGPFKPNYYRY

SEQ ID NO: 642 - protein, 518 aa, Homo Sapiens
  misc_feature (1)..(1): Xaa can be any naturally occurring amino acid
XRKWSRQFLLSFWCTVCSAHQGTIFLSLKIQFADQKQEFNKRPTKIGRRSLSRSISQSSTDSYSSAASYTDSSDDETSPRDKQQKNSKGSSDFCVKNIKQAEFGRREIEIAEQEMPALMALRKRAQGEKPLAGAKIVGCTHITAQTAVLMETLGALGAQCRWAACNIYSTLNEVAAALAESGFPVFAWKGESEDDFWWCIDRCVNVEGWQPNMILDDGGDLTHWIYKKYPNMFKKIKGIVEESVTGVHRLYQLSKAGKLCVPAMNVNDSVTKQKFDNLYCCRESILDGLKRTTDMMFGGKQVVVCGYGEVGKGCCAALKAMGSIVYVTEIDPICALQACMDGFRLVKLNEVIRQVDIVITCTGNKNVVTREHLDRMKNSCIVCNMGHSNTEIDVASLRTPELTWERVRSQVDHVIWPDGKRIVLLAEGRLLNLSCSTVPTFVLSITATTQALALIELYNAPEGRYKQDVYLLPKKMDEYVASLHLPTFDAHLTELTDEQAKYLGLNKNGPFKPNYYRY

SEQ ID NO: 643 - protein, 368 aa, Homo Sapiens
MKSLVLLLCLAQLWGCHSAPHGPGLIYRQPNCDDPETEEAALVAIDYINQNLPWGYKHTLNQIDEVKVWPQQPSGELFEIEIDTLETTCHVLDPTPVARCSVRQLKEHAVEGDCDFQLLKLDGKFSVVYAKCDSSPADSAEDVRKVCQDCPLLAPLNDTRVVHAAKAALAAFNAQNNGSNFQLEEISRAQLVPLPPSTYVEFTVSGTDCVAKEATEAAKCNLLAEKQYGFCKATLSEKLGGAEVAVTCMVFQTQPVSSQPQPEGANEAVPTPVVDPDAPPSPPLGAPGLPPAGSPPDSHVLLAAPPGHQLHRAHYDLRHTFMGVVSLGSPSGEVSHPRKTRTVVQPSVGAAAGPVVPPCPGRIRHFKV

SEQ ID NO: 644 - protein, 367 aa, Homo Sapiens
MKSLVLLLCLAQLWGCHSAPHGPGLIYRQPNCDDPETEEAALVAIDYINQNLPWGYKHTLNQIDEVKVWPQQPSGELFEIEIDTLETTCHVLDPTPVARCSVRQLKEHAVEGDCDFQLLKLDGKFSVVYAKCDSSPDSAEDVRKVCQDCPLLAPLNDTRVVHAAKAALAAFNAQNNGSNFQLEEISRAQLVPLPPSTYVEFTVSGTDCVAKEATEAAKCNLLAEKQYGFCKATLSEKLGGAEVAVTCMVFQTQPVSSQPQPEGANEAVPTPVVDPDAPPSPPLGAPGLPPAGSPPDSHVLLAAPPGHQLHRAHYDLRHTFMGVVSLGSPSGEVSHPRKTRTVVQPSVGAAAGPVVPPCPGRIRHFKV

SEQ ID NO: 645 - protein, 47 aa, Homo Sapiens
MALVPCQVLRMAILLSYCSILCNYKAIEMPSHQTYGGSWKFLTFIDL

SEQ ID NO: 646 - protein, 124 aa, Homo Sapiens
MALVPCQVLRMAILLSYCSILCNYKAIEMPSHQTYGGSWKFLTFIDLFVVAVFWIIYAYDREMIYPKLLDNFIPGWLNHGMHTTVLPFILIEMRTSHHQYPSRSSGLTAICTFSVGYILWVCWV

SEQ ID NO: 647 - protein, 137 aa, Homo Sapiens
MALVPCQVLRMAILLSYCSILCNYKAIEMPSHQTYGGSWKFLTFIDLVIQAVFFGICVLTDLSSLLTRGSGNQEQERQLKKLISLRDWMLAVLAFPVGVFVVAVFWIIYAYDREMIYPKLLDNFIPGWLNHGMHFKA

SEQ ID NO: 648 - protein, 245 aa, Homo Sapiens
MALVPCQVLRMAILLSYCSILCNYKAIEMPSHQTYGGSWKFLTFIDLVIQAVFFGICVLTDLSSLLTRGSGNQEQERQLKKLISLRDWMLAVLAFPVGVFVVAVFWIIYAYDREMIYPKLLDNFIPGWLNHGMHTTVLPFILIEMRTSHHQYPSRSSGLTAICTFSVGYILWVCWVHHVTGMWVYPFLEHIGPGARIIFFGSTTILMNFLYLLGEVLNNYIWDTQKKPPSWQDMKIKFMYLGPSS

SEQ ID NO: 649 - protein, 238 aa, Homo Sapiens
MALVPCQVLRMAILLSYCSILCNYKAIEMPSHQTYGGSWKFLTFIDLVIQAVFFGICVLTDLSSLLTRGSGNQEQERQLKKLISLRDWMLAVLAFPVGVFVVAVFWIIYAYDREMIYPKLLDNFIPGWLNHGMHTTVLPFILIEMRTSHHQYPSRSSGLTAICTFSVGYILWVCWVHHVTGMWVYPFLEHIGPGARIIFFGSTTILMNFLYLLGEVLNNYIWDTQKSMEEEKEKPKLE

SEQ ID NO: 650 - protein, 231 aa, Homo Sapiens
MALVPCQVLRMAILLSYCSILCNYKAIEMPSHQTYGGSWKFLTFIDLVIQAVFFGICVLTDLSSLLTRGSGNQEQERQLKKLISLRDWMLAVLAFPVGVFVVAVFWIIYAYDREMIYPKLLDNFIPGWLNHGMHTTVLPFILIEMRTSHHQYPSRSSGLTAICTFSVGYILWVCWVHHVTGMWVYPFLEHIGPGARIIFFGSTTILMNFLYLLGEVLNNYIWDTQKTAKLK

SEQ ID NO: 651 - protein, 134 aa, Homo Sapiens
MALVPCQVLRMAILLSYCSILCNYKAIEMPSHQTYGGSWKFLTFIDLVIQAVFFGICVLTDLSSLLTRGSGNQEQERQLKKLISLRDWMLAVLAFPVGVFVVAVFWIIYAYDREMIYPKLLDNFIPGWLNHGML

SEQ ID NO: 652 - protein, 138 aa, Homo Sapiens
MLAVLAFPVGVFVVAVFWIIYAYDREMIYPKLLDNFIPGWLNHGMHTTVLPFILIEMRTSHHQYPSRSSGLTAICTFSVGYILWVCWVHHVTGMWVYPFLEHIGPGARIIFFGSTTILMNFLYLLGEVLNNYIWDTQK

SEQ ID NO: 653 - protein, 192 aa, Homo Sapiens
MTKVLRMAILLSYCSILCNYKAIEMPSHQTYGGSWKFLTFIDLVIQAVFFGICVLTDLSSLLTRGSGNQEQERQLKKLISLRDWMLAVLAFPVGVFVVAVFWIIYAYDREMIYPKLLDNFIPGWLNHGMHTTVLPFILIEMRTSHHQYPSRSSGLTAICTFSVGYILWVCWVHHVTGMWVYPFLEHIGPGAR

SEQ ID NO: 654 - protein, 171 aa, Homo Sapiens
MAKQYIEKSLLVPDHVITRLMMSELENRRGQHWLLDGFPRTLGQAEALDKICEVDLVISLNIPFETLKDRLSRRWIHPPSGRVYNLDFNPPHVHGIDDVTGEPLVQQEDDKPEAVAARLRQYKDVAKPVIELYKSRGVLHQFSGTETNKIWPYVYTLFSNKITPIQSKEAY

SEQ ID NO: 655 - protein, 223 aa, Homo Sapiens
MASKLLRAVILGPPGSGKGTVCQRIAQNFGLQHLSSGHFLRENIKASTEVGEMAKQYIEKSLLVPDHVITRLMMSELENRRGQHWLLDGFPRTLGQAEALDKICEVDLVISLNIPFETLKDRLSRRWIHPPSGRVYNLDFNPPHVHGIDDVTGEPLVQQEDDKPEAVAARLRQYKDVAKPVIELYKSRGVLHQFSGTETNKIWPYVYTLFSNKITPIQSKEAY

SEQ ID NO: 656 - protein, 223 aa, Homo Sapiens; identical to SEQ ID NO: 655

SEQ ID NO: 657 - protein, 223 aa, Homo Sapiens; identical to SEQ ID NO: 655

SEQ ID NO: 658 - protein, 78 aa, Homo Sapiens
LALLALLMSLTQGVLTALRLRKMTFGRVSDLGQFIRESEPEPDVRKSKGSMFSQAMKKWVQGNTDEAQEELAWKIAKM

SEQ ID NO: 659 - protein, 138 aa, Homo Sapiens
MRGAGPSPRQSPRTLRPDPGPAMSFFRRKVKGKEQEKTSDVKSIKALKIMPCWRLQDQVMLQSMPFLPTWTPFQVAGQPHLRSSQATWRPLILVTWADLVWTTRLKRPNQAFLRPLNKSCTTLLSSLTSFNSWNFGEW

SEQ ID NO: 660 - protein, 150 aa, Homo Sapiens
MRGAGPSPRQSPRTLRPDPGPAMSFFRRKVKGKEQEKTSDVKSIKASISVHSPQKSTKNHALLEAAGPSHVAINAISANMDSFSSSRTATLKKQPSHMEAAHFGDLDLVWTTRLKRPNQAFLRPLNKSCTTLLSSLTSFNSWNFGEWSIW

SEQ ID NO: 661 - protein, 662 aa, Homo Sapiens
MRGAGPSPRQSPRTLRPDPGPAMSFFRRKVKGKEQEKTSDVKSIKASISVHSPQKSTKNHALLEAAGPSHVAINAISANMDSFSSSRTATLKKQPSHMEAAHFGDLGRSCLDYQTQETKSSLSKTLEQVLHDTIVLPYFIQFMELRRMEHLVKFWLEAESFHSTTWSRIRAHSLNTVKQSSLAEPVSPSKKHETTASFLTDSLDKRLEDSGSAQLFMTHSEGIDLNNRTNSTQNHLLLSQECDSAHSLRLEMARAGTHQVSMETQESSSTLTVASRNSPASPLKELSGKLMKSIEQDAVNTFTKYISPDAAKPIPITEAMRNDIIARICGEDGQVDPNCFVLAQSIVFSAMEQEHFSEFLRSHHFCKYQIEVLTSGTVYLADILFCESALFYFSEYMEKEDAVNILQFWLAADNFQSQLAAKKGQYDGQEAQNDAMILYDKYFSLQATHPLGFDDVVRLEIESNICREGGPLPNCFTTPLRQAWTTMEKVFLPGFLSSNLYYKYLNDLIHSVRGDEFLGGNVSLTAPGSVGPPDESHPGSSDSSASQSSVKKASIKILKNFDEAIIVDAASLDPESLYQRTYAGKMTFGRVSDLGQFIRESEPEPDVRKSKGSMFSQAMKKWVQGNTDEAQEELAWKIAKMIVSDIMQQAQYDQPLEKSTKL

SEQ ID NO: 662 - protein, 604 aa, Homo Sapiens
MRGAGPSPRQSPRTLRPDPGPAMSFFRRKVKGKEQEKTSDVKSIKASISVHSPQKSTKNHALLEAAGPSHVAINAISANMDSFSSSRTATLKKQPSHMEAAHFGDLGRSCLDYQTQETKSSLSKTLEQVLHDTIVLPYFIQFMELRRMEHLVKFWLEAESFHSTTWSRIRAHSLNTVKQSSLAEPVSPSKKHETTASFLTDSLDKRLEDSGSAQLFMTHSEGIDLNNRTNSTQNHLLLSQECDSAHSLRLEMARAGTHQVSMETQESSSTLTVASRNSPASPLKELSGKLMKSIEQDAVNTFTKYISPDAAKPIPITEAMRNDIIARICGEDGQVDPNCFVLAQSIVFSAMEQEHFSEFLRSHHFCKYQIEVLTSGTVYLADILFCESALFYFSEYMEKEDAVNILQFWLAADNFQSQLAAKKGQYDGQEAQNDAMILYDKYFSLQATHPLGFDDVVRLEIESNICREGGPLPNCFTTPLRQAWTTMEKSSVKKASIKILKNFDEAIIVDAASLDPESLYQRTYAGKMTFGRVSDLGQFIRESEPEPDVRKSKGSMFSQAMKKWVQGNTDEAQEELAWKIAKMIVSDIMQQAQYDQPLEKSTKL

SEQ ID NO: 663 - protein, 66 aa, Homo Sapiens
MRGAGPSPRQSPRTLRPDPGPAMSFFRRKVKGKEQEKTSDVKSIKGCRTKSCCNQCHFCQHGLLFK

SEQ ID NO: 664 - protein, 63 aa, Homo Sapiens
MRGAGPSPRQSPRTLRPDPGPAMSFFRRKVKGKEQEKTSDVKSIKVETEFHHVSQYGLDLLTL

SEQ ID NO: 665 - protein, 59 aa, Homo Sapiens
  misc_feature (1)..(1): Xaa can be any naturally occurring amino acid
XKYISPDAAKPIPITEAMRNDIIARICGEDGQVDPNCFVLAQSIVFSAMEQDTWKKRMQ

SEQ ID NO: 666 - protein, 31 aa, Homo Sapiens
  misc_feature (1)..(1): Xaa can be any naturally occurring amino acid
XLTAPGSVGPPDESHPGSSDSSASQCEKSQY

SEQ ID NO: 667 - protein, 323 aa, Homo Sapiens
MDSKYQCVKLNDGHFMPVLGFGTYAPAEVPKSKALEATKLAIEAGFRHIDSAHLYNNEEQVGLAIRSKIADGSVKREDIFYTSKLWCNSHRPELVRPALERSLKNLQLDYVDLYLIHFPVSVKPGEEVIPKDENGKILFDTVDLCATWEAVEKCKDAGLAKSIGVSNFNRRQLEMILNKPGLKYKPVCNQVECHPYFNQRKLLDFCKSKDIVLVAYSALGSHREEPWVDPNSPVLLEDPVLCALAKKHKRTPALIALRYQLQRGVVVLAKSYNEQRIRQNVQVFEFQLTSEEMKAIDGLNRNVRYLTLDIFAGPPNYPFSDEY

SEQ ID NO: 668 - protein, 205 aa, Homo Sapiens
MGVVSLFLCIVEQIFTSSKKIQFRGIFMAKVPKSKALEATKLAIEAGFRHIDSAHLYNNEEQVGLAIRSKIADGSVKREDIFYTSKLWCNSHRPELVRPALERSLKNLQLDYVDLYLIHFPVSVKPGEEVIPKDENGKILFDTVDLCATWEAVEKCKDAGLAKSIGVSNFNRRQLEMILNKPGLKYKPVCNQPRDNSIFSLSPDW

SEQ ID NO: 669 - protein, 248 aa, Homo Sapiens
  misc_feature (1)..(1): Xaa can be any naturally occurring amino acid
XSKYQCVKLNDGHFMPVLGFGTYAPAEVGLAIRSKIADGSVKREDIFYTSKLWCNSHRPELVRPALERSLKNLQLDYVDLYLIHFPVSVKPGEEVIPKDENGKILFDTVDLCATWEAVEKCKDAGLAKSIGVSNFNRRQLEMILNKPGLKYKPVCNQVECHPYFNQRKLLDFCKSKDIVLVAYSALGSHREEPWVDPNSPVLLEDPVLCALAKKHKRTPALIALRYQLQRGVVVLAKSYNEQRIRQNV

SEQ ID NO: 670 - protein, 172 aa, Homo Sapiens
MPVPASWPHLPSPFLLMTLLLGRLTGVAGEDELQVIQPEKSVSVAAGESATLRCAMTSLIPVGPIMWFRGAGAGRELIYNQKEGHFPRVTTVSELTKRNNLDFSISISNITPADAGTYYCVKFRKGSPDDVEFKSGAGTELSVRAFFQESHMCSMCNKRRCHRLYQLGSQSS

SEQ ID NO: 671 - protein, 177 aa, Homo Sapiens
MPVPASWPHPPCPFLLLTLLLGLTGVAGEDELQVIQPEKSVSVAAGESATLRCAMTSLIPVGPIMWFRGAGAGRELIYNQKEGHFPRVTTVSELTKRNNLDFSISISNITPADAGTYYCVKFRKGSPDDVEFKSGAGTELSVRGVTHVFHVQQTEMSQTVSTGESIILSCSVPNTLP

SEQ ID NO: 672 - protein, 140 aa, Homo Sapiens
  misc_feature (1)..(1): Xaa can be any naturally occurring amino acid
XLIYNQKEGHFPRVTTVSDLTKRNNMDFSIRISNITPADAGTYYCVKFRKGSPDHVEFKSGAGTELSVREARTVFSARSTESRASPGQAFRQSKLQVSPQCPSLPPHSTHLCLPYCCICCLNWQSLTVLEARSLKSASLD

SEQ ID NO: 673 - protein, 45 aa, Homo Sapiens
  misc_feature (1)..(1): Xaa can be any naturally occurring amino acid
XVHKAVVEVDESGTRAAAATGTIFTFRYSLNGHCVPGTVPSAEEK

SEQ ID NO: 674 - protein, 85 aa, Homo Sapiens
KKEHVFIHERPRKINGICISPKKVACQNLSAIFCFQSETKFKMTVCQLIEGTRYPACRYHYSPTEGFVLVTCDDLRPDSFLGYVK

SEQ ID NO: 675 - protein, 96 aa, Homo Sapiens
MIIMVIIFLVLLFWENEVNDEAVMSTLEHLHVDYPQNDVPVPARRDYTTSEMETFPLLLLSLGLVLAEASESTMKIIKEEFTDEEMQYDMAKSGQE

SEQ ID NO: 676 - protein, 31 aa, Homo Sapiens
MVMGLGVLLLVFVLGLGLTPPTLAQDNSRHL

SEQ ID NO: 677 - protein, 190 aa, Homo Sapiens
MCLCVCLYVCICVYVCVCHFVCFWVCLPLRVSVYLYLRVCVCVCVFVCLCMCVRGCVSVCVCVCIEREGERKGATDGSAWKVYPHSQPWEESVNPPTGQDQLWWCLADSGNVTFHLRMGLHFLGKECRSWSLKECFFFPFVIERAQPCVHWLTVTNLRVGDSHREETEGTADSEQESGGTSLPLGPNPQL

SEQ ID NO: 678 - protein, 23 aa, Homo Sapiens
MSRLVRGSSLLTYLVVALVLQSR

SEQ ID NO: 679 - protein, 1266 aa, Homo Sapiens
MGPLMVLFCLLFLYPGLADSAPSCPQNVNISGGTFTLSHGWAPGSLLTYSCPQGLYPSPASRLCKSSGQWQTPGATRSLSKAVCKPGHCPNPGISLGAVRTGFRFGHGDKVRYRCSSNLVLTGSSERECQGNGVWSGTEPICRQPYSYDFPEDVAPALGTSFSHMLGATNPTQKTKDHENGTGTNTYAALNSVYLMMNNQMRLLGMETMAWQEIRHAIILLTDGKSNMGGSPKTAVDHIREILNINQKRNDYLDIYAIGVGKLDVDWRELNELGSKKDGERHAFILQDTKALHQVFEHMLDVSKLTDTICGVGNMSANASDQERTPWHVTIKPKSQETCRGALISDQWVLTAAHCFRDGNDHSLWRVNVGDPKSQWGKEFLIEKAVISPGFDVFAKKNQGILEFYGDDIALLKLAQKVKMSTHARPICLPCTMEANLALRRPQGSTCRDHENELLNKQSVPAHFVALNGSKLNINLKMGVEWTSCAEVVSQEKTMFPNLTDVREVVTDQFLCSGTQEDESPCKGVTTTPWSLARPQGSCSLEGVEIKGGSFRLLQEGQALEYVCPSGFYPYPVQTRTCRSTGSWSTLKTQDQKTVRKAECRAIHCPRPHDFENGEYWPRSPYYNVSDEISFHCYDGYTLRGSANRTCQVNGRWSGQTAICDNGAGYCSNPGIPIGTRKVGSQYRLEDSVTYHCSRGLTLRGSQRRTCQEGGSWSGTEPSCQDSFMYDTPQEVAEAFLSSLTETIEGVDAEDGHGPGEQQKRKIVLDPSGSMNIYLVLDGSDSIGASNFTGAKKCLVNLIEKVASYGVKPRYGLVTYATYPKIWVKVSEADSSNADWVTKQLNEINYEDHKLKSGTNTKKALQAVYSMMSWPDDVPPEGWNRTRHVIILMTDGLHNMGGDPITVIDEIRDLLYIGKDRKNPREDYLDVYVFGVGPLVNQVNINALASKKDNEQHVFKVKDMENLEDVFYQMIDESQSLSLCGMVWEHRKGTDYHKQPWQAKISVIRPSKGHESCMGAVVSEYFVLTAAHCFTVDDKEHSIKVSVGGEKRDLEIEVVLFHPNYNINGKKEAGIPEFYDYDVALIKLKNKLKYGQTIRPICLPCTEGTTRALRLPPTTTCQQQKEELLPAQDIKALFVSEEEKKLTRKEVYIKNGDKKGSCERDAQYAPGYDKVKDISEVVTPRFLCTGGVSPYADPNTCRGDSGGPLIVHKRSRFIQVGVISWGVVDVCKNQKRQKQVPAHARDFHINLFQVLPWLKEKLQDEDLGFL

SEQ ID NO: 680 - protein, 1115 aa, Homo Sapiens
MGPLMVLFCLLFLYPGLADSAPSCPQNVNISGGTFTLSHGWAPGSLLTYSCPQGLYPSPASRLCKSSGQWQTPGATRSLSKAVCKPVRCPAPVSFENGIYTPRLGSYPVGGNVSFECEDGFILRGSPVRQCRPNGMWDGETAVCDNGDHENGTGTNTYAALNSVYLMMNNQMRLLGMETMAWQEIRHAIILLTDGKSNMGGSPKTAVDHIREILNINQKRNDYLDVSKLTDTICGVGNMSANASDQERTPWHVTIKPKSQETCRGALISDQWVLTAAHCFRDGNDHSLWRVNVGDPKSQWGKEFLIEKAVISPGFDVFAKKNQGILEFYGDDIALLKLAQKVKMSTHARPICLPCTMEANLALRRPQGSTCRDHENELLNKQSVPAHFVALNGSKLNINLKMGVEWTSCAEVVSQEKTMFPNLTDVREVVTDQFLCSGTQEDESPCKGGSAIHCPRPHDFENGEYWPRSPYYNVSDEISFHCYDGYTLRGSANRTCQVNGRWSGQTAICDNGAGYCSNPGIPIGTRKVGSQYRLEDSVTYHCSRGLTLRGSQRRTCQEGGSWSGTEPSCQDSFMYDTPQEVAEAFLSSLTETIEGVDAEDGHGPGEQQKRKIVLDPSGSMNIYLVLDGSDSIGASNFTGAKKCLVNLIEKVASYGVKPRYGLVTYATYPKIWVKVSEADSSNADWVTKQLNEINYEDHKLKSGTNTKKALQAVYSMMSWPDDVPPEGWNRTRHVIILMTDGLHNMGGDPITVIDEIRDLLYIGKDRKNPREDYLDVYVFGVGPLVNQVNINALASKKDNEQHVFKVKDMENLEDVFYQMIDESQSLSLCGMVWEHRKGTDYHKQPWQAKISVIRPSKGHESCMGAVVSEYFVLTAAHCFTVDDKEHSIKVSVGGEKRDLEIEVVLFHPNYNINGKKEAGIPEFYDYDVALIKLKNKLKYGQTIRPICLPCTEGTTRALRLPPTTTCQQQKEELLPAQDIKALFVSEEEKKLTRKEVYIKNGDKKGSCERDAQYAPGYDKVKDISEVVTPRFLCTGGVSPYADPNTCRGDSGGPLIVHKRSRFIQVGVISWGVVDVCKNQKRQKQVPAHARDFHINLFQVLPWLKEKLQDEDLGFL

SEQ ID NO: 681 - protein, 175 aa, Homo Sapiens
MGHEQNQGAALLQMLPLLWLLPHSWAVPEEQSMITFLPLLLGLSLGCTGAGGFVAHVESTCLLDDAGTPKDFTYCISFNKDLLTCWDPEENKMAPCEFGVLNSLANVLSQHLNQKDTLMQRLRNGLQNCATHTQPFWGSLTNRTRPPSVQVAKTTPFNTREPVMLACYVWGFYPA

SEQ ID NO: 682 - protein, 63 aa, Homo Sapiens
MGTSSIFLCVLFLCGALGLTMSPARGRLRCYICGFTKPCHPVPTECRDDEACGISIGTSDAHC

SEQ ID NO: 683 - protein, 33 aa, Homo Sapiens
  misc_feature (1)..(1): Xaa can be any naturally occurring amino acid
XLGLTYLSLLLIPAAGASSCPRTPLPAMAPLPQ

SEQ ID NO: 684 - protein, 198 aa, Homo Sapiens
MLSELQDGKSKIVQKAAPEVQEDVKAFKTDLPSSLVSVSLRKPFSGPQEQEQISGKVTHLIQNNMPGNYVFSYDQFFRDKIMEKKQDHTYRVFKTVNRWADAYPFAQHFSEASVASKDVSVWCSNDYLGMSRHPQVLQATQETLQRHGAGAGGTRNISGTSKFHVELEQELAELHQKDSALLFSSCFVANDSTLFTLA

SEQ ID NO: 685 - protein, 171 aa, Homo Sapiens
MLSELQDGKSKIVQKAAPEVQEDVKAFKTGNYVFSYDQFFRDKIMEKKQDHTYRVFKTVNRWADAYPFAQHFSEASVASKDVSVWCSNDYLGMSRHPQVLQATQETLQRHGAGAGGTRNISGTSKFHVELEQELAELHQKDSALLFSSCFVANDSTLFTLAKILPGCEIYS

SEQ ID NO: 686 - protein, 165 aa, Homo Sapiens
MRGGEVALGWNKKKRLFCEDFRFKMVTAAMLLQCCPVLARGPTSLLGKVVKTHQFLFGIGRCPILATQGPNCSQIHLKATKAGGDSPSWAKGHCPFMLSELQDGKSKIVQKAAPEVQEDVKAFKTDLPSSLVSVSLRKPFSGPQEQEQISGKVTHLIQNNMPGNY

SEQ ID NO: 687 - protein, 574 aa, Homo Sapiens
MRGGEVALGWNKKKRLFCEDFRFKMVTAAMLLQCCPVLARGPTSLLGKVVKTHQFLFGIGRCPILATQGPNCSQIHLKATKAGGDSPSWAKGHCPFMLSELQDGKSKIVQKAAPEVQEDVKAFKTGNYVFSYDQFFRDKIMEKKQDHTYRVFKTVNRWADAYPFAQHFSEASVASKDVSVWCSNDYLGMSRHPQVLQATQETLQRHGAGAGGTRNISGTSKFHVELEQELAELHQKDSALLFSSCFVANDSTLFTLAKILPGCEIYSDAGNHASMIQGIRNSGAAKFVFRHNDPDHLKKLLEKSNPKIPKIVAFETVHSMDGAICPLEELCDVSHQYGALTFVDEVHAVGLYGSRGAGIGERDGIMHKIDIISGTLGKAFGCVGGYIASTRDLVDMVRSYAAGFIFTTSLPPMVLSGALESVRLLKGEEGQALRRAHQRNVKHMRQLLMDRGLPVIPCPSHIIPIRVGNAALNSKLCDLLLSKHGIYVQAINYPTVPRGEELLRLAPSPHHSPQMMEDFVEKLLLAWTAVGLPLQDVSVAACNFCRRPVHFELMSEWERSYFGNMGPQYVTTYA

SEQ ID NO: 688 - protein, 587 aa, Homo Sapiens
MVTAAMLLQCCPVLARGPTSLLGKVVKTHQFLFGIGRCPILATQGPNCSQIHLKATKAGGDSPSWAKGHCPFMLSELQDGKSKIVQKAAPEVQEDVKAFKTDLPSSLVSVSLRKPFSGPQEQEQISGKVTHLIQNNMPGNYVFSYDQFFRDKIMEKKQDHTYRVFKTVNRWADAYPFAQHFSEASVASKDVSVWCSNDYLGMSRHPQVLQATQETLQRHGAGAGGTRNISGTSKFHVELEQELAELHQKDSALLFSSCFVANDSTLFTLAKILPGCEIYSDAGNHASMIQGIRNSGAAKFVFRHNDPDHLKKLLEKSNPKIPKIVAFETVHSMDGAICPLEELCDVSHQYGALTFVDEVHAVGLYGSRGAGIGERDGIMHKIDIISGTLGKAFGCVGGYIASTRDLVDMVRSYAAGFIFTTSLPPMVLSGALESVRLLKGEEGQALRRAHQRNVKHMRQLLMDRGLPVIPCPSHIIPIRVGNAALNSKLCDLLLSKHGIYVQAINYPTVPRGEELLRLAPSPHHSPQMMEDFVEKLLLAWTAVGLPLQDVSVAACNFCRRPVHFELMSEWERSYFGNMGPQYVTTYA

SEQ ID NO: 689 - protein, 550 aa, Homo Sapiens
MVTAAMLLQCCPVLARGPTSLLGKVVKTHQFLFGIGRCPILATQGPNCSQIHLKATKAGGDSPSWAKGHCPFMLSELQDGKSKIVQKAAPEVQEDVKAFKTGNYVFSYDQFFRDKIMEKKQDHTYRVFKTVNRWADAYPFAQHFSEASVASKDVSVWCSNDYLGMSRHPQVLQATQETLQRHGAGAGGTRNISGTSKFHVELEQELAELHQKDSALLFSSCFVANDSTLFTLAKILPGCEIYSDAGNHASMIQGIRNSGAAKFVFRHNDPDHLKKLLEKSNPKIPKIVAFETVHSMDGAICPLEELCDVSHQYGALTFVDEVHAVGLYGSRGAGIGERDGIMHKIDIISGTLGKAFGCVGGYIASTRDLVDMVRSYAAGFIFTTSLPPMVLSGALESVRLLKGEEGQALRRAHQRNVKHMRQLLMDRGLPVIPCPSHIIPIRVGNAALNSKLCDLLLSKHGIYVQAINYPTVPRGEELLRLAPSPHHSPQMMEDFVEKLLLAWTAVGLPLQDVSVAACNFCRRPVHFELMSEWERSYFGNMGPQYVTTYA

SEQ ID NO: 690 - protein, 141 aa, Homo Sapiens
MVTAAMLLQCCPVLARGPTSLLGKVVKTHQFLFGIGRCPILATQGPNCSQIHLKATKAGGDSPSWAKGHCPFMLSELQDGKSKIVQKAAPEVQEDVKAFKTGRPCSVMVLELVAPATSQAPILPGCEIYSDAGNHASMIQG

SEQ ID NO: 691 - protein, 276 aa, Homo Sapiens
  misc_feature (1)..(1): Xaa can be any naturally occurring amino acid
XELEQELAELHQKDSALLFSSCFVANDSTLFTLAKILPGCEIYSDAGNHASMIQGIRNSGAAKFVFRHNDPDHLKKLLEKSNPKIPKIVAFETVHSMDGAICPLEELCDVSHQYGALTFVDEVHAVGLYGSRGAGIGERDGIMHKIDIISGTLGKAFGCVGGYIASTRDLVDMVRSYAAGFIFTTSLPPMVLSGALESVRLLKGEEGQALRRAHQRNVKHMRQLLMDRGLPVIPCPSHIIPIRRSCCWLGLRWGCPSRMCLWLPAISVAVLYTLSS

SEQ ID NO: 692 - protein, 197 aa, Homo Sapiens
GFEWGGQRRASHNSTFSAYSRGVFRRDAHKSEVAHRFKDLGEENFKALVLIAFAQYLQQCPFEDHVKLVNEVTEFAKTCVADESAENCDKSLHTLFGDKLCTVATLRETYGEMADCCAKQEPERNECFLQHKDDNPNLPRLVRPEVDVMCTAFHDNEETFLKKYLYEIARRHPYFYAPELLFFAKRYKAAFTECCQA

SEQ ID NO: 693 - protein, 417 aa, Homo Sapiens
MKWVTFISLLFLFSSAYSRGVFRRDAHKSEVAHRFKDLGEENFKALAVARLSQRFPKAEFAEVSKLVTDLTKVHTECCHGDLLECADDRADLAKYICENQDSISSKLKECCEKPLLEKSHCIAEVENDEMPADLPSLAADFVESKDVCKNYAEAKDVFLGMFLYEYARRHPDYSVVLLLRLAKTYETTLEKCCAAADPHECYAKVFDEFKPLVEEPQNLIKQNCELFEQLGEYKFQNALLVRYTKKVPQVSTPTLVEVSRNLGKVGSKCCKHPEAKRMPCAEDYLSVVLNQLCVLHEKTPVSDRVTKCCTESLVNRRPCFSALEVDETYVPKEFNAETFTFHADICTLSEKERQIKKQTALVELVKHKPKATKEQLKAVMDDFAAFVEKCCKADDKETCFAEEGKKLVAASQAALGL

SEQ ID NO: 694 - protein, 609 aa, Homo Sapiens [sequence omitted]

SEQ ID NO: 695 - protein, 604 aa, Homo Sapiens
MKWVTFISLLFLFSSAYSRGVFRRDAHKSEVAHRFKDLGEENFKALVLIAFAQYLQQCPFEDHVKLVNEVTEFAKTCVADESAENCDKSLHTLFGDKLCTVATLRETYGEMADCCAKQEPERNECFLQHKDDNPNLPRLVRPEVDVMCTAFHDNEETFLKKYLYEIARRHPYFYAPELLFFAKRYKAAFTECCQAADKAACLLPKLDELRDEGKASSAKQRLKCASLQKFGERAFKAWAVARLSQRFPKAEFAEVSKLVTDLTKVHTECCHGDLLECADDRADLAKYICENQDSISSKLKECCEKPLLEKSHCIAEVENDEMPADLPSLAADFVESKDVCKNYAEAKDVFLGMFLYEYARRHPDYSVVLLLRLAKTYETTLEKCCAAADPHECYAKVFDEFKPLVEEPQNLIKQNCELFEQLGEYKFQNALLVRYTKKVPQVSTPTLVEVSRNLGKVGSKCCKHPEAKRMPCAEDYLSVVLNQLCVLHEKTPVSDRVTKCCTESLVNRRPCFSALEVDETYVPKEFNAETFTFHADICTLSEKERQIKKQTALVELVKHKPKATKEQLKAVMDDFAAFVEKCCKADDKETCFAEEPTMRIRERK

SEQ ID NO: 696 - protein, 396 aa, Homo Sapiens
MKWVTFISLLFLFSSAYSRGVFRRDAHKSEVAHRFKDLGEENFKALVLIAFAQYLQQCPFEDHVKLVNEVTEFAKTCVADESAENCDKSLHTLFGDKLCTVATLRETYGEMADCCAKQEPERNECFLQHKDDNPNLPRLVRPEVDVMCTAFHDNEETFLKKYLYETTLEKCCAAADPHECYAKVFDEFKPLVEEPQNLIKQNCELFEQLGEYKFQNALLVRYTKKVPQVSTPTLVEVSRNLGKVGSKCCKHPEAKRMPCAEDYLSVVLNQLCVLHEKTPVSDRVTKCCTESLVNRRPCFSALEVDETYVPKEFNAETFTFHADICTLSEKERQIKKQTALVELVKHKPKATKEQLKAVMDDFAAFVEKCCKADDKETCFAEEGKKLVAASQAALGL

SEQ ID NO: 697 - protein, 396 aa, Homo Sapiens
MKWVTFISLLFLFSSAYSRGVFRRDAHKSEVAHRFKDLGEENFKALVLIAFAQYLQQCPFEDHVKLVNEVTEFAKTCVADESAENCDKSLHTLFGDKLCTVATLRETYGEMADCCAKQEPERNECFLQHKDDNPNLPRLVRPEVDVMCTAFHDNEETFLKKYTYETTLEKCCAAADPHECYAKVFDEFKPLVEEPQNLIKQNCELFEQLGEYKFQNALLVRYTKKVPQVSTPTLVEVSRNLGKVGSKCCKHPEAKRMPCAEDYLSVVLNQLCVLHEKTPVSDRVTKCCTESLVNRRPCFSALEVDETYVPKEFNAETFTFHADICTLSEKERQIKKQTALVELVKHKPKATKEQLKAVMDDFAAFVEKCCKADDKETCFAEEGKKLVAASQAALGL

SEQ ID NO: 698 - protein, 494 aa, Homo Sapiens
MKWVTFISLLFLFSSAYSRGVFRRDAHKSEVAHRFKDLGEENFKALYLYEIARRHPYFYAPELLFFAKRYKAAFTECCQAADKAACLLPKLDELRDEGKASSAKQRLKCASLQKFGERAFKAWAVARLSQRFPKAEFAEVSKLVTDLTKVHTECCHGDLLECADDRADLAKYICENQDSISSKLKECCEKPLLEKSHCIAEVENDEMPADLPSLAADFVESKDVCKNYAEAKDVFLGMFLYEYARRHPDYSVVLLLRLAKTYETTLEKCCAAADPHECYAKVFDEFKPLVEEPQNLIKQNCELFEQLGEYKFQNALLVRYTKKVPQVSTPTLVEVSRNLGKVGSKCCKHPEAKRMPCAEDYLSVVLNQLCVLHEKTPVSDRVTKCCTESLVNRRPCFSALEVDETYVPKEFNAETFTFHADICTLSEKERQIKKQTALVELVKHKPKATKEQLKAVMDDFAAFVEKCCKADDKETCFAEEGKKLVAASQAALGL

SEQ ID NO: 699 - protein, 105 aa, Homo Sapiens
MKWVTFISLLFLFSSAYSRGVFRRDAHTYMKLPEDILTFMPRNSFSLLKGIKLLLQNVAKLLIKLPACCQSSMNFGMKGRLRLPNRDSSVPVSKNLEKELSKHGQ

SEQ ID NO: 700 - protein, 459 aa, Homo Sapiens
MSQLKIVTNHLYLYEIARRHPYFYAPELLFFAKRYKAAFTECCQAADKAACLLPKLDELRDEGKASSAKQRLKCASLQKFGERAFKAWAVARLSQRFPKAEFAEVSKLVTDLTKVHTECCHGDLLECADDRADLAKYICENQDSISSKLKECCEKPLLEKSHCIAEVENDEMPADLPSLAADFVESKDVCKNYAEAKDVFLGMFLYEYARRHPDYSVVLLLRLAKTYETTLEKCCAAADPHECYAKVFDEFKPLVEEPQNLIKQNCELFEQLGEYKFQNALLVRYTKKVPQVSTPTLVEVSRNLGKVGSKCCKHPEAKRMPCAEDYLSVVLNQLCVLHEKTPVSDRVTKCCTESLVNRRPCFSALEVDETYVPKEFNAETFTFHADICTLSEKERQIKKQTALVELVKHKPKATKEQLKAVMDDFAAFVEKCCKADDKETCFAEEGKKLVAASQAALGL

SEQ ID NO: 701 - protein, 454 aa, Homo Sapiens
  misc_feature (1)..(1): Xaa can be any naturally occurring amino acid
XFSKFRYLYEIARRHPYFYAPELLFFAKRYKAAFTECCQAADKAACLLPKLDELRDEGKASSAKQRLKCASLQKFGERAFKAWAVARLSQRFPKAEFAEVSKLVTDLTKVHTECCHGDLLECADDRADLAKYICENQDSISSKLKECCEKPLLEKSHCIAEVENDEMPADLPSLAADFVESKDVCKNYAEAKDVFLGMFLYEYARRHPDYSVVLLLRLAKTYETTLEKCCAAADPHECYAKVFDEFKPLVEEPQNLIKQNCELFEQLGEYKFQNALLVRYTKKVPQVSTPTLVEVSRNLGKVGSKCCKHPEAKRMPCAEDYLSVVLNQLCVLHEKTPVSDRVTKCCTESLVNRRPCFSALEVDETYVPKEFNAETFTFHADICTLSEKERQIKKQTALVELVKHKPKATKEQLKAVMDDFAAFVEKCCKADDKETCFAEEGKKLVAASQAALGL

SEQ ID NO: 702 - protein, 518 aa, Homo Sapiens
MFLRAGLAALSPLLRSLRPSPVAAMSTGTFVVSQPLNYRGGARVEPADASGTEKAFEPATGRVIATFTCSGEKEVNLAVQNAKAAFKIWSQKSGMERCRILLEAARIIREREDEIATMECINNGKSIFEARLDIDISWQCLEYYAGLAASMAGEHIQLPGGSFGYTRREPLGVCVGIGAWNYPFQIASWKSAPALACGNAMVFKPSPFTPVSALLLAEIYSEAGVPPGLFNVVQGGAATGQFLCQHPDVAKVSFTGSVPTGMKIMEMSAKGIKPVTLELGGKSPLIIFSDCDMNNAVKGALMANFLTQGQVCCNGTRVFVQKEILDKFTEEVVKQTQRIKIGDPLLEDTRMGPLINRPHLERVLGFVKVAKEQGAKVLCGGDIYVPEDPKLKDGYYMRPCVLTNCRDDMTCVKEEIFGPVMSILSFDTEAEVLERANDTTFGLAAGVFTRDIQRAHRVVAELQAGTCFINNYNVSPVELPFGGYKKSGFGRENGRVTIEYYSQLKTVCVEMGDVESAF

SEQ ID NO: 703 - protein, 418 aa, Homo Sapiens
MARRKPEGSSFNMTHLSMAMAFSFPPVASGQLHPQLGNTQHQTELGKELATTSTMPYQYPALTPEQKKELSDIAHRIVAPGKGILAADESTGSIAKRLQSIGTENTEENRRFYRQLLLTADDRVNPCIGGVILFHETLYQKADDGRPFPQVIKSKGGVVGIKVDKGVVPLAGTNGETTTQGLDGLSERCAQYKKDGADFAKWRCVLKIGEHTPSALAIMENANVLARYASICQQNGIVPIVEPEILPDGDHDLKRCQYVTEKVLAAVYKALSDHHIYLEGTLLKPNMVTPGHACTQKFSHEEIAMATVTALRRTVPPAVTGITFLSGGQSEEEASINLNAINKCPLLKPWALTFSYGRALQASALKAWGGKKENLKAAQEEYVKRALANSLACQGKYTPSGQAGAAASESLFVSNHAY

SEQ ID NO: 704 - protein, 278 aa, Homo Sapiens
MARRKPEGSSFNMTHLSMAMAFSFPPVASGQLHPQLGNTQHQTELGKELATTSTMPYQYPALTPEQKKELSDIAHRIVAPGKGILAADESTGSIAKRLQSIGTENTEENRRFYRQLLLTADDRVNPCIGGVILFHETLYQKADDGRPFPQVIKSKGGVVGIKVDKGVVPLAGTNGETTTQGLDGLSERCAQYKKDGADFAKWRCVLKIGEHTPSALAIMENANVLARYASICQQNGIVPIVEPEILPDGDHDLKRCQYVTEKVLAAVYKALSDHHIYL

SEQ ID NO: 705 - protein, 418 aa, Homo Sapiens; identical to SEQ ID NO: 703

SEQ ID NO: 706 - protein, 155 aa, Homo Sapiens
MPYQYPALTPEQKKELSDIAHRIVAPGKGILAADESTGSIAKRLQSIGTENTEENRRFYRQLLLTADDRVNPCIGGVILFHETLYQKADDGRPFPQVIKSKGGVVGIKVDKGVVPLAGTNGETTTQGLDGLSERCAQYKKDGADFAKWRCVLKIG

SEQ ID NO: 707 - protein, 364 aa, Homo Sapiens
MPYQYPALTPEQKKELSDIAHRIVAPGKGILAADESTGSIAKRLQSIGTENTEENRRFYRQLLLTADDRVNPCIGGVILFHETLYQKADDGRPFPQVIKSKGGVVGIKVDKGVVPLAGTNGETTTQGLDGLSERCAQYKKDGADFAKWRCVLKIGEHTPSALAIMENANVLARYASICQQNGIVPIVEPEILPDGDHDLKRCQYVTEKVLAAVYKALSDHHIYLEGTLLKPNMVTPGHACTQKFSHEEIAMATVTALRRTVPPAVTGITFLSGGQSEEEASINLNAINKCPLLKPWALTFSYGRALQASALKAWGGKKENLKAAQEEYVKRALANSLACQGKYTPSGQAGAAASESLFVSNHAY

SEQ ID NO: 708 - protein, 364 aa, Homo Sapiens; identical to SEQ ID NO: 707

SEQ ID NO: 709 - protein, 364 aa, Homo Sapiens; identical to SEQ ID NO: 707

SEQ ID NO: 710 - protein, 364 aa, Homo Sapiens; identical to SEQ ID NO: 707

SEQ ID NO: 711 - protein, 361 aa, Homo Sapiens
MPYQYPALTPEQKKELSDIAHRIVAPGKGILAADESTGSIAKRLQSIGTENTEENRRFYRQLLLTADDRVNPCIGGVILFHETLYQKADDGRPFPQVIKSKGGVVGIKVDKGVVPLAGTNGETTTQGLDGLSERCAQYKKDGADFAKWRCVLKIGEHTPSALAIMENANVLARYASICQQNGIVPIVEPEILPDGDHDLKRCQYVTEKVLAAVYKALSDHHIYLEGTLLKPNMVTPGHACTQKFSHEEIAMATVTALRRTVPPAVTGITFLSGGQSEEEASINLNAINKCPLLKPWALTFSYGRALQASALKAWGGKKENLKAAQEEYVKRALVRIGRRWAGCLGGWDSEKSPSHSTPLPA

SEQ ID NO: 712 - protein, 364 aa, Homo Sapiens; identical to SEQ ID NO: 707

SEQ ID NO: 713 - protein, 368 aa, Homo Sapiens
MPYQYPALTPEQKKELSDIAHRIVAPGKGILAADESTGSIAKRLQSIGTENTEENRRFYRQLLLTADDRVNPCIGGVILFHETLYQKADDGRPFPQVIKSKGGVVGIKVDKGVVPLAGTNGETTTQGLDGLSERCAQYKKDGADFAKWRCVLKIGEHTPSALAIMENANVLARYASICQQVGLQNGIVPIVEPEILPDGDHDLKRCQYVTEKVLAAVYKALSDHHIYLEGTLLKPNMVTPGHACTQKFSHEEIAMATVTALRRTVPPAVTGITFLSGGQSEEEASINLNAINKCPLLKPWALTFSYGRALQASALKAWGGKKENLKAAQEEYVKRALANSLACQGKYTPSGQAGAAASESLFVSNHAY

SEQ ID NO: 714 - protein, 140 aa, Homo Sapiens
MPYQYPALTPEQKKELSDIAHRIVAPGSIAKRLQSIGTENTEENRRFYRQLLLTADDRVNPCIGGVILFHETLYQKADDGRPFPQVIKSKGGVVGIKVDKGVVPLAGTNGETTTQGLDGLSERCAQYKKDGADFAKWRCV

SEQ ID NO: 715 - protein, 162 aa, Homo Sapiens
MPYQYPALTPEQKKELSDIAHRIVAPGSIAKRLQSIGTENTEENRRFYRQLLLTADDRVNPCIGGVILFHETLYQKADDGRPFPQVIKSKGGVVGIKVDKGVVPLAGTNGETTTQGLDGLSERCAQYKKDGADFAKWRCVLKIGEHTPSALAIMENANVLAR

SEQ ID NO: 716 - protein, 204 aa, Homo Sapiens
RRFYRQLLLTADDRVNPCIGGVILFHETLYQKADDGRPFPQVIKSKGGVVGIKVDKGVVPLAGTNGETTTQGLDGLSERCAQYKKDGADFAKWRCVLKIGEHTPSALAIMENANVLARYASICQQVLAAVYKALSDHHIYLEGTLLKPNMVTPGHACTQKFSHEEIAMATVTALRRTVPPAVTGITFLSGGQSEEEASINLNAI

SEQ ID NO: 717 - protein, 130 aa, Homo Sapiens
  misc_feature (1)..(1): Xaa can be any naturally occurring amino acid
XPGHACTQKFSHEEIAMATVTALRRTVPPAVTGITFLSGGQSEEEASINLNAINKCPLLKPWALTFSYGRALQASALKAWGGKKENLKAAQEEYVKRALANSLACQGKYTPSGQAGAAASESLFVSNHAY

SEQ ID NO: 718 - protein, 464 aa, Homo Sapiens
MAASCLVLLALCLLLPLLLLGGWKRWRRGRAARHVVAVVLGDVGRSPRMQYHALSLAMHGFSVTLLGFCNSKPHDELLQNNRIQIVGLTELQSLAVGPRVFQYGVKVVLQAMYLLWKLMWREPGAYIFLQNPPGLPSIAVCWFVGCLCGSKLVIDWHNYGYSIMGLVHGPNHPLVLLAKWYEKFFGRLSHLNLCVTNAMREDLADNWHIRAVTVYDKPASFFKETPLDLQHRLFMKLGSMHSPFRARSEPEDPVTERSAFTERDAGSGLVTRLRERPALLVSSTSWTEDEDFSILLAALEKFEQLTLDGHNLPSLVCVITGKGPLREYYSRLIHQKHFQHIQVCTPWLEAEDYPLLLGSADLGVCLHTSSSGLDLPMKVVDMFGCCLPVCAVNFKCLHELVKHEENGLVFEDSEELAAQLQMLFSNFPDPAGKLNQFRKNLRESQQLRWDESWVQTVLPLVMDT

SEQ ID NO: 719 - protein, 184 aa, Homo Sapiens
MAASCLVLLALCLLLPLLLLGGWKRWRRGRAARHVVAVVLGDVGRSPRMQYHALSLAMHGFSVTLLGFCNSKPHDELLQNNRIQIVGLTELQSLAVGPRVFQYGVKVVLQAMYLLWKLMWREPGAYIFLQVCLALLSAGSWAAFVEASSSLTGTTMATPSWVWCMAPTIPSFCWPSGTRSSLGA

SEQ ID NO: 720 - protein, 84 aa, Homo Sapiens
MAASCLVLLALCLLLPLLLLGGWKRWRRGRAARHVVAVVLGDVGRSPRMQYHALSLAMHGFSVTLLGFCSEWPRVWEGRCSLSR

SEQ ID NO: 721 - protein, 168 aa, Homo Sapiens
MYLLWKLMWREPGAYIFLQNPPGLPSIAVCWFVGCLCGSKLVIDWHNYGYSIMGLVHGPNHPLVLLAKWYEKFFGRLSHLNLCVTNAMREDLADNWHIRAVTVYDKPASFFKETPLDLQHRLFMKLGSMHSPFRARSEPEDPVTERSAFTERDAGSGLVTRLRERPAL

SEQ ID NO: 722 - protein, 353 aa, Homo Sapiens
MYLLWKLMWREPGAYIFLQNPPGLPSIAVCWFVGCLCGSKLVIDWHNYGYSIMGLVHGPNHPLVLLAKWYEKFFGRLSHLNLCVTNAMREDLADNWHIRAVTVYDKPASFFKETPLDLQHRLFMKLGSMHSPFRARSEPEDPVTERSAFTERDAGSGLVTRLRERPALLVSSTSWTEDEDFSILLAALEKFEQLTLDGHNLPSLVCVITGKGPLREYYSRLIHQKHFQHIQVCTPWLEAEDYPLLLGSADLGVCLHTSSSGLDLPMKVVDMFGCCLPVCAVNFKCLHELVKHEENGLVFEDSEELAAQLQMLFSNFPDPAGKLNQFRKNLRESQQLRWDESWVQTVLPLVMDT

SEQ ID NO: 723 - protein, 353 aa, Homo Sapiens; identical to SEQ ID NO: 722

SEQ ID NO: 724 - protein, 324 aa, Homo Sapiens
MAPLLLQLAVLGAALAAAALVLISIVAFTTATKMPALHRHEEEKFFLNAKGQKETLPSIWDSPTKQLSVVVPSYNEEKRLPVMMDEALSYLEKRQKRDPAFTYEVIVVDDGSKDQTSKVAFKYCQKYGSDKVRVITLVKNRGKGGAIRMGIFSSRGEKILMADADGATKFPDVEKLEKGLNDLQPWPNQMAIACGSRAHLEKESIAQRSYFRTLLMYGFHFLVWFLCVKGIRDTQCGFKLFTREAASRTFSSLHVERWAFDVELLYIAQFFKIPIAEIAVNWTEIEGSKLVPFWSWLQMGKDLLFIRLRYLTGAWRLEQTRKMN

SEQ ID NO: 725 - protein, 294 aa, Homo Sapiens
MAPLLLQLAVLGAALAAAALVLISIVAFTTATKMPALHRHEEEKFFLNAKGQKETLPSIWDSPTKQLSVVVPSYNEEKRLPVMMDEALSYLEKRQKYGSDKVRVITLVKNRGKGGAIRMGIFSSRGEKILMADADGATKFPDVEKLEKGLNDLQPWPNQMAIACGSRAHLEKESIAQRSYFRTLLMYGFHFLVWFLCVKGIRDTQCGFKLFTREAASRTFSSLHVERWAFDVELLYIAQFFKIPIAEIAVNWTEIEGSKLVPFWSWLQMGKDLLFIRLRYLTGAWRLEQTRKMN

SEQ ID NO: 726 - protein, 102 aa, Homo Sapiens
MASRGARQRLKGSGASSGDTAPAADKLRELLGSREAGGAEHRTEHTTSSMGKGFRLGNIPQHMPFAPMLTCCFMPGQLHFMQEFYKLIRFLCFTFCDVFWLL

SEQ ID NO: 727 - protein, 168 aa, Homo Sapiens
MASRGARQRLKGSGASSGDTAPAADKLRELLGSREAGGAEHRTELSGNKAGQVWAPEGSTAFKCLLSARLCAALLSNISDCDETFNYWEPTHYLIYGEGFQTWEYSPAYAIRSYAYLLLHAWPAAFHARILQTNKGCVQEVWVARESNDASLLGSQHWHVLLIISIPS

SEQ ID NO: 728 - protein, 618 aa, Homo Sapiens
MASRGARQRLKGSGASSGDTAPAADKLRELLGSREAGGAEHRTELSGNKAGQVWAPEGSTAFKCLLSARLCAALLSNISDCDETFNYWEPTHYLIYGEGFQTWEYSPAYAIRSYAYLLLHAWPAAFHARILQTNKILVFYFLRCLLAFVSCICELYFYKAVCKKFGLHVSRMMLAFLVLSTGMFCSSSAFLPSSFCMYTTLIAMTGWYMDKTSIAVLGVAAGAILGWPFSAALGLPIAFDLLVMKHRWKSFFHWSLMALILFLVPVVVIDSYYYGKLVIAPLNIVLYNVFTPHGPDLYGTEPWYFYLINGFLNFNVAFALALLVLPLTSLMEYLLQRFHVQNLGHPYWLTLAPMYIWFIIFFIQPHKEERFLFPVYPLICLCGAVALSALQHSFLYFQKCYHFVFQRYRLEHYTVTSNWLALGTVFLFGLLSFSRSVALFRGYHGPLDLYPEFYRIATDPTIHTVPEGRPVNVCVGKEWYRFPSSFLLPDNWQLQFIPSEFRGQLPKPFAEGPLATRIVPTDMNDQNLEEPSRYIDISKCHYLVDLDTMRETPREPKYSSNKEEWISLAYRPFLDASRSSKLLRAFYVPFLSDQYTVYVNYTILKPRKAKQIRKKSGG

SEQ ID NO: 729 - protein, 611 aa, Homo Sapiens
MASRGARQRLKGSGASSGDTAPAADKLRELLGSREAGGAEHRTELSGNKAGQVWAPEGSTAFKCLLSARLCAALLSNISDCDETFNYWEPTHYLIYGEGFQTWEYSPAYAIRSYAYLLLHAWPAAFHARILQTNKILVFYFLRCLLAFVSCICELYFYKAVCKKFGLHVSRMMLAFLVLSTGMFCSSSAFLPSSFCMYTTLIAMTGWYMDKTSIAVLGVAAGAILGWPFSAALGLPIAFDLLVMKHRWKSFFHWSLMALILFLVPVVVIDSYYYGKLVIAPLNIVLYNVFTPHGPDLYGTEPWYFYLINGFLNFNVAFALALLVLPLTSLMEYLLQRFHVQNLGHPYWLTLAPMYIWFIIFFIQPHKEERFLFPVYPLICLCGAVALSALQKCYHFVFQRYRLEHYTVTSNWLALGTVFLFGLLSFSRSVALFRGYHGPLDLYPEFYRIATDPTIHTVPEGRPVNVCVGKEWYRFPSSFLLPDNWQLQFIPSEFRGQLPKPFAEGPLATRIVPTDMNDQNLEEPSRYIDISKCHYLVDLDTMRETPREPKYSSNKEEWISLAYRPFLDASRSSKLLRAFYVPFLSDQYTVYVNYTILKPRKAKQIRKKSGG

SEQ ID NO: 730 - protein, 198 aa, Homo Sapiens
MASRGARQRLKGSGASSGDTAPAADKLRELLGSREAGGAEHRTELSGNKAGQVWAPEGSTAFKCLLSARLCAALLSNISDCDETFNYWEPTHYLIYGEGFQTWEYSPAYAIRSYAYLLLHAWPAAFHARILQTNKILVFYFLRCLLAFVSCICELYFYKAVCKKFGLHVSRMMLAFLVLSTGMFCSSSVYPLPLICWS

SEQ ID NO: 731 - protein, 134 aa, Homo Sapiens
MASRGARQRLKGSGASSGDTAPAADKLRELLGSREAGGAEHRTELSGNKAGQVWAPEGSTAFKCLLSARLCAALLSNISDCDETFNYWEPVDTLPHLWGRVSDLGIFPSICHSLLCLPVASCLASCISCKNSTN

SEQ ID NO: 732 - protein, 447 aa, Homo Sapiens
MMLAFLVLSTGMFCSSSAFLPSSFCMYTTLIAMTGWYMDKTSIAVLGVAAGAILGWPFSAALGLPIAFDLLVMKHRWKSFFHWSLMALILFLVPVVVIDSYYYGKLVIAPLNIVLYNVFTPHGPDLYGTEPWYFYLINGFLNFNVAFALALLVLPLTSLMEYLLQRFHVQNLGHPYWLTLAPMYIWFIIFFIQPHKEERFLFPVYPLICLCGAVALSALQHSFLYFQKCYHFVFQRYRLEHYTVTSNWLALGTVFLFGLLSFSRSVALFRGYHGPLDLYPEFYRIATDPTIHTVPEGRPVNVCVGKEWYRFPSSFLLPDNWQLQFIPSEFRGQLPKPFAEGPLATRIVPTDMNDQNLEEPSRYIDISKCHYLVDLDTMRETPREPKYSSNKEEWISLAYRPFLDASRSSKLLRAFYVPFLSDQYTVYVNYTILKPRKAKQIRKKSGG

SEQ ID NO: 733 - protein, 440 aa, Homo Sapiens
MMLAFLVLSTGMFCSSSAFLPSSFCMYTTLIAMTGWYMDKTSIAVLGVAAGAILGWPFSAALGLPIAFDLLVMKHRWKSFFHWSLMALILFLVPVVVIDSYYYGKLVIAPLNIVLYNVFTPHGPDLYGTEPWYFYLINGFLNFNVAFALALLVLPLTSLMEYLLQRFHVQNLGHPYWLTLAPMYIWFIIFFIQPHKEERFLFPVYPLICLCGAVALSALQKCYHFVFQRYRLEHYTVTSNWLALGTVFLFGLLSFSRSVALFRGYHGPLDLYPEFYRIATDPTIHTVPEGRPVNVCVGKEWYRFPSSFLLPDNWQLQFIPSEFRGQLPKPFAEGPLATRIVPTDMNDQNLEEPSRYIDISKCHYLVDLDTMRETPREPKYSSNKEEWISLAYRPFLDASRSSKLLRAFYVPFLSDQYTVYVNYTILKPRKAKQIRKKSGG

SEQ ID NO: 734 - protein, 24 aa, Homo Sapiens
  misc_feature (1)..(1): Xaa can be any naturally occurring amino acid
XEEWISLAYRPFLDASRVSLCCPG

SEQ ID NO: 735 - protein, 35 aa, Homo Sapiens
  misc_feature (1)..(1): Xaa can be any naturally occurring amino acid
XKYSSNKEEWISLAYRPFLDASSFEGWKTKITMPV

SEQ ID NO: 736 - protein, 207 aa, Homo Sapiens
  misc_feature (1)..(1): Xaa can be any naturally occurring amino acid
XTVFLFGLLSFSRSVALFRGYHGPLDLYPEFYRIATDPTIHTVPEGRPVNVCVGKEWYRFPSSFLLPDNWQLQFIPSEFRGQLPKPFAEGPLATRIVPTDMNDQNLEEPSRYIDISKCHYLVDLDTMRETPREPKYSSNKEEWISLAYRPFLDASRSSKLLRAFYVPFLSDQYTVYVNYTILKPRKAKQIRKKSGDRRRAEPTYRKN

SEQ ID NO: 737 - protein, 111 aa, Homo Sapiens
MRPLKPGAPLPALFLLALALSPHGAHGRPRGRRGARVTDKEPKPLLFLPAAGAGRTPSGSRSAEIFPRDSNLKDKFIKHFTGPVTFSPECSKHFHRLYYNTRECSTPAYIS

SEQ ID NO: 738 - protein, 129 aa, Homo Sapiens
MRPLKPGAPLPALFLLALALSPHGAHGRPRGRRGARVTDKEPKPLLFLPAAGAGRTPSGSRSAEIFPRDSNLKDKFIKHFTGPVTFSPECSKHFHRLYYNTRECSTPAYYKRCARLLTRLAVSPLCSQT

SEQ ID NO: 739 - protein, 59 aa, Homo Sapiens
MKDKFLKHLTGPLYFSPKCSKHFHRLYHNTRDCTIPAYYKRCARLLTRLAVSPVCMEDK

SEQ ID NO: 740 - protein, 59 aa, Homo Sapiens; identical to SEQ ID NO: 739

SEQ ID NO: 741 - protein, 60 aa, Homo Sapiens
MKDKFLKHLTGPLYFSPKCSKHFHRLYHNTRDCTIPAYYKRCARLLTRLAVSPVCMEDKQ

SEQ ID NO: 742 - protein, 151 aa, Homo Sapiens
MRGPGHPLLLGLLLVLGAAGRGRGGAEPREPADGQALLRLVVELVQELRKHHSAEHKGLQLLGRDCALGRAEAAGLGPSPEQRVEIVPRDLRMKDKFLKHLTGPLYFSPKCSKHFHRLYHNTRDCTIPAYYKRCARLLTRLAVSPVCMEDK

SEQ ID NO: 743 - protein, 152 aa, Homo Sapiens
MRGPGHPLLLGLLLVLGAAGRGRGGAEPREPADGQALLRLVVELVQELRKHHSAEHKGLQLLGRDCALGRAEAAGLGPSPEQRVEIVPRDLRMKDKFLKHLTGPLYFSPKCSKHFHRLYHNTRDCTIPAYYKRCARLLTRLAVSPVCMEDKQ

SEQ ID NO: 744 - protein, 91 aa, Homo Sapiens
MRGPGHPLLLGLLLVLGPSPEQRVEIVPRDLRMKDKFLKHLTGPLYFSPKCSKHFHRLYHNTRDCTIPAYYKRCARLLTRLAVSPVCMEDK

SEQ ID NO: 745 - protein, 102 aa, Homo Sapiens
  misc_feature (1)..(1): Xaa can be any naturally occurring amino acid
XHHSAEHKGLQLLGRDCALGRAEAAGLGPSPEQRVEIVPRDLRMKDKFLKHLTGPLYFSPKCSKHFHRLYHNTRDCTIPAYYKRCARLLTRLAVSPVCMEDK

SEQ ID NO: 746 - protein, 112 aa, Homo Sapiens
AAAVGSVATLATEPGEDAFRKLFRFYRQSRPGTADLEGVIDFSAAHAARGKGPGAQKVIKSQLNVSSVSEQNAYRAGLQPVSKWQAYGLKGYPGIKKRLNGDPEVYWRNCVG

SEQ ID NO: 747 - protein, 389 aa, Homo Sapiens
MGKMAAAVGSVATLATEPGEDAFRKLFRFYRQSRPGTADLEGVIDFSAAHAARGKGPGAQKVIKSQLNVSSVSEQNAYRAGLQPVSKWQAYGLKGYPGFIFIPNPFLPGYQWHWVKQCLKLYSQKPNVCNLDKHMSKEETQDLWEQSKEFLRYKEATKRRPRSLLEKLRWVTVGYHYNWDSKKYSADHYTPFPSDLGFLSEQVAAACGFEDFRAEAGILNYYRLDSTLGIHVDRSELDHSKPLLSFSFGQSAIFLLGGLQRDEAPTAMFMHSGDIMIMSGFSRLLNHAVPRVLPNPEGEGLPHCLEAPLPAVLPRDSMVEPCSMEDWQVCASYLKTARVNMTVRQVLATDQNFPLEPIEDEKRDISTEGFCHLDDQNSEVKRARINPDS

SEQ ID NO: 748 - protein, 116 aa, Homo Sapiens
MGKMAAAVGSVATLATEPGEDAFRKLFRFYRQSRPGTADLEGVIDFSAAHAARGKGPGAQKVIKSQLNVSSVSEQNAYRAGLQPVSKWQAYGLKGYPGIKKRLNGDPEVYWRNCVG

SEQ ID NO: 749 - protein, 394 aa, Homo Sapiens
MAAASGYTDLREKLKSMTSRDNYKAGSREAAAAAAAAVAAAAAAAAAAEPYPVSGAKRKYQEDSDPERSDYEEQQLQKEEEARKVKSGIRQMRLFSQDECAKIEARIDEVVSRAEKGLYNEHTVDRAPLRNKYFFGEGYTYGAQLQKRGPGQERLYPPGDVDEIPEWVHQLVIQKLVEHRVIPEGFVNSAVINDYQPGGCIVSHVDPIHIFERPIVSVSFFSDSALCFGCKFQFKPIRVSEPVLSLPVRRGSVTVLSGYAADEITHCIRPQDIKERRAVIILRKTRLDAPRLETKSLSSSVLPPSYASDRLSGNNRDPALKPKRSHRKADPDAAHRPRILEMDKEENRRSVLLPTHRRRGSFSSENYWRKSYESSEDCSEAAGSPARKVKMRRH

SEQ ID NO: 750 - protein, 53 aa, Homo Sapiens
MDKEENRRSVLLPTHRRRGSFSSENYWRKSYESSEDCSEAAGSPARKVKMRRH

SEQ ID NO: 751 - protein, 528 aa, Homo Sapiens
MQGPWVLLLLGLRLQLSLGVIPAEEENPAFWNRQAAEALDAAKKLQPIQKVAKNLILFLGDGLGVPTVTATRILKGQKNGKLGPETPLAMDRFPYLALSKTYNVDRQVPDSAATATAYLCGVKANFQTIGLSAAARFNQCNTTRGNEVISVMNRAKQAGKSVGVVTTTRVQHASPAGTYAHTVNRNWYSDADMPASARQEGCQDIATQLISNMDIDVILGGGRKYMFPMGTPDPEYPADASQNGIRLDGKNLVQEWLAKHQGAWYVWNRTELMQASLDQSVTHLMGLFEPGDTKYEIHRDPTLDPSLMEMTEAALRLLSRNPRGFYLFVEGGRIDHGHHEGVAYQALTEAVMFDDAIERAGQLTSEEDTLTLVTADHSHVFSFGGYTLRGSSIFGLAPSKAQDSKAYTSILYGNGPGYVFNSGVRPDVNESESGSPDYQQQAAVPLSSETHGGEDVAVFARGPQAHLVHGVQEQSFVAHVMAFAACLEPYTACDLAPPACTTDAAHPVAASLPLLAGTLLLLGASAAP

SEQ ID NO: 752 - protein, 50 aa, Homo Sapiens
MQGPWVLLLLGLRLQLSLGVIPGNEAPQAVPHTGHPLSQADLISTLPLAS

SEQ ID NO: 753 - protein, 469 aa, Homo Sapiens
MFLGDGMGVSTVTAARILKGQLHHNPGEETRLEMDKFPFVALSKTYNTNAQVPDSAGTATAYLCGVKANEGTVGVSAATERSRCNTTQGNEVTSILRWAKDAGKSVGIVTTTRVNHATPSAAYAHSADRDWYSDNEMPPEALSQGCKDIAYQLMHNIRDIDVIMGGGRKYMYPKNKTDVEYESDEKARGTRLDGLDLVDTWKSFKPRYKHSHFIWNRTELLTLDPHNVDYLLGLFEPGDMQYELNRNNVTDPSLSEMVVVAIQILRKNPKGFFLLVEGGRIDHGHHEGKAKQALHEAVEMDRAIGQAGSLTSSEDTLTVVTADHSHVFTFGGYTPRGNSIFGLAPMLSDTDKKPFTAILYGNGPGYKVVGGERENVSMVDYAHNNYQAQSAVPLRHETHGGEDVAVFSKGPMAHLLHGVHEQNYVPHVMAYAACIGANLGHCAPASSAGSLAAGPLLLALALYPLSVLF

SEQ ID NO: 754 - protein, 524 aa, Homo Sapiens
MISPFLVLAIGTCLTNSLVPEKEKDPKYWRDQAQETLKYALELQKLNTNVAKNVIMFLGDGMGVSTVTAARILKGQLHHNPGEETRLEMDKFPFVALSKTYNTNAQVPDSAGTATAYLCGVKANEGTVGVSAATERSRCNTTQGNEVTSILRWAKDAGKSVGIVTTTRVNHATPSAAYAHSADRDWYSDNEMPPEALSQGCKDIAYQLMHNIRDIDVIMGGGRKYMYPKNKTDVEYESDEKARGTRLDGLDLVDTWKSFKPRYKHSHFIWNRTELLTLDPHNVDYLLGLFEPGDMQYELNRNNVTDPSLSEMVVVAIQILRKNPKGFFLLVEGGRIDHGHHEGKAKQALHEAVEMDRAIGQAGSLTSSEDTLTVVTADHSHVFTFGGYTPRGNSIFGLAPMLSDTDKKPFTAILYGNGPGYKVVGGERENVSMVDYAHNNYQAQSAVPLRHETHGGEDVAVFSKGPMAHLLHGVHEQNYVPHVMAYAACIGANLGHCAPASSAGSLAAGPLLLALALYPLSVLF

SEQ ID NO: 755 - protein, 524 aa, Homo Sapiens; identical to SEQ ID NO: 754

SEQ ID NO: 756 - protein, 447 aa, Homo Sapiens
MPWSFRSSTPTWLRMSSCSWEMTYNTNAQVPDSAGTATAYLCGVKANEGTVGVSAATERSRCNTTQGNEVTSILRWAKDAGKSVGIVTTTRVNHATPSAAYAHSADRDWYSDNEMPPEALSQGCKDIAYQLMHNIRDIDVIMGGGRKYMYPKNKTDVEYESDEKARGTRLDGLDLVDTWKSFKPRYKHSHFIWNRTELLTLDPHNVDYLLGLFEPGDMQYELNRNNVTDPSLSEMVVVAIQILRKNPKGFFLLVEGGRIDHGHHEGKAKQALHEAVEMDRAIGQAGSLTSSEDTLTVVTADHSHVFTFGGYTPRGNSIFGLAPMLSDTDKKPFTAILYGNGPGYKVVGGERENVSMVDYAHNNYQAQSAVPLRHETHGGEDVAVFSKGPMAHLLHGVHEQNYVPHVMAYAACIGANLGHCAPASSAGSLAAGPLLLALALYPLSVLF

SEQ ID NO: 757 - protein, 216 aa, Homo Sapiens
  misc_feature (1)..(1): Xaa can be any naturally occurring amino acid
XHSHFIWNRTELLTLDPHNVDYLLGGRIDHGHHEGKAKQALHEAVEMDRAIGQAGSLTSSEDTLTVVTADHSHVFTFGGYTPRGNSIFGLAPMLSDTDKKPFTAILYGNGPGYKVVGGERENVSMVDYAHNNYQAQSAVPLRHETHGGEDVAVFSKGPMAHLLHGVHEQNYVPHVMAYAACIGANLGHCAPASSAGSLAAGPLLLALALYPLSVLF

SEQ ID NO: 758 - protein, 535 aa, Homo Sapiens
MLGPCMLLLLLLLGLRLQLSLGIIPVEEENPDFWNREAAEALGAAKKLQPAQTAAKNLIIFLGDGMGVSTVTAARILKGQKKDKLGPEIPLAMDRFPYVALSKTYNVDKHVPDSGATATAYLCGVKGNFQTIGLSAAARFNQCNTTRGNEVISVMNRAKKAGKSVGVVTTTRVQHASPAGTYAHTVNRNWYSDADVPASARQEGCQDIATQLISNMDIDVILGGGRKYMFRMGTPDPEYPDDYSQGGTRLDGKNLVQEWLAKRQGARYVWNRTELMQASLDPSVTHLMGLFEPGDMKYEIHRDSTLDPSLMEMTEAALRLLSRNPRGFFLFVEGGRIDHGHHESRAYRALTETIMFDDAIERAGQLTSEEDTLSLVTADHSHVFSFGGYPLRGSSIFGLAPGKARDRKAYTVLLYGNGPGYVLKDGARPDVTESESGSPEYRQQSAVPLDEETHAGEDVAVFARGPQAHLVHGVQEQTFIAHVMAFAACLEPYTACDLAPPAGTTDAAHPGRSVVPALLPLLAGTLLLLETATAP

SEQ ID NO: 759 - protein, 532 aa, Homo Sapiens
MQGPWVLLLLGLRLQLSLGIIPVEEENPDFWNRQAAEALGAAKKLQPAQTAAKNLIIFLGDGMGVSTVTAARILKGQKKDKLGPETFLAMDRFPYVALSKTYSVDKHVPDSGATATAYLCGVKGNFQTIGLSAAARFNQCNTTRGNEVISVMNRAKKAGKSVGVVTTTRVQHASPAGAYAHTVNRNWYSDADVPASARQEGCQDIATQLISNMDIDVILGGGRKYMFPMGTPDPEYPDDYSQGGTRLDGKNLVQEWLAKHQGARYVWNRTELLQASLDPSVTHLMGLFEPGDMKYEIHRDSTLDPSLMEMTEAALLLLSRNPRGFFLFVEGGRIDHGHHESRAYRALTETIMFDDAIERAGQLTSEEDTLSLVTADHSHVFSFGGYPLRGSSIFGLAPGKARDRKAYTVLLYGNGPGYVLKDGARPDVTESESGSPEYRQQSAVPLDGETHAGEDVAVFARGPQAHLVHGVQEQTFIAHVMAFAACLEPYTACDLAPRAGTTDAAHPGPSVVPALLPLLAGTLLLLGTATAP

SEQ ID NO: 760 - protein, 432 aa, Homo Sapiens
MSASKIPLFKMKDLILILCLLEMSFAVPFFPQQSGTPGMASLSLETMRQLGSLQRLNTLSQYSRYGFGKSFNSLWMHGLLPPHSSLPWMRPREHETQQPSLKPQQPGLKPFLQSAAATTNQATALKEALQPPIHLGHLPLQEGELPLVQQQVAPSDKPPKPELPGVDFADPQGPSLPGMDFPDPQGPSLPGLDFADPQGSTIFQIARLISHGPMPQNKQSPLYPGMLYVPFGANQLNAPARLGIMSSEEVAGGREDPMAYGAMFPGFGGMRPGFEGMPHNPAMGGDFTLEFDSPVAATKGPENEEGGAQGSPMPEANPDNLENPAFLTELEPAPHAGLLALPKDDIPGLPRSPSGKMKGLPSVTPAAADPLMTPELADVYRTYDADMTTSVDFQEEATMDTTMAPNSLQTSMPGNKAQEPEMMHDAWHFQEP

SEQ ID NO: 761 - protein, 447 aa, Homo Sapiens
MSASKIPLFKMKDLILILCLLEMSFAVPFFPQQSGTPGMASLSLETMRQLGSLQRLNTLSQYSRYGFGKSFNSLWMHGLLPPHSSLPWMRPREHETQQYEYSLPVHPPPLPSQPSLKPQQPGLKPFLQSAAATTNQATALKEALQPPIHLGHLPLQEGELPLVQQQVAPSDKPPKPELPGVDFADPQGPSLPGMDFPDPQGPSLPGLDFADPQGSTIFQIARLISHGPMPQNKQSPLYPGMLYVPFGANQLNAPARLGIMSSEEVAGGREDPMAYGAMFPGFGGMRPGFEGMPHNPAMGGDFTLEFDSPVAATKGPENEEGGAQGSPMPEANPDNLENPAFLTELEPAPHAGLLALPKDDIPGLPRSPSGKMKGLPSVTPAAADPLMTPELADVYRTYDADMTTSVDFQEEATMDTTMAPNSLQTSMPGNKAQEPEMMHDAWHFQEP

SEQ ID NO: 762 - protein, 446 aa, Homo Sapiens [sequence omitted]

SEQ ID NO: 763 - protein, 193 aa, Homo Sapiens
HKSKWNITMESYVVHTNYDEYAIFLTKKFSRHHGPTITAKLYGRAPQLRETLLQDFRVVAQGVGIPEDSIFTMADRGECVPGEQEPEPILIPRVRRAVLPQEEEGSGGGQLVTEVTKKEDSCQLGYSAGPCMGMTSRYFYNGTSMACETFQYGGCMGNGNNFVTVRGPCRAFIQLWAFDAVKGKCVLFPYGGC

SEQ ID NO: 764 - protein, 352 aa, Homo Sapiens
MRSLGALLLLLSACLAVSAGPVPTPPDNIQVQENFNISRIYGKWYNLAIGSTCPWLKKIMDRMTVSTLVLGEGATEAEISMTSTRWRKGVCEETSGAYEKTDTDGKFLYHKSKWNITMESYVVHTNYDEYAIFLTKKFSRHHGPTITAKLYGRAPQLRETLLQDFRVVAQGVGIPEDSIFTMADRGECVPGEQEPEPILIPRVRRAVLPQEEEGSGGGQLVTEVTKKEDSCQLGYSAGPCMGMTSRYFYNGTSMACETFQYGGCMGNGNNFVTEKECLQTCRTVAACNLPIVRGPCRAFIQLWAFDAVKGKCVLFPYGGCQGNGNKFYSEKECREYCGVPGDGDEELLRFSN

SEQ ID NO: 765 - protein, 238 aa, Homo Sapiens
MRSLGALLLLLSACLAVSAGPVPTPPDNIQVQENFNISRIYGKWYNLAIGSTCPWLKKIMDRMTVSTLVLGEGATEAEISMTSTRWRKGVCEETSGAYEKTDTDGKFLYHKSKWNITMESYVVHTNYDEYAIFLTKKFSRHHGPTITAKLYGRAPQLRETLLQDFRVVAQGVGIPEDSIFTMADRVNGLEQATQAGPFMKWTKARQVPSTMLTKDTNPGLGWPLGLVLLFTPLSCSVT

SEQ ID NO: 766 - protein, 205 aa, Homo Sapiens
MGTWILFACLLGAAFAMPLPPHPGHPGYINFSYENSHSQAINVDRTALVLTPLKWYQSIRPPYPSYGYEPMGGWLHHQIIPVLSQQHPPTHTLQPHHHIPVVPAQQPVIPQQPMMPVPGQHSMTPIQHHQPNLPPPAQQPYQPQPVQPQPHQPMQPQPPVHPMQPLPPQPPLPPMFPMQPLPPMLPDLTLEAWPSTDKTKREEVD

SEQ ID NO: 767 - protein, 191 aa, Homo Sapiens
MGTWILFACLLGAAFAMPLPPHPGHPGYINFSYEVLTPLKWYQSIRPPYPSYGYEPMGGWLHHQIIPVLSQQHPPTHTLQPHHHIPVVPAQQPVIPQQPMMPVPGQHSMTPIQHHQPNLPPPAQQPYQPQPVQPQPHQPMQPQPPVHPMQPLPPQPPLPPMFPMQPLPPMLPDLTLEAWPSTDKTKREEVD

SEQ ID NO: 768 - protein, 175 aa, Homo Sapiens
MGTWILFACLLGAAFAMPVLTPLKWYQSIRPPYPSYGYEPMGGWLHHQIIPVLSQQHPPTHTLQPHHHIPVVPAQQPVIPQQPMMPVPGQHSMTPIQHHQPNLPPPAQQPYQPQPVQPQPHQPMQPQPPVHPMQPLPPQPPLPPMFPMQPLPPMLPDLTLEAWPSTDKTKREEVD

SEQ ID NO: 769 - protein, 206 aa, Homo Sapiens
MGTWILFACLVGAAFAMPLPPHPGHPGYINFSYENSHSQAINVDRIALVLTPLKWYQSMIRPPYSSYGYEPMGGWLHHQIIPVVSQQHPLTHTLQSHHHIPVVPAQQPRVRQQALMPVPGQQSMTPTQHHQPNLPLPAQQPFQPQPVQPQPHQPMQPQPPVQPMQPLLPQPPLPPMFPLRPLPPILPDLHLEAWPATDKTKQEEVD

SEQ ID NO: 770 - protein, 192 aa, Homo Sapiens
MGTWILFACLVGAAFAMPLPPHPGHPGYINFSYEVLTPLKWYQSMIRPPYSSYGYEPMGGWLHHQIIPVVSQQHPLTHTLQSHHHIPVVPAQQPRVRQQALMPVPGQQSMTPTQHHQPNLPLPAQQPFQPQPVQPQPHQPMQPQPPVQPMQPLLPQPPLPPMFPLRPLPPILPDLHLEAWPATDKTKQEEVD

SEQ ID NO: 771 - protein, 560 aa, Homo Sapiens
MRDLPLTSLALVLSALGALLGTEALRAEEPAVGTSGLIFREDLDWPPGSPQEPLCLVALGGDSNGSSSPLRVVGALSAYEQAFLGAVQRARWGPRDLATFGVCNTGDRQAALPSLRRLGAWLRDPGGQRLVVLHLEEVTWEPTPSLRFQEPPPGGAGPPELALLVLYPGPGPEVTVTRAGLPGAQSLCPSRDTRYLVLAVDRPAGAWRGSGLALTLQPRGEDSRLSTARLQALLFGDDHRCFTRMTPALLLLPRSEPAPLPAHGQLDTVPFPPPRPSAELEESPPSADPFLETLTRLVRALRVPPARASAPRLALDPDALAGFPQGLVNLSDPAALERLLDGEEPLLLLLRPTAATTGDPAPLHDPTSAPWATALARRVAAELQAAAAELRSLPGLPPATAPLLARLLALCPGGPGGLGDPLRALLLLKALQGLRVEWRGRDPRGPGRAQRSAGATAADGPCALRELSVDLRAERSVLIPETYQANNCQGVCGWPQSDRNPRYGNHVVLLLKMQVRGAALARPPCCVPTAYAGKLLISLSEERISAHHVPNMVATECGCR

SEQ ID NO: 772 - protein, 780 aa, Homo Sapiens
MNVRIFYSVSQSPHSLLSLLFYCAILESRISATMPLFKLPAEEKQIDDAMRNFAEKVFASEVKDEGGRQEISPFDVDEICPISHHEMQAHIFHLETLSTSTEARRKKRFQGRKTVNLSIPLSETSSTKLSHIDEYISSSPTYQTVPDFQRVQITGDYASGVTVEDFEIVCKGLYRALCIREKYMQKSFQRFPKTPSKYLRNIDGEAWVANESFYPVFTPPVKKGEDPFRTDNLPENLGYHLKMKDGVVYVYPNEAAVSKDEPKPLPYPNLDTFLDDMNFLLALIAQGPVKTYTHRRLKFLSSKFQVHQMLNEMDELKELKNNPHRDFYNCRKVDTHIHAAACMNQKHLLRFIKKSYQIDADRVVYSTKEKNLTLKELFAKLKMHPYDLTVDSLDVHAGRQTFQRFDKFNDKYNPVGASELRDLYLKTDNYINGEYFATIIKEVGADLVEAKYQHAEPRLSIYGRSPDEWSKLSSWFVCNRIHCPNMTWMIQVPRIYDVFRSKNFLPHFGKMLENIFMPVFEATINPQADPELSVFLKHITGFDSVDDESKHSGHMFSSKSPKPQEWTLEKNPSYTYYAYYMYANIMVLNSLRKERGMNTFLFRPHCGEAGALTHLMTAFMIADDISHGLNLKKSPVLQYLFFLAQIPIAMSPLSNNSLFLEYAKNPFLDFLQKGLMISLSTDDPMQFHFTKEPLMEEYAIAAQVFKLSTCDMCEVARNSVLQCGISHEEKVKFLGDNYLEEGPAGNDIRRTNVAQIRMAYRYETWCYELNLIAEGLKSTE

SEQ ID NO: 773 - protein, 776 aa, Homo Sapiens
MNVRIFYSVSQSPHSLLSLLFYCAILESRISATMPLFKLPEIDDAMRNFAEKVFASEVKDEGGRQEISPFDVDEICPISHHEMQAHIFHLETLSTSTEARRKKRFQGRKTVNLSIPLSETSSTKLSHIDEYISSSPTYQTVPDFQRVQITGDYASGVTVEDFEIVCKGLYRALCIREKYMQKSFQRFPKTPSKYLRNIDGEAWVANESFYPVFTPPVKKGEDPFRTDNLPENLGYHLKMKDGVVYVYPNEAAVSKDEPKPLPYPNLDTFLDDMNFLLALIAQGPVKTYTHRRLKFLSSKFQVHQMLNEMDELKELKNNPHRDFYNCRKVDTHIHAAACMNQKHLLRFIKKSYQIDADRVVYSTKEKNLTLKELFAKLKMHPYDLTVDSLDVHAGRQTFQRFDKFNDKYNPVGASELRDLYLKTDNYINGEYFATIIKEVGADLVEAKYQHAEPRLSIYGRSPDEWSKLSSWFVCNRIHCPNMTWMIQVPRIYDVFRSKNFLPHFGKMLENIFMPVFEATINPQADPELSVFLKHITGFDSVDDESKHSGHMFSSKSPKPQEWTLEKNPSYTYYAYYMYANIMVLNSLRKERGMNTFLFRPHCGEAGALTHLMTAFMIADDISHGLNLKKSPVLQYLFFLAQIPIAMSPLSNNSLFLEYAKNPFLDFLQKGLMISLSTDDPMQFHFTKEPLMEEYAIAAQVFKLSTCDMCEVARNSVLQCGISHEEKVKFLGDNYLEEGPAGNDIRRTNVAQIRMAYRYETWCYELNLIAEGLKSTE

SEQ ID NO: 774 - protein, 191 aa, Homo Sapiens
QCLCSNSQVGVQKIDDAMRNFAEKVFASEVKDEGGRQEISPFDVDEICPISHHEMQAHIFHLETLSTSTEARRKKRFQGRKTVNLSIPLSETSSTKLSHIDEYISSSPTYQTVPDFQRVQITGDYASGVTVEDFEIVCKGLYRALCIREKYMQKSFQRFPKTPSKYLRNIDGEAWVANESFYPVRPIPTGA

SEQ ID NO: 775 - protein, 208 aa, Homo Sapiens
MRSTILLFCLLGSTRSLPLKPALGLPPTKLAPDQGTLPNQQQSNQVFPSLSLIPLTQMLTLGPDLHLLNPAAGMTPGTQTHPLTLGGLNVQQQLHPHVLPIFVTQLGAQGTILSSEELPQIFTSLIIHSLFPGGILPTSQAGANPDVQDGSLPAGGAGVNPATQGTPAGRLPTPSGTDDDFAVTTPAGIQRSTHAIEEATTESANGIQ

SEQ ID NO: 776 - protein, 209 aa, Homo Sapiens
MRSTILLFCLLGSTRSLPQLKPALGLPPTKLAPDQGTLPNQQQSNQVFPSLSLIPLTQMLTLGPDLHLLNPAAGMTPGTQTHPLTLGGLNVQQQLHPHVLPIFVTQLGAQGTILSSEELPQIFTSLIIHSLFPGGILPTSQAGANPDVQDGSLPAGGAGVNPATQGTPAGRLPTPSGTDDDFAVTTPAGIQRSTHAIEEATTESANGIQ

SEQ ID NO: 777 - protein, 105 aa, Homo Sapiens
MKLFWLLFTIGFCWAQYSSNTQQGRTSIVHLFEWRWVDIALECERYLAPKGFGGVQVSPPNENVAIHNPFRPWWERYQPVSYKLCTRSGNEDEFRNMVTRCNNVG

SEQ ID NO: 778 - protein, 226 aa, Homo Sapiens
MKLFWLLFTIGFCWAQYSSNTQQGRTSIVHLFEWRWVDIALECERYLAPKGFGGVQVSPPNENVAIHNPFRPWWERYQPVSYKLCTRSGNEDEFRNMVTRCNNVGVRIYVDAVINHMCGNAVSAGTSSTCGSYFNPGSRDFPAVPYSGWDFNDGKCKTGSGDIENYNDATQVRDCRLSGLLDLALGKDYVRSKIAEYMNHLIDIGVAGFRIDASKHMWPGDIKAIL

SEQ ID NO: 779 - protein, 511 aa, Homo Sapiens
MKLFWLLFTIGFCWAQYSSNTQQGRTSIVHLFEWRWVDIALECERYLAPKGFGGVQVSPPNENVAIHNPFRPWWERYQPVSYKLCTRSGNEDEFRNMVTRCNNVGVRIYVDAVINHMCGNAVSAGTSSTCGSYFNPGSRDFPAVPYSGWDFNDGKCKTGSGDIENYNDATQVRDCRLSGLLDLALGKDYVRSKIAEYMNHLIDIGVAGFRIDASKHMWPGDIKAILDKLHNLNSNWFPEGSKPFIYQEVIDLGGEPIKSSDYFGNGRVTEFKYGAKLGTVIRKWNGEKMSYLKNWGEGWGFMPSDRALVFVDNHDNQRGHGAGGASILTFWDARLYKMAVGFMLAHPYGFTRVMSSYRWPRYFENGKDVNDWVGPPNDNGVTKEVTINPDTTCGNDWVCEHRWRQIRNMVNFRNVVDGQPFTNWYDNGSNQVAFGRGNRGFIVFNNDDWTFSLTLQTGLPAGTYCDVISGDKINGNCTGIKIYVSDDGKAHFSISNSAEDPFIAIHAESKL

SEQ ID NO: 780 - protein, 105 aa, Homo Sapiens; identical to SEQ ID NO: 777

SEQ ID NO: 781 - protein, 226 aa, Homo Sapiens; identical to SEQ ID NO: 778

SEQ ID NO: 782 - protein, 511 aa, Homo Sapiens; identical to SEQ ID NO: 779

SEQ ID NO: 783 - protein, 511 aa, Homo Sapiens; identical to SEQ ID NO: 779

SEQ ID NO: 784 - protein, 511 aa, Homo Sapiens; identical to SEQ ID NO: 779

SEQ ID NO: 785 - protein, 511 aa, Homo Sapiens
MKFFLLLFTIGFCWAQYSPNTQQGRTSIVHLFEWRWVDIALECERYLAPKGFGGVQVSPPNENVAIYNPFRPWWERYQPVSYKLCTRSGNEDEFRNMVTRCNNVGVRIYVDAVINHMCGNAVSAGTSSTCGSYFNPGSRDFPAVPYSGWDFNDGKCKTGSGDIENYNDATQVRDCRLTGLLDLALEKDYVRSKIAEYMNHLIDIGVAGFRLDASKHMWPGDIKAILDKLHNLNSNWFPAGSKPFIYQEVIDLGGEPIKSSDYFGNGRVTEFKYGAKLGTVIRKWNGEKMSYLKNWGEGWGFVPSDRALVFVDNHDNQRGHGAGGASILTFWDARLYKMAVGFMLAHPYGFTRVMSSYRWPRQFQNGNDVNDWVGPPNNNGVIKEVTINPDTTCGNDWVCEHRWRQIRNMVIFRNVVDGQPFTNWYDNGSNQVAFGRGNRGFIVFNNDDWSFSLTLQTGLPAGTYCDVISGDKINGNCTGIKIYVSDDGKAHFSISNSAEDPFIAIHAESKL

SEQ ID NO: 786 - protein, 511 aa, Homo Sapiens; identical to SEQ ID NO: 785

SEQ ID NO: 787 - protein, 209 aa, Homo Sapiens
  misc_feature (1)..(1): Xaa can be any naturally occurring amino acid
XFFLLLFTIGFCWAQYSPNTQQGRTSIVHLFEWRWVDIALECERYLAPKGFGGVQVSPPNENVAIYNPFRPWWERYQPVSYKLCTRSGNEDEFRNMVTRCNNVGVRIYVDAVINHMCGNAVSAGTSSTCGSYFNPGSRDFPAVPYSGWDFNDGKCKTGSGDIENYNDATQVIDLGGEPIKSSDYFGNGRVTEFKYGAKLGTVIRKWNGE

SEQ ID NO: 788 - protein, 86 aa, Homo Sapiens
MKFFLLLFTIGFCWAQYSPNTQQGRTSIVHLFEWRWVDIALECERYLAPKGFGGVQVSPPNENVAIHNPFRPWWERYQPVSYKLCT

SEQ ID NO: 789 - protein, 96 aa, Homo Sapiens
MKFFLLLFTIGFCWAQYSPNTQQGRTSIVHLFEWRWVDIALECERYLAPKGFGGVQVSPPNENVAIHNPFRPWWERYQPVSYKLCTRSGNEDEFRN

SEQ ID NO: 790 - protein, 511 aa, Homo Sapiens
MKFFLLLFTIGFCWAQYSPNTQQGRTSIVHLFEWRWVDIALECERYLAPKGFGGVQVSPPNENVAIHNPFRPWWERYQPVSYKLCTRSGNEDEFRNMVTRCNNVGVRIYVDAVINHMSGNAVSAGTSSTCGSYFNPGSRDFPAVPYSGWDFNDGKCKTGSGDIENYNDATQVRDCRLVGLLDLALEKDYVRSKIAEYMNHLIDIGVAGFRLDASKHMWPGDIKAILDKLHNLNSNWFPAGSKPFIYQEVIDLGGEPIKSSDYFGNGRVTEFKYGAKLGTVIRKWNGEKMSYLKNWGEGWGFMPSDRALVFVDNHDNQRGHGAGGASILTFWDARLYKMAVGFMLAHPYGFTRVMSSYRWPRQFQNGNDVNDWVGPPNNNGVIKEVTINPDTTCGNDWVCEHRWRQIRNMVNFRNVVDGQPFTNWYDNGSNQVAFGRGNRGFIVFNNDDWTFSLTLQTGLPAGTYCDVISGDKINGNCTGIKIYVSDDGKAHFSISNSAEDPFIAIHAESKL

SEQ ID NO: 791 - protein, 370 aa, Homo Sapiens
MKFFLLLFTIGFCWAQYSPNTQQGRTSIVHLFEWRWVDIALECERYLAPKGFGGVQVSPPNENVAIHNPFRPWWERYQPVSYKLCTRSGNEDEFRNMVTRCNNVGVRIYVDAVINHMSGNAVSAGTSSTCGSYFNPGSRDFPAVPYSGWDFNDGKCKTGSGDIENYNDATQVRDCRLVGLLDLALEKDYVRSKIAEYMNHLIDIGVAGFRLDASKHMWPGDIKAILDKLHNLNSNWFPAGSKPFIYQEVIDLGGEPIKSSDYFGNGRVTEFKYGAKLGTVIRKWNGEKMSYLKNWGEGWGFMPSDRALVFVDNHDNQRGHGAGGASILTFWDARLYKMAVGFMLAHPYGFTRVMSSYRWPRQFQNGNEHG

SEQ ID NO: 792 - protein, 511 aa, Homo Sapiens; identical to SEQ ID NO: 790

SEQ ID NO: 793 - protein, 147 aa, Homo Sapiens
MVMGLGVLLLVFVLGLGLTPPTLAQDNSRYTHFLTQHYDAKPQGRDDRYCESIMRRRGLTSPCKDINTFIHGNKRSIKAICENKNGNPHRENLRISKSSFQVTTCKLHGGSPWPPCQYRATAGFRNVVVACENGLPVHLDQSIFRRP

SEQ ID NO: 794 - protein, 147 aa, Homo Sapiens; identical to SEQ ID NO: 793

SEQ ID NO: 795 - protein, 129 aa, Homo Sapiens
MAPRGPEQEECEGLLQQWREEGLSQVLSTASEGPLIDKGLAQSSLALLMDNPGEENAASEDRWSSRQLSDLRAAENLDEPFPEMLGEEPLLEVEGVEGSMWAAIPMQSEPQYADCAALPVGALATEQWE

SEQ ID NO: 796 - protein, 67 aa, Homo Sapiens
MEGVTDTKPERPAGWAESVLEEDASELEPAFSRTVGTIQHCLHLTSVYTHFLPQRGRPEVTTMPLGL

SEQ ID NO: 797 - protein, 670 aa, Homo Sapiens
MIASCLCYLLLPATRLFRALSDAFFTCRKNVLLANSSSPQVEGDFAMAPRGPEQEECEGLLQQWREEGLSQVLSTASEGPLIDKGLAQSSLALLMDNPGEENAASEDRWSSRQLSDLRAAENLDEPFPEMLGEEPLLEVEGVEGSMWAAIPMQSEPQYADCAALPVGALATEQWEEDPAVLAWSIAPEPVPQEEASIWPFEGLGQLQPPAVEIPYHEILWREWEDFSTQPDAQGLKAGDGPQFQFTLMSYNILAQDLMQQSSELYLHCHPDILNWNYRFVNLMQEFQHWDPDILCLQEVQEDHYWEQLEPSLRMMGFTCFYKRRTGCKTDGCAVCYKPTRFRLLCASPVEYFRPGLELLNRDNVGLVLLLQPLVPEGLGQVSVAPLCVANTHILYNPRRGDVKLAQMAILLAEVDKVARLSDGSHCPIILCGDLNSVPDSPLYNFIRDGELQYHGMPAWKVSGQEDFSHQLYQRKLQAPLWPSSLGITDCCQYVTSCHPKRSERRKYGRDFLLRFRFCSIACQRPVGLVLMEGVTDTKPERPAGWAESVLEEDASELEPAFSRTVGTIQHCLHLTSVYTHFLPQRGRPEVTTMPLGLGMTVDYIFFSAESCENGNRTDHRLYRDGTLKLLGRLSLLSEEILWAANGLPNPFCSSDHLCLLASFGMEVTAP

SEQ ID NO: 798 - protein, 235 aa, Homo Sapiens
MSQNMGCYFLFLSWFPYSHPSFSTQVSGQEDFSHQLYQRKLQAPLWPSSLGITDCCQYVTSCHPKRSERRKYGRDFLLRFRFCSIACQRPVGLVLMEGVTDTKPERPAGWAESVLEEDASELEPAFSRTVGTIQHCLHLTSVYTHFLPQRGRPEVTTMPLGLGMTVDYIFFSAESCENGNRTDHRLYRDGTLKLLGRLSLLSEEILWAANGLPNPFCSSDHLCLLASFGMEVTAP

SEQ ID NO: 799 - protein, 298 aa, Homo Sapiens
MEGKHKEELDTLKEEKENLQGLVTRQTYIIQELEKQLNRATTNNSVLQKQQLELMDTVHNLVNLCTKEGVLLKGGKREEEKPFRDCADVYQAGFNKSGIYTIYINNMPEPKKVFCNMDVNGGGWTVIQHREDGSLDFQRGWKEYKMGFGNPSGEYWLGNEFIFAITSQRQYMLRIELMDWEGNRAYSQYDRFHIGNEKQNYRLYLKGHTGTAGKQSSLILHGADFSTKDADNDNCMCKCALMLTGGWWFDACGPSNLNGMFYTAGQNHGKLNGIKWHYFKGPSYSLRSTTMMIRPLDF

SEQ ID NO: 800 - protein, 297 aa, Homo Sapiens
MEGKHKEELDTLKEEKENLQGLVTRQTYIIQELEKQLNRATTNNSVLQKQQLELMDTVHNLVNLCTKEVLLKGGKREEEKPFRDCADVYQAGFNKSGIYTIYINNMPEPKKVFCNMDVNGGGWTVIQHREDGSLDFQRGWKEYKMGFGNPSGEYWLGNEFIFAITSQRQYMLRIELMDWEGNRAYSQYDRFHIGNEKQNYRLYLKGHTGTAGKQSSLILHGADFSTKDADNDNCMCKCALMLTGGWWFDACGPSNLNGMFYTAGQNHGKLNGIKWHYFKGPSYSLRSTTMMIRPLDF

SEQ ID NO: 801 - protein, 30 aa, Homo Sapiens
MKSEMAQIQQNAVQNHTATMLEIGTSLLSQ

SEQ ID NO: 802 - protein, 497 aa, Homo Sapiens
MTVFLSFAFLAAILTHIGCSNQRRSPENSGRRYNRIQHGQCAYTFILPEHDGNCRESTTDQYNTNALQRDAPHVEPDFSSQKLQHLEHVMENYTQWLQKLENYIVENMKSEMAQIQQNAVQNHTATMLEIGTSLLSQTAEQTRKLTDVETQVLNQTSRLEIQLLENSLSTYKLEKQLLQQTNEILKIHEKNSLLEHKILEMEGKHKEELDTLKEEKENLQGLVTRQTYIIQELEKQLNRATTNNSVLQKQQLELMDTVHNLVNLCTKEVLLKGGKREEEKPFRDCADVYQAGFNKSGIYTIYINNMPEPKKVFCNMDVNGGGWTVIQHREDGSLDFQRGWKEYKMGFGNPSGEYWLGNEFIFAITSQRQYMLRIELMDWEGNRAYSQYDRFHIGNEKQNYRLYLKGHTGTAGKQSSLILHGADFSTKDADNDNCMCKCALMLTGGWWFDACGPSNLNGMFYTAGQNHGKLNGIKWHYFKGPSYSLRSTTMMIRPLDF

SEQ ID NO: 803 - protein, 498 aa, Homo Sapiens
MTVFLSFAFLAAILTHIGCSNQRRSPENSGRRYNRIQHGQCAYTFILPEHDGNCRESTTDQYNTNALQRDAPHVEPDFSSQKLQHLEHVMENYTQWLQKLENYIVENMKSEMAQIQQNAVQNHTATMLEIGTSLLSQTAEQTRKLTDVETQVLNQTSRLEIQLLENSLSTYKLEKQLLQQTNEILKIHEKNSLLEHKILEMEGKHKEELDTLKEEKENLQGLVTRQTYIIQELEKQLNRATTNNSVLQKQQLELMDTVHNLVNLCTKEGVLLKGGKREEEKPFRDCADVYQAGFNKSGIYTIYINNMPEPKKVFCNMDVNGGGWTVIQHREDGSLDFQRGWKEYKMGFGNPSGEYWLGNEFIFAITSQRQYMLRIELMDWEGNRAYSQYDRFHIGNEKQNYRLYLKGHTGTAGKQSSLILHGADFSTKDADNDNCMCKCALMLTGGWWFDACGPSNLNGMFYTAGQNHGKLNGIKWHYFKGPSYSLRSTTMMIRPLDF

SEQ ID NO: 804 - protein, 496 aa, Homo Sapiens
MWQIVFFTLSCDLVLAAAYNNFRKSMDSIGKKQYQVQHGSCSYTFLLPEMDNCRSSSSPYVSNAVQRDAPLEYDDSVQRLQVLENIMENNTQWLMKLENYIQDNMKKEMVEIQQNAVQNQTAVMIEIGTNLLNQTAEQTRKLTDVEAQVLNQTTRLELQLLEHSLSTNKLEKQILDQTSEINKLQDKNSFLEKKVLAMEDKHIIQLQSIKEEKDQLQVLVSKQNSIIEELEKKIVTATVNNSVLQKQQHDLMETVNNLLTMMSTSNSAKDPTVAKEEQISFRDCAEVFKSGHTTNGIYTLTFPNSTEEIKAYCDMEAGGGGWTIIQRREDGSVDFQRTWKEYKVGFGNPSGEYWLGNEFVSQLTNQQRYVLKIHLKDWEGNEAYSLYEHFYLSSEELNYRIHLKGLTGTAGKISSISQPGNDFSTKDGDNDKCICKCSQMLTGGWWFDACGPSNLNGMYYPQRQNTNKFNGIKWYYWKGSGYSLKATTMMIRPADF

SEQ ID NO: 805 - protein, 459 aa, Homo Sapiens
MWQIVFFTLSCDLVLAAAYNNFRKSMDSIGKKQYQVQHGSCSYTFLLPEMDNCRSSSSPYVSNAVQRDAPLEYDDSVQRLQVLENIMENNTQWLMKLENYIQDNMKKEMVEIQQNAVQNQTAVMIEIGTNLLNQTAEQTRKLTDVEAQVLNQTTRLELQLLEHSLSTNKLEKQILDQTSEINKLQDKNSFLEKKVLAMEDKHIIQLQSIKEEKDQLQVLVSKQNSIIEELEKKIVTATVNNSVLQKQQHDLMETVNNLLTMMSTSNSKDPTVAKEEQISFRDCAEVFKSGHTTNGIYTLTFPNSTEEIKAYCDMEAGGGGWTIIQRREDGSVDFQRTWKEYKVGFGNPSGEYWLGNEFVSQLTNQQRYVLKIHLKDWEGNEAYSLYEHFYLSSEELNYRIHLKGLTGTAGKISSISQPGNDFSTKDGDNDKCICKCSQMLTGGRDDFLSSYLYWQGMIS

SEQ ID NO: 806 - protein, 495 aa, Homo Sapiens
MWQIVFFTLSCDLVLAAAYNNFRKSMDSIGKKQYQVQHGSCSYTFLLPEMDNCRSSSSPYVSNAVQRDAPLEYDDSVQRLQVLENIMENNTQWLMKLENYIQDNMKKEMVEIQQNAVQNQTAVMIEIGTNLLNQTAEQTRKLTDVEAQVLNQTTRLELQLLEHSLSTNKLEKQILDQTSEINKLQDKNSFLEKKVLAMEDKHIIQLQSIKEEKDQLQVLVSKQNSIIEELEKKIVTATVNNSVLQKQQHDLMETVNNLLTMMSTSNSKDPTVAKEEQISFRDCAEVFKSGHTTNGIYTLTFPNSTEEIKAYCDMEAGGGGWTIIQRREDGSVDFQRTWKEYKVGFGNPSGEYWLGNEFVSQLTNQQRYVLKIHLKDWEGNEAYSLYEHFYLSSEELNYRIHLKGLTGTAGKISSISQPGNDFSTKDGDNDKCICKCSQMLTGGWWFDACGPSNLNGMYYPQRQNTNKFNGIKWYYWKGSGYSLKATTMMIRPADF

SEQ ID NO: 807 - protein, 444 aa, Homo Sapiens
MWQIVFFTLSCDLVLAAAYNNFRKSMDSIGKKQYQVQHGSCSYTFLLPEMDNCRSSSSPYVSNAVQRDAPLEYDDSVQRLQVLENIMENNTQWLMKVLNQTTRLELQLLEHSLSTNKLEKQILDQTSEINKLQDKNSFLEKKVLAMEDKHIIQLQSIKEEKDQLQVLVSKQNSIIEELEKKIVTATVNNSVLQKQQHDLMETVNNLLTMMSTSNSAKDPTVAKEEQISFRDCAEVFKSGHTTNGIYTLTFPNSTEEIKAYCDMEAGGGGWTIIQRREDGSVDFQRTWKEYKVGFGNPSGEYWLGNEFVSQLTNQQRYVLKIHLKDWEGNEAYSLYEHFYLSSEELNYRIHLKGLTGTAGKISSISQPGNDFSTKDGDNDKCICKCSQMLTGGWWFDACGPSNLNGMYYPQRQNTNKFNGIKWYYWKGSGYSLKATTMMIRPADF

SEQ ID NO: 808 - protein, 503 aa, Homo Sapiens
MLSQLAMLQGSLLLVVATMSVAQQTRQEADRGCETLVVQHGHCSYTFLLPKSEPCPPGPEVSRDSNTLQRESLANPLHLGKLPTQQVKQLEQALQNNTQWLKKLERAIKTILRSKLEQVQQQMAQNQTAPMLELGTSLLNQTTAQIRKLTDMEAQLLNQTSRMDAQMPETFLSTNKLENQLLLQRQKLQQLQGQNSALEKRLQALETKQQEELASILSKKAKLLNTLSRQSAALTNIERGLRGVRHNSSLLQDQQHSLRQLLVLLRHLVQERANASAPAFIMAGEQVFQDCAEIQRSGASASGVYTIQVSNATKPRKVFCDLQSSGGRWTLIQRRENGTVNFQRNWKDYKQGFGDPAGEHWLGNEVVHQLTRRAAYSLRVELQDWEGHEAYAQYEHFHLGSENQLYRLSVVGYSGSAGRQSSLVLQNTSFSTLDSDNDHCLCKCAQVMSGGWWFDACGLSNLNGVYYHAPDNKYKMDGIRWHYFKGPSYSLRASRMMIRPLDI

SEQ ID NO: 809 - protein, 114 aa, Homo Sapiens
MKTFTWTLGVLFFLLVDTGHCRGGQFKIKKINQRRYPRATDGKEEAKKCAYTFLVPEQRITGPICVNTKGQDASTIKDMITRMDLENLKDVLSRQKREIDVLQLVVDVDGNIVN

SEQ ID NO: 810 - protein, 491 aa, Homo Sapiens
MKTFTWTLGVLFFLLVDTGHCRGGQFKIKKINQRRYPRATDGKEEAKKCAYTFLVPEQRITGPICVNTKGQDASTIKDMITRMDLENLKDVLSRQKREIDVLQLVVDVDGNIVNEVKLLRKESRNMNSRVTQLYMQLLHEIIRKRDNSLELSQLENKILNVTTEMLKMATRYRELEVKYASLTDLVNNQSVMITLLEEQCLRIFSRQDTHVSPPLVQVVPQHIPNSQQYTPGLLGGNEIQRDPGYPRDLMPPPDLATSPTKSPFKIPPVTFINEGPFKDCQQAKEAGHSVSGIYMIKPENSNGPMQLWCENSLDPGGWTVIQKRTDGSVNFFRNWENYKKGFGNIDGEYWLGLENIYMLSNQDNYKLLIELEDWSDKKVYAEYSSFRLEPESEFYRLRLGTYQGNAGDSMMWHNGKQFTTLDRDKDMYAGNCAHFHKGGWWYNACAHSNLNGVWYRGGHYRSKHQDGIFWAEYRGGSYSLRAVQMMIKPID

SEQ ID NO: 811 - protein, 491 aa, Homo Sapiens; identical to SEQ ID NO: 810

SEQ ID NO: 812 - protein, 191 aa, Homo Sapiens
MQVWCDQRHDPGGWTVIQRRLDGSVNFFRNWETYKQGFGNIDGEYWLGLENIYWLTNQGNYKLLVTMEDWSGRKVFAEYASFRLEPESEYYKLRLGRYHGNAGDSFTWHNGKQFTTLDRDHDVYTGNCAHYQKGGWWYNACAHSNLNGVWYRGGHYRSRYQDGVYWAEFRGGSYSLKKVVMMIRPNPNTFH

SEQ ID NO: 813 - protein, 493 aa, Homo Sapiens
MRPLCVTCWWLGLLAAMGAVAGQEDGFEGTEEGSPREFIYLNRYKRAGESQDKCTYTFIVPQQRVTGAICVNSKEPEVLLENRVHKQELELLNNELLKQKRQIETLQQLVEVDGGIVSEVKLLRKESRNMNSRVTQLYMQLLHEIIRKRDNALELSQLENRILNQTADMLQLASKYKDLEHKYQHLATLAHNQSEIIAQLEEHCQRVPSARPVPQPPPAAPPRVYQPPTYNRIINQISTNEIQSDQNLKVLPPPLPTMPTLTSLPSSTDKPSGPWRDCLQALEDGHDTSSIYLVKPENTNRLMQVWCDQRHDPGGWTVIQRRLDGSVNFFRNWETYKQGFGNIDGEYWLGLENIYWLTNQGNYKLLVTMEDWSGRKVFAEYASFRLEPESEYYKLRLGRYHGNAGDSFTWHNGKQFTTLDRDHDVYTGNCAHYQKGGWWYNACAHSNLNGVWYRGGHYRSRYQDGVYWAEFRGGSYSLKKVVMMIRPNPNTFH

SEQ ID NO: 814 - protein, 460 aa, Homo Sapiens
MFTIKLLLFIVPLVISSRIDQDNSSFDSLSPEPKSRFAMLDDVKILANGLLQLGHGLKDFVHKTKGQINDIFQKLNIFDQSFYDLSLQTSEIKEEEKELRRTTYKLQVKNEEVKNMSLELNSKLESLLEEKILLQQKVKYLEEQLTNLIQNQPETPEHPEVTSLKTFVEKQDNSIKDLLQTVEDQYKQLNQQHSQIKEIENQLRRTSIQEPTEISLSSKPRAPRTTPFLQLNEIRNVKHDGIPAECTTIYNRGEHTSGMYAIRPSNSQVFHVYCDVISGSPWTLIQHRIDGSQNFNETWENYKYGFGRLDGEFWLGLEKIYSIVKQSNYVLRIELEDWKDNKHYIEYSFYLGNHETNYTLHLVAITGNVPNAIPENKDLVFSTWDHKAKGHFNCPEGYSGGWWWHDECGENNLNGKYNKPRAKSKPERRRGLSWKSQNGRLYSIKSTKMLIHPTDSESFE

SEQ ID NO: 815 - protein, 86 aa, Homo Sapiens
MSGAPTAGAALMLCAATAVLLSAQGGPVQSKSPRFASWDEMNVLAHGLLQLGQGLREHAERTRSQLSALERRLSACGSACQGTEGS

SEQ ID NO: 816 - protein, 96 aa, Homo Sapiens
MSGAPTAGAALMLCAATAVLLSAQGGPVQSKSPRFASWDEMNVLAHGLLQLGQGLREHAERTRSQLSALERRLSACGSACQGTEGSTDLPLAPESR

SEQ ID NO: 817 - protein, 105 aa, Homo Sapiens
MSGAPTAGAALMLCAATAVLLSAQGGPVQSKSPRFASWDEMNVLAHGLLQLGQGLREHAERTRSQLSALERRLSACGSACQGTEGSTDLPLAPESRVDPEVLHSL

SEQ ID NO: 818 - protein, 368 aa, Homo Sapiens
MSGAPTAGAALMLCAATAVLLSAQGGPVQSKSPRFASWDEMNVLAHGLLQLGQGLREHAERTRSQLSALERRLSACGSACQGTEGSTDLPLAPESRVDPEVLHSLQTQLKAQNSRIQQLFHKVAQQQRHLEKQHLRIQHLQSQFGLLDHKHLDHEVAKPARRKRLPEMAQPVDPAHNVSRLHHGGWTVIQRRHDGSVDFNRPWEAYKAGFGDPHGEFWLGLEKVHSITGDRNSRLAVQLRDWDGNAELLQFSVHLGGEDTAYSLQLTAPVAGQLGATTVPPSGLSVPFSTWDQDHDLRRDKNCAKSLSGGWWFGTCSHSNLNGQYFRSIPQQRQKLKKGIFWKTWRGRYYPLQATTMLIQPMAAEAAS

SEQ ID NO: 819 - protein, 406 aa, Homo Sapiens
MSGAPTAGAALMLCAATAVLLSAQGGPVQSKSPRFASWDEMNVLAHGLLQLGQGLREHAERTRSQLSALERRLSACGSACQGTEGSTDLPLAPESRVDPEVLHSLQTQLKAQNSRIQQLFHKVAQQQRHLEKQHLRIQHLQSQFGLLDHKHLDHEVAKPARRKRLPEMAQPVDPAHNVSRLHRLPRDCQELFQVGERQSGLFEIQPQGSPPFLVNCKMTSDGGWTVIQRRHDGSVDFNRPWEAYKAGFGDPHGEFWLGLEKVHSITGDRNSRLAVQLRDWDGNAELLQFSVHLGGEDTAYSLQLTAPVAGQLGATTVPPSGLSVPFSTWDQDHDLRRDKNCAKSLSGGWWFGTCSHSNLNGQYFRSIPQQRQKLKKGIFWKTWRGRYYPLQATTMLIQPMAAEAAS

SEQ ID NO: 820 - protein, 406 aa, Homo Sapiens; identical to SEQ ID NO: 819

SEQ ID NO: 821 - protein, 128 aa, Homo Sapiens
MSGAPTAGAALMLCAATAVLLSAQGGPVQSKSPRFASWDEMNVLAHGLLQLGQGLREHAERTRSQLSALERRLSACGSFTACRHNSRLRTAGSSNSSTRWPSSSGTWRSSTCEFSICKASLASWTTST

SEQ ID NO: 822 - protein, 129 aa, Homo Sapiens
  misc_feature (1)..(1): Xaa can be any naturally occurring amino acid
XPVQSKSPRFASWDEMNVLAHGLLQLGQGLREHAERTRSQLSALERRLSACGSACQGTEGSTDLPLAPESRVDPEVLHSLQTQLKAQNSRIQQLFHKVAQQQRHLEKQHLRIQHLQSQTGLNGGLSHID

SEQ ID NO: 823 - protein, 192 aa, Homo Sapiens
MMSPSQASLLFLNVCIFICGEAVQGNCVHHSTDSSVVNIVEDGSNAKDESKSNDTVCKEDCEESCDVKTKITREEKHFMCRNLQNSIVSYTRSTKKLLRNMMDEQQASLDYLSNQVMCDMDYRGGGRTVIQKRIDGIIDFQRLWCDYLDGFGDLLGEFWLGLKKIFYIVNQKNTSFMLYVALESEDDTLAYA

SEQ ID NO: 824 - protein, 388 aa, Homo Sapiens
MMSPSQASLLFLNVCIFICGEAVQGNCVHHSTDSSVVNIVEDGSNAKDESKSNDTVCKEDCEESCDVKTKITREEKHFMCRNLQNSIVSYTRSTKKLLRNMMDEQQASLDYLSNQVNELMNRVLLLTTEVFRKQLDPFPHRPVQSHGLDCTDIKDTIGSVTKTPSGLYIIHPEGSSYPFEVMCDMDYRGGGRTVIQKRIDGIIDFQRLWCDYLDGFGDLLGEFWLGLKKIFYIVNQKNTSFMLYVALESEDDTLAYASYDNFWLEDETRFFKMHLGRYSGNAGDAFRGLKKEDNQNAMPFSTSDVDNDGCRPACLVNGQSVKSCSHLHNKTGWWFNECGLANLNGIHHFSGKLLATGIQWGTWTKNNSPVKIKSVSMKIRRMYNPYFK

SEQ ID NO: 825 - protein, 470 aa, Homo Sapiens
MGKPWLRALQLLLLLGASWARAGAPRCTYTFVLPPQKFTGAVCWSGPASTRATPEAANASELAALRMRVGRHEELLRELQRLAAADGAVAGEVRALRKESRGLSARLGQLRAQLQHEAGPGAGPGADLGAEPAAALALLGERVLNASAEAQRAAARFHQLDVKFRELAQLVTQQSSLIARLERLCPGGAGGQQQVLPPPPLVPVVPVRLVGSTSDTSRMLDPAPEPQRDQTQRQQEPMASPMPAGHPAVPTKPVGPWQDCAEARQAGHEQSGVYELRVGRHVVSVWCEQQLEGGGWTVIQRRQDGSVNFFTTWQHYKAGFGRPDGEYWLGLEPVYQLTSRGDHELLVLLEDWGGRGARAHYDGFSLEPESDHYRLRLGQYHGDAGDSLSWHNDKPFSTVDRDRDSYSGNCALYQRGGWWYHACAHSNLNGVWHHGGHYRSRYQDGVYWAEFRGGAYSLRKAAMLIRPLKL

SEQ ID NO: 826 - protein, 470 aa, Homo Sapiens; identical to SEQ ID NO: 825

SEQ ID NO: 827 - protein, 430 aa, Homo Sapiens
MGKPWLRALQLLLLLGASWARAGAPRCTYTFVLPPQKFTGAVCWSGPASTRATPEAANASELAALRMRVGRHEELLRELQRLAAADGAVAGEVRALRKESRGLSARLGQLRAQLQHEAGPGAGPGADLGAEPAAALALLGERVLNASAEAQRAAARFHQLDVKFRELAQLVTQQSSLIARLERLCPGGAGGQQQVLPPPPLVPVVPVRLVGSTSDTSRMLDPAPEPQRDQTQRQQEPMASPMPAGHPAVPTKPVGPWQDCAEARQAGHEQSGVYELRAGFGRPDGEYWLGLEPVYQLTSRGDHELLVLLEDWGGRGARAHYDGFSLEPESDHYRLRLGQYHGDAGDSLSWHNDKPFSTVDRDRDSYSGNCALYQRGGWWYHACAHSNLNGVWHHGGHYRSRYQDGVYWAEFRGGAYSLRKAAMLIRPLKL

SEQ ID NO: 828 - protein, 346 aa, Homo Sapiens
MLKKPLSAVTWLCIFIVAFVSHPAWLQKLSKHKTPAQPQLKAANCCEEVKELKAQVANLSSLLSELNKKQERDWVSVVMQVMELESNSKRMESRLTDAESKYSEMNNQIDIMQLQAAQTVTQTSADAIYDCSSLYQKNYRISGVYKLPPDDFLGSPELEVFCDMETSGGGWTIIQRRKSGLVSFYRDWKQYKQGFGSIRGDFWLGNEHIHRLSRQPTRLRVEMEDWEGNLRYAEYSHFVLGNELNSYRLFLGNYTGNVGNDALQYHNNTAFSTKDKDNDNCLDKCAQLRKGGYWYNCCTDSNLNGVYYRLGEHNKHLDGITWYGWHGSTYSLKRVEMKIRPEDFKP

SEQ ID NO: 829 - protein, 99 aa, Homo Sapiens
MEEDILQLQAEATAEVLGEVAQAQKVLRDSVQRLEVQLRSAWLGPAYREFEVLKAHADKQSHILWALTGHVQRQRREMVAQQHRLRQIQERLHTAALPA

SEQ ID NO: 830 - protein, 198 aa, Homo Sapiens
MPVPALCLLWALAMVTRPASAAPMGGPELAQHEELTLLFHGTLQLGQALNGVYRTTEGRLTKARNSLGLYGRTIELLGQEVSRGRDAAQELRASLLETQMEEDILQLQAEATAEVLGEVAQAQKVLRDSVQRLEVQLRSAWLGPAYREFEVLKAHADKQSHILWALTGHVQRQRREMVAQQHRLRQIQERLHTAALPA

SEQ ID NO: 831 - protein, 198 aa, Homo Sapiens; identical to SEQ ID NO: 830

SEQ ID NO: 832 - protein, 58 aa, Homo Sapiens
  misc_feature (1)..(1): Xaa can be any naturally occurring amino acid
XAQELRASLLETQAHADKQSHILWALTGHVQRQRREMVAQQHRLRQIQERLHTAALPA

SEQ ID NO: 833 - protein, 1897 aa, Homo Sapiens
MAQAAKQLKKIKDIEAQALQEQKEKEESNRKRRNRSRDRKKKADAATSFLRAARSGNLDKALDHLRNGVDINTCNQNGLNGLHLASKEGHVKMVVELLHKEIILETTTKKGNTALHIAALAGQDEVVRELVNYGANVNAQSQKGFTPLYMAAQENHLEVVKFLLENGANQNVATEDGFTPLAVALQQGHENVVAHLINYGTKGKVRLPALHIAARNDDTRTAAVLLQNDPNPDVLSKTGFTPLHIAAHYENLNVAQLLLNRGASVNFTPQNGITPLHIASRRGNVIMVRLLLDRGAQIETKTKDELTPLHCAARNGHVRISEILLDHGAPIQAKTKNGLSPIHMAAQGDHLDCVRLLLQYDAEIDDITLDHLTPLHVAAHCGHHRVAKVLLDKGAKPNSRALNGFTPLHIACKKNHVRVMELLLKTGASIDAVTESGLTPLHVASFMGHLPIVKNLLQRGASPNVSNVKVETPLHMAARAGHTEVAKYLLQNKAKVNAKAKDDQTPLHCAARIGHTNMVKLLLENNANPNLATTAGHTPLHIAAREGHVETVLALLEKEASQACMTKKGFTPLHVAAKYGKVRVAELLLERDAHPNAAGKNGLTPLHVAVHHNNLDIVKLLLPRGGSPHSPAWNGYTPLHIAAKQNQVEVARSLLQYGGSANAESVQGVTPLHLAAQEGHAEMVALLLSKQANGNLGNKSGLTPLHLVAQEGHVPVADVLIKHGVMVDATTRMGYTPLHVASHYGNIKLVKFLLQHQADVNAKTKLGYSPLHQAAQQGHTDIVTLLLKNGASPNEVSSDGTTPLAIAKRLGYISVTDVLKVVTDETSFVLVSDKHRMSFPETVDEILDVSEDEGTAHITIMGEELISFKAERRDSRDVDEEKELLDFVPKLDQVVESPAIPRIPCAMPETVVIRSEEQEQASKEYDEDSLIPSSPATETSDNISPVASPVHTGFLVSFMVDARGGSMRGSRHNGLRVVIPPRTCAAPTRITCRLVKPQKLSTPPPLAEEEGLASRIIALGPTGAQFLSPVIVEIPHFASHGRGDRELVVLRSENGSVWKEHRSRYGESYLDQILNGMDEELGSLEELEKKRVCRIITTDFPLYFVIMSRLCQDYDTIGPEGGSLKSKLVPLVQATFPENAVTKRVKLALQAQPVPDELVTKLLGNQATFSPIVTVEPRRRKFHRPIGLRIPLPPSWTDNPRDSGEGDTTSLRLLCSVIGGTDQAQWEDITGTTKLVYANECANFTTNVSARFWLSDCPRTAEAVNFATLLYKELTAVPYMAKFVIFAKMNDPREGRLRCYCMTDDKVDKTLEQHENFVEVARSRDIEVLEGMSLFAELSGNLVPVKKAAQQRSFHFQSFRENRLAMPVKVRDSSREPGGSLSFLRKAMKYEDTQHILCHLNITMPPCAKGSGAEDRRRTPTPLALRYSILSESTPGSLSGTEQAEMKMAVISEHLGLSWAELARELQFSVEDINRIRVENPNSLLEQSVALLNLWVIREGQNANMENLYTALQSIDRGEIVNMLEGSGRQSRNLKPDRRHTDRDYSLSPSQMNGYSSLQDELLSPASLGCALSSPLRADQYWNEVAVLDAIPLAATEHDTMLEMSDMQVWSAGLTPSLVTAEDSSLECSKAEDSDATGHEWKLEGALSEEPRGPELGSLELVEDDTVDSDATNGLIDLLEQEEGQRSEEKLPGSKRQDDATGAGQDSENEVSLVSGHQRGQARITHSPTVSQVTERSQDRLQDWDADGSIVSYLQDAAQGSWQEEVTQGPHSFQGTSTMTEGLEPGGSQEYEKVLVSVSEHTWTEQPEAESSQADRDRRQQGQEEQVQEAKNTFTQVVQGNEFQNIPGEQVTEEQFTDEQGNIVTKKIIRKVVRQIDLSSADAAQEHEEDHTSTPNP

SEQ ID NO: 834 - protein, 1880 aa, Homo Sapiens
MPYSVGFREADAATSFLRAARSGNLDKALDHLRNGVDINTCNQNGLNGLHLASKEGHVKMVVELLHKEIILETTTKKGNTALHIAALAGQDEVVRELVNYGANVNAQSQKGFTPLYMAAQENHLEVVKFLLENGANQNVATEDGFTPLAVALQQGHENVVAHLINYGTKGKVRLPALHIAARNDDTRTAAVLLQNDPNPDVLSKTGFTPLHIAAHYENLNVAQLLLNRGASVNFTPQNGITPLHIASRRGNVIMVRLLLDRGAQIETKTKDELTPLHCAARNGHVRISEILLDHGAPIQAKTKNGLSPIHMAAQGDHLDCVRLLLQYDAEIDDITLDHLTPLHVAAHCGHHRVAKVLLDKGAKPNSRALNGFTPLHIACKKNHVRVMELLLKTGASIDAVTESGLTPLHVASFMGHLPIVKNLLQRGASPNVSNVKVETPLHMAARAGHTEVAKYLLQNKAKVNAKAKDDQTPLHCAARIGHTNMVKLLLENNANPNLATTAGHTPLHIAAREGHVETVLALLEKEASQACMTKKGFTPLHVAAKYGKVRVAELLLERDAHPNAAGKNGLTPLHVAVHHNNLDIVKLLLPRGGSPHSPAWNGYTPLHIAAKQNQVEVARSLLQYGGSANAESVQGVTPLHLAAQEGHAEMVALLLSKQANGNLGNKSGLTPLHLVAQEGHVPVADVLIKHGVMVDATTRMGYTPLHVASHYGNIKLVKFLLQHQADVNAKTKLGYSPLHQAAQQGHTDIVTLLLKNGASPNEVSSDGTTPLAIAKRLGYISVTDVLKVVTDETSFVLVSDKHRMSFPETVDEILDVSEDEGEELISFKAERRDSRDVDEEKELLDFVPKLDQVVESPAIPRIPCAMPETVVIRSEEQEQASKEYDEDSLIPSSPATETSDNISPVASPVHTGFLVSFMVDARGGSMRGSRHNGLRVVIPPRTCAAPTRITCRLVKPQKLSTPPPLAEEEGLASRIIALGPTGAQFLSPVIVEIPHFASHGRGDRELVVLRSENGSVWKEHRSRYGESYLDQILNGMDEELGSLEELEKKRVCRIITTDFPLYFVIMSRLCQDYDTIGPEGGSLKSKLVPLVQATFPENAVTKRVKLALQAQPVPDELVTKLLGNQATFSPIVTVEPRRRKFHRPIGLRIPLPPSWTDNPRDSGEGDTTSLRLLCSVIGGTDQAQWEDITGTTKLVYANECANFTTNVSARFWLSDCPRTAEAVNFATLLYKELTAVPYMAKFVIFAKMNDPREGRLRCYCMTDDKVDKTLEQHENFVEVARSRDIEVLEGMSLFAELSGNLVPVKKAAQQRSFHFQSFRENRLAMPVKVRDSSREPGGSLSFLRKAMKYEDTQHILCHLNITMPPCAKGSGAEDRRRTPTPLALRYSILSESTPGSLSGTEQAEMKMAVISEHLGLSWAELARELQFSVEDINRIRVENPNSLLEQSVALLNLWVIREGQNANMENLYTALQSIDRGEIVNMLEGSGRQSRNLKPDRRHTDRDYSLSPSQMNGYSSLQDELLSPASLGCALSSPLRADQYWNEVAVLDAIPLAATEHDTMLEMSDMQVWSAGLTPSLVTAEDSSLECSKAEDSDATGHEWKLEGALSEEPRGPELGSLELVEDDTVDSDATNGLIDLLEQEEGQRSEEKLPGSKRQDDATGAGQDSENEVSLVSGHQRGQARITHSPTVSQVTERSQDRLQDWDADGSIVSYLQDAAQGSWQEEVTQGPHSFQGTSTMTEGLEPGGSQEYEKVLVSVSEHTWTEQPEAESSQADRDRRQQGQEEQVQEAKNTFTQVVQGNEFQNIPGEQVTEEQFTDEQGNIVTKKIIRKVVRQIDLSSADAAQEHEEVELRGSGLQPDLIEGRKGAQIVKRASLKRGKQ

SEQ ID NO: 835 - protein, 1881 aa, Homo Sapiens
MPYSVGFREADAATSFLRAARSGNLDKALDHLRNGVDINTCNQNGLNGLHLASKEGHVKMVVELLHKEIILETTTKKGNTALHIAALAGQDEVVRELVNYGANVNAQSQKGFTPLYMAAQENHLEVVKFLLENGANQNVATEDGFTPLAVALQQGHENVVAHLINYGTKGKVRLPALHIAARNDDTRTAAVLLQNDPNPDVLSKTGFTPLHIAAHYENLNVAQLLLNRGASVNFTPQNGITPLHIASRRGNVIMVRLLLDRGAQIETKTKDELTPLHCAARNGHVRISEILLDHGAPIQAKTKNGLSPIHMAAQGDHLDCVRLLLQYDAEIDDITLDHLTPLHVAAHCGHHRVAKVLLDKGAKPNSRALNGFTPLHIACKKNHVRVMELLLKTGASIDAVTESGLTPLHVASFMGHLPIVKNLLQRGASPNVSNVKVETPLHMAARAGHTEVAKYLLQNKAKVNAKAKDDQTPLHCAARIGHTNMVKLLLENNANPNLATTAGHTPLHIAAREGHVETVLALLEKEASQACMTKKGFTPLHVAAKYGKVRVAELLLERDAHPNAAGKNGLTPLHVAVHHNNLDIVKLLLPRGGSPHSPAWNGYTPLHIAAKQNQVEVARSLLQYGGSANAESVQGVTPLHLAAQEGHAEMVALLLSKQANGNLGNKSGLTPLHLVAQEGHVPVADVLIKHGVMVDATTRMGYTPLHVASHYGNIKLVKFLLQHQADVNAKTKLGYSPLHQAAQQGHTDIVTLLLKNGASPNEVSSDGTTPLAIAKRLGYISVTDVLKVVTDETSFVLVSDKHRMSFPETVDEILDVSEDEGEELISFKAERRDSRDVDEEKELLDFVPKLDQVVESPAIPRIPCAMPETVVIRSEEQEQASKEYDEDSLIPSSPATETSDNISPVASPVHTGFLVSFMVDARGGSMRGSRHNGLRVVIPPRTCAAPTRITCRLVKPQKLSTPPPLAEEEGLASRIIALGPTGAQFLSPVIVEIPHFASHGRGDRELVVLRSENGSVWKEHRSRYGESYLDQILNGMDEELGSLEELEKKRVCRIITTDFPLYFVIMSRLCQDYDTIGPEGGSLKSKLVPLVQATFPENAVTKRVKLALQAQPVPDELVTKLLGNQATFSPIVTVEPRRRKFHRPIGLRIPLPPSWTDNPRDSGEGDTTSLRLLCSVIGGTDQAQWEDITGTTKLVYANECANFTTNVSARFWLSDCPRTAEAVNFATLLYKELTAVPYMAKFVIFAKMNDPREGRLRCYCMTDDKVDKTLEQHENFVEVARSRDIEVLEGMSLFAELSGNLVPVKKAAQQRSFHFQSFRENRLAMPVKVRDSSREPGGSLSFLRKAMKYEDTQHILCHLNITMPPCAKGSGAEDRRRTPTPLALRYSILSESTPGSLSGTEQAEMKMAVISEHLGLSWAELARELQFSVEDINRIRVENPNSLLEQSVALLNLWVIREGQNANMENLYTALQSIDRGEIVNMLEGSGRQSRNLKPDRRHTDRDYSLSPSQMNGYSSLQDELLSPASLGCALSSPLRADQYWNEVAVLDAIPLAATEHDTMLEMSDMQVWSAGLTPSLVTAEDSSLECSKAEDSDATGHEWKLEGALSEEPRGPELGSLELVEDDTVDSDATNGLIDLLEQEEGQRSEEKLPGSKRQDDATGAGQDSENEVSLVSGHQRGQARITHSPTVSQVTERSQDRLQDWDADGSIVSYLQDAAQGSWQEEVTQGPHSFQGTSTMTEGLEPGGSQEYEKVLVSVSEHTWTEQPEAESSQADRDRRQQGQEEQVQEAKNTFTQVVQGNEFQNIPGEQVTEEQFTDEQGNIVTKKIIRKVVRQIDLSSADAAQEHEEVTVEGPLEDPSELEVDIDYFMKHSKDHTSTPNP

SEQ ID NO: 836 - protein, 109 aa, Homo Sapiens
MWTFVTQLLVTLVLLSFFLVSCQNVMHIVRGSLCFVLKHIHQELDKELGESEGLSDDEETISTRVVRRRVFLKGNEFQNIPGEQVTEEQFTDEQGNIVTKKDHTSTPNP

SEQ ID NO: 837 - protein, 131 aa, Homo Sapiens
MWTFVTQLLVTLVLLSFFLVSCQNVMHIVRGSLCFVLKHIHQELDKELGESEGLSDDEETISTRVVRRRVFLKGNEFQNIPGEQVTEEQFTDEQGNIVTKKIIRKVVRQIDLSSADAAQEHEEDHTSTPNP

SEQ ID NO: 838 - protein, 155 aa, Homo Sapiens
MWTFVTQLLVTLVLLSFFLVSCQNVMHIVRGSLCFVLKHIHQELDKELGESEGLSDDEETISTRVVRRRVFLKGNEFQNIPGEQVTEEQFTDEQGNIVTKKIIRKVVRQIDLSSADAAQEHEEVELRGSGLQPDLIEGRKGAQIVKRASLKRGKQ

SEQ ID NO: 839 - protein, 156 aa, Homo Sapiens
MWTFVTQLLVTLVLLSFFLVSCQNVMHIVRGSLCFVLKHIHQELDKELGESEGLSDDEETISTRVVRRRVFLKGNEFQNIPGEQVTEEQFTDEQGNIVTKKIIRKVVRQIDLSSADAAQEHEEVTVEGPLEDPSELEVDIDYFMKHSKDHTSTPNP

SEQ ID NO: 840 - protein, 113 aa, Homo Sapiens
MWTFVTQLLVTLVLLSFFLVSCQNVMHIVRGSLCFVLKHIHQELDKELGESEGLSDDEETISTRVVRRRVFLKGNEFQNIPGEQVTEEQFTDEQGNIVTKKVELRGSGLQPDL

SEQ ID NO: 841 - protein, 177 aa, Homo Sapiens
  misc_feature (1)..(1): Xaa can be any naturally occurring amino acid
XEDTQHILCHLNITMPPCAKGSGAEDRRRTPTPLALRYSILSESTPGSLSGTEQAEMKMAVISEHLGLSWAELARELQFSVEDINRIRVENPNSLLEQSVALLNLWVIREGQNANMENLYTALQSIDRGEIVNMLEGSGRQSRNLKPDRRHTDRDYSLSPSQMNGGRSEVRREAARF

SEQ ID NO: 842 - protein, 1040 aa, Homo Sapiens
  misc_feature (1)..(1): Xaa can be any naturally occurring amino acid
XIKHGVMVDATTRMGYTPLHVASHYGNIKLVKFLLQHQADVNAKTKLGYSPLHQAAQQGHTDIVTLLLKNGASPNEVSSDGTTPLAIAKRLGYISVTDVLKVVTDETSFVLVSDKHRMSFPETVDEILDVSEDEGTAHITIMGEELISFKAERRDSRDVDEEKELLDFVPKLDQVVESPAIPRIPCAMPETVVIRSEEQEQASKEYDEDSLIPSSPATETSDNISPVASPVHTGFLVSFMVDARGGSMRGSRHNGLRVVIPPRTCAAPTRITCRLVKPQKLSTPPPLAEEEGLASRIIALGPTGAQFLSPVIVEIPHFASHGRGDRELVVLRSENGSVWKEHRSRYGESYLDQILNGMDEELGSLEELEKKRVCRIITTDFPLYFVIMSRLCQDYDTIGPEGGSLKSKLVPLVQATFPENAVTKRVKLALQAQPVPDELVTKLLGNQATFSPIVTVEPRRRKFHRPIGLRIPLPPSWTDNPRDSGEGDTTSLRLLCSVIGGTDQAQWEDITGTTKLVYANECANFTTNVSARFWLSDCPRTAEAVNFATLLYKELTAVPYMAKFVIFAKMNDPREGRLRCYCMTDDKVDKTLEQHENFVEVARSRDIEVLEGMSLFAELSGNLVPVKKAAQQRSFHFQSFRENRLAMPVKVRDSSREPGGSLSFLRKAMKYEDTQHILCHLNITMPPCAKGSGAEDRRRTPTPLALRYSILSESTPGSLSGTEQAEMKMAVISEHLGLSWAELARELQFSVEDINRIRVENPNSLLEQSVALLNLWVIREGQNANMENLYTALQSIDRGEIVNMLEGSGRQSRNLKPDRRHTDRDYSLSPSQMNGHQRGQARITHSPTVSQVTERSQDRLQDWDADGSIVSYLQDAAQGSWQEEVTQGPHSFQGTSTMTEGLEPGGSQEYEKVLVSVSEHTWTEQPEAESSQADRDRRQQGQEEQVQEAKNTFTQVVQGNEFQNIPGEQVTEEQFTDEQGNIVTKKIIRKVVRQIDLSSADAAQEHEEVELRGSGLQPDLIEGRKGAQIVKRASLKRGKQ

SEQ ID NO: 843 - protein, 553 aa, Homo Sapiens
  misc_feature (1)..(1): Xaa can be any naturally occurring amino acid
XTSLRLLCSVIGGTDQAQWEDITGTTKLVYANECANFTTNVSARFWLSDCPRTAEAVNFATLLYKELTAVPYMAKFVIFAKMNDPREGRLRCYCMTDDKVDKTLEQHENFVEVARSRDIEVLEGMSLFAELSGNLVPVKKAAQQRSFHFQSFRENRLAMPVKVRDSSREPGGSLSFLRKAMKYEDTQHILCHLNITMPPCAKGSGAEDRRRTPTPLALRYSILSESTPGSLSGTEQAEMKMAVISEHLGLSWAELARELQFSVEDINRIRVENPNSLLEQSVALLNLWVIREGQNANMENLYTALQSIDRGEIVNMLEGSGRQSRNLKPDRRHTDRDYSLSPSQMNGHQRGQARITHSPTVSQVTERSQDRLQDWDADGSIVSYLQDAAQGSWQEEVTQGPHSFQGTSTMTEGLEPGGSQEYEKVLVSVSEHTWTEQPEAESSQADRDRRQQGQEEQVQEAKNTFTQVVQGNEFQNIPGEQVTEEQFTDEQGNIVTKKIIRKVVRQIDLSSADAAQEHEEVTVEGPLEDPSELEVDIDYFMKHSKDHTSTPNP

SEQ ID NO: 844 - protein, 133 aa, Homo Sapiens
IGRRVNTRARNHVGRVALHWAAGAGHEQAVRLLLEHEAAVDEEDAVGALTEEGNTALHLAAGRGHMAVLQRLVDIGLDLEEQNAEGLTALHSAAGGSHPDCVQLLLRAGSTVNALTQVARPSQDCGRLLAAEP

SEQ ID NO: 845 - protein, 423 aa, Homo Sapiens
MNALLLSAWFGHLRILQILVNSGAKIHCESKDGLTLLHCAAQKGHVPVLAFIMEDLEDVALDHVDKLGRTAFHRAAEHGQLDALDFLVGSGCDHNVKDKEGNTALHLAAGRGHMAVLQRLVDIGLDLEEQNAEGLTALHSAAGGSHPDCVQLLLRAGSTVNALTQKNLSCLHYAALSGSEDVSRVLIHAGGCANVVDHQGASPLHLAVRHNFPALVRLLINSDSDVNAVDNRQQTPLHLAAEHAWQDIADMLLIAGVDLNLRDKQGKTALAVAVRSNHVSLVDMIIKADRFYRWEKDHPSDPSGKSLSFKQDHRQETQQLRSVLWRLASRYLQPREWKKLAYSWEFTEAHVDAIEQQWTGTRSYQEHGHRMLLIWLHGVATAGENPSKALFEGLVAIGRRDLAENIRKKANAAPSAPRRCTAM

SEQ ID NO: 846 - protein, 399 aa, Homo Sapiens
MNALLLSAWFGHLRILQILVNSGAKIHCESKDGLTLLHCAAQKGHVPVLAFIMEDLEDVALDHVDKLGRTAFHRAAEHGQLDALDFLVGSGCDHNVKDKEGNTALHLAAGRGHMAVLQRLVDIGLDLEEQNAEGLTALHSAAGGSHPDCVQLLLRAGSTVNALTQKNLSCLHYAALSGSEDVSRVLIHAGGCANVVDHQGASPLHLAVRHNFPALVRLLINSDSDVNAVDNRQQTPLHLAAEHAWQDIADMLLIAGVDLNLRDKDHPSDPSGKSLSFKQDHRQETQQLRSVLWRLASRYLQPREWKKLAYSWEFTEAHVDAIEQQWTGTRSYQEHGHRMLLIWLHGVATAGENPSKALFEGLVAIGRRDLAGWSTMARSQLTATSASRVQMILVPQPPE

SEQ ID NO: 847 - protein, 423 aa, Homo Sapiens; identical to SEQ ID NO: 845

SEQ ID NO: 848 - protein, 181 aa, Homo Sapiens
MNALLLSAWFGHLRILQILVNSGAKIHCESKDGLTLLHCAAQKGHVPVLAFIMEDLEDVALDHVDKLGRTAFHRAAEHGQLDALDFLVGSGCDHNVKDKEGNTALHLAAGRGHMAVLQRLVDIGLDLEEQNAEGLTALHSAAGGSHPDCVQLLLRAGSTVNALTQVARPSQDCGRLLAAEP

SEQ ID NO: 849 - protein, 123 aa, Homo Sapiens
MQEELAWETDGLLPLERQLHEAARQNNVGRMQELIGRRVNTRARNHVGRVALHWAAGAGHEQAVRLLLEHEAAVDEEDAFGMNALLLSAWFGHLRILQILVNSGAKIHCESKPKKAMCLCWRS

SEQ ID NO: 850 - protein, 522 aa, Homo Sapiens
MQEELAWETDGLLPLERQLHEAARQNNVGRMQELIGRRVNTRARNHVGRVALHWAAGAGHEQAVRLLLEHEAAVDEEDAVGALTEARLCFGMNALLLSAWFGHLRILQILVNSGAKIHCESKDGLTLLHCAAQKGHVPVLAFIMEDLEDVALDHVDKLGRTAFHRAAEHGQLDALDFLVGSGCDHNVKDKEGNTALHLAAGRGHMAVLQRLVDIGLDLEEQNAEGLTALHSAAGGSHPDCVQLLLRAGSTVNALTQKNLSCLHYAALSGSEDVSRVLIHAGGCANVVDHQGASPLHLAVRHNFPALVRLLINSDSDVNAVDNRQQTPLHLAAEHAWQDIADMLLIAGVDLNLRDKQGKTALAVAVRSNHVSLVDMIIKADRFYRWEKDHPSDPSGKSLSFKQDHRQETQQLRSVLWRLASRYLQPREWKKLAYSWEFTEAHVDAIEQQWTGTRSYQEHGHRMLLIWLHGVATAGENPSKALFEGLVAIGRRDLAGWSTMARSQLTATSASRVQMILVPQPPE

SEQ ID NO: 851 - protein, 217 aa, Homo Sapiens [sequence omitted]

SEQ ID NO: 852 - protein, 300 aa, Homo Sapiens
MAAAAGDADDEPRSGHSSSEGECAVAPEPLTDAEGLFSFADFGSALGGGGAGLSGRASGGAQSPLRYLHVLWQQDAEPRDELRCKIPAGRLRRAARPHRRLGPTGKEVHALKRLRDSANANDVETVQQLLEDGADPCAADDKGRTALHFASCNGNDQIVQLLLDHGADPNQRDGLGNTPLHLAACTNHVPVITTLLRGGARVDALDRAGRTPLHLAKSKLNILQEGHAQCLEAVRLEVKQIIHMLREYLERLGQHEQRERLDDLCTRLQMTSTKEQVDEVTDLLASFTSLSLQMQSMEKR

SEQ ID NO: 853 - protein, 284 aa, Homo Sapiens
MAAAAGDADDEPRSGHSSSEGECAVAPEPLTDAEGLFSFADFGSALGGGGAGLSGRASGGAQSPLRYLHVLWQQDAEPRDELRCKIPAGRLRRAARPHRRLGPTGKEVHVQQLLEDGADPCAADDKGRTALHFASCNGNDQIVQLLLDHGADPNQRDGLGNTPLHLAACTNHVPVITTLLRGGARVDALDRAGRTPLHLAKSKLNILQEGHAQCLEAVRLEVKQIIHMLREYLERLGQHEQRERLDDLCTRLQMTSTKEQVDEVTDLLASFTSLSLQMQSMEKR

SEQ ID NO: 854 - protein, 90 aa, Homo Sapiens
MARIPVQLMTRAAQLYTLPHAMAMTRLLLLDHGADPNQRDGLGNTPLHLAACTNHVPVITTLLRGGARVDALDRAGRTPLHLAKSKLNIL

SEQ ID NO: 855 - protein, 156 aa, Homo Sapiens
MARIPVQLMTRAAQLYTLPHAMAMTRLLLLDHGADPNQRDGLGNTPLHLAACTNHVPVITTLLRGGARVDALDRAGRTPLHLAKSKLNILQEGHAQCLEAVRLEVKQIIHMLREYLERLGQHEQRERLDDLCTRLQMTSTKEQVDEVTDLLASFTS

SEQ ID NO: 856 - protein, 107 aa, Homo Sapiens
MPMMWKQCSCSWTMVLILTSEMGWGTRHCTWRPAPTTFLSSPHCYEEIIHMLREYLERLGQHEQRERLDDLCTRLQMTSTKEQVDEVTDLLASFTSLSLQMQSMEKR

SEQ ID NO: 857 - protein, 180 aa, Homo Sapiens
MPMMWKQQLLEDGADPCAADDKGRTALHFASCNGNDQIVQLLLDHGADPNQRDGLGNTPLHLAACTNHVPVITTLLRGGARVDALDRAGRTPLHLAKSKLNILQEGHAQCLEAVRLEVKQIIHMLREYLERLGQHEQRERLDDLCTRLQMTSTKEQVDEVTDLLASFTSLSLQMQSMEKR

SEQ ID NO: 858 - protein, 208 aa, Homo Sapiens
  misc_feature (1)..(1): Xaa can be any naturally occurring amino acid
XRDELRCKIPAGRLRRAARPHRRLGPTGKEVHALKRLRDSANANDVETVQQLLEDGADPCAADDKGRTALHFASCNGNDQIVQLLLDHGADPNQRDGLGNTPLHLECSPQLVPAGARVDALDRAGRTPLHLAKSKLNILQEGHAQCLEAVRLEVKQIIHMLREYLERLGQHEQRERLDDLCTRLQMTSTKEQVDEVTDLLASFTSLSL

SEQ ID NO: 859 - protein, 178 aa, Homo Sapiens
  misc_feature (1)..(1): Xaa can be any naturally occurring amino acid
XRLRRPGPRGAVAMAAAAGDADDEPRSGHSSSEGECAVAPEPLTDAEGLFSFADFGSALGGGGAGLSGRASGGAQSPLRYLHVLWQQDAEPRDELRCKIPAGRLRRAARPHRRLGPTGKEVHALKRLRDSANANDVETVQQLLEDGADPCAADDKGRTALHFASCNGNDQIAAPGPWC

SEQ ID NO: 860 - protein, 345 aa, Homo Sapiens
MTRGRAWGMRRAAAGAGGARAAGPTGGASRLHPNAGRRSGARAGAQGCGGPRVGSADSRALPAQPLACARGRSQRLVCDPKAASALPDLAPDVFVLRVRLEETGEMFRVANCRGDMTVRELKEELDLMVGIPFNLQRLQYLDEGVLMDDTTLKFHDVVPGGIISLCIWHHDGWTELVLAAVEGDPSKLSCLGLTEDSFYRTANSEHFEGEKWKHWTSQRAFVALYVASHRGHFDAVQYLLEHGASCLSRSPLGRTPLHVAAAMGRSDCIILLLQHGASIHDRDAKGETPISIAHRLNHTLSERQMVLLHRIAKSGIRDLNDLVMKNALQRVKSGFRSEKMTMTPH

SEQ ID NO: 861 - protein, 933 aa, Homo Sapiens
MRMAATAWAGLQGPPLPTLCPAVRTGLYCRDQAHAERWAMTSETSSGSHCARSRMLRRRAQEEDSTVLIDVSPPEAEKRGSYGSTAHASEPGGQQAAACRAGSPAKPRIADFVLVWEEDLKLDRQQDSAARDRTDMHRTWRETFLDNLRAAGLCVDQQDVQDGNTTVHYALLSASWAVLCYYAEDLRLKLPLQELPNQASNWSAGLLAWLGIPNVLLEVVPDVPPEYYSCRFRVNKLPRFLGSDNQDTFFTSTKRHQILFEILAKTPYGHEKKNLLGIHQLLAEGVLSAAFPLHDGPFKTPPEGPQAPRLNQRQVLFQHWARWGKWNKYQPLDHVRRYFGEKVALYFAWLGFYTGWLLPAAVVGTLVFLVGCFLVFSDIPTQELCGSKDSFEMCPLCLDCPFWLLSSACALAQAGRLFDHGGTVFFSLFMALWAVLLLEYWKRKSATLAYRWDCSDYEDTEERPRPQFAASAPMTAPNPITGEDEPYFPERSRARRMLAGSVVIVVMVAVVVMCLVSIILYRAIMAIVVSRSGNTLLAAWASRIASLTGSVVNLVFILILSKIYVSLAHVLTRWEMHRTQTKFEDAFTLKVFIFQFVNFYSSPVYIAFFKGRFVGYPGNYHTLFGVRNEECAAGGCLIELAQELLVIMVGKQVINNMQEVLIPKLKGWWQKFRLRSKKRKAGASAGASQGPWEDDYELVPCEGLFDEYLEMVLQFGFVTIFVAACPLAPLFALLNNWVEIRLDARKFVCEYRRPVAERAQDIGIWFHILAGLTHLAVISNAFLLAFSSDFLPRAYYRWTRAHDLRGFLNFTLARAPSSFAAAHNRTCRYRAFRDDDGHYSQTYWNLLAIRLAFVIVFEHVVFSVGRLLDLLVPDIPESVEIKVKREYYLAKQALAENEVLFGTNGTKDEQPEGSELSSHWTPFTVPKASQLQQ

SEQ ID NO: 862 - protein, 883 aa, Homo Sapiens
MRMAATAWAGLQGPPLPTLCPAVRTGLYCRDQAHAERWAMTSETSSGSHCARSRMLRRRAQEEDSTVLIDVSPPEAEKRGSYGSTAHASEPGGQQAAACRAGSPAKPRIDFVLVWEEDLKLDRQQDSAARDRTDMHRTWRETFLDNLRAAGLCVDQQDVQDGNTTVHYALLSASWAVLCYYAEDLRLKLPLQELPNQASNWSAGLLAWLGIPNVLLEVVPDVPPEYYSCRFRVNKLPRFLGSDNQDTFFTSTKRHQILFEILAKTPYGHEKKNLLGIHQLLAEGVLSAAFPLHDGPFKTPPEGPQAPRLNQRQVLFQHWARWGKWNKYQPLDHVRRYFGEKVALYFAWLGFYTGWLLPAAVVGTLVFLVGCFLVFSDIPTQELCGSKDSFEMCPLCLDCPFWLLSSACALAQAGRLFDHGGTVFFSLFMALWAVLLLEYWKRKSATLAYRWDCSDYEDTEERPRPQFAASAPMTAPNPITGEDEPYFPERSRARRMLAGSVVIVVMVAVVVMCLVSIILYRAIMAIVVSRSGNTLLAAWASRIASLTGSVVNLVFILILSKIYVSLAHVLTRWEMHRTQTKFEDAFTLKVFIFQFVNFYSSPVYIAFFKGRFVGYPGNYHTLFGVRNEECAAGGCLIELAQELLVIMVGKQVINNMQEVLIPKLKGWWQKFRLRSKKRKAGASAGASQGPWEDDYELVPCEGLFDEYLEMVLQFGFVTIFVAACPLAPLFALLNNWVEIRLDARKFVCEYRRPVAERAQDIGIWFHILAGLTHLAVISNAFLLAFSSDFLPRAYYRWTRAHDLRGFLNFTLARAPSSFAAAHNRTCRYRAFRDDDGHYSQTYWNLLAIRLAFVIVFEVAEAPAGSPIHGMRPRPCALPNSSTW

SEQ ID NO: 863 - protein, 179 aa, Homo Sapiens
MRMAATAWAGLQGPPLPTLCPAVRTGLYCRDQAHAERWAMTSETSSGSHCARSRMLRRRAQEEDSTVLIDVSPPEAEKRGSYGSTAHASEPGGQQAAACRAGSPAKPRIDFVLVWEEDLKLDRQQDSAARDRTDMHRTWRETFLDNLRAAGLCVDQVRGGCHGQGPRPCIHSVTHDLAA

SEQ ID NO: 864 - protein, 186 aa, Homo Sapiens
  misc_feature (1)..(1): Xaa can be any naturally occurring amino acid
XAGGAFRGLRADGGGEPGRDPLPAVLQFGFVTIFVAACPLAPLFALLNNWVEIRLDARKFVCEYRRPVAERAQDIGIWFHILAGLTHLAVISNAFLLAFSSDFLPRAYYRWTRAHDLRGFLNFTLARAPSSFAAAHNRTCRYRAFRDDDGHYSQTYWNLLAIRLAFVIVFEHVVFSVGRLLDLLVP

SEQ ID NO: 865 - protein, 680 aa, Homo Sapiens
MVPGVPGAVLTLCLWLAASSGCLAAGPGAAAARRLDESLSAGSVQRARCASRCLSLQITRISAFFQHFQNNGSLVWCQNHKQCSKCLEPCKESGDLRKHQCQSFCEPLFPKKSYECLTSCEFLKYILLVKQGDCPAPEKASGFAAACVESCEVDNECSGVKKCCSNGCGHTCQVPKTLYKGVPLKPRKELRFTELQSGQLEVKWSSKFNISIEPVIYVVQRRWNYGIHPSEDDATHWQTVAQTTDERVQLTDIRPSRWYQFRVAAVNVHGTRGFTAPSKHFRSSKDPSAPPAPANLRLANSTVNSDGSVTVTIVWDLPEEPDIPVHHYKVFWSWMVSSKSLVPTKKKRRKTTDGFQNSVILEKLQPDCDYVVELQAITYWGQTRLKSAKVSLHFTSTHATNNKEQLVKTRKGGIQTQLPFQRRRPTRPLEVGAPFYQDGQLQVKVYWKKTEDPTVNRYHVRWFPEACAHNRTTGSEASSGMTHENYIILQDLSFSCKYKVTVQPIRPKSHSKAEAVFFTTPPCSALKGKSHKPVGCLGEAGHVLSKVLAKPENLSASFIVQDVNITGHFSWKMAKANLYQPMTGFQVTWAEVTTESRQNSLPNSIISQSQILPSDHYVLTVPNLRPSTLYRLEVQVLTPGGEGPATIKTFRTPELPPSSAHRSHLKHRHPHHYKPSPERY

SEQ ID NO: 866 - protein, 564 aa, Homo Sapiens
MATAERRALGIGFQWLSLATLVLICAGQGGRREDGGPACYGGFDLYFILDKSGSVLHHWNEIYYFVEQLAHKFISPQLRMSFIVFSTRGTTLMKLTEDREQIRQGLEELQKVLPGGDTYMHEGFERASEQIYYENRQGYRTASVIIALTDGELHEDLFFYSEREANRSRDLGAIVYCVGVKDFNETQLARIADSKDHVFPVNDGFQALQGIIHSILKKSCIEILAAEPSTICAGESFQVVVRGNGFRHARNVDRVLCSFKINDSVTLNEKPFSVEDTYLLCPAPILKEVGMKAALQVSMNDGLSFISSSVIITTTHCSDGSILAIALLILFLLLALALLWWFWPLCCTVIIKEVPPPPAEESEEEDDDGLPKKKWPTVDASYYGGRGVGGIKRMEVRWGEKGSTEEGAKLEKAKNARVKMPEQEYEFPEPRNLNNNMRRPSSPRKWYSPIKGKLDALWVLLRKGYDRVSVMRPQPGDTGRCINFTRVKNNQPAKYPLNNAYHTSSPPPAPIYTPPPPAPHCPPPPPSAPTPPIPSPPSTLPPPPQAPPPNRAPPPSRPPPRPSV

SEQ ID NO: 867 - protein, 333 aa, Homo Sapiens
MATAERRALGIGFQWLSLATLVLICAGQGGRREDGGPACYGGFDLYFILDKSGSVLHHWNEIYYFVEQLAHKFISPQLRMSFIVFSTRGTTLMKLTEDREQIRQGLEELQKVLPGGDTYMHEGFERASEQIYYENRQGYRTASVIIALTDGELHEDLFFYSEREANRSRDLGAIVYCVGVKDFNETQLARIADSKDHVFPVNDGFQALQGIIHSILKKSCIEILAAEPSTICAGESFQVVVRGNGFRHARNVDRVLCSFKINDSVTLNEKPFSVEDTYLLCPAPILKEVGMKAALQVSMNDGLSFISSSVIITTTHCSLHKIASGPTTAACME

SEQ ID NO: 868 - protein, 368 aa, Homo Sapiens
MATAERRALGIGFQWLSLATLVLICAGQGGRREDGGPACYGGFDLYFILDKSGSVLHHWNEIYYFVEQLAHKFISPQLRMSFIVFSTRGTTLMKLTEDREQIRQGLEELQKVLPGGDTYMHEGFERASEQIYYENRQGYRTASVIIALTDGELHEDLFFYSEREANRSRDLGAIVYCVGVKDFNETQLARIADSKDHVFPVNDGFQALQGIIHSILKKSCIEILAAEPSTICAGESFQVVVRGNGFRHARNVDRVLCSFKINDSVTLNEKPFSVEDTYLLCPAPILKEVGMKAALQVSMNDGLSFISSSVIITTTHCSDGSILAIALLILFLLLALALLWWFWPLCCTVIIKEVPPPPAEESEENKIK

SEQ ID NO: 869 - protein, 179 aa, Homo Sapiens
  misc_feature (1)..(1): Xaa can be any naturally occurring amino acid
XDLGAIVYCVGVKDFNETQLARIADSKDHVFPVNDGFQALQGIIHSILKKSCIEILAAEPSTICAGESFQVVVRGNGFRHARNVDRVLCSFKINDSVTLNEKPFSVEDTYLLCPAPILKEVGMKAALQVSMNDGLSFISSSVIITTTHCDGLWFYIQSLETVKDHRNIRVRNSDLKYCL

SEQ ID NO: 870 - protein, 52 aa, Homo Sapiens
MQSPWKILTVAPLFLLLSLQSSASPANDDQSRPSLSNGHTCVASSAEKPQLS

SEQ ID NO: 871 - protein, 108 aa, Homo Sapiens
MQSPWKILTVAPLFLLLSLQSSASPANDDQSRPSLSNGHTCVEKLFLKTTCYLVIDKFGSDIIKLLSADMNADVVCHTLEFCKQNTGQPLCHLYPLPKETWKFTLQKA

SEQ ID NO: 872 - protein, 543 aa, Homo Sapiens
MQSPWKILTVAPLFLLLSLQSSASPANDDQSRPSLSNGHTCVEKLFLKTTCYLVIDKFGSDIIKLLSADMNADVVCHTLEFCKQNTGQPLCHLYPLPKETWKFTLQKARQIVKKSPILKYSRSGSDICSLPVLAKICQKIKLAMEQSVPFKDVDSDKYSVFPTLRGYHWRGRDCNDSDESVYPGRRPNNWDVHQDSNCNGIWGVDPKDGVPYEKKFCEGSQPRGIILLGDSAGAHFHISPEWITASQMSLNSFINLPTALTNELDWPQLSGATGFLDSTVGIKEKSIYLRLWKRNHCNHRDYQNISRNGASSRNLKKFIESLSRNKVLDYPAIVIYAMIGNDVCSGKSDPVPAMTTPEKLYSNVMQTLKHLNSHLPNGSHVILYGLPDGTFLWDNLHNRYHPLGQLNKDMTYAQLYSFLNCLQVSPCHGWMSSNKTLRTLTSERAEQLSNTLKKIAASEKFTNFNLFYMDFAFHEIIQEWQKRGGQPWQLIEPVDGFHPNEVALLLLADHFWKKVQLQWPQILGKENPFNPQIKQVFGDQGGH

SEQ ID NO: 873 - protein, 688 aa, Homo Sapiens
MQSPWKILTVAPLFLLLSLQSSASPANDDQSRPSLSNGHTCVGCVLVVSVIEQLAQVHNSTVQASMERLCSYLPEKLFLKTTCYLVIDKFGSDIIKLLSADMNADVVCHTLEFCKQNTGQPLCHLYPLPKETWKFTLQKARQIVKKSPILKYSRSGSDICSLPVLAKICQKIKLAMEQSVPFKDVDSDKYSVFPTLRGYHWRGRDCNDSDESVYPGRRPNNWDVHQDSNCNGIWGVDPKDGVPYEKKFCEGSQPRGIILLGDSAGAHFHISPEWITASQMSLNSFINLPTALTNELDWPQLSGATGFLDSTVGIKEKSIYLRLWKRNHCNHRDYQNISRNGASSRNLKKFIESLSRNKVLDYPAIVIYAMIGNDVCSGKSDPVPAMTTPEKLYSNVMQTLKHLNSHLPNGSHVILYGLPDGTFLWDNLHNRYHPLGQLNKDMTYAQLYSFLNCLQVSPCHGWMSSNKTLRTLTSERAEQLSNTLKKIAASEKFTNFNLFYMDFAFHEIIQEWQKRGGQPWQLIEPVDGFHPNERKSILLKGILMTSQTLDNQEWTQLTSWIKGNLTCDSRTREWLCCCWRIISGKRCSSSGPKSWERRIRSTPRLNRCLETKAGTEPLRSMHPWGAQGGRGLGKLIPQTLWGLPRHRPKGLFFSSIFAKCLSLNEEHIWTTVQCCVLPGSVTLPLFLK

SEQ ID NO: 874 - protein, 575 aa, Homo Sapiens
MQSPWKILTVAPLFLLLSLQSSASPANDDQSRPSLSNGHTCVGCVLVVSVIEQLAQVHNSTVQASMERLCSYLPEKLFLKTTCYLVIDKFGSDIIKLLSADMNADVVCHTLEFCKQNTGQPLCHLYPLPKETWKFTLQKARQIVKKSPILKYSRSGSDICSLPVLAKICQKIKLAMEQSVPFKDVDSDKYSVFPTLRGYHWRGRDCNDSDESVYPGRRPNNWDVHQDSNCNGIWGVDPKDGVPYEKKFCEGSQPRGIILLGDSAGAHFHISPEWITASQMSLNSFINLPTALTNELDWPQLSGATGFLDSTVGIKEKSIYLRLWKRNHCNHRDYQNISRNGASSRNLKKFIESLSRNKVLDYPAIVIYAMIGNDVCSGKSDPVPAMTTPEKLYSNVMQTLKHLNSHLPNGSHVILYGLPDGTFLWDNLHNRYHPLGQLNKDMTYAQLYSFLNCLQVSPCHGWMSSNKTLRTLTSERAEQLSNTLKKIAASEKFTNFNLFYMDFAFHEIIQEWQKRGGQPWQLIEPVDGFHPNEVALLLLADHFWKKVQLQWPQILGKENPFNPQIKQVFGDQGGH

SEQ ID NO: 875 - protein, 249 aa, Homo Sapiens
MPALGWAVAAILMLQTAMAEPSPGTLPRKAGVFSDLSNQELKAVHSFLWSKKELRLQPSSTTTMAKNTVFLIEMLLPKKYHVLRFLDKGERHPVREARAVIFFGDQEHPNVTEFAVGPLPGPCYMRALSPRPGYQSSWASRPISTAEYALLYHTLQEATKPLHQFFLNTTGFSFQDCHDRCLAFTDVAPRGVASGQRRSWLIIQRYVEGYFLHPTGLELLVDHGSTDAGHWAVEQVWYNGKFYGSPEEL

SEQ ID NO: 876 - protein, 751 aa, Homo Sapiens
MPALGWAVAAILMLQTAMAEPSPGTLPRKAGVFSDLSNQELKAVHSFLWSKKELRLQPSSTTTMAKNTVFLIEMLLPKKYHVLRFLDKGERHPVREARAVIFFGDQEHPNVTEFAVGPLPGPCYMRALSPRPGYQSSWASRPISTAEYALLYHTLQEATKPLHQFFLNTTGFSFQDCHDRCLAFTDVAPRGVASGQRRSWLIIQRYVEGYFLHPTGLELLVDHGSTDAGHWAVEQVWYNGKFYGSPEELARKYADGEVDVVVLEDPLPGGKGHDSTEEPPLFSSHKPRGDFPSPIHVSGPRLVQPHGPRFRLEGNAVLYGGWSFAFRLRSSSGLQVLNVHFGGERIAYEVSVQEAVALYGGHTPAGMQTKYLDVGWGLGSVTHELAPGIDCPETATFLDTFHYYDADDPVHYPRALCLFEMPTGVPLRRHFNSNFKGGFNFYAGLKGQVLVLRTTSTVYNYDYIWDFIFYPNGVMEAKMHATGYVHATFYTPEGLRHGTRLHTHLIGNIHTHLVHYRVDLDVAGTKNSFQTLQMKLENITNPWSPRHRVVQPTLEQTQYSWERQAAFRFKRKLPKYLLFTSPQENPWGHKRTYRLQIHSMADQVLPPGWQEEQAITWARYPLAVTKYRESELCSSSIYHQNDPWHPPVVFEQFLHNNENIENEDLVAWVTVGFLHIPHSEDIPNTATPGNSVGFLLRPFNFFPEDPSLASRDTVIVWPRDNGPNYVQRWIPEDRDCSMPPPFSYNGTYRPV

SEQ ID NO: 877 - protein, 770 aa, Homo Sapiens
MPALGWAVAAILMLQTAMAEPSPGTLPRKAGVFSDLSNQELKAVHSFLWSKKELRLQPSSTTTMAKNTVFLIEMLLPKKYHVLRFLDKGERHPVREARAVIFFGDQEHPNVTEFAVGPLPGPCYMRALSPRPGYQSSWASRPISTAEYALLYHTLQEATKPLHQFFLNTTGFSFQDCHDRCLAFTDVAPRGVASGQRRSWLIIQRYVEGYFLHPTGLELLVDHGSTDAGHWAVEQVWYNGKFYGSPEELARKYADGEVDVVVLEDPLPGGKGHDSTEEPPLFSSHKPRGDFPSPIHVSGPRLVQPHGPRFRLEGNAVLYGGWSFAFRLRSSSGLQVLNVHFGGERIAYEVSVQEAVALYGGHTPAGMQTKYLDVGWGLGSVTHELAPGIDCPETATFLDTFHYYDADDPVHYPRALCLFEMPTGVPLRRHFNSNFKGGFNFYAGLKGQVLVLRTTSTVYNYDYIWDFIFYPNGVMEAKMHATGYVHATFYTPEGLRHGTRLHTHLIGNIHTHLVHYRVDLDVAGTKNSFQTLQMKLENITNPWSPRHRVVQPTLEQTQYSWERQAAFRFKRKLPKYLLFTSPQENPWGHKRTYRLQIHSMADQVLPPGWQEEQAITWARTEGGQPRALSQAASPVPGRYPLAVTKYRESELCSSSIYHQNDPWHPPVVFEQFLHNNENIENEDLVAWVTVGFLHIPHSEDIPNTATPGNSVGFLLRPFNFFPEDPSLASRDTVIVWPRDNGPNYVQRWIPEDRDCSMPPPFSYNGTYRPV

SEQ ID NO: 878 - protein, 751 aa, Homo Sapiens; identical to SEQ ID NO: 876

SEQ ID NO: 879 - protein, 337 aa, Homo Sapiens
MPALGWAVAAILMLQTAMAEPSPGTLPRKAGVFSDLSNQELKAVHSFLWSKKELRLQPSSTTTMAKNTVFLIEMLLPKKYHVLRFLDKGERHPVREARAVIFFGDQEHPNVTEFAVGPLPGPCYMRALSPRPGYQSSWASRPISTAEYALLYHTLQEATKPLHQFFLNTTGFSFQDCHDRCLAFTDVAPRGVASGQRRSWLIIQRYVEGYFLHPTGLELLVDHGSTDAGHWAVEQVWYNGKFYGSPEELARKYADGEVDVVVLEDPLPGGKGHDSTEEPPLFSSHKPRGDFPSPIHVSGPRLVQPHGPRFRLEGNAVLYGGWSFAFRLRSSSGLQVL

SEQ ID NO: 880 - protein, 751 aa, Homo Sapiens; identical to SEQ ID NO: 876

SEQ ID NO: 881 - protein, 756 aa, Homo Sapiens
MHLKIVLAFLALSLITIFALAYVLLTSPGGSSQPPHCPSVSHRAQPWPHPGQSQLFADLSREELTAVMRFLTQRLGPGLVDAAQAQPSDNCIFSVELQLPPKAAALAHLDRGSPPPAREALAIVLFGGQPQPNVSELVVGPLPHPSYMRDVTVERHGGPLPYHRRPVLRAEFTQMWRHLKEVELPKAPIFLSSTFNYNGSTLAAVHATPRGLRSGDRATWMALYHNISGVGLFLHPVGLELLLDHRALDPAHWTVQQVFYLGHYYADLGQLEREFKSGRLEVVRVPLPPPNGASSLRSRNSPGPLPPLQFSPQGSQYSVQGNLVVSSLWSFTFGHGVFSGLRIFDVRFQGERIAYEVSVQECVSIYGADSPKTMLTRYLDSSFGLGRNSRGLVRGVDCPYQATMVDIHILVGKGAVQLLPGAVCVFEEAQGLPLRRHHNYLQNHFYGGLASSALVVRSVSSVGNYDYIWDFVLYPNGALEGRVHATGYINTAFLKGGEEGLLFGNRVGERVLGTVHTHAFHFKLDLDVAGLKNWVVAEDVVFKPVAAPWNPEHWLQRPQLTRQVLGKEDLTAFSLGSPLPRYLYLASNQTNAWGHQRGYRIQIHSPLGIHIPLESDMERALSWGRYQLVVTQRKEEESQSSSIYHQNDIWTPTVTFADFINNETLLGEDLVAWVTASFLHIPHAEDIPNTVTLGNRVGFLLRPYNFFDEDPSIFSPGSVYFEKGQDAGLCSINPVACLPDLAACVPDLPPFSYHGF

SEQ ID NO: 882 - protein, 729 aa, Homo Sapiens
MHLKIVLAFLALSLITIFALAYVLLTSPGGSSQPPHCPSVSHRAQPWPHPGQSQLFADLSREELTAVMRFLTQRLGPGLVDAAQAQPSDNCIFSVELQLPPKAAALAHLDRGSPPPAREALAIVLFGGQPQPNVSELVVGPLPHPSYMRDVTVERHGGPLPYHRRPVLRAEFTQMWRHLKEVELPKAPIFLSSTFNYNGSTLAAVHATPRGLRSGDRATWMALYHNISGVGLFLHPVGLELLLDHRALDPAHWTVQQVFYLGHYYADLGQLEREFKSGRLEVVRVPLPPPNGASSLRSRNSPGPLPPLQFSPQGSQYSVQGNLVVSSLWSFTFGHGVFSGLRIFDVRFQGERIAYEVSVQECVSIYGADSPKTMLTRYLDSSFGLGRNSRGLVRGVDCPYQATMVDIHILVGKGAVQLLPGAVCVFEEAQGLPLRRHHNYLQNHFYGGLASSALVVRSVSSVGNYDYIWDFVLYPNGALEGRVHATGYINTAFLKGGEEGLLFGNRVGERVLGTVHTHAFHFKLDLDVAGLKNWVVAEDVVFKPVAAPWNPEHWLQRPQLTRQVLGKEDLTAFSLGSPLPRYLYLASNQTNAWGHQRGYQLVVTQRKEEESQSSSIYHQNDIWTPTVTFADFINNETLLGEDLVAWVTASFLHIPHAEDIPNTVTLGNRVGFLLRPYNFFDEDPSIFSPGSVYFEKGQDAGLCSINPVACLPDLAACVPDLPPFSYHGF

SEQ ID NO: 883 - protein, 763 aa, Homo Sapiens
MNQKTILVLLILAVITIFALVCVLLVGRGGDGGEPSQLPHCPSVSPSAQPWTHPGQSQLFADLSREELTAVMRFLTQRLGPGLVDAAQARPSDNCVFSVELQLPPKAAALAHLDRGSPPPAREALAIVFFGRQPQPNVSELVVGPLPHPSYMRDVTVERHGGPLPYHRRPVLFQEYLDIDQMIFNRELPQASGLLHHCCFYKHRGRNLVTMTTAPRGLQSGDRATWFGLYYNISGAGFFLHHVGLELLVNHKALDPARWTIQKVFYQGRYYDSLAQLEAQFEAGLVNVVLIPDNGTGGSWSLKSPVPPGPAPPLQFYPQGPRFSVQGSRVASSLWTFSFGLGAFSGPRIFDVRFQGERLVYEISLQEALAIYGGNSPAAMTTRYVDGGFGMGKYTTPLTRGVDCPYLATYVDWHFLLESQAPKTIRDAFCVFEQNQGLPLRRHHSDLYSHYFGGLAETVLVVRSMSTLLNYDYVWDTVFHPSGAIEIRFYATGYISSAFLFGATGKYGNQVSEHTLGTVHTHSAHFKVDLDVAGLENWVWAEDMVFVPMAVPWSPEHQLQRLQVTRKLLEMEEQAAFLVGSATPRYLYLASNHSNKWGHPRGYRIQMLSFAGEPLPQNSSMARGFSWERYQLAVTQRKEEEPSSSSVFNQNDPWAPTVDFSDFINNETIAGKDLVAWVTAGFLHIPHAEDIPNTVTVGNGVGFFLRPYNFFDEDPSFYSADSIYFRGDQDAGACEVNPLACLPQAAACAPDLPAFSHGGFSHN

SEQ ID NO: 884 - protein, 634 aa, Homo Sapiens
MNQKTILVLLILAVITIFALVCVLLVGRGGDGGEPSQLPHCPSVSPSAQPWTHPGQSQLFADLSREELTAVMRFLTQRLGPGLVDAAQARPSDNCVFSVELQLPPKAAALAHLDRGSPPPAREALAIVFFGRQPQPNVSELVVGPLPHPSYMRDVTVERHGGPLPYHRRPVLFQEYLDIDQMIFNRELPQASGLLHHCCFYKHRGRNLVTMTTAPRGLQSGDRATWFGLYYNISGAGFFLHHVGLELLVNHKALDPARWTIQKVFYQGRYYDSLAQLEAQFEAGLVNVVLIPDNGTGGSWSLKSPVPPGPAPPLQFYPQGPRFSVQGSRVASSLWTFSFGLGAFSGPRIFDVRFQGERLVYEISLQEALAIYGGNSPAAMTTRYVDGGFGMGKYTTPLTRGVDCPYLATYVDWHFLLESQAPKTIRDAFCVFEQNQGLPLRRHHSDLYSHYFGGLAETVLVVRSMSTLLNYDYVWDTVFHPSGAIEIRFYATGYISSAFLFGATGKYGNQVSEHTLGTVHTHSAHFKVDLDVAGLENWVWAEDMVFVPMAVPWSPEHQLQRLQVTRKLLEMEEQAAFLVGSATPRYLYLASNHSNKWGHPRGYRIQMLSFAGEPLPQNSSMARGFSWERIWWPG

SEQ ID NO: 885 - protein, 112 aa, Homo Sapiens
MVFVPMAVPWSPEHQLQRLQVTRKLLEMEEQAAFLVGSATPRYLYLASNHSNKWGHPRGYRIQMLSFAGEPLPQNSSMARGFSWERYQLAVTQRKEEEPSSSSVFNQNDPWA

SEQ ID NO: 886 - protein, 152 aa, Homo Sapiens
MVFVPMAVPWSPEHQLQRLQVTRKLLEMEEQAAFLVGSATPRYLYLASNHSNKWGHPRGYRIQMLSFAGEPLPQNSSMARGFSWERYQLAVTQRKEEEPSSSSVFNQNDPWAPTVDFSDFINNETIAGKDLVAWVTAGFLHIPHAEDIPNTV

SEQ ID NO: 887 - protein, 220 aa, Homo Sapiens
MVFVPMAVPWSPEHQLQRLQVTRKLLEMEEQAAFLVGSATPRYLYLASNHSNKWGHPRGYRIQMLSFAGEPLPQNSSMARGFSWERYQLAVTQRKEEEPSSSSVFNQNDPWAPTVDFSDFINNETIAGKDLVAWVTAGFLHIPHAEDIPNTVTVGNGVGFFLRPYNFFDEDPSFYSADSIYFRGDQDAGACEVNPLACLPQAAACAPDLPAFSHGGFSHN

SEQ ID NO: 888 - protein, 220 aa, Homo Sapiens; identical to SEQ ID NO: 887

SEQ ID NO: 889 - protein, 144 aa, Homo Sapiens
  misc_feature (1)..(1): Xaa can be any naturally occurring amino acid
XYDYVWDTVFHPSGAIEIRFYATGYISSAFLFGATGKYGNQVSEHTLGTVHTHSAHFKVDLDVAGDPEAAGDGGAGRLPRGKRHPSLPVPGQQPQQQVGSPPGLPHPDAQLCWRAAAPKQLHGERLQLGEVPAGCDPAEGGGAQ

SEQ ID NO: 890 - protein, 164 aa, Homo Sapiens
MSVLTPLLLRGLTGSARRLPVPRAKIHSLPPEGKLGIMGKENGIGSRRICNHHRELWEAGKMEPNQCVGWRCGSGAAGLSYRSQVRRPGVPAPATGLEAHSLTTPKGIPLLGLLPRRGNEEGLASGRTAIGNPEAVGSAALFKDGGGGTSAAEAGAAGQRLRRC

SEQ ID NO: 891 - protein, 235 aa, Homo Sapiens
MLKCHVFRCEAPAKNIATSLHEICSKIMAERRNARCLVNGLSLDHSKLVDVPFQVEFPAPKNELVQKFQVYYLGNVPVAKPVGVDVINGALESVLSSSSREQWTPSHVSVAPATLTILHQQTEAVLGECRVRFLSFLAVGRDVHTFAFIMAAGPASFCCHMFWCEPNAASLSEAVQAACMLRYQKCLDARSQASTSCLPAPPAESVARRVGWTVRRGVQSLWGSLKPKRLGAHTP

SEQ ID NO: 892 - protein, 87 aa, Homo Sapiens
MRVQDTSGTYYWHIPTGTTQWEPPGRASPSQGSSPQEESQLTWTGFAHGEGFEDGEFWKDEPSDEAPMELGLKEPEEGTLTFPAQSL

SEQ ID NO: 893 - protein, 262 aa, Homo Sapiens
MRVQDTSGTYYWHIPTGTTQWEPPGRASPSQGSSPQEESQLTWTGFAHGEGFEDGEFWKDEPSDEAPMELGLKEPEEGTLTFPAQSLSPEPLPQEEEKLPPRNTNPGIKCFAVRSLGWVEMTEEELAPGRSSVAVNNCIRQLSYHKNNLHDPMSGGWGEGKDLLLQLEDETLKLVEPQSQALLHAQPIISIRVWGVGRDSGRDFAYVARDKLTQMLKCHVFRCEAPAKNIATSLHEICSKIMAERRNARCLVNGLSLDHSKL

SEQ ID NO: 894 - protein, 451 aa, Homo Sapiens
MRVQDTSGTYYWHIPTGTTQWEPPGRASPSQGSSPQEESQLTWTGFAHGEGFEDGEFWKDEPSDEAPMELGLKEPEEGTLTFPAQSLSPEPLPQEEEKLPPRNTNPGIKCFAVRSLGWVEMTEEELAPGRSSVAVNNCIRQLSYHKNNLHDPMSGGWGEGKDLLLQLEDETLKLVEPQSQALLHAQPIISIRVWGVGRDSGRERDFAYVARDKLTQMLKCHVFRCEAPAKNIATSLHEICSKIMAERRNARCLVNGLSLDHSKLVDVPFQVEFPAPKNELVQKFQVYYLGNVPVAKPVGVDVINGALESVLSSSSREQWTPSHVSVAPATLTILHQQTEAVLGECRVRFLSFLAVGRDVHTFAFIMAAGPASFCCHMFWCEPNAASLSEAVQAACMLRYQKCLDARSQASTSCLPAPPAESVARRVGWTVRRGVQSLWGSLKPKRLGAHTP

SEQ ID NO: 895 - protein, 451 aa, Homo Sapiens; identical to SEQ ID NO: 894

SEQ ID NO: 896 - protein, 451 aa, Homo Sapiens; identical to SEQ ID NO: 894

SEQ ID NO: 897 - protein, 451 aa, Homo Sapiens [sequence omitted]

SEQ ID NO: 898 - protein, 451 aa, Homo Sapiens [sequence omitted]

SEQ ID NO: 899 - protein, 488 aa, Homo Sapiens
MSAMFSQDFFLAIILQDSSADSFWNPNAFETDSDLPAGWMRVQDTSGTYYWHIPTGTTQWEPPGRASPSQGSSPQEESQLTWTGFAHGEGFEDGEFWKDEPSDEAPMELGLKEPEEGTLTFPAQSLSPEPLPQEEEKLPPRNTNPGIKCFAVRSLGWVEMTEEELAPGRSSVAVNNCIRQLSYHKNNLHDPMSGGWGEGKDLLLQLEDETLKLVEPQSQALLHAQPIISIRVWGVGRDSGRDFAYVARDKLTQMLKCHVFRCEAPAKNIATSLHEICSKIMAERRNARCLVNGLSLDHSKLVDVPFQVEFPAPKNELVQKFQVYYLGNVPVAKPVGVDVINGALESVLSSSSREQWTPSHVSVAPATLTILHQQTEAVLGECRVRFLSFLAVGRDVHTFAFIMAAGPASFCCHMFWCEPNAASLSEAVQAACMLRYQKCLDARSQASTSCLPAPPAESVARRVGWTVRRGVQSLWGSLKPKRLGAHTP

SEQ ID NO: 900 - protein, 490 aa, Homo Sapiens
MSAMFSQDFFLAIILQDSSADSFWNPNAFETDSDLPAGWMRVQDTSGTYYWHIPTGTTQWEPPGRASPSQGSSPQEESQLTWTGFAHGEGFEDGEFWKDEPSDEAPMELGLKEPEEGTLTFPAQSLSPEPLPQEEEKLPPRNTNPGIKCFAVRSLGWVEMTEEELAPGRSSVAVNNCIRQLSYHKNNLHDPMSGGWGEGKDLLLQLEDETLKLVEPQSQALLHAQPIISIRVWGVGRDSGRERDFAYVARDKLTQMLKCHVFRCEAPAKNIATSLHEICSKIMAERRNARCLVNGLSLDHSKLVDVPFQVEFPAPKNELVQKFQVYYLGNVPVAKPVGVDVINGALESVLSSSSREQWTPSHVSVAPATLTILHQQTEAVLGECRVRFLSFLAVGRDVHTFAFIMAAGPASFCCHMFWCEPNAASLSEAVQAACMLRYQKCLDARSQASTSCLPAPPAESVARRVGWTVRRGVQSLWGSLKPKRLGAHTP

SEQ ID NO: 901 - protein, 708 aa, Homo Sapiens
MSVPSSLSQSAINANSHGGPALSLPLPLHAAHNQLLNAKLQATAVGPKDLRSAMGEGGGPEPGPANAKWLKEGQNQLRRAATAHRDQNRNVTLTLAEEASQEPEMAPLGPKGLIHLYSELELSAHNAANRGLRGPGLIISTQEQGPDEGEEKAAGEAEEEEEDDDDEEEEEDLSSPPGLPEPLESVEAPPRPQALTDGPREHSKSASLLFGMRNSAASDEDSSWATLSQGSPSYGSPEDTDSFWNPNAFETDSDLPAGWMRVQDTSGTYYWHIPTGTTQWEPPGRASPSQGSSPQEESQLTWTGFAHGEGFEDGEFWKDEPSDEAPMELGLKEPEEGTLTFPAQSLSPEPLPQEEEKLPPRNTNPGIKCFAVRSLGWVEMTEEELAPGRSSVAVNNCIRQLSYHKNNLHDPMSGGWGEGKDLLLQLEDETLKLVEPQSQALLHAQPIISIRVWGVGRDSGRDFAYVARDKLTQMLKCHVFRCEAPAKNIATSLHEICSKIMAERRNARCLVNGLSLDHSKLVDVPFQVEFPAPKNELVQKFQVYYLGNVPVAKPVGVDVINGALESVLSSSSREQWTPSHVSVAPATLTILHQQTEAVLGECRVRFLSFLAVGRDVHTFAFIMAAGPASFCCHMFWCEPNAASLSEAVQAACMLRYQKCLDARSQASTSCLPAPPAESVARRVGWTVRRGVQSLWGSLKPKRLGAHTP

SEQ ID NO: 902 - protein, 708 aa, Homo Sapiens; identical to SEQ ID NO: 901

SEQ ID NO: 903 - protein, 710 aa, Homo Sapiens [sequence omitted]

SEQ ID NO: 904 - protein, 710 aa, Homo Sapiens
MSVPSSLSQSAINANSHGGPALSLPLPLHAAHNQLLNAKLQATAVGPKDLRSAMGEGGGPEPGPANAKWLKEGQNQLRRAATAHRDQNRNVTLTLAEEASQEPEMAPLGPKGLIHLYSELELSAHNAANRGLRGPGLIISTQEQGPDEGEEKAAGEAEEEEEDDDDEEEEEDLSSPPGLPEPLESVEAPPRPQALTDGPREHSKSASLLFGMRNSAASDEDSSWATLSQGSPSYGSPEDTDSFWNPNAFETDSDLPAGWMRVQDTSGTYYWHIPTGTTQWEPPGRASPSQGSSPQEESQLTWTGFAHGEGFEDGEFWKDEPSDEAPMELGLKEPEEGTLTFPAQSLSPEPLPQEEEKLPPRNTNPGIKCFAVRSLGWVEMTEEELAPGRSSVAVNNCIRQLSYHKNNLHDPMSGGWGEGKDLLLQLEDETLKLVEPQSQALLHAQPIISIRVWGVGRDSGRERDFAYVARDKLTQMLKCHVFRCEAPAKNIATSLHEICSKIMAERRNARCLVNGLSLDHSKLVDVPFQVEFPAPKNELVQKFQVYYLGNVPVAKPVGVDVINGALESVLSSSSREQWTPSHVSVAPATLTILHQQTEAVLGECRVRFLSFLAVGRDVHTFAFIMAAGPASFCCHMFWCEPNAASLSEAVQAACMLRYQKCLDARSQASTSCLPAPPAESVARRVGWTVRRGVQSLWGSLKPKRLGAHTP

SEQ ID NO: 905 - protein, 707 aa, Homo Sapiens
MSVPSSLSQSAINANSHGGPALSLPLPLHAAHNQLLNAKLQATAVGPKDLRSAMGEGGGPEPGPANAKWLKEGQNQLRRAATAHRDQNRNVTLTLAEEASQEPEMAPLGPKGLIHLYSELELSAHNAANRGLRGPGLIISTQEQGPDEGEEKAAGEAEEEEEDDDDEEEEEDLSSPPGLPEPLESVEAPPRPQALTDGPREHSKSASLLFGMRNSAASDEDSSWATLSQGSPSYGSPEDTDSFWNPNAFETDSDLPAGWMRVQDTSGTYYWHIPTGTTQWEPPGRASPSQGSSPQEESQLTWTGFAHGEGFEDGEFWKDEPSDEAPMELGLKEPEEGTLTFPAQSLSPEPLPQEEEKLPPRNTNPGIKCFAVRSLGWVEMTEEELAPGRSSVAVNNCIRQLSYHKNNLHDPMSGGWGEGKDLLLQLEDETLKLVEPQSQALLHAQPIISIRVWGVGRDSGRERDFAYVARDKLTQMLKCHVFRCEAPAKNIATSLHEICSKIMAERRNARCLVNGLSLDHSKLVDVPFQVEFPAPKNELVQKFQVYYLGNVPVAKPVGVDVINGALESVLSSSSREQWTPSHVSVAPATLTILHQQTEAVLGECRVRFLSFLAVGRDVHTFAFIMAAGPASFCCHMFWCEPNAASLSEAVQAACMVEQEELVQARPHPPGPSRGRRRKGLVQAWVPSPCSMGTSAVLISLIKSVCTA

SEQ ID NO: 906 - protein, 475 aa, Homo Sapiens
MTQMRDSFWNPNAFETDSDLPAGWMRVQDTSGTYYWHIPTGTTQWEPPGRASPSQGSSPQEESQLTWTGFAHGEGFEDGEFWKDEPSDEAPMELGLKEPEEGTLTFPAQSLSPEPLPQEEEKLPPRNTNPGIKCFAVRSLGWVEMTEEELAPGRSSVAVNNCIRQLSYHKNNLHDPMSGGWGEGKDLLLQLEDETLKLVEPQSQALLHAQPIISIRVWGVGRDSGRERDFAYVARDKLTQMLKCHVFRCEAPAKNIATSLHEICSKIMAERRNARCLVNGLSLDHSKLVDVPFQVEFPAPKNELVQKFQVYYLGNVPVAKPVGVDVINGALESVLSSSSREQWTPSHVSVAPATLTILHQQTEAVLGECRVRFLSFLAVGRDVHTFAFIMAAGPASFCCHMFWCEPNAASLSEAVQAACMLRYQKCLDARSQASTSCLPAPPAESVARRVGWTVRRGVQSLWGSLKPKRLGAHTP

SEQ ID NO: 907 - protein, 475 aa, Homo Sapiens [sequence omitted]

SEQ ID NO: 908 - protein, 22 aa, Homo Sapiens
MSWPRRLLLRYLFPALLLHAVK

SEQ ID NO: 909 - protein, 61 aa, Homo Sapiens
MSWPRRLLLRYLFPALLLHEPRPCLHRLSDHLSVRRAPPSHPAPKGRPDHRPARGVGEPAL

SEQ ID NO: 910 - protein, 184 aa, Homo Sapiens
MSWPRRLLLRYLFPALLLHGLGEGSALLHPDSRSHPRSLEKSAWRAFKESQCHHMLKHLHNGARITVQMPPTIEGHWVSTGCEVRSGPEFITRSYRFYHNNTFKAYQFYYGSNRCTNPTYTLIIRGKIRLRQASWIIRGGTEADYQLHNVQGHGRHRVRVQSESHEGHPHGCGHSLTAQRLQRE

SEQ ID NO: 911 - protein, 514 aa, Homo Sapiens
MSWPRRLLLRYLFPALLLHGLGEGSALLHPDSRSHPRSLEKSAWRAFKESQCHHMLKHLHNGARITVQMPPTIEGHWVSTGCEVRSGPEFITRSYRFYHNNTFKAYQFYYGSNRCTNPTYTLIIRGKIRLRQASWIIRGGTEADYQLHNVQVICHTEAVAEKLGQQVNRTCPGFLADGGPWVQDVAYDLWREENGCECTKAVNFAMHELQLIRVEKQYLHHNLDHLVEELFLGDIHTDATQRMFYRPSSYQPPLQNAKNHDHACIACRIIYRSDEHHPPILPPKADLTIGLHGEWVSQRCEVRPEVLFLTRHFIFHDNNNTWEGHYYHYSDPVCKHPTFSIYARGRYSRGVLSSRVMGGTEFVFKVNHMKVTPMDAATASLLNVFNGNECGAEGSWQVGIQQDVTHTNGCVALGIKLPHTEYEIFKMEQDARGRYLLFNGQRPSDGSSPDRPEKRATSYQMPLVQCASSSPRAEDLAEDSGSSLYGRAPGRHTWSLLLAALACLVPLLHWNIRR

SEQ ID NO: 912 - protein, 94 aa, Homo Sapiens
PEDVLPALQLPAPSAECQVEMGFHHVGQDGLQLPTSSDPPALASQSAGITGVSHRPPGRHLSNDLRTTTMPASPVGSSIGQTSTTLPSCPQRQT

SEQ ID NO: 913 - protein, 227 aa, Homo Sapiens
  misc_feature (1)..(1): Xaa can be any naturally occurring amino acid
XDVAYDLWREENGCECTKAVNFAMHELQLIRVEKQYLHHNLDHLVEELFLGDIHTDATQRMFYRPSSYQPPLQNAKCAAESSGSFQILPQDSSEKEQNGLSHWCLSRPGHQKDWALCAHAGPATAGCPSCLWPPAETGRKAGRTSSKTVHACPGEAGTSSFELFYFPNCWSIETKLKISLNAKLSFKPRASAPLETGHRVKIETLSQLVFLSFIQLCCEVQSPLANK

SEQ ID NO: 914 - protein, 223 aa, Homo Sapiens
MNKPLLWISVLTSLLEAFAHTDLSGKVFVFPRESVTDHVNLITPLEKPLQNFTLCFRAYSDLSRAYSLFSYNTQGRDNELLVYKERVGEYSLYIGRHKVTSKVIEKFPAPVHICVSWESSSGIAEFWINGTPLVKKGLRQGYFVEAQPKIVLGQEQDSYGGKFDRSQSFVGEIGDLYMWDSVLPPENILSAYQGTPLPANILDWQALNYEIRGYVIIKPLVWV

SEQ ID NO: 915 - protein, 54 aa, Homo Sapiens
MRFQQFLFAFFIFIMSLLLISGQRPVNLTMRRKLRKHNCLQRRCMPLHSRVPFP

SEQ ID NO: 916 - protein, 54 aa, Homo Sapiens; identical to SEQ ID NO: 915

SEQ ID NO: 917 - protein, 54 aa, Homo Sapiens; identical to SEQ ID NO: 915

SEQ ID NO: 918 - protein, 77 aa, Homo Sapiens
MNLRLCVQALLLLWLSLTAVCGGSLMPLPDGNGLEDGNVRHLVQPRGSRNGPGPWQGGRRKFRRQRPRLSHKGPMPF

SEQ ID NO: 919 - protein, 158 aa, Homo Sapiens
MAATGTAAAAATGRLLLLLLALAANAGTGFAVAEPQIAMFCGKLNMHVNIQTGKWEPDPTGTKSCFETKEEVLQYCQEMYPELQITNVMEANQRVSIDNWCRRDKKQCKSRFVTPFKCLVGEFVSDVLLVPEKCQFFHKERMEVCENHQHWHTVVKEV

SEQ ID NO: 920 - protein, 35 aa, Homo Sapiens
MAATGTAAAAATGRLLLLLLVGLTAPALALAGYIE

SEQ ID NO: 921 - protein, 116 aa, Homo Sapiens
MAATGTAAAAATGRLLLLLLVGLTAPALALAGYIEALAANAGTGFAVAEPQIAMFCGKLNMHVNIQTGKWEPDPTGTKSCFETKEEVLQYCQEMYPELQITNSGWRCVRITSTGTR

SEQ ID NO: 922 - protein, 763 aa, Homo Sapiens
MAATGTAAAAATGRLLLLLLVGLTAPALALAGYIEALAANAGTGFAVAEPQIAMFCGKLNMHVNIQTGKWEPDPTGTKSCFETKEEVLQYCQEMYPELQITNVMEANQRVSIDNWCRRDKKQCKSRFVTPFKCLVGEFVSDVLLVPEKCQFFHKERMEVCENHQHWHTVVKEACLTQGMTLYSYGMLLPCGVDQFHGTEYVCCPQTKIIGSVSKEEEEEDEEEEEEEDEEEDYDVYKSEFPTEADLEDFTEAAVDEDDEDEEEGEEVVEDRDYYYDTFKGDDYNEENPTEPGSDGTMSDKEITHDVKAVCSQEAMTGPCRAVMPRWYFDLSKGKCVRFIYGGCGGNRNNFESEDYCMAVCKAMIPPTPLPTNDVDVYFETSADDNEHARFQKAKEQLEIRHRNRMDRVKKEWEEAELQAKNLPKAERQTLIQHFQAMVKALEKEAASEKQQLVETHLARVEAMLNDRRRMALENYLAALQSDPPRPHRILQALRRYVRAENKDRLHTIRHYQHVLAVDPEKAAQMKSQVMTHLHVIEERRNQSLSLLYKVPYVAQEIQEEIDELLQEQRADMDQFTASISETPVDVRVSSEESEEIPPFHPFHPFPALPENEDTQPELYHPMKKGSGVGEQDGGLIGAEEKVINSKNKVDENMVIDETLDVKEMIFNAERVGGLEEERESVGPLREDFSLSSSALIGLLVIAVAIATVIVISLVMLRKRQYGTISHGIVEVDPMLTPEERHLNKMQNHGYENPTYKYLEQMQI

SEQ ID NO: 923 - protein, 751 aa, Homo Sapiens
MAATGTAAAAATGRLLLLLLVGLTAPALALAGYIEALAANAGTGFAVAEPQIAMFCGKLNMHVNIQTGKWEPDPTGTKSCFETKEEVLQYCQEMYPELQITNVMEANQRVSIDNWCRRDKKQCKSRFVTPFKCLVGEFVSDVLLVPEKCQFFHKERMEVCENHQHWHTVVKEACLTQGMTLYSYGMLLPCGVDQFHGTEYVCCPQTKIIGSVSKEEEEEDEEEEEEEDEEEDYDVYKSEFPTEADLEDFTEAAVDEDDEDEEEGEEVVEDRDYYYDTFKGDDYNEENPTEPGSDGTMSDKEITHDVKAVCSQEAMTGPCRAVMPRWYFDLSKGKCVRFIYGGCGGNRNNFESEDYCMAVCKAMIPPTPLPTNDVDVYFETSADDNEHARFQKAKEQLEIRHRNRMDRVKKEWEEAELQAKNLPKAERQTLIQHFQAMVKALEKEAASEKQQLVETHLARVEAMLNDRRRMALENYLAALQSDPPRPHRILQALRRYVRAENKDRLHTIRHYQHVLAVDPEKAAQMKSQVMTHLHVIEERRNQSLSLLYKVPYVAQEIQEEIDELLQEQRADMDQFTASISETPVDVRVSSEESEEIPPFHPFHPFPALPENEGSGVGEQDGGLIGAEEKVINSKNKVDENMVIDETLDVKEMIFNAERVGGLEEERESVGPLREDFSLSSSALIGLLVIAVAIATVIVISLVMLRKRQYGTISHGIVEVDPMLTPEERHLNKMQNHGYENPTYKYLEQMQI

SEQ ID NO: 924 - protein, 695 aa, Homo Sapiens
MAATGTAAAAATGRLLLLLLVGLTAPALALAGYIEALAANAGTGFAVAEPQIAMFCGKLNMHVNIQTGKWEPDPTGTKSCFETKEEVLQYCQEMYPELQITNVMEANQRVSIDNWCRRDKKQCKSRFVTPFKCLVGEFVSDVLLVPEKCQFFHKERMEVCENHQHWHTVVKEACLTQGMTLYSYGMLLPCGVDQFHGTEYVCCPQTKIIGSVSKEEEEEDEEEEEEEDEEEDYDVYKSEFPTEADLEDFTEAAVDEDDEDEEEGEEVVEDRDYYYDTFKGDDYNEENPTEPGSDGTMSDKEITHDVKVPPTPLPTNDVDVYFETSADDNEHARFQKAKEQLEIRHRNRMDRVKKEWEEAELQAKNLPKAERQTLIQHFQAMVKALEKEAASEKQQLVETHLARVEAMLNDRRRMALENYLAALQSDPPRPHRILQALRRYVRAENKDRLHTIRHYQHVLAVDPEKAAQMKSQVMTHLHVIEERRNQSLSLLYKVPYVAQEIQEEIDELLQEQRADMDQFTASISETPVDVRVSSEESEEIPPFHPFHPFPALPENEGSGVGEQDGGLIGAEEKVINSKNKVDENMVIDETLDVKEMIFNAERVGGLEEERESVGPLREDFSLSSSALIGLLVIAVAIATVIVISLVMLRKRQYGTISHGIVEVDPMLTPEERHLNKMQNHGYENPTYKYLEQMQI

SEQ ID NO: 925 - protein, 522 aa, Homo Sapiens
MAATGTAAAAATGRLLLLLLVGLTAPALALAGYIEALAANAGTGFAVAEPQIAMFCGKLNMHVNIQTGKWEPDPTGTKSCFETKEEVLQYCQEMYPELQITNVMEANQRVSIDNWCRRDKKQCKSRFVTPFKCLVPPTPLPTNDVDVYFETSADDNEHARFQKAKEQLEIRHRNRMDRVKKEWEEAELQAKNLPKAERQTLIQHFQAMVKALEKEAASEKQQLVETHLARVEAMLNDRRRMALENYLAALQSDPPRPHRILQALRRYVRAENKDRLHTIRHYQHVLAVDPEKAAQMKSQVMTHLHVIEERRNQSLSLLYKVPYVAQEIQEEIDELLQEQRADMDQFTASISETPVDVRVSSEESEEIPPFHPFHPFPALPENEGSGVGEQDGGLIGAEEKVINSKNKVDENMVIDETLDVKEMIFNAERVGGLEEERESVGPLREDFSLSSSALIGLLVIAVAIATVIVISLVMLRKRQYGTISHGIVEVDPMLTPEERHLNKMQNHGYENPTYKYLEQMQI

SEQ ID NO: 926 - protein, 159 aa, Homo Sapiens [sequence omitted]

SEQ ID NO: 927 - protein, 39 aa, Homo Sapiens
MAATGTAAAAATGRLLLLLLVGLTAPALALAGYIEWVNL

SEQ ID NO: 928 - protein, 761 aa, Homo Sapiens
MLRAPGELPRQAARCSLCRLGPGRGRAFFKWRCLPASVDRGNPLWALAANAGTGFAVAEPQIAMFCGKLNMHVNIQTGKWEPDPTGTKSCFETKEEVLQYCQEMYPELQITNVMEANQRVSIDNWCRRDKKQCKSRFVTPFKCLVGEFVSDVLLVPEKCQFFHKERMEVCENHQHWHTVVKEACLTQGMTLYSYGMLLPCGVDQFHGTEYVCCPQTKIIGSVSKEEEEEDEEEEEEEDEEEDYDVYKSEFPTEADLEDFTEAAVDEDDEDEEEGEEVVEDRDYYYDTFKGDDYNEENPTEPGSDGTMSDKEITHDVKAVCSQEAMTGPCRAVMPRWYFDLSKGKCVRFIYGGCGGNRNNFESEDYCMAVCKAMIPPTPLPTNDVDVYFETSADDNEHARFQKAKEQLEIRHRNRMDRVKKEWEEAELQAKNLPKAERQTLIQHFQAMVKALEKEAASEKQQLVETHLARVEAMLNDRRRMALENYLAALQSDPPRPHRILQALRRYVRAENKDRLHTIRHYQHVLAVDPEKAAQMKSQVMTHLHVIEERRNQSLSLLYKVPYVAQEIQEEIDELLQEQRADMDQFTASISETPVDVRVSSEESEEIPPFHPFHPFPALPENEGSGVGEQDGGLIGAEEKVINSKNKVDENMVIDETLDVKEMIFNAERVGGLEEERESVGPLREDFSLSSSALIGLLVIAVAIATVIVISLVMLRKRQYGTISHGIVEVDPMLTPEERHLNKMQNHGYENPTYKYLEQMQI

SEQ ID NO: 929 - protein, 267 aa, Homo Sapiens
MKAAVLTLAVLFLTGSQARHFWQQDEPPQSPWDRVKDLATVYVDVLKDSGRDYVSQFEGSALGKQLNLKLLDNWDSVTSTFSKLREQLGPVTQEFWDNLEKETEGLRQEMSKDLEEVKAKVQPYLDDFQKKWQEEMELYRQKVEPLRAELQEGARQKLHELQEKLSPLGEEMRDRARAHVDALRTHLAPYSDELRQRLAARLEALKENGGARLAEYHAKATEHLSTLSEKAKPALEDLRQGLLPVLESFKVSFLSALEEYTKKLNTQ

SEQ ID NO: 930 - protein, 267 aa, Homo Sapiens; identical to SEQ ID NO: 929

SEQ ID NO: 931 - protein, 267 aa, Homo Sapiens; identical to SEQ ID NO: 929

SEQ ID NO: 932 - protein, 267 aa, Homo Sapiens; identical to SEQ ID NO: 929

SEQ ID NO: 933 - protein, 245 aa, Homo Sapiens
MSGGARGFCMLKAPHSARPFFSSRSPTALQDESCGADLGRALPDGLKLLDNWDSVTSTFSKLREQLGPVTQEFWDNLEKETEGLRQEMSKDLEEVKAKVQPYLDDFQKKWQEEMELYRQKVEPLRAELQEGARQKLHELQEKLSPLGEEMRDRARAHVDALRTHLAPYSDELRQRLAARLEALKENGGARLAEYHAKATEHLSTLSEKAKPALEDLRQGLLPVLESFKVSFLSALEEYTKKLNTQ

SEQ ID NO: 934 - protein, 133 aa, Homo Sapiens
MCEQHPKRPGLQLWRGREPGWNGQQAALPTVTNMKLLAATVLLLTICSLEGALVRRQAKEPCVESLVSQYFQTVTDYGKDLMEKVKSPELQAEAKSYFEKSKEQLTPLIKKAGTELVNFLSYFVELGTQPATQ

SEQ ID NO: 935 - protein, 52 aa, Homo Sapiens
MEKVKSPELQAEAKSYFEKSKEQLTPLIKKAGTELVNFLSYFVELGTQPATQ

SEQ ID NO: 936 - protein, 52 aa, Homo Sapiens; identical to SEQ ID NO: 935

SEQ ID NO: 937 - protein, 66 aa, Homo Sapiens
MKLLAATVLLLTICSLEGALVRRQAKEPCVESLVSQYFQTVTDYGKDLMEKVKSPELQAEAKSYFE

SEQ ID NO: 938 - protein, 95 aa, Homo Sapiens
MKLLAATVLLLTICSLEGALVRRQAKEPCVESLVSQYFQTVTDYGKDLMEKVKSPELQAEAKSYFEKSKEQLTPLIKKAGTELVNFLSYFVELGT

SEQ ID NO: 939 - protein, 100 aa, Homo Sapiens
MKLLAATVLLLTICSLEGALVRRQAKEPCVESLVSQYFQTVTDYGKDLMEKVKSPELQAEAKSYFEKSKEQLTPLIKKAGTELVNFLSYFVELGTQPATQ

SEQ ID NO: 940 - protein, 82 aa, Homo Sapiens
MKLLAATVLLLTICSLEGALVRRQAKEPCVESLVSQYFQTVTDYGKDLMEKVKSPELQAEAKSYFENFLSYFVELGTQPATQ

SEQ ID NO: 941 - protein, 72 aa, Homo Sapiens
MKLLAATVLLLTICSLEGLATKGLKRKIIPSLKPRKPIQRSGWIPFWGGGRELGWVLAEVWQEARIHCCGPS

SEQ ID NO: 942 - protein, 27 aa, Homo Sapiens
MKLLAATVLLLTICSLEGLTLKSQRSS

SEQ ID NO: 943 - protein, 396 aa, Homo Sapiens
MFLKAVVLTLALVAVAGARAEVSADQVATVMWDYFSQLSNNAKEAVEHLQKSELTQQLNALFQDKLGEVNTYAGDLQKKLVPFATELHERLAKDSEKLKEEIGKELEELRARLLPHANEVSQKIGDNLRELQQRLEPYADQLRTQVSTQAEQLRRQLTPYAQRMERVLRENADSLQASLRPHADELKAKIDQNVEELKGRLTPYADEFKVKIDQTVEELRRSLAPYAQDTQEKLNHQLEGLTFQMKKNAEELKARISASAEELRQRLAPLAEDVRGNLRGNTEGLQKSLAELGGHLDQQVEEFRRRVEPYGENFNKALVQQMEQLRQKLGPHAGDVEGHLSFLEKDLRDKVNSFFSTFKEKESQDKTLSLPELEQQQEQQQEQQQEQVQMLAPLES

SEQ ID NO: 944 - protein, 162 aa, Homo Sapiens
MASMAAVLTWALALLSAFSATQARKGFWDYFSQTSGDKGRVEQIHQQKMAREPATLKDSLEQDLNNMNKFLEKLRPLSGSEAPRLPQDPVGMRRQLQEELEEVKARLQPYMAEAHELVGWNLEGLRQQLKPYTMDLMEQVALRVQELQEQLRVVGEDTKAQL

SEQ ID NO: 945 - protein, 366 aa, Homo Sapiens
MASMAAVLTWALALLSAFSATQARKGFWDYFSQTSGDKGRVEQIHQQKMAREPATLKDSLEQDLNNMNKFLEKLRPLSGSEAPRLPQDPVGMRRQLQEELEEVKARLQPYMAEAHELVGWNLEGLRQQLKPYTMDLMEQVALRVQELQEQLRVVGEDTKAQLLGGVDEAWALLQGLQSRVVHHTGRFKELFHPYAESLVSGIGRHVQELHRSVAPHAPASPARLSRCVQVLSRKLTLKAKALHARIQQNLDQLREELSRAFAGTGTEEGAGPDPQMLSEEVRQRLQAFRQDTYLQIAAFTRAIDQETEEVQQQLAPPPPGHSAFAPEFQQTDSGKVLSKLQARLDDLWEDITHSLHDQGHSHLGDP

SEQ ID NO: 946 - protein, 366 aa, Homo Sapiens; identical to SEQ ID NO: 945

SEQ ID NO: 947 - protein, 4563 aa, Homo Sapiens
MDPPRPALLALLALPALLLLLLAGARAEEEMLENVSLVCPKDATRFKHLRKYTYNYEAESSSGVPGTADSRSATRINCKVELEVPQLCSFILKTSQCTLKEVYGFNPEGKALLKKTKNSEEFAAAMSRYELKLAIPEGKQVFLYPEKDEPTYILNIKRGIISALLVPPETEEAKQVLFLDTVYGNCSTHFTVKTRKGNVATEISTERDLGQCDRFKPIRTGISPLALIKGMTRPLSTLISSSQSCQYTLDAKRKHVAEAICKEQHLFLPFSYKNKYGMVAQVTQTLKLEDTPKINSRFFGEGTKKMGLAFESTKSTSPPKQAEAVLKTLQELKKLTISEQNIQRANLFNKLVTELRGLSDEAVTSLLPQLIEVSSPITLQALVQCGQPQCSTHILQWLKRVHANPLLIDVVTYLVALIPEPSAQQLREIFNMARDQRSRATLYALSHAVNNYHKTNPTGTQELLDIANYLMEQIQDDCTGDEDYTYLILRVIGNMGQTMEQLTPELKSSILKCVQSTKPSLMIQKAAIQALRKMEPKDKDQEVLLQTFLDDASPGDKRLAAYLMLMRSPSQADINKIVQILPWEQNEQVKNFVASHIANILNSEELDIQDLKKLVKEALKESQLPTVMDFRKFSRNYQLYKSVSLPSLDPASAKIEGNLIFDPNNYLPKESMLKTTLTAFGFASADLIEIGLEGKGFEPTLEALFGKQGFFPDSVNKALYWVNGQVPDGVSKVLVDHFGYTKDDKHEQDMVNGIMLSVEKLIKDLKSKEVPEARAYLRILGEELGFASLHDLQLLGKLLLMGARTLQGIPQMIGEVIRKGSKNDFFLHYIFMENAFELPTGAGLQLQISSSGVIAPGAKAGVKLEVANMQAELVAKPSVSVEFVTNMGIIIPDFARSGVQMNTNFFHESGLEAHVALKAGKLKFIIPSPKRPVKLLSGGNTLHLVSTTKTEVIPPLIENRQSWSVCKQVFPGLNYCTSGAYSNASSTDSASYYPLTGDTRLELELRPTGEIEQYSVSATYELQREDRALVDTLKFVTQAEGAKQTEATMTFKYNRQSMTLSSEVQIPDFDVDLGTILRVNDESTEGKTSYRLTLDIQNKKITEVALMGHLSCDTKEERKIKGVISIPRLQAEARSEILAHWSPAKLLLQMDSSATAYGSTVSKRVAWHYDEEKIEFEWNTGTNVDTKKMTSNFPVDLSDYPKSLHMYANRLLDHRVPQTDMTFRHVGSKLIVAMSSWLQKASGSLPYTQTLQDHLNSLKEFNLQNMGLPDFHIPENLFLKSDGRVKYTLNKNSLKIEIPLPFGGKSSRDLKMLETVRTPALHFKSVGFHLPSREFQVPTFTIPKLYQLQVPLLGVLDLSTNVYSNLYNWSASYSGGNTSTDHFSLRARYHMKADSVVDLLSYNVQGSGETTYDHKNTFTLSCDGSLRHKFLDSNIKFSHVEKLGNNPVSKGLLIFDASSSWGPQMSASVHLDSKKKQHLFVKEVKIDGQFRVSSFYAKGTYGLSCQRDPNTGRLNGESNLRFNSSYLQGTNQITGRYEDGTLSLTSTSDLQSGIIKNTASLKYENYELTLKSDTNGKYKNFATSNKMDMTFSKQNALLRSEYQADYESLRFFSLLSGSLNSHGLELNADILGTDKINSGAHKATLRIGQDGISTSATTNLKCSLLVLENELNAELGLSGASMKLTTNGRFREHNAKFSLDGKAALTELSLGSAYQAMILGVDSKNIFNFKVSQEGLKLSNDMMGSYAEMKFDHTNSLNIAGLSLDFSSKLDNIYSSDKFYKQTVNLQLQPYSLVTTLNSDLKYNALDLTNNGKLRLEPLKLHVAGNLKGAYQNNEIKHIYAISSAALSASYKADTVAKVQGVEFSHRLNTDIAGLASAIDMSTNYNSDSLHFSNVFRSVMAPFTMTIDAHTNGNGKLALWGEHTGQLYSKFLLKAEPLAFTFSHDYKGSTSHHLVSRKSISAALEHKVSALLTPAEQTGTWKLKTQFNNNEYSQDLDAYNTKDKIGVELTGRTLADLTLLDSPIKVPLLLSEPINIIDALEMRDAVEKPQEFTIVAFVKYDKNQDVHSINLPFFETLQEYFERNRQTIIVVLENVQRNLKHINIDQFVRKYRAALGKLPQQANDYLNSFNWERQVSHAKEKLTALTKKYRITENDIQIALDDAKINFNEKLSQLQTYMIQFDQYIKDSYDLHDLKIAIANIIDEIIEKLKSLDEHYHIRVNLVKTIHDLHLFIENIDFNKSGSSTASWIQNVDTKYQIRIQIQEKLQQLKRHIQNIDIQHLAGKLKQHIEAIDVRVLLDQLGTTISFERINDILEHVKHFVINLIGDFEVAEKINAFRAKVHELIERYEVDQQIQVLMDKLVELAHQYKLKETIQKLSNVLQQVKIKDYFEKLVGFIDDAVKKLNELSFKTFIEDVNKFLDMLIKKLKSFDYHQFVDETNDKIREVTQRLNGEIQALELPQKAEALKLFLEETKATVAVYLESLQDTKITLIINWLQEALSSASLAHMKAKFRETLEDTRDRMYQMDIQQELQRYLSLVGQVYSTLVTYISDWWTLAAKNLTDFAEQYSIQDWAKRMKALVEQGFTVPEIKTILGTMPAFEVSLQALQKATFQTPDFIVPLTDLRIPSVQINFKDLKNIKIPSRFSTPEFTILNTFHIPSFTIDFVEMKVKIIRTIDQMLNSELQWPVPDIYLRDLKVEDIPLARITLPDFRLPEIAIPEFIIPTLNLNDFQVPDLHIPEFQLPHISHTIEVPTFGKLYSILKIQSPLFTLDANADIGNGTTSANEAGIAASITAKGESKLEVLNFDFQANAQLSNPKINPLALKESVKFSSKYLRTEHGSEMLFFGNAIEGKSNTVASLHTEKNTLELSNGVIVKINNQLTLDSNTKYFHKLNIPKLDFSSQADLRNEIKTLLKAGHIAWTSSGKGSWKWACPRFSDEGTHESQISFTIEGPLTSFGLSNKINSKHLRVNQNLVYESGSLNFSKLEIQSQVDSQHVGHSVLTAKGMALFGEGKAEFTGRHDAHLNGKVIGTLKNSLFFSAQPFEITASTNNEGNLKVRFPLRLTGKIDFLNNYALFLSPSAQQASWQVSARFNQYKYNQNFSAGNNENIMEAHVGINGEANLDFLNIPLTIPEMRLPYTIITTPPLKDFSLWEKTGLKEFLKTTKQSFDLSVKAQYKKNKHRHSITNPLAVLCEFISQSIKSFDRHFEKNRNNALDFVTKSYNETKIKFDKYKAEKSHDELPRTFQIPGYTVPVVNVEVSPFTIEMSAFGYVFPKAVSMPSFSILGSDVRVPSYTLILPSLELPVLHVPRNLKLSLPDFKELCTISHIFIPAMGNITYDFSFKSSVITLNTNAELFNQSDIVAHLLSSSSSVIDALQYKLEGTTRLTRKRGLKLATALSLSNKFVEGSHNSTVSLTTKNMEVSVATTTKAQIPILRMNFKQELNGNTKSKPTVSSSMEFKYDFNSSMLYSTAKGAVDHKLSLESLTSYFSIESSTKGDVKGSVLSREYSGTIASEANTYLNSKSTRSSVKLQGTSKIDDIWNLEVKENFAGEATLQRIYSLWEHSTKNHLQLEGLFFTNGEHTSKATLELSPWQMSALVQVHASQPSSFHDFPDLGQEVALNANTKNQKIRWKNEVRIHSGSFQSQVELSNDQEKAHLDIAGSLEGHLRFLKNIILPVYDKSLWDFLKLDVTTSIGRRQHLRVSTAFVYTKNPNGYSFSIPVKVLADKFIIPGLKLNDLNSVLVMPTFHVPFTDLQVPSCKLDFREIQIYKKLRTSSFALNLPTLPEVKFPEVDVLTKYSQPEDSLIPFFEITVPESQLTVSQFTLPKSVSDGIAALDLNAVANKIADFELPTIIVPEQTIEIPSIKFSVPAGIVIPSFQALTARFEVDSPVYNATWSASLKNKADYVETVLDSTCSSTVQFLEYELNVLGTHKIEDGTLASKTKGTFAHRDFSAEYEEDGKYEGLQEWEGKAHLNIKSPAFTDLHLRYQKDKKGISTSAASPAVGTVGMDMDEDDDFSKWNFYYSPQSSPDKKLTIFKTELRVRESDEETQIKVNWEEEAASGLLTSLKDNVPKATGVLYDYVNKYHWEHTGLTLREVSSKLRRNLQNNAEWVYQGAIRQIDDIDVRFQKAASGTTGTYQEWKDKAQNLYQELLTQEGQASFQGLKDNVFDGLVRVTQEFHMKVKHLIDSLIDFLNFPRFQFPGKPGIYTREELCTMFIREVGTVLSQVYSKVHNGSEILFSYFQDLVITLPFELRKHKLIDVISMYRELLKDLSKEAQEVFKAIQSLKTTEVLRNLQDLLQFIFQLIEDNIKQLKEMKFTYLINYIQDEINTIFSDYIPYVFKLLKENLCLNLHKFNEFIQNELQEASQELQQIHQYIMALREEYFDPSIVGWTVKYYELEEKIVSLIKNLLVALKDFHSEYIVSASNFTSQLSSQVEQFLHRNIQEYLSILTDPDGKGKEKIAELSATAQEIIKSQAIATKKIISDYHQQFRYKLQDFSDQLSDYYEKFIAESKRLIDLSIQNYHTFLIYITELLKKLQSTTVMNPYMKLAPGELTIIL

SEQ ID NO: 948 - protein, 828 aa, Homo Sapiens
MDPPRPALLALLALPALLLLLLAGARAEEEMLENVSLVCPKDATRFKHLRKYTYNYEAESSSGVPGTADSRSATRINCKVELEVPQLCSFILKTSQCTLKEVYGFNPEGKALLKKTKNSEEFAAAMSRYELKLAIPEGKQVFLYPEKDEPTYILNIKRGIISALLVPPETEEAKQVLFLDTVYGNCSTHFTVKTRKGNVATEISTERDLGQCDRFKPIRTGISPLALIKGMTRPLSTLISSSQSCQYTLDAKRKHVAEAICKEQHLFLPFSYKNKYGMVAQVTQTLKLEDTPKINSRFFGEGTKKMGLAFESTKSTSPPKQAEAVLKTLQELKKLTISEQNIQRANLFNKLVTELRGLSDEAVTSLLPQLIEVSSPITLQALVQCGQPQCSTHILQWLKRVHANPLLIDVVTYLVALIPEPSAQQLREIFNMARDQRSRATLYALSHAVNNYHKTNPTGTQELLDIANYLMEQIQDDCTGDEDYTYLILRVIGNMGQTMEQLTPELKSSILKCVQSTKPSLMIQKAAIQALRKMEPKDKDQEVLLQTFLDDASPGDKRLAAYLMLMRSPSQADINKIVQILPWEQNEQVKNFVASHIANILNSEELDIQDLKKLVKEALKESQLPTVMDFRKFSRNYQLYKSVSLPSLDPASAKIEGNLIFDPNNYLPKESMLKTTLTAFGFASADLIEIGLEGKGFEPTLEALFGKQGFFPDSVNKALYWVNGQVPDGVSKVLVDHFGYTKDDKHEQDMVNGIMLSVEKLIKDLKSKEVPEARAYLRILGEELGFASLHDLQLLGKLLLMDRPDSLTIPAAQARKDACTFFRDGGLP

SEQ ID NO: 949 - protein, 54 aa, Homo Sapiens
MRLFLSLPVLVVVLSIVLEGPAPAQGTPDVSSALDKLKEFGNTLEDKARELISR

SEQ ID NO: 950 - protein, 83 aa, Homo Sapiens
MRLFLSLPVLVVVLSIVLEGPAPAQGTPDVSSALDKLKEFGNTLEDKARELISRIKQSELSAKMREDDISPCCPGWSRTPDLK

SEQ ID NO: 951 - protein, 77 aa, Homo Sapiens
MRLFLSLPVLVVVLSIVLEGPAPAQGTPDVSSALDKLKEFGNTLEDKARELISRIKQSELSAKMREWFSETFQKVKE

SEQ ID NO: 952 - protein, 83 aa, Homo Sapiens
MRLFLSLPVLVVVLSIVLEGPAPAQGTPDVSSALDKLKEFGNTLEDKARELISRIKQSELSAKMREWFSETFQKVKEKLKIDS

SEQ ID NO: 953 - protein, 83 aa, Homo Sapiens; identical to SEQ ID NO: 952

SEQ ID NO: 954 - protein, 92 aa, Homo Sapiens
MRLFLSLPVLVVVLSIVLEGPAPAQGTPDVSSALDKLKEFGNTLEDKARELISRIKQSELSAKMRLEPFPGHGRAGGVVFRDISESEGETQD

SEQ ID NO: 955 - protein, 129 aa, Homo Sapiens
MRLFLSLPVLVVVLSIVLEGPAPAQGTPDVSSALDKLKEFGNTLEDKARELISRIKQSELSAKMRLEPFPGHGRAGVCFWVEPWQMVQDEQIEKKTSPGEADNIPLVTQLDLKGVVFRDISESEGETQD

SEQ ID NO: 956 - protein, 29 aa, Homo Sapiens
MRLFLSLPVLVVVLSIVLEGSGFQRHFRK

SEQ ID NO: 957 - protein, 39 aa, Homo Sapiens
MRLFLSLPVLVVVLSIVLEGSPRLSPAGAKSAQESTSNR

SEQ ID NO: 958 - protein, 87 aa, Homo Sapiens
MGTRLLPALFLVLLVLGFEVQGTQQPQQDEMPSPTFLTQVKESLSSYWESAKTAAQNLDLYSKSTAAMSTYTGIFTDQVLSVLKGEE

SEQ ID NO: 959 - protein, 72 aa, Homo Sapiens
MGTRLLPALFLVLLVLGFEVQGTQQPQQDEMPSPTFLTQVKESLSSYWESAKTAAQNLYEKTYLPAVDEKLR

SEQ ID NO: 960 - protein, 101 aa, Homo Sapiens
MGTRLLPALFLVLLVLGFEVQGTQQPQQDEMPSPTFLTQVKESLSSYWESAKTAAQNLYEKTYLPAVDEKLRDLYSKSTAAMSTYTGIFTDQVLSVLKGEE

SEQ ID NO: 961 - protein, 101 aa, Homo Sapiens; identical to SEQ ID NO: 960

SEQ ID NO: 962 - protein, 47 aa, Homo Sapiens
MGTRLLPALFLVLLVLGFGEGISLQLLGVSKDSRPEPVREDIPARCR

SEQ ID NO: 963 - protein, 117 aa, Homo Sapiens
MGTWGAPHRTLPCRNRGAMQPRVLLVVALLALLASARASEAEDASLLSFMQGYMKHATKTAKDALSSVQESQVAQQARGWVTDGFSSLKDYWSTVKDKFSEFWDLDPEVRPTSAVAA

SEQ ID NO: 964 - protein, 117 aa, Homo Sapiens; identical to SEQ ID NO: 963

SEQ ID NO: 965 - protein, 55 aa, Homo Sapiens
MQPRVLLVVALLALLASARASEAEDASLLSFMQGYMKHATKTAKDALSSVQESQV

SEQ ID NO: 966 - protein, 99 aa, Homo Sapiens
MQPRVLLVVALLALLASARASEAEDASLLSFMQGYMKHATKTAKDALSSVQESQVAQQARGWVTDGFSSLKDYWSTVKDKFSEFWDLDPEVRPTSAVAA

SEQ ID NO: 967 - protein, 73 aa, Homo Sapiens
MSLLRNRLQALPALCLCVLVLACIGACQPEAQEGTLSPPPKLKMSRWSLVRGRMKELLETVVNRTRDGWQWFW

SEQ ID NO: 968 - protein, 127 aa, Homo Sapiens
MSLLRNRLQALPALCLCVLVLACIGACQPEAQEGTLSPPPKLKMSRWSLVRGRMKELLETVVNRTRDGWQWFWSPSTFRGFMQTYYDDHLRDLGPLTKAWFLESKDSLLKKTHSLCPRLVCGDKDQG

SEQ ID NO: 969 - protein, 178 aa, Homo Sapiens
MSLLRNRLQALPALCLCVLVLACIGACQPEAQEGTLSPPPKLKMSRWSLVRGRMKELLETVVNRTRDGWQWFWSLDTMGTRLLPALFLVLLVLGFEVQGTQQPQQDEMPSPTFLTQVKESLSSYWESAKTAAQNLYEKTYLPAVDEKLRDLYSKSTAAMSTYTGIFTDQVLSVLKGEE

SEQ ID NO: 970 - protein, 127 aa, Homo Sapiens; identical to SEQ ID NO: 968

SEQ ID NO: 971 - protein, 215 aa, Homo Sapiens
MFKQLSCISLPSSCDYSSRSLLQPPSPKMVMLLLLLSALAGLFGAAEGQAFHLGKCPNPPVQENFDVNKYLGRWYEIEKIPTTFENGRCIQANYSLMENGKIKVLNQELRADGTVNQIEGEATPVNLTEPAKLEVKFSWFMPSAPYWILATDYENYALVYSCTCIIQLFHVDFAWILARNPNLPPETVDSLKNILTSNNIDVKKMTVTDQVNCPK

SEQ ID NO: 972 - protein, 108 aa, Homo Sapiens
MVMLLLLLSALAGLFGAAEGQAFHLGKCPNPPVQENFDVNKTESHFVTQGGVQHHHLGSLQPPPPGFKQFSCLSLPSSWDYSISEDGTKLRRSQQPLRMDAASRPTTH

SEQ ID NO: 973 - protein, 149 aa, Homo Sapiens
MVMLLLLLSALAGLFGAAEGQAFHLGKCPNPPVQENFDVNKYLGRWYEIEKIPTTFENGRCIQANYSLMENGKIKVLNQELRADGTVNQIEGEATPVNLTEPAKLEVKFSWFMPSAPYWILATDYENYALVYSCTCIIQLFHVDFAWIL

SEQ ID NO: 974 - protein, 189 aa, Homo Sapiens
MVMLLLLLSALAGLFGAAEGQAFHLGKCPNPPVQENFDVNKYLGRWYEIEKIPTTFENGRCIQANYSLMENGKIKVLNQELRADGTVNQIEGEATPVNLTEPAKLEVKFSWFMPSAPYWILATDYENYALVYSCTCIIQLFHVDFAWILARNPNLPPETVDSLKNILTSNNIDVKKMTVTDQVNCPKLS

SEQ ID NO: 975 - protein, 216 aa, Homo Sapiens
MKVLWAALLVTFLAGCQAKVEQAVETEPEPELRQQTEWQSGQRWELALGRFWDYLRWVQTLSEQVQEELLSSQVTQELRALMDETMKELKAYKSELEEQLTPVAEETRARLSKELQAAQARLGADMEDVCGRLVQYRGEVQAMLGQSTEELRVRLASHLRKLRKRLLRDADDLQKRLAVYQAGAREGAERGLSAIRERLGPLVEQGRVRAATVGSL

SEQ ID NO: 976 - protein, 219 aa, Homo Sapiens
MKVLWAALLVTFLAGCQAKVEQAVETEPEPELRQQTEWQSGQRWELALGRFWDYLRWVQTLSEQVQEELLSSQVTQELRALMDETMKELKAYKSELEEQLTPVAEETRARLSKELQAAQARLGADMEDVCGRLVQYRGEVQAMLGQSTEELRVRLASHLRKLRKRLLRDADDLQKRLAVYQAGAREGAERGLSAIRERLGPLVEQGRVRAATVGSLAGQ

SEQ ID NO: 977 - protein, 317 aa, Homo Sapiens [sequence omitted]

SEQ ID NO: 978 - protein, 269 aa, Homo Sapiens
MSSGASRKSWDPGNPWPPDWPITGRKMKVLWAALLVTFLAGCQAKVEQAVETEPEPELRQQTEWQSGQRWELALGRFWDYLRWVQTLSEQVQEELLSSQVTQELRALMDETMKELKAYKSELEEQLTPVAEETRARLSKELQAAQARLGADMEDVCGRLVQYRGEVQAMLGQSTEELRVRLASHLRKLRKRLLRDADDLQKRLAVYQAGAREGAERGLSAIRERLGPLVEQGRVRAATVGSLAGQPLQERAQAWGERLRARMEEMGSRT

SEQ ID NO: 979 - protein, 326 aa, Homo Sapiens
MTGLCGYSAPDMRGLRLIMIPVELLLCYLLLHPVDATSYGKQTNVLMHFPLSLESQTPSSDPLSCQFLHPKSLPGFSHMAPLPKFLVSLALRNALEEAGCQADVWALQLQLYRQGGVNATQVLIQHLRGLQKGRSTERNVSVEALASALQLLAREQQSTGRVGRSLPTEDCENEKEQAVHNVVQLLPGVGTFYNLGTALYYATQNCLGKARERGRDGAIDLGYDLLMTMAGMSGGPMGLAISAALKPALRSGVQQLIQYYQDQKDANISQPETTKEGLRAISDVSDLEETTTLASFISEVVSSAPYWGWAIIKSYDLDPGAGSLEI

SEQ ID NO: 980 - protein, 181 aa, Homo Sapiens
MISPVLILFSSFLCHVAIAGRTCPKPDDLPFSTVVPLKTFYEPGEEITYSCKPGYVSRGGMRKFICPLTGLWPINTLKCTPRVCPFAGILENGAVRYTTFEYPNTISFSCNTGFYLNGADSAKCTEEGKWSPELPVCAPIICPPPSIPTFATLRVYKPSAGNNSLYRDTAVFECLPQHAMF

SEQ ID NO: 981 - protein, 345 aa, Homo Sapiens
MISPVLILFSSFLCHVAIAGRTCPKPDDLPFSTVVPLKTFYEPGEEITYSCKPGYVSRGGMRKFICPLTGLWPINTLKCTPRVCPFAGILENGAVRYTTFEYPNTISFSCNTGFYLNGADSAKCTEEGKWSPELPVCAPIICPPPSIPTFATLRVYKPSAGNNSLYRDTAVFECLPQHAMFGNDTITCTTHGNWTKLPECREVKCPFPSRPDNGFVNYPAKPTLYYKDKATFGCHDGYSLDGPEEIECTKLGNWSAMPSCKASCKVPVKKATVVYQGERVKIQEKFKNGMLHGDKVSFFCKNKEKKCSYTEDAQCIDGTIEVPKCFKEHSSLAFWKTDASDVKPC

SEQ ID NO: 982 - protein, 200 aa, Homo Sapiens
MRKFICPLTGLWPINTLKCTPRVCPFAGILENGAVRYTTFEYPNTISFSCNTGFYLNGADSAKCTEEGKWSPELPVCAPIICPPPSIPTFATLRVYKPSAGNNSLYRDTAVFECLPQHAMFGNDTITCTTHGNWTKLPECREVKCPFPSRPDNGFVNYPAKPTLYYKDKATFGCHDGYSLDGPEEIECTKLGNWSAMPSC

SEQ ID NO: 983 - protein, 104 aa, Homo Sapiens
  misc_feature (1)..(1): Xaa can be any naturally occurring amino acid
XQHAMFGNDTITCTTHGNWTKLPECREVKCPFPSRPDNGFVNYPAKPTLYYKDKATFGCHDGYSLDGPEEIECTKLGNWSAMPSCKEHSSLAFWKTDASDVKPC

SEQ ID NO: 984 - protein, 160 aa, Homo Sapiens
MEGAALLRVSVLCIWMSALFLGVGVRAEEAGARVQQNVPSGTDTGDPQSKPLGDWAAGTMDPESSIFIEDAIKYFKEKVSTQNLLLLLTDNEAWNGFVAAAELPRNEADELRKALDNLARQMIMKDKNWHDKGQQYRNWFLKEFPRLKSELEDNIRRLRA

SEQ ID NO: 985 - protein, 398 aa, Homo Sapiens
MEGAALLRVSVLCIWMSALFLGVGVRAEEAGARVQQNVPSGTDTGDPQSKPLGDWAAGTMDPESSIFIEDAIKYFKEKVSTQNLLLLLTDNEAWNGFVAAAELPRNEADELRKALDNLARQMIMKDKNWHDKGQQYRNWFLKEFPRLKSELEDNIRRLRALADGVQKVHKGTTIANVVSGSLSISSGILTLVGMGLAPFTEGGSLVLLEPGMELGITAALTGITSSTMDYGKKWWTQAQAHDLVIKSLDKLKEVREFLGENISNFLSLAGNTYQLTRGIGKDIRALRRARANLQSVPHASASRPRVTEPISAESGEQVERVNEPSILEMSRGVKLTDVAPVSFFLVLDVVYLVYESKHLHEGAKSETAEELKKVAQELEEKLNILNNNYKILQADQEL

SEQ ID NO: 986 - protein, 398 aa, Homo Sapiens; identical to SEQ ID NO: 985

SEQ ID NO: 987 - protein, 398 aa, Homo Sapiens; identical to SEQ ID NO: 985

SEQ ID NO: 988 - protein, 141 aa, Homo Sapiens
MEGAALLRVSVLCIWMSALFLGVGVRAEEAGARVQQNVPSGTDTGDPQSKPLGDWAAGTMDPGPAGSRGDSGEPCTLRPACRGQRQHGGASRISAEGPAPMPRRRTPSTAHLRVPKTSRRNLLCMRAVSLLRMPLSISRKK

SEQ ID NO: 989 - protein, 141 aa, Homo Sapiens; identical to SEQ ID NO: 988

SEQ ID NO: 990 - protein, 142 aa, Homo Sapiens
MEGAALLRVSVLCIWMSALFLGVGVRAEEAGARVQQNVPSGTDTGDPQSKPLGDWAAGTMDPGPAGSRGDSGEPCTLRPACRGQRQHGGASRISAEGPAPMPRRRTPSTAHLRVPKTSRRNLLCMVVVLNAVEFETLFLNFK

SEQ ID NO: 991 - protein, 380 aa, Homo Sapiens
MEGAALLRVSVLCIWVQQNVPSGTDTGDPQSKPLGDWAAGTMDPESSIFIEDAIKYFKEKVSTQNLLLLLTDNEAWNGFVAAAELPRNEADELRKALDNLARQMIMKDKNWHDKGQQYRNWFLKEFPRLKSELEDNIRRLRALADGVQKVHKGTTIANVVSGSLSISSGILTLVGMGLAPFTEGGSLVLLEPGMELGITAALTGITSSTMDYGKKWWTQAQAHDLVIKSLDKLKEVREFLGENISNFLSLAGNTYQLTRGIGKDIRALRRARANLQSVPHASASRPRVTEPISAESGEQVERVNEPSILEMSRGVKLTDVAPVSFFLVLDVVYLVYESKHLHEGAKSETAEELKKVAQELEEKLNILNNNYKILQADQEL

SEQ ID NO: 992 - protein, 123 aa, Homo Sapiens
MEGAALLRVSVLCIWVQQNVPSGTDTGDPQSKPLGDWAAGTMDPGPAGSRGDSGEPCTLRPACRGQRQHGGASRISAEGPAPMPRRRTPSTAHLRVPKTSRRNLLCMRAVSLLRMPLSISRKK

SEQ ID NO: 993 - protein, 414 aa, Homo Sapiens
MRFKSHTVELRRPCSDMEGAALLRVSVLCIWMSALFLGVGVRAEEAGARVQQNVPSGTDTGDPQSKPLGDWAAGTMDPESSIFIEDAIKYFKEKVSTQNLLLLLTDNEAWNGFVAAAELPRNEADELRKALDNLARQMIMKDKNWHDKGQQYRNWFLKEFPRLKSELEDNIRRLRALADGVQKVHKGTTIANVVSGSLSISSGILTLVGMGLAPFTEGGSLVLLEPGMELGITAALTGITSSTMDYGKKWWTQAQAHDLVIKSLDKLKEVREFLGENISNFLSLAGNTYQLTRGIGKDIRALRRARANLQSVPHASASRPRVTEPISAESGEQVERVNEPSILEMSRGVKLTDVAPVSFFLVLDVVYLVYESKHLHEGAKSETAEELKKVAQELEEKLNILNNNYKILQADQEL

SEQ ID NO: 994 - protein, 118 aa, Homo Sapiens
MRFKSHTVELRSTLSQPLFSCSRRRPCSDMEGAALLRVSVLCIWMSALFLGVGVRAEEAGARVQQNVPSGTDTGDPQSKPLGDWAAGTMDPESSIFIEDAIKYFKEKVSTQNLLLLLT

SEQ ID NO: 995 - protein, 331 aa, Homo Sapiens
MDSEKKRFTEEATKYFRERVSPVHLQILLTNNEAWKRFVTAAELPRDEADALYEALKKLRTYAAIEDEYVQQKDEQFREWFLKEFPQVKRKIQESIEKLRALANGIEEVHRGCTISNVVSSSTGAASGIMSLAGLVLAPFTAGTSLALTAAGVGLGAASAVTGITTSIVEHSYTSSAEAEASRLTATSIDRLKVFKEVMRDITPNLLSLLNNYYEATQTIGSEIRAIRQARARARLPVTTWRISAGSGGQAERTIAGTTRAVSRGARILSATTSGIFLALDVVNLVYESKHLHEGAKSASAEELRRQAQELEENLMELTQIYQRLNPCHTH

SEQ ID NO: 996 - protein, 402 aa, Homo Sapiens
MGLGQGWGWEASCFACLIRSCCQVVTFTFPFGFQGISQSLENVSGYYADARLEVGSTQLRTAGSCSHSFKRSFLEKKRFTEEATKYFRERVSPVHLQILLTNNEAWKRFVTAAELPRDEADALYEALKKLRTYAAIEDEYVQQKDEQFREWFLKEFPQVKRKIQESIEKLRALANGIEEVHRGCTISNVVSSSTGAASGIMSLAGLVLAPFTAGTSLALTAAGVGLGAASAVTGITTSIVEHSYTSSAEAEASRLTATSIDRLKVFKEVMRDITPNLLSLLNNYYEATQTIGSEIRAIRQARARARLPVTTWRISAGSGGQAERTIAGTTRAVSRGARILSATTSGIFLALDVVNLVYESKHLHEGAKSASAEELRRQAQELEENLMELTQIYQRLNPCHTH

SEQ ID NO: 997 - protein, 97 aa, Homo Sapiens
MGLGQGWGWEASCFACLIRSCCQVVTFTFPFGFQGISQSLENVSGYYADARLEVGSTQLRTAGSCSHSFKRSFLGLRKKTNPSSQVSDWRAPWKVSQ

SEQ ID NO: 998 - protein, 82 aa, Homo Sapiens
MGLGQGWGWEASCFACLIRSCCQVVTFTFPFGFQGISQSLENVSGYYADARLEVGSTQLRTAGSCSHSFKRSFLGQKDPALV

SEQ ID NO: 999 - protein, 82 aa, Homo Sapiens; identical to SEQ ID NO: 998

SEQ ID NO: 1000 - protein, 202 aa, Homo Sapiens
MSLAGLVLAPFTAGTSLALTAAGVGLGAASAVTGITTSIVEHSYTSSAEAEASRLTATSIDRLKVFKEVMRDITPNLLSLLNNYYEATQTIGSEIRAIRQARARARLPVTTWRISAGSGGQAERTIAGTTRAVSRGARILSATTSGIFLALDVVNLVYESKHLHEGAKSASAEELRRQAQELEENLMELTQIYQRLNPCHTH

SEQ ID NO: 1001 - protein, 202 aa, Homo Sapiens; identical to SEQ ID NO: 1000

SEQ ID NO: 1002 - protein, 202 aa, Homo Sapiens; identical to SEQ ID NO: 1000

SEQ ID NO: 1003 - protein, 40 aa, Homo Sapiens
SQSLENVSGYYADARLEVGSTQLRTAGSCSHSFKRSFLGE

SEQ ID NO: 1004 - protein, 39 aa, Homo Sapiens
  misc_feature (1)..(1): Xaa can be any naturally occurring amino acid
XYADARLEVGSTQLRTAGSCSHSFKRSFLAWLPQPPRFL

SEQ ID NO: 1005 - protein, 86 aa, Homo Sapiens
  misc_feature (1)..(1): Xaa can be any naturally occurring amino acid
XYADARLEVGSTQLRTAGSCSHSFKRSFLAWWYVPVGTTTWEVEAEASLAARTYRQKQGGQRVSSTAPVNSPRQTLGHRVQDTDLE

SEQ ID NO: 1006 - protein, 33 aa, Homo Sapiens
  misc_feature (1)..(1): Xaa can be any naturally occurring amino acid
XYADARLEVGSTQLRTAGSCSHSFKRSFLEMSI

SEQ ID NO: 1007 - protein, 52 aa, Homo Sapiens
  misc_feature (1)..(1): Xaa can be any naturally occurring amino acid
XYADARLEVGSTQLRTAGSCSHSFKRSFLGLRKKTNPSSQVSDWRAPWKVSQ

SEQ ID NO: 1008 - protein, 52 aa, Homo Sapiens; identical to SEQ ID NO: 1007
  misc_feature (1)..(1): Xaa can be any naturally occurring amino acid

SEQ ID NO: 1009 - protein, 37 aa, Homo Sapiens
  misc_feature (1)..(1): Xaa can be any naturally occurring amino acid
XYADARLEVGSTQLRTAGSCSHSFKRSFLGQKDPALV

SEQ ID NO: 1010 - protein, 116 aa, Homo Sapiens
MAAGSAPMQLHLRATIRMKDGLCVPRKWIYHLTEGSTDLRTEGRPDMKTELFSSSCPGGIMLNETGQGYQRFLLYNRSPHPPEKCVEEFKSLTSCLDSKAFLLTPRNQEACELSNN

SEQ ID NO: 1011 - protein, 129 aa, Homo Sapiens
MAAGSAPMQLHLRATIRMKDGLCVPRKWIYHLTEGSTDLRTEGRPDMKTELFSSSCPGGIMLNETGQGYQRFLLYNRSPHPPEKCVEEFKSLTSCLDSKAFLLTPRNQGKGLKSHKTGLGLTKSSGVTG

SEQ ID NO: 1012 - protein, 188 aa, Homo Sapiens
MFHQIWAALLYFYGIILNSIYQCPEHSQLTTLGVDGKEFPEVHLGQWYFIAGAAPTKEELATFDPVDNIVFNMAAGSAPMQLHLRATIRMKDGLCVPRKWIYHLTEGSTDLRTEGRPDMKTELFSSSCPGGIMLNETGQGYQRFLLYNRSPHPPEKCVEEFKSLTSCLDSKAFLLTPRNQEACELSNN

SEQ ID NO: 1013 - protein, 268 aa, Homo Sapiens
MAAIRMGKLTTMPAGLIYASVSVHAAKQEESKKQLVKPEQLPIYTAPPLQSKYVEEQPGHLQMGFASIRTATGCYIGWCKGVYVFVKNGIMDTVQFGKDAYVYLKNPPRDFLPKMGVITVSGLAGLVSARKGSKFKKITYPLGLATLGATVCYPVQSVIIAKVTAKKVYATSQQIFGAVKSLWTKSSKEESLPKPKEKTKLGSSSEIEVPAKTTHVLKHSVPLPTELSSEAKTKSESTSGATQFMPDPKLMDHGQSHPEDIDMYSTRS

SEQ ID NO: 1014 - protein, 263 aa, Homo Sapiens [sequence omitted]

SEQ ID NO: 1015 - protein, 268 aa, Homo Sapiens [sequence omitted]

SEQ ID NO: 1016 - protein, 552 aa, Homo Sapiens
MAECNLVAILISSIDNPLDKNLDNGGNSCLDFRPLNSFSQPQVLLAAAVCTKAGKAIVSRQFVEMTRTRIEGLLAAFPKLMNTGKQHTFVETESVRYVYQPMEKLYMVLITTKNSNILEDLETLRLFSRVIPEYCRALEENEISEHCFDLIFAFDEIVALGYRENVNLAQIRTFTEMDSHEEKVFRAVRETQEREAKAEMRRKAKELQQARRDAERQGKKAPGFGGFGSSAVSGGSTAAMITETIIETDKPKVAPAPARPSGPSKALKLGAKGKEVDNFVDKLKSEGETIMSSSMGKRTSEATKMHAPPINMESVHMKIEEKITLTCGRDGGLQNMELHGMIMLRISDDKYGRIRLHVENEDKKGVQLQTHPNVDKKLFTAESLIGLKNPEKSFPVNSDVGVLKWRLQTTEESFIPLTINCWPSESGNGCDVNIEYELQEDNLELNDVVITIPLPSGVGAPVIGEIDGEYRHDSRRNTLEWCLPVIDAKNKSGSLEFSIAGQPNDFFPVQVSFVSKKNYCNIQVTKVTQVDGNSPVRFSTETTFLVDKYEIL

SEQ ID NO: 1017 - protein, 423 aa, Homo Sapiens
MIPEYCRALEENEISEHCFDLIFAFDEIVALGYRENVNLAQIRTFTEMDSHEEKVFRAVRETQEREAKAEMRRKAKELQQARRDAERQGKKAPGFGGFGSSAVSGGSTAAMITETIIETDKPKVAPAPARPSGPSKALKLGAKGKEVDNFVDKLKSEGETIMSSSMGKRTSEATKMHAPPINMESVHMKIEEKITLTCGRDGGLQNMELHGMIMLRISDDKYGRIRLHVENEDKKGVQLQTHPNVDKKLFTAESLIGLKNPEKSFPVNSDVGVLKWRLQTTEESFIPLTINCWPSESGNGCDVNIEYELQEDNLELNDVVITIPLPSGVGAPVIGEIDGEYRHDSRRNTLEWCLPVIDAKNKSGSLEFSIAGQPNDFFPVQVSFVSKKNYCNIQVTKVTQVDGNSPVRFSTETTFLVDKYEIL

SEQ ID NO: 1018 - protein, 83 aa, Homo Sapiens
MVLLAAAVCTKAGKAIVSRQFVEMTRTRIEGLLAAFPKLMNTGKQHTFVETESIRMSSVLFPYQFIPSSLCQVVFLSGPVLPV

SEQ ID NO: 1019 - protein, 189 aa, Homo Sapiens
MVLLAAAVCTKAGKAIVSRQFVEMTRTRIEGLLAAFPKLMNTGKQHTFVETESVRYVYQPMEKLYMVLITTKNSNILEDLETLRLFSRVIPEYCRALEENEISEHCFDLIFAFDEIVALGYRENVNLAQIRTFTEMDSHEEKVFRAVRETQEREAKAEMRRKAKELQQAQSVGITGMSHHAQLLLYFNP

SEQ ID NO: 1020 - protein, 511 aa, Homo Sapiens
MVLLAAAVCTKAGKAIVSRQFVEMTRTRIEGLLAAFPKLMNTGKQHTFVETESVRYVYQPMEKLYMVLITTKNSNILEDLETLRLFSRVIPEYCRALEENEISEHCFDLIFAFDEIVALGYRENVNLAQIRTFTEMDSHEEKVFRAVRETQEREAKAEMRRKAKELQQARRDAERQGKKAPGFGGFGSSAVSGGSTAAMITETIIETDKPKVAPAPARPSGPSKALKLGAKGKEVDNFVDKLKSEGETIMSSSMGKRTSEATKMHAPPINMESVHMKIEEKITLTCGRDGGLQNMELHGMIMLRISDDKYGRIRLHVENEDKKGVQLQTHPNVDKKLFTAESLIGLKNPEKSFPVNSDVGVLKWRLQTTEESFIPLTINCWPSESGNGCDVNIEYELQEDNLELNDVVITIPLPSGVGAPVIGEIDGEYRHDSRRNTLEWCLPVIDAKNKSGSLEFSIAGQPNDFFPVQVSFVSKKNYCNIQVTKVTQVDGNSPVRFSTETTFLVDKYEIL

SEQ ID NO: 1021 - protein, 256 aa, Homo Sapiens
MKPALCLVAMGALVMDSSPQCTKQLLSERFGRGSRTVDLELELQIELLRETKRKYESVLQLGRALTAHLYSLLQTQHALGDAFADLSQKSPELQEEFGYNAETQKLLCKNGETLLGAVNFFVSSINTLVTKTMEDTLMTVKQYEAARLEYDAYRTDLEELSLGPRDAGTRGRLESAQATFQAHRDKYEKLRGDVAIKLKFLEENKIKVMHKQLLLFHNAVSAYFAGNQKQLEQTLQQFNIKLRPPGAEKPSWLEEQ

SEQ ID NO: 1022 - protein, 374 aa, Homo Sapiens
MTDGILGKAATMEIPIHGNGEARQLPEDDGLEQDLQQVMVSGPNLNETSIVSGGYGGSGDGLIPTGKSISCARREVWVGPQRCLVYLREAGVRELDPLGSGRHPSHSTTPSGPGDEVARGIAGEKFDIVKKWGINTYKCTKQLLSERFGRGSRTVDLELELQIELLRETKRKYESVLQLGRALTAHLYSLLQTQHALGDAFADLSQKSPELQEEFGYNAETQKLLCKNGETLLGAVNFFVSSINTLVTKTMEDTLMTVKQYEAARLEYDAYRTDLEELSLGPRDAGTRGRLESAQATFQAHRDKYEKLRGDVAIKLKFLEENKIKVMHKQLLLFHNAVSAYFAGNQKQLEQTLQQFNIKLRPPGAEKPSWLEEQ

SEQ ID NO: 1023 - protein, 159 aa, Homo Sapiens
MTDGILGKAATMEIPIHGNGEARQLPEDDGLEQDLQQVMVSGPNLNETSIVSGGYGGSGDGLIPTGSGRHPSHSTTPSGPGDEVARGIAGEKFDIVKKWGINTYKCTKQLLSERFGRGSRTVDLELELQIELLRETKRKRNLATMQRHRNYYARMGKRC

SEQ ID NO: 1024 - protein, 341 aa, Homo Sapiens
MTDGILGKAATMEIPIHGNGEARQLPEDDGLEQDLQQVMVSGPNLNETSIVSGGYGGSGDGLIPTGSGRHPSHSTTPSGPGDEVARGIAGEKFDIVKKWGINTYKCTKQLLSERFGRGSRTVDLELELQIELLRETKRKYESVLQLGRALTAHLYSLLQTQHALGDAFADLSQKSPELQEEFGYNAETQKLLCKNGETLLGAVNFFVSSINTLVTKTMEDTLMTVKQYEAARLEYDAYRTDLEELSLGPRDAGTRGRLESAQATFQAHRDKYEKLRGDVAIKLKFLEENKIKVMHKQLLLFHNAVSAYFAGNQKQLEQTLQQFNIKLRPPGAEKPSWLEEQ

SEQ ID NO: 1025 - protein, 341 aa, Homo Sapiens; identical to SEQ ID NO: 1024

SEQ ID NO: 1026 - protein, 202 aa, Homo Sapiens
MTDGILGKAATMEIPIHGNGEARQLPEDDGLEQDLQQVMVSGPNLNETSIVSGGYGGSGDGLIPTGSGRHPSHSTTPSGPGDEVARGIAGEKFDIVKKWGINTYKCTKQLLSERFGRGSRTVDLELELQIELLRETKRKYESVLQLGRALTAHLYSLLQTQHALGDAFADLSQKSPELQPTGRTPSGWAQPYPQQHSPVEAA

SEQ ID NO: 1027 - protein, 303 aa, Homo Sapiens
MVSGPNLNETSIVSGGYGGSGDGLIPTGSGRHPSHSTTPSGPGDEVARGIAGEKFDIVKKWGINTYKCTKQLLSERFGRGSRTVDLELELQIELLRETKRKYESVLQLGRALTAHLYSLLQTQHALGDAFADLSQKSPELQEEFGYNAETQKLLCKNGETLLGAVNFFVSSINTLVTKTMEDTLMTVKQYEAARLEYDAYRTDLEELSLGPRDAGTRGRLESAQATFQAHRDKYEKLRGDVAIKLKFLEENKIKVMHKQLLLFHNAVSAYFAGNQKQLEQTLQQFNIKLRPPGAEKPSWLEEQ

SEQ ID NO: 1028 - protein, 535 aa, Homo Sapiens
MAWILDCLFASAFEPRPRRVSVLGGAPGHNPDRRTKMVSIHSLSELERLKLQETAYHELVARHFLSEFKPDRALPIDRPNTLDKWFLILRGQQRAVSHKTFGISLEEVLVNEFTRRKHLELTATMQVEEATGQAAGRRRGNVVRRVFGRIRRFFSRRRNEPTLPREFTRRGRRGAVSVDSLAELEDGALLLQTLQLSKISFPIGQRLLGSKRKMSLNPIAKQIPQVVEACCQFIEKHGLSAVGIFTLEYSVQRVRQLREEFDQGLDVVLDDNQNVHDVAALLKEFFRDMKDSLLPDDLYMSFLLTATLKPQDQLSALQLLVYLMPPCHSDTLERLLKALHKITENCEDSIGIDGQLVPGNRMTSTNLALVFGSALLKKGKFGKRESRKTKLGIDHYVASVNVVRAMIDNWDVLFQVPPHIQRQVAKRVWKSSPEALDFIRRRNLRKIQSARIKMEEDALLSDPVETSAEARAAVLAQSKPSDEGSSEEPAVPSGTARSHDDEEGAGNPPIPEQDRPLLRVPREKEAKTGVSYFFP

SEQ ID NO: 1029 - protein, 547 aa, Homo Sapiens
MGGCIPFLKAARALCPRIMPPLLLLSAFIFLVSVLGGAPGHNPDRRTKMVSIHSLSELERLKLQETAYHELVARHFLSEFKPDRALPIDRPNTLDKWFLILRGQQRAVSHKTFGISLEEVLVNEFTRRKHLELTATMQVEEATGQAAGRRRGNVVRRVFGRIRRFFSRRRNEPTLPREFTRRGRRGAVSVDSLAELEDGALLLQTLQLSKISFPIGQRLLGSKRKMSLNPIAKQIPQVVEACCQFIEKHGLSAVGIFTLEYSVQRVRQLREEFDQGLDVVLDDNQNVHDVAALLKEFFRDMKDSLLPDDLYMSFLLTATLKPQDQLSALQLLVYLMPPCHSDTLERLLKALHKITENCEDSIGIDGQLVPGNRMTSTNLALVFGSALLKKGKFGKRESRKTKLGIDHYVASVNVVRAMIDNWDVLFQVPPHIQRQVAKRVWKSSPEALDFIRRRNLRKIQSARIKMEEDALLSDPVETSAEARAAVLAQSKPSDEGSSEEPAVPSGTARSHDDEEGAGNPPIPEQDRPLLRVPREKEAKTGVSYFFP

SEQ ID NO: 1030 - protein, 411 aa, Homo Sapiens
MQVEEATGQAAGRRRGNVVRRVFGRIRRFFSRRRNEPTLPREFTRRGRRGAVSVDSLAELEDGALLLQTLQLSKISFPIGQRLLGSKRKMSLNPIAKQIPQVVEACCQFIEKHGLSAVGIFTLEYSVQRVRQLREEFDQGLDVVLDDNQNVHDVAALLKEFFRDMKDSLLPDDLYMSFLLTATLKPQDQLSALQLLVYLMPPCHSDTLERLLKALHKITENCEDSIGIDGQLVPGNRMTSTNLALVFGSALLKKGKFGKRESRKTKLGIDHYVASVNVVRAMIDNWDVLFQVPPHIQRQVAKRVWKSSPEALDFIRRRNLRKIQSARIKMEEDALLSDPVETSAEARAAVLAQSKPSDEGSSEEPAVPSGTARSHDDEEGAGNPPIPEQDRPLLRVPREKEAKTGVSYFFP

SEQ ID NO: 1031 - protein, 411 aa, Homo Sapiens; identical to SEQ ID NO: 1030

SEQ ID NO: 1032 - protein, 516 aa, Homo Sapiens
MSVLGGAPGHNPDRRTKMVSIHSLSELERLKLQETAYHELVARHFLSEFKPDRALPIDRPNTLDKWFLILRGQQRAVSHKTFGISLEEVLVNEFTRRKHLELTATMQVEEATGQAAGRRRGNVVRRVFGRIRRFFSRRRNEPTLPREFTRRGRRGAVSVDSLAELEDGALLLQTLQLSKISFPIGQRLLGSKRKMSLNPIAKQIPQVVEACCQFIEKHGLSAVGIFTLEYSVQRVRQLREEFDQGLDVVLDDNQNVHDVAALLKEFFRDMKDSLLPDDLYMSFLLTATLKPQDQLSALQLLVYLMPPCHSDTLERLLKALHKITENCEDSIGIDGQLVPGNRMTSTNLALVFGSALLKKGKFGKRESRKTKLGIDHYVASVNVVRAMIDNWDVLFQVPPHIQRQVAKRVWKSSPEALDFIRRRNLRKIQSARIKMEEDALLSDPVETSAEARAAVLAQSKPSDEGSSEEPAVPSGTARSHDDEEGAGNPPIPEQDRPLLRVPREKEAKTGVSYFFP

SEQ ID NO: 1033 - protein, 218 aa, Homo Sapiens
MVSIHSLSELERLKLQETAYHELVARHFLSEFKPDRALPIDRPNTLDKWFLILRGQQRAVSHKTFGISLEEVLVNEFTRRKHLELTATMQVEEATGQAAGRRRGNVVRRVFGRIRRFFSRRRNEPTLPREFTRRGRRGAVSVDSLAELEDGALLLQTLQLSKISFPIGQRLLGSKRKMSLNPIAKQIPQVVEACCQFIEKHGLSAVGIFTLEYSVQRV

SEQ ID NO: 1034 - protein, 78 aa, Homo Sapiens
GRQDGSESEAVAVALAGRLRELLRDLPPENRASLQYLLRHLRRPASSRLSSSTTAWSSRRSRRRPPGARTSHPTSELR

SEQ ID NO: 1035 - protein, 1019 aa, Homo Sapiens
MCICGTAHPVLDEGPVRCRAGPRDLLEARRPRAHECLGEALRVMHQIISKYPLLNTVETLTAAGTLIAKVKAFHYESNNDLEKQEFEKALETIAVAFSSTVSEFLMGEVDSSTLLAVPPGDSSQSMESLYGPGSEGTPPSLEDCDAGCLPAEEVDVLLQRCEGGVDAALLYAKNMAKYMKDLISYLEKRTTLEMEFAKGLQKIAHNCRQSVMQEPHMPLLSIYSLALEQDLEFGHSMVQAVGTLQTQTFMQPLTLRRLEHEKRRKEIKEAWHRAQRKLQEAESNLRKAKQGYVQRCEDHDKARFLVAKAEEEQAGSAPGAGSTATKTLDKRRRLEEEAKNKAEEAMATYRTCVADAKTQKQELEDTKVTALRQIQEVIRQSDQTIKSATISYYQMMHMQTAPLPVHFQMLCESSKLYDPGQQYASHVRQLQRDQEPDVHYDFEPHVSANAWSPVMRARKSSFNVSDVARPEAAGSPPEEGGCTEGTPAKDHRAGRGHQVHKSWPLSISDSDSGLDPGPGAGDFKKFERTSSSGTMSSTEELVDPDGGAGASAFEQADLNGMTPELPVAVPSGPFRHEGLSKAARTHRLRKLRTPAKCRECNSYVYFQGAECEECCLACHKKCLETLAIQCGHKKLQGRLQLFGQDFSHAARSAPDGVPFIVKKCVCEIERRALRTKGIYRVNGVKTRVEKLCQAFENGKELVELSQASPHDISNVLKLYLRQLPEPLISFRLYHELVGLAKDSLKAEAEAKAASRGRQDGSESEAVAVALAGRLRELLRDLPPENRASLQYLLRHLRRIVEVEQDNKMTPGNLGIVFGPTLLRPRPTEATVSLSSLVDYPHQARVIETLIVHYGLVFEEEPEETPGGQDESSNQRAEVVVQVPYLEAGEAVVYPLQEAAADGCRESRVVSNDSDSDLEEASELLSSSEASALGHLSFLEQQQSEASLEVASGSHSGSEEQLEATAREDGDGDEDGPAQQLSGFNTNQSNNVLQAPLPPMRLRGGRMTLGSCRERQPEFV

SEQ ID NO: 1036 - protein, 1136 aa, Homo Sapiens
MFSRKKRELMKTPSISKKNRAGSPSPQPSGELPRKDGADAVFPGPSLEPPAGSSGVKATGTLKRPTSLSRHASAAGFPLSGAASWTLGRSHRSPLTAASPGELPTEGAGPDVVEDISHLLADVARFAEGLEKLKECVLRDDLLEARRPRAHECLGEALRVMHQIISKYPLLNTVETLTAAGTLIAKVKAFHYESNNDLEKQEFEKALETIAVAFSSTVSEFLMGEVDSSTLLAVPPGDSSQSMESLYGPGSEGTPPSLEDCDAGCLPAEEVDVLLQRCEGGVDAALLYAKNMAKYMKDLISYLEKRTTLEMEFAKGLQKIAHNCRQSVMQEPHMPLLSIYSLALEQDLEFGHSMVQAVGTLQTQTFMQPLTLRRLEHEKRRKEIKEAWHRAQRKLQEAESNLRKAKQGYVQRCEDHDKARFLVAKAEEEQAGSAPGAGSTATKTLDKRRRLEEEAKNKAEEAMATYRTCVADAKTQKQELEDTKVTALRQIQEVIRQSDQTIKSATISYYQMMHMQTAPLPVHFQMLCESSKLYDPGQQYASHVRQLQRDQEPDVHYDFEPHVSANAWSPVMRARKSSFNVSDVARPEAAGSPPEEGGCTEGTPAKDHRAGRGHQVHKSWPLSISDSDSGLDPGPGAGDFKKFERTSSSGTMSSTEELVDPDGGAGASAFEQADLNGMTPELPVAVPSGPFRHEGLSKAARTHRLRKLRTPAKCRECNSYVYFQGAECEECCLACHKKCLETLAIQCGHKKLQGRLQLFGQDFSHAARSAPDGVPFIVKKCVCEIERRALRTKGIYRVNGVKTRVEKLCQAFENGKELVELSQASPHDISNVLKLYLRQLPEPLISFRLYHELVGLAKDSLKAEAEAKAASRGRQDGSESEAVAVALAGRLRELLRDLPPENRASLQYLLRHLRRIVEVEQDNKMTPGNLGIVFGPTLLRPRPTEATVSLSSLVDYPHQARVIETLIVHYGLVFEEEPEETPGGQDESSNQRAEVVVQVPYLEAGEAVVYPLQEAAADGCRESRVVSNDSDSDLEEASELLSSSEASALGHLSFLEQQQSEASLEVASGSHSGSEEQLEATAREDGDGDEDGPAQQLSGFNTNQSNNVLQAPLPPMRLRGGRMTLGSCRERQPEFV

SEQ ID NO: 1037 - protein, 1163 aa, Homo Sapiens
MFSRKKRELMKTPSISKKNRAGSPSPQPSGPHFISGETEAVSRPENPFNELPSDLPKELPRKDGADAVFPGPSLEPPAGSSGVKATGTLKRPTSLSRHASAAGFPLSGAASWTLGRSHRSPLTAASPGELPTEGAGPDVVEDISHLLADVARFAEGLEKLKECVLRDDLLEARRPRAHECLGEALRVMHQIISKYPLLNTVETLTAAGTLIAKVKAFHYESNNDLEKQEFEKALETIAVAFSSTVSEFLMGEVDSSTLLAVPPGDSSQSMESLYGPGSEGTPPSLEDCDAGCLPAEEVDVLLQRCEGGVDAALLYAKNMAKYMKDLISYLEKRTTLEMEFAKGLQKIAHNCRQSVMQEPHMPLLSIYSLALEQDLEFGHSMVQAVGTLQTQTFMQPLTLRRLEHEKRRKEIKEAWHRAQRKLQEAESNLRKAKQGYVQRCEDHDKARFLVAKAEEEQAGSAPGAGSTATKTLDKRRRLEEEAKNKAEEAMATYRTCVADAKTQKQELEDTKVTALRQIQEVIRQSDQTIKSATISYYQMMHMQTAPLPVHFQMLCESSKLYDPGQQYASHVRQLQRDQEPDVHYDFEPHVSANAWSPVMRARKSSFNVSDVARPEAAGSPPEEGGCTEGTPAKDHRAGRGHQVHKSWPLSISDSDSGLDPGPGAGDFKKFERTSSSGTMSSTEELVDPDGGAGASAFEQADLNGMTPELPVAVPSGPFRHEGLSKAARTHRLRKLRTPAKCRECNSYVYFQGAECEECCLACHKKCLETLAIQCGHKKLQGRLQLFGQDFSHAARSAPDGVPFIVKKCVCEIERRALRTKGIYRVNGVKTRVEKLCQAFENGKELVELSQASPHDISNVLKLYLRQLPEPLISFRLYHELVGLAKDSLKAEAEAKAASRGRQDGSESEAVAVALAGRLRELLRDLPPENRASLQYLLRHLRRIVEVEQDNKMTPGNLGIVFGPTLLRPRPTEATVSLSSLVDYPHQARVIETLIVHYGLVFEEEPEETPGGQDESSNQRAEVVVQVPYLEAGEAVVYPLQEAAADGCRESRVVSNDSDSDLEEASELLSSSEASALGHLSFLEQQQSEASLEVASGSHSGSEEQLEATAREDGDGDEDGPAQQLSGFNTNQSNNVLQAPLPPMRLRGGRMTLGSCRERQPEFV

SEQ ID NO: 1038 - protein, 60 aa, Homo Sapiens
MFSRKKRELMKTPSISKKNRAGSPSPQPSGTSLRPAARGPTSAWVRLCVSCIRSSPSTRC

SEQ ID NO: 1039 - protein, 771 aa, Homo Sapiens
MGVGRKGGAGETESHPRIGLELASWLPHPQQEAESNLRKAKQGYVQRCEDHDKARFLVAKAEEEQAGSAPGAGSTATKTLDKRRRLEEEAKNKAEEAMATYRTCVADAKTQKQELEDTKVTALRQIQEVIRQSDQTIKSATISYYQMMHMQTAPLPVHFQMLCESSKLYDPGQQYASHVRQLQRDQEPDVHYDFEPHVSANAWSPVMRARKSSFNVSDVARPEAAGSPPEEGGCTEGTPAKDHRAGRGHQVHKSWPLSISDSDSGLDPGPGAGDFKKFERTSSSGTMSSTEELVDPDGGAGASAFEQADLNGMTPELPVAVPSGPFRHEGLSKAARTHRLRKLRTPAKCRECNSYVYFQGAECEECCLACHKKCLETLAIQCGHKKLQGRLQLFGQDFSHAARSAPDGVPFIVKKCVCEIERRALRTKGIYRVNGVKTRVEKLCQAFENGKELVELSQASPHDISNVLKLYLRQLPEPLISFRLYHELVGLAKDSLKAEAEAKAASRGRQDGSESEAVAVALAGRLRELLRDLPPENRASLQYLLRHLRRIVEVEQDNKMTPGNLGIVFGPTLLRPRPTEATVSLSSLVDYPHQARVIETLIVHYGLVFEEEPEETPGGQDESSNQRAEVVVQVPYLEAGEAVVYPLQEAAADGCRESRVVSNDSDSDLEEASELLSSSEASALGHLSFLEQQQSEASLEVASGSHSGSEEQLEATAREDGDGDEDGPAQQLSGFNTNQSNNVLQAPLPPMRLRGGRMTLGSCRERQPEFV

SEQ ID NO: 1040 - protein, 1140 aa, Homo Sapiens
MLGRRLGARASYSPYRAGRQGPQQRGRDPGIQLTELPRKDGADAVFPGPSLEPPAGSSGVKATGTLKRPTSLSRHASAAGFPLSGAASWTLGRSHRSPLTAASPGELPTEGAGPDVVEDISHLLADVARFAEGLEKLKECVLRDDLLEARRPRAHECLGEALRVMHQIISKYPLLNTVETLTAAGTLIAKVKAFHYESNNDLEKQEFEKALETIAVAFSSTVSEFLMGEVDSSTLLAVPPGDSSQSMESLYGPGSEGTPPSLEDCDAGCLPAEEVDVLLQRCEGGVDAALLYAKNMAKYMKDLISYLEKRTTLEMEFAKGLQKIAHNCRQSVMQEPHMPLLSIYSLALEQDLEFGHSMVQAVGTLQTQTFMQPLTLRRLEHEKRRKEIKEAWHRAQRKLQEAESNLRKAKQGYVQRCEDHDKARFLVAKAEEEQAGSAPGAGSTATKTLDKRRRLEEEAKNKAEEAMATYRTCVADAKTQKQELEDTKVTALRQIQEVIRQSDQTIKSATISYYQMMHMQTAPLPVHFQMLCESSKLYDPGQQYASHVRQLQRDQEPDVHYDFEPHVSANAWSPVMRARKSSFNVSDVARPEAAGSPPEEGGCTEGTPAKDHRAGRGHQVHKSWPLSISDSDSGLDPGPGAGDFKKFERTSSSGTMSSTEELVDPDGGAGASAFEQADLNGMTPELPVAVPSGPFRHEGLSKAARTHRLRKLRTPAKCRECNSYVYFQGAECEECCLACHKKCLETLAIQCGHKKLQGRLQLFGQDFSHAARSAPDGVPFIVKKCVCEIERRALRTKGIYRVNGVKTRVEKLCQAFENGKELVELSQASPHDISNVLKLYLRQLPEPLISFRLYHELVGLAKDSLKAEAEAKAASRGRQDGSESEAVAVALAGRLRELLRDLPPENRASLQYLLRHLRRIVEVEQDNKMTPGNLGIVFGPTLLRPRPTEATVSLSSLVDYPHQARVIETLIVHYGLVFEEEPEETPGGQDESSNQRAEVVVQVPYLEAGEAVVYPLQEAAADGCRESRVVSNDSDSDLEEASELLSSSEASALGHLSFLEQQQSEASLEVASGSHSGSEEQLEATAREDGDGDEDGPAQQLSGFNTNQSNNVLQAPLPPMRLRGGRMTLGSCRERQPEFV

SEQ ID NO: 1041 - protein, 1152 aa, Homo Sapiens
MSRGQRVLKGLLGWVCTWTWAWRARLGARGCGLHVLCPRDLPLPPEELPRKDGADAVFPGPSLEPPAGSSGVKATGTLKRPTSLSRHASAAGFPLSGAASWTLGRSHRSPLTAASPGELPTEGAGPDVVEDISHLLADVARFAEGLEKLKECVLRDDLLEARRPRAHECLGEALRVMHQIISKYPLLNTVETLTAAGTLIAKVKAFHYESNNDLEKQEFEKALETIAVAFSSTVSEFLMGEVDSSTLLAVPPGDSSQSMESLYGPGSEGTPPSLEDCDAGCLPAEEVDVLLQRCEGGVDAALLYAKNMAKYMKDLISYLEKRTTLEMEFAKGLQKIAHNCRQSVMQEPHMPLLSIYSLALEQDLEFGHSMVQAVGTLQTQTFMQPLTLRRLEHEKRRKEIKEAWHRAQRKLQEAESNLRKAKQGYVQRCEDHDKARFLVAKAEEEQAGSAPGAGSTATKTLDKRRRLEEEAKNKAEEAMATYRTCVADAKTQKQELEDTKVTALRQIQEVIRQSDQTIKSATISYYQMMHMQTAPLPVHFQMLCESSKLYDPGQQYASHVRQLQRDQEPDVHYDFEPHVSANAWSPVMRARKSSFNVSDVARPEAAGSPPEEGGCTEGTPAKDHRAGRGHQVHKSWPLSISDSDSGLDPGPGAGDFKKFERTSSSGTMSSTEELVDPDGGAGASAFEQADLNGMTPELPVAVPSGPFRHEGLSKAARTHRLRKLRTPAKCRECNSYVYFQGAECEECCLACHKKCLETLAIQCGHKKLQGRLQLFGQDFSHAARSAPDGVPFIVKKCVCEIERRALRTKGIYRVNGVKTRVEKLCQAFENGKELVELSQASPHDISNVLKLYLRQLPEPLISFRLYHELVGLAKDSLKAEAEAKAASRGRQDGSESEAVAVALAGRLRELLRDLPPENRASLQYLLRHLRRIVEVEQDNKMTPGNLGIVFGPTLLRPRPTEATVSLSSLVDYPHQARVIETLIVHYGLVFEEEPEETPGGQDESSNQRAEVVVQVPYLEAGEAVVYPLQEAAADGCRESRVVSNDSDSDLEEASELLSSSEASALGHLSFLEQQQSEASLEVASGSHSGSEEQLEATAREDGDGDEDGPAQQLSGFNTNQSNNVLQAPLPPMRLRGGRMTLGSCRERQPEFV

SEQ ID NO: 1042 - protein, 170 aa, Homo Sapiens
MVGSTPHFGDPCAGSPGPGGRGDPDGRGDPDGQGPELPRKDGADAVFPGPSLEPPAGSSGVKATGTLKRPTSLSRHASAAGFPLSGAASWTLGRSHRSPLTAASPGELPTEGAGPDVVEDISHLLADVARFAEGLEKLKECVLRDDLLEARRPRAHECLGEALRVMHQII

SEQ ID NO: 1043 - protein, 601 aa, Homo Sapiens
LELYDLQILGTKPPMNSDTHRNFDPTATLRNQGDFTWNSMSGRSVRLRSVPIQSLSELERARLQEVAFYQLQQDCDLSCQITIPKDGQKRKKSLRKKLDSLGKEKNKDKEFIPQAFGMPLSQVIANDRAYKLKQDLQRDEQKDASDFVASLLPFGNKRQNKELSSSNSSLSSTSETPNESTSPNTPEPAPRARRRGAMSVDSITDLDDNQSRLLEALQLSLPAEAQSKKEKARDKKLSLNPIYRQVPRLVDSCCQHLEKHGLQTVGIFRVGSSKKRVRQLREEFDRGIDVSLEEEHSVHDVAALLKEFLRDMPDPLLTRELYTAFINTLLLEPEEQLGTLQLLIYLLPPCNCDTLHRLLQFLSIVARHADDNISKDGQEVTGNKMTSLNLATIFGPNLLHKQKSSDKEFSVQSSARAEESTAIIAVVQKMIENYEALFMVPPDLQNEVLISLLETDPDVVDYLLRRKASQSSSPDMLQSEVSFSVGGRHSSTDSNKASSGDISPYDNNSPVLSERSLLAMQEDAAPGGSEKLYRVPGQFMLVGHLSSSKSRESSPGPRLGKGNWSLASRRWPKQATLLLLHVAWCGALRTFSSSLPYLMFL

SEQ ID NO: 1044 - protein, 974 aa, Homo Sapiens
MSAQSLLHSVFSCSSPASSSAASAKGFSKRKLRQTRSLDPALIGGCGSDEAGAEGSARGATAGRLYSPSLPAESLGPRLASSSRGPPPRATRLPPPGPLCSSFSTPSTPQEKSPSGSFHFDYEVPLGRGGLKKSMAWDLPSVLAGPASSRSASSILCSSGGGPNGIFASPRRWLQQRKFQSPPDSRGHPYVVWKSEGDFTWNSMSGRSVRLRSVPIQSLSELERARLQEVAFYQLQQDCDLSCQITIPKDGQKRKKSLRKKLDSLGKEKNKDKEFIPQAFGMPLSQVIANDRAYKLKQDLQRDEQKDASDFVASLLPFGNKRQNKELSSSNSSLSSTSETPNESTSPNTPEPAPRARRRGAMSVDSITDLDDNQSRLLEALQLSLPAEAQSKKEKARDKKLSLNPIYRQVPRLVDSCCQHLEKHGLQTVGIFRVGSSKKRVRQLREEFDRGIDVSLEEEHSVHDVAALLKEFLRDMPDPLLTRELYTAFINTLLLEPEEQLGTLQLLIYLLPPCNCDTLHRLLQFLSIVARHADDNISKDGQEVTGNKMTSLNLATIFGPNLLHKQKSSDKEFSVQSSARAEESTAIIAVVQKMIENYEALFMVPPDLQNEVLISLLETDPDVVDYLLRRKASQSSSPDMLQSEVSFSVGGRHSSTDSNKASSGDISPYDNNSPVLSERSLLAMQEDAAPGGSEKLYRVPGQFMLVGHLSSSKSRESSPGPRLGKDLSEEPFDIWGTWHSTLKSGSKDPGMTGSSGDIFESSSLRAGPCSLSQGNLSPNWPRWQGSPAELDSDTQGARRTQAAAPATEGRAHPAVSRACSTPHVQVAGKAERPTARSEQYLTLSGAHDLSESELDVAGLQSRATPQCQRPHGSGRDDKRPPPPYPGPGKPAAAAAWIQGPPEGVETPTDQGGQAAEREQQVTQKKLSSANSLPAGEQDSPRLGDAGWLDWQRERWQIWELLSTDNPDALPETLV

SEQ ID NO: 1045 - protein, 765 aa, Homo Sapiens
MSAQSLLHSVFSCSSPASSSAASAKGFSKRKLRQTRSLDPALIGGCGSDEAGAEGSARGATAGRLYSPSLPAESLGPRLASSSRGPPPRATRLPPPGPLCSSFSTPSTPQEKSPSGSFHFDYEVPLGRGGLKKSMAWDLPSVLAGPASSRSASSILCSSGGGPNGIFASPRRWLQQRKFQSPPDSRGHPYVVWKSEGDFTWNSMSGRSVRLRSVPIQSLSELERARLQEVAFYQLQQDCDLSCQITIPKDGQKRKKSLRKKLDSLGKEKNKDKEFIPQAFGMPLSQVIANDRAYKLKQDLQRDEQKDASDFVASLLPFGNKRQNKELSSSNSSLSSTSETPNESTSPNTPEPAPRARRRGAMSVDSITDLDDNQSRLLEALQLSLPAEAQSKKEKARDKKLSLNPIYRQVPRLVDSCCQHLEKHGLQTVGIFRVGSSKKRVRQLREEFDRGIDVSLEEEHSVHDVAALLKEFLRDMPDPLLTRELYTAFINTLLLEPEEQLGTLQLLIYLLPPCNCDTLHRLLQFLSIVARHADDNISKDGQEVTGNKMTSLNLATIFGPNLLHKQKSSDKEFSVQSSARAEESTAIIAVVQKMIENYEALFMVPPDLQNEVLISLLETDPDVVDYLLRRKASQSSSPDMLQSEVSFSVGGRHSSTDSNKASSGDISPYDNNSPVLSERSLLAMQEDAAPGGSEKLYRVPGQFMLVGHLSSSKSRESSPGPRLGKGNWSLASRRWPKQATLLLLHVAWCGALRTFSSSLPYLMFL

SEQ ID NO: 1046 - protein, 690 aa, Homo Sapiens
MSAQSLLHSVFSCSSPASSSAASAKGFSKRKLRQTRSLDPALIGGCGSDEAGAEGSARGATAGRLYSPSLPAESLGPRLASSSRGPPPRATRLPPPGPLCSSFSTPSTPQEKSPSGSFHFDYEVPLGRGGLKKSMAWDLPSVLAGPASSRSASSILCSSGGGPNGIFASPRRWLQQRKFQSPPDSRGHPYVVWKSELELYDLQILGTKPPMNSDTHRNFDPTATLRNQGDFTWNSMSGRSVRLRSVPIQSLSELERARLQEVAFYQLQQDCDLSCQITIPKDGQKRKKSLRKKLDSLGKEKNKDKEFIPQAFGMPLSQVIANDRAYKLKQDLQRDEQKDASDFVASLLPFGNKRQNKELSSSNSSLSSTSETPNESTSPNTPEPAPRARRRGAMSVDSITDLDDNQSRLLEALQLSLPAEAQSKKEKARDKKLSLNPIYRQVPRLVDSCCQHLEKHGLQTVGIFRVGSSKKRVRQLREEFDRGIDVSLEEEHSVHDVAALLKEFLRDMPDPLLTRELYTAFINTLLLEPEEQLGTLQLLIYLLPPCNCDTLHRLLQFLSIVARHADDNISKDGQEVTGNKMTSLNLATIFGPNLLHKQKSSDKEFSVQSSARAEESTAIIAVVQKMIENYEALFMVPPDLQNEVLISLLETDPDVVDYLLRRKASQSSTSSVLPAAVQACPQYPASMFTP

SEQ ID NO: 1047 - protein, 771 aa, Homo Sapiens
MSGRSVRLRSVPIQSLSELERARLQEVAFYQLQQDCDLSCQITIPKDGQKRKKSLRKKLDSLGKEKNKDKEFIPQAFGMPLSQVIANDRAYKLKQDLQRDEQKDASDFVASLLPFGNKRQNKELSSSNSSLSSTSETPNESTSPNTPEPAPRARRRGAMSVDSITDLDDNQSRLLEALQLSLPAEAQSKKEKARDKKLSLNPIYRQVPRLVDSCCQHLEKHGLQTVGIFRVGSSKKRVRQLREEFDRGIDVSLEEEHSVHDVAALLKEFLRDMPDPLLTRELYTAFINTLLLEPEEQLGTLQLLIYLLPPCNCDTLHRLLQFLSIVARHADDNISKDGQEVTGNKMTSLNLATIFGPNLLHKQKSSDKEFSVQSSARAEESTAIIAVVQKMIENYEALFMVPPDLQNEVLISLLETDPDVVDYLLRRKASQSSSPDMLQSEVSFSVGGRHSSTDSNKASSGDISPYDNNSPVLSERSLLAMQEDAAPGGSEKLYRVPGQFMLVGHLSSSKSRESSPGPRLGKDLSEEPFDIWGTWHSTLKSGSKDPGMTGSSGDIFESSSLRAGPCSLSQGNLSPNWPRWQGSPAELDSDTQGARRTQAAAPATEGRAHPAVSRACSTPHVQVAGKAERPTARSEQYLTLSGAHDLSESELDVAGLQSRATPQCQRPHGSGRDDKRPPPPYPGPGKPAAAAAWIQGPPEGVETPTDQGGQAAEREQQVTQKKLSSANSLPAGEQDSPRLGDAGWLDWQRERWQIWELLSTDNPDALPETLV

SEQ ID NO: 1048 - protein, 771 aa, Homo Sapiens; identical to SEQ ID NO: 1047

SEQ ID NO: 1049 - protein, 1816 aa, Homo Sapiens
MLSVVHFLRSFFKTPEPGAHLPGEGEIEDNQLPTSPAEQVEQGWNQQTDRDDSETLSQQSESGSDTKTDPFESASDTESLSGYLPRGVFHPLRGTPVDIEAPWEYPDVSATGPPQEQHLTSVPGLHAKEELDLSPSLEDDSCKNGWRAFATVAGEQEAGHLWDCATSLERESLLAGVPRHTGCCLQRATDSSGPEPVQGVAVQDLRGLSSVSLQKSRSESYLGIPVVWPFLLWCCELGRSWPHIHNRARALVLPSRGPLDNTAPLGTRTKKESTLGPAGDTELLWSQPHSDVPCQPPLRTSCLLRTNRHHSAPETTGDKNRASPRLNCGHMRALVRAHSIAGFSPECPEDPVGQNVVKSGTHVKEGAKNERDPRIQNIPSPAPTQLSGPIPAFQSGAPHLQGPCKPGGFRLQRASQDTPSAGLLGENQLRQDSRSCLVASCLTSELVKLSAEEVPEPAECKSEQSPESRTQEPQGTQLAPRAADERETQKHLWGISVQAGNQTSNYTSKYVLSEESKSPTRAKFPRQPSSEGTQVWSGDLMGCLEVSDSSDAPETTQKSSAIDTSKAAEEAMVLDPNYREQALQGLSEFKAATVSHCGPGAEEGEQGPGGAGGRQLEPKAGGEASRGRGALIIVAVEQKGLQASRSNAGPVPETLPRDFPKERPESPLSTGETPCESPTRGKTPAGNECELPAAPIQGAGDGALQRVAQAAELGRVLVPQAASEETPSTEEPPGERLRGESRSSGSGERGPEEAPEGGAAAARGQRPRVPALEPPQPPRGLRKGAQEPGKRPTFSKVTSFRKGRPLATESPGGVPAPTTEGRRWGSSGPEGLPRENPPAAAGRDAPPLHHGDASAWPEFVPQAAGDRTAGPAGAGHTGTSGDLGSRGPSSESCNAKRLKTTEKKLRARLALAHKTFSNFIESIVLEKENTHERSPSSPKGEKEKSRLRQGSWRAFLKSKDAGSPKKPTLVSLPLGPEVLSPAETDSHCEERAEDKEGYVFSDHWAPPLASTPLSSSLVSPEHRRKSEPTIKCTATQEGGRYLPSGIFPEKSWLASPGSPRAQQAGIAHTLPSSSACCLAYENPGTPCRPTSPKPLSPRPSAQRMGLHYPGRGSAISMVSLGSYSYVDSSSGDPERPKIPKGQTSFLLSLQTLNQDEQKEESREGGQGPRGLGTVPWLRDLPGSENHMPWEEPAGEKPSCSHSQKAFHMEPAQKPCFTTDMVTWALLCISAETVRGEAPSQPRGIPHRSPVSVDDLWLEKTQRKKLQKQAHVERRLHIGAVHKDGVKCWRKTIITSPESLNLPRRSHPLSQSAPTGLNHMGWPEHTPGTAMPDGALDTAVCADEVGSEEDLYDDLHSSSHHYSHPGGGGEQLAINELISDGSVVCAEALWDHVTMDDQELGFKAGDVIEVMDATNREWWWGRVADGEGWFPASFVRLRVNQDEPADDDAPLAGNSGAEDGGAEAQSSKDQMRTNVINEILSTERDYIKHLRDICEQADFQIYSEYCNNHPNACVELSRLTKLSKYVYFFEACRLLQKMIDISLDGFLLTPVQKICKYPLQLAELLKYTHPQHRDFKDVEAALHAMKNVAQLINERKRRLENIDKIAQWQSSIEDWEGEDLLVRSSELIYSGELTRVTQPQAKSQQRMFFLFDHQLIYCKKDLLRRDVLYYKGRLDMDGLEVVDLEDGKDRDLHVSIKNAFRLHRGATGDSHLLCTRKPEQKQRWLKAFAREREQVQLDQETGFSITELQRKQAMLNASKQQVTGKPKAVGRPCYLTRQKHPALPSNRPQQQVLVLAEPRRKPSTFWHSISRLAPFRK

SEQ ID NO: 1050 - protein, 690 aa, Homo Sapiens
MPWEEPAGEKPSCSHSQKAFHMEPAQKPCFTTDMVTWALLCISAETVRGEAPSQPRGIPHRSPVSVDDLWLEKTQRKKLQKQAHVERRLHIGAVHKDGVKCWRKTIITSPESLNLPRRSHPLSQSAPTGLNHMGWPEHTPGTAMPDGALDTAVCADEVGSEEDLYDDLHSSSHHYSHPGGGGEQLAINELISDGSVVCAEALWDHVTMDDQELGFKAGDVIEVMDATNREWWWGRVADGEGWFPASFVRLRVNQDEPADDDAPLAGNSGAEDGGAEAQSSKDQMRTNVINEILSTERDYIKHLRDICEGYVRQCRKRADMFSEEQLRTIFGNIEDIYRCQKAFVKALEQRFNRERPHLSELGACFLEHQADFQIYSEYCNNHPNACVELSRLTKLSKYVYFFEACRLLQKMIDISLDGFLLTPVQKICKYPLQLAELLKYTHPQHRDFKDVEAALHAMKNVAQLINERKRRLENIDKIAQWQSSIEDWEGEDLLVRSSELIYSGELTRVTQPQAKSQQRMFFLFDHQLIYCKKDLLRRDVLYYKGRLDMDGLEVVDLEDGKDRDLHVSIKNAFRLHRGATGDSHLLCTRKPEQKQRWLKAFAREREQVQLDQETGFSITELQRKQAMLNASKQQVTGKPKAVGRPCYLTRQKHPALPSNRPQQQVLVLAEPRRKPSTFWHSISRLAPFRK

SEQ ID NO: 1051 - protein, 670 aa, Homo Sapiens
MPWEEPAGEKPSCSHSQKAFHMEPAQKPCFTTDMVTWALLCISAETVRGEAPSQPRGIPHRSPVSVDDLWLEKTQRKKLQKQAHVERRLHIGAVHKDGVKCWRKTIITSPESLNLPRRSHPLSQSAPTGLNHMGWPEHTPGTAMPDGALDTAVCADEVGSEEDLYDDLHSSSHHYSHPGGGGEQLAINELISDGSVVCAEALWDHVTMDDQELGFKAGDVIEVMDATNREWWWGRVADGEGWFPASFVRLRVNQDEPADDDAPLAGNSGAEDGGAEAQSSKDQMRTNVINEILSTERDYIKHLRDICEGYVRQCRKRADMFSEEQLRTIFGNIEDIYRCQKAFVKALEQRFNRERPHLSELGACFLEHQADFQIYSEYCNNHPNACVELSRLTKLSKYVYFFEACRLLQKMIDISLDGFLLTPVQKICKYPLQLAELLKYTHPQHRDFKDVEAALHAMKNVAQLINERKRRLENIDKIAQWQSSIEDWEGEDLLVRSSELIYSGELTRVTQPQAKSQQRMFFLFDHQLIYCKKDLLRRDVLYYKGRLDMDGLEVVDLEDGKDRDLHVSIKNAFRLHRGATGDSHLLCTRKPEQKQRWLKAFAREREQVQLDQETGFSITELQRKQAMLNASKQQVTGKPKGRRTAAPPPRLPGPYPADIIPFSEPQSQAS

SEQ ID NO: 1052 - protein, 630 aa, Homo Sapiens
MPWEEPAGEKPSCSHSQKAFHMEPAQKPCFTTDMVTWALLCISAETVRGEAPSQPRGIPHRSPVSVDDLWLEKTQRKKLQKQAHVERRLHIGAVHKDGVKCWRKTIITSPESLNLPRRSHPLSQSAPTGLNHMGWPEHTPGTAMPDGALDTAVCADEVGSEEDLYDDLHSSSHHYSHPGGGGEQLAINELISDGSVVCAEALWDHVTMDDQELGFKAGDVIEVMDATNREWWWGRVADGEGWFPASFVRLRVNQDEPADDDAPLAGNSGAEDGGAEAQSSKDQMRTNVINEILSTERDYIKHLRDICEQADFQIYSEYCNNHPNACVELSRLTKLSKYVYFFEACRLLQKMIDISLDGFLLTPVQKICKYPLQLAELLKYTHPQHRDFKDVEAALHAMKNVAQLINERKRRLENIDKIAQWQSSIEDWEGEDLLVRSSELIYSGELTRVTQPQAKSQQRMFFLFDHQLIYCKKDLLRRDVLYYKGRLDMDGLEVVDLEDGKDRDLHVSIKNAFRLHRGATGDSHLLCTRKPEQKQRWLKAFAREREQVQLDQETGFSITELQRKQAMLNASKQQVTGKPKAVGRPCYLTRQKHPALPSNRPQQQVLVLAEPRRKPSTFWHSISRLAPFRK

SEQ ID NO: 1053 - protein, 192 aa, Homo Sapiens
MPWEEPAGEKPSCSHSQKAFHMEPAQKPCFTTDMVTWALLCISAETVRGEAPSQPRGIPHRSPVSVDDLWLEKTQRKKLQKQAHVERRLHIGAVHKDGVKCWRKTIITSPESLNLPRRSHPLSQSAPTGLNHMGWPEHTPGTAVGRPCYLTRQKHPALPSNRPQQQVLVLAEPRRKPSTFWHSISRLAPFRK

SEQ ID NO: 1054 - protein, 517 aa, Homo Sapiens
MRGAVSRSWSLESLRSATAAMPDGALDTAVCADEVGSEEDLYDDLHSSSHHYSHPGGGGEQLAINELISDGSVVCAEALWDHVTMDDQELGFKAGDVIEVMDATNREWWWGRVADGEGWFPASFVRLRVNQDEPADDDAPLAGNSGAEDGGAEAQSSKDQMRTNVINEILSTERDYIKHLRDICEGYVRQCRKRADMFSEEQLRTIFGNIEDIYRCQKAFVKALEQRFNRERPHLSELGACFLEHQADFQIYSEYCNNHPNACVELSRLTKLSKYVYFFEACRLLQKMIDISLDGFLLTPVQKICKYPLQLAELLKYTHPQHRDFKDVEAALHAMKNVAQLINERKRRLENIDKIAQWQSSIEDWEGEDLLVRSSELIYSGELTRVTQPQAKSQQRMFFLFDHQLIYCKKDLLRRDVLYYKGRLDMDGLEVVDLEDGKDRDLHVSIKNAFRLHRGATGDSHLLCTRKPEQKQRWLKAFAREREQVQLDQETGFSITELQRKQAMLNASKQQVTGKPK

SEQ ID NO: 1055 - protein, 619 aa, Homo Sapiens
MRPDGQQALDAVVRSFDCHSEAALRQRNDVIYCSLPRTAQGIVQREDQLEVLVSLREVWGRRRGRDGTCTGAMPDGALDTAVCADEVGSEEDLYDDLHSSSHHYSHPGGGGEQLAINELISDGSVVCAEALWDHVTMDDQELGFKAGDVIEVMDATNREWWWGRVADGEGWFPASFVRLRVNQDEPADDDAPLAGNSGAEDGGAEAQSSKDQMRTNVINEILSTERDYIKHLRDICEGYVRQCRKRADMFSEEQLRTIFGNIEDIYRCQKAFVKALEQRFNRERPHLSELGACFLEHQADFQIYSEYCNNHPNACVELSRLTKLSKYVYFFEACRLLQKMIDISLDGFLLTPVQKICKYPLQLAELLKYTHPQHRDFKDVEAALHAMKNVAQLINERKRRLENIDKIAQWQSSIEDWEGEDLLVRSSELIYSGELTRVTQPQAKSQQRMFFLFDHQLIYCKKDLLRRDVLYYKGRLDMDGLEVVDLEDGKDRDLHVSIKNAFRLHRGATGDSHLLCTRKPEQKQRWLKAFAREREQVQLDQETGFSITELQRKQAMLNASKQQVTGKPKAVGRPCYLTRQKHPALPSNRPQQQVLVLAEPRRKPSTFWHSISRLAPFRK

SEQ ID NO: 1056 - protein, 372 aa, Homo Sapiens
PLASTPLSSSLVSPEHRRKSEPTIKCTATQEGGRYLPSGIFPEKSWLASPGSPRAQQAGIAHTLPSSSACCLAYENPGTPCRPTSPKPLSPRPSAQRMGLHYPGRGSAISMVSLGSYSYVDSSSGDPERPKIPKGQTSFLLSLQTLNQDEQKEESREGGQGPRGLGTVPWLRDLPGSENHMPWEEPAGEKPSCSHSQKAFHMEPAQKPCFTTDMVTWALLCISAETVRGEAPSQPRGIPHRSPVSVDDLWLEKTQRKKLQKQAHVERRLHIGAVHKDGVKCWRKTIITSPESLNLPRRSHPLSQSAPTGLNHMGWPEHTPGTAVGRPCYLTRQKHPALPSNRPQQQVLVLAEPRRKPSTFWHSISRLAPFRK

SEQ ID NO: 1057 - protein, 287 aa, Homo Sapiens
  misc_feature (1)..(1): Xaa can be any naturally occurring amino acid
XACVELSRLTKLSKYVYFFEACRLLQKMIDISLDGFLLTPVQKICKYPLQLAELLKYTHPQHRDFKDVEAALHAMKNVAQLINERKRRLENIDKIAQWQSSIEDWEGEDLLVRSSELIYSGELTRVTQPQAKSQQRMFFLFDHQLIYCKKDLLRRDVLYYKGRLDMDGLEVVDLEDGKDRDLHVSIKNAFRLHRGATGDSHLLCTRKPEQKQRWLKAFAREREQVQLDQETGFSITELQRKQAMLNASKQQVTGKPKGRRTAAPPPRLPGPYPADIIPFSEPQSQAS

SEQ ID NO: 1058 - protein, 695 aa, Homo Sapiens
  misc_feature (1)..(1): Xaa can be any naturally occurring amino acid
XEGGQGPRGLGTVPWLRDLPGSENHMPWEEPAGEKPSCSHSQKAFHMEPAQKPCFTTDMVTWALLCISAETVRGEAPSQPRGIPHRSPVSVDDLWLEKTQRKKLQKQAHVERRLHIGAVHKDGVKCWRKTIITSPESLNLPRRSHPLSQSAPTGLNHMGWPEHTPGTAMPDGALDTAVCADEVGSEEDLYDDLHSSSHHYSHPGGGGEQLAINELISDGSVVCAEALWDHVTMDDQELGFKAGDVIEVMDATNREWWWGRVADGEGWFPASFVRLRVNQDEPADDDAPLAGNSGAEDGGAEAQSSKDQMRTNVINEILSTERDYIKHLRDICEGYVRQCRKRADMFSEEQLRTIFGNIEDIYRCQKAFVKALEQRFNRERPHLSELGACFLEHQADFQIYSEYCNNHPNACVELSRLTKLSKYVYFFEACRLLQKMIDISLDGFLLTPVQKICKYPLQLAELLKYTHPQHRDFKDVEAALHAMKNVAQLINERKRRLENIDKIAQWQSSIEDWEGEDLLVRSSELIYSGELTRVTQPQAKSQQRMFFLFDHQLIYCKKDLLRRDVLYYKGRLDMDGLEVVDLEDGKDRDLHVSIKNAFRLHRGATGDSHLLCTRKPEQKQRWLKAFAREREQVQLDQETGFSITELQRKQAMLNASKQQVTGKPKGRRTAAPPPRLPGPYPADIIPFSEPQSQAS

SEQ ID NO: 1059 - protein, 142 aa, Homo Sapiens
  misc_feature (1)..(1): Xaa can be any naturally occurring amino acid
XKKLRARLALAHKTFSNFIESIVLEKENTHERSPSSPKGEKEKSRLRQGSWRAFLKSKDAGSPKKPTLVSLPLGPEVLSPAETDSHCEERAEDKEGYVFSDHWAPPLASTPLSSSLVSPEHRRKSEPTIKCTATQEGDAKPR

SEQ ID NO: 1060 - protein, 173 aa, Homo Sapiens
MCLLLGATGVGKTLLVKRLQEVSSRDGKGDLGEPPPTRPTVGTNLTDIVAQRKITIRELGGCMGPIWSSYYGNCRSLLFVMDASDPTQLSASCVQLLGLLSAEQLAEASVLILFNKIDLPCYMSTEEMKSLIRLPDIIACAKQNITTAEISAREGTGLAGVLAWLQATHRAND

SEQ ID NO: 1061 - protein, 93 aa, Homo Sapiens
MDASDPTQLSASCVQLLGLLSAEQLAEASVLILFNKIDLPCYMSTEEMKSLIRLPDIIACAKQNITTAEISAREGTGLAGVLAWLQATHRAND

SEQ ID NO: 1062 - protein, 93 aa, Homo Sapiens; identical to SEQ ID NO: 1061

SEQ ID NO: 1063 - protein, 93 aa, Homo Sapiens; identical to SEQ ID NO: 1061

SEQ ID NO: 1064 - protein, 111 aa, Homo Sapiens
MGPIWSSYYGNCRSLLFVMDASDPTQLSASCVQLLGLLSAEQLAEASVLILFNKIDLPCYMSTEEMKSLIRLPDIIACAKQNITTAEISAREGTGLAGVLAWLQATHRAND

SEQ ID NO: 1065 - protein, 111 aa, Homo Sapiens; identical to SEQ ID NO: 1064

SEQ ID NO: 1066 - protein, 197 aa, Homo Sapiens
MRVAGGRALSRGAELRVPGGAKHGMCLLLGATGVGKTLLVKRLQEVSSRDGKGDLGEPPPTRPTVGTNLTDIVAQRKITIRELGGCMGPIWSSYYGNCRSLLFVMDASDPTQLSASCVQLLGLLSAEQLAEASVLILFNKIDLPCYMSTEEMKSLIRLPDIIACAKQNITTAEISAREGTGLAGVLAWLQATHRAND

SEQ ID NO: 1067 - protein, 197 aa, Homo Sapiens; identical to SEQ ID NO: 1066

SEQ ID NO: 1068 - protein, 48 aa, Homo Sapiens
VGTNLTDIVAQRKITIRELGGCMGPIWSSYYGNCRSLLACAADTSMEN

SEQ ID NO: 1069 - protein, 935 aa, Homo Sapiens
MAAAKPTLTDSLSFCLAQLAAAAGEALGGEKDPATNETPLSRALLALRTRHIKAAGGIERFRARGGLRPLLALLRRAAAAGSAPSQAGPGSAPSSAASGASSPAPASGPAPSAVSSSSPTPPVRLRKTLDLALSILADCCTEGACRTEVRRLGGILPLVTILQCMKTDSIQNRTARALGNLAMEPESCGDIHCAGAVPLLVESLTACQDSQCLQSVVRALRNLADSPQHRLALAQQGAVRPLAELLATAPDAALTLALVRALLELSRGCSRACAEQLSLGGGLGPLVSLASHPKRAVREGTILILANLCAQGLIRPALGNAGGVEVLVDELRQRRDPNGASPTSQQPLVRAVCLLCREAINRARLRDAGGLDLLMGLLRDPRASAWHPRIVAALVGFLYDTGALGRLQALGLVPLLAGQLCGEAGEEEEEGREAASWDFPEERTPERAQGGSFRSLRSWLISEGYATGPDDISPDWSPEQCPPEPMEPASPAPTPTSLRAPRTQRTPGRSPAAAIEEPWGREGPALLLLSRFSQAPDPSGALVTGPALYGLLTYVTGAPGPPSPRALRILSRLTCNPACLEAFVRSYGAALLRAWLVLGVAPDDWPAPRARPTLHSRHRELGERLLQNLTVQAESPFGVGALTHLLLSGSPEDRVACALTLPFICRKPSLWRRLLLEQGGLRLLLAALTRPAPHPLFLFFAADSLSCLQDLVSPTVSPAVPQAVPMDLDSPSPCLYEPLLGPAPVPAPDLHFLLDSGLQLPAQRAASATASPFFRALLSGSFAEAQMDLVPLRGLSPGAAWPVLHHLHGCRGCGAALGPVPPPGQPLLGSEAEEALEAAGRFLLPGLEEELEEAVGRIHLGPQGGPESVGEVFRLGRPRLAAHCARWTLGSEQCPRKRGLALVGLVEAAGEEAGPLTEALLAVVMGIELGARVPA

SEQ ID NO: 1070 - protein, 935 aa, Homo Sapiens; identical to SEQ ID NO: 1069

SEQ ID NO: 1071 - protein, 725 aa, Homo Sapiens
MAAAKPTLTDSLSFCLAQLAAAAGEALGGEKDPATNETPLSRALLALRTRHIKAAGGIERFRARGGLRPLLALLRRAAAAGSAPSQAGPGSAPSSAASGASSPAPASGPAPSAVSSSSPTPPVRLRKTLDLALSILADCCTEGACRTEVRRLGGILPLVTILQCMKTDSIQNRTARALGNLAMEPESCGDIHCAGAVPLLVESLTACQDSQCLQSVVRALRNLADSPQHRLALAQQGAVRPLAELLATAPDAALTLALVRALLELSRGCSRACAEQLSLGGGLGPLVSLASHPKRAVREGTILILANLCAQGLIRPALGNAGGVEVLVDELRQRRDPNGASPTSQQPLVRAVCLLCREAINRARLRDAGGLDLLMGLLRDPRASAWHPRIVAALVGFLYDTGALGRLQALGLVPLLAGQLCGEAGEEEEEGREAASWDFPEERTPERAQGGSFRSLRSWLISEGYATGPDDISPDWSPEQCPPEPMEPASPAPTPTSLRAPRTQRTPGRSPAAAIEEPWGREGPALLLLSRFSQAPDPSGALVTGPALYGLLTYVTGAPGPPSPRALRILSRLTCNPACLEAFVRSYGAALLRAWLVLGVAPDDWPAPRARPTLHSRHRELGEFPYPPVSLPPCESPSSPMASMGPEPHLPTHLSSPARPPDNLSPEWGGEQGVPVPPWAHRQSSAVSSALALGPRYPNSRCSPAPRIWAGLCFFPGSAIGSALS

SEQ ID NO: 1072 - protein, 771 aa, Homo Sapiens
MKTDSIQNRTARALGNLAMEPESCGDIHCAGAVPLLVESLTACQDSQCLQSVVRALRNLADSPQHRLALAQQGAVRPLAELLATAPDAALTLALVRALLELSRGCSRACAEQLSLGGGLGPLVSLASHPKRAVREGTILILANLCAQGLIRPALGNAGGVEVLVDELRQRRDPNGASPTSQQPLVRAVCLLCREAINRARLRDAGGLDLLMGLLRDPRASAWHPRIVAALVGFLYDTGALGRLQALGLVPLLAGQLCGEAGEEEEEGREAASWDFPEERTPERAQGGSFRSLRSWLISEGYATGPDDISPDWSPEQCPPEPMEPASPAPTPTSLRAPRTQRTPGRSPAAAIEEPWGREGPALLLLSRFSQAPDPSGALVTGPALYGLLTYVTGAPGPPSPRALRILSRLTCNPACLEAFVRSYGAALLRAWLVLGVAPDDWPAPRARPTLHSRHRELGERLLQNLTVQAESPFGVGALTHLLLSGSPEDRVACALTLPFICRKPSLWRRLLLEQGGLRLLLAALTRPAPHPLFLFFAADSLSCLQDLVSPTVSPAVPQAVPMDLDSPSPCLYEPLLGPAPVPAPDLHFLLDSGLQLPAQRAASATASPFFRALLSGSFAEAQMDLVPLRGLSPGAAWPVLHHLHGCRGCGAALGPVPPPGQPLLGSEAEEALEAAGRFLLPGLEEELEEAVGRIHLGPQGGPESVGEVFRLGRPRLAAHCARWTLGSEQCPRKRGLALVGLVEAAGEEAGPLTEALLAVVMGIELGARVPA

SEQ ID NO: 1073 - protein, 1030 aa, Homo Sapiens
MVTLGAGVRLFTGVYPVVLNQIRATSEASAITRTTMPAPELTSTSRAEDTRDTGVQLRKRKIPQARHSRKRQRTFSFRSLGSAARSGAESEARAKMAAAKPTLTDSLSFCLAQLAAAAGEALGGEKDPATNETPLSRALLALRTRHIKAAGGIERFRARGGLRPLLALLRRAAAAGSAPSQAGPGSAPSSAASGASSPAPASGPAPSAVSSSSPTPPVRLRKTLDLALSILADCCTEGACRTEVRRLGGILPLVTILQCMKTDSIQNRTARALGNLAMEPESCGDIHCAGAVPLLVESLTACQDSQCLQSVVRALRNLADSPQHRLALAQQGAVRPLAELLATAPDAALTLALVRALLELSRGCSRACAEQLSLGGGLGPLVSLASHPKRAVREGTILILANLCAQGLIRPALGNAGGVEVLVDELRQRRDPNGASPTSQQPLVRAVCLLCREAINRARLRDAGGLDLLMGLLRDPRASAWHPRIVAALVGFLYDTGALGRLQALGLVPLLAGQLCGEAGEEEEEGREAASWDFPEERTPERAQGGSFRSLRSWLISEGYATGPDDISPDWSPEQCPPEPMEPASPAPTPTSLRAPRTQRTPGRSPAAAIEEPWGREGPALLLLSRFSQAPDPSGALVTGPALYGLLTYVTGAPGPPSPRALRILSRLTCNPACLEAFVRSYGAALLRAWLVLGVAPDDWPAPRARPTLHSRHRELGERLLQNLTVQAESPFGVGALTHLLLSGSPEDRVACALTLPFICRKPSLWRRLLLEQGGLRLLLAALTRPAPHPLFLFFAADSLSCLQDLVSPTVSPAVPQAVPMDLDSPSPCLYEPLLGPAPVPAPDLHFLLDSGLQLPAQRAASATASPFFRALLSGSFAEAQMDLVPLRGLSPGAAWPVLHHLHGCRGCGAALGPVPPPGQPLLGSEAEEALEAAGRFLLPGLEEELEEAVGRIHLGPQGGPESVGEVFRLGRPRLAAHCARWTLGSEQCPRKRGLALVGLVEAAGEEAGPLTEALLAVVMGIELGARVPA

SEQ ID NO: 1074 - protein, 10 aa, Homo Sapiens
  misc_feature (1)..(1): Xaa can be any naturally occurring amino acid
XLGKCSAPVS

SEQ ID NO: 1075 - protein, 598 aa, Homo Sapiens
  misc_feature (1)..(1): Xaa can be any naturally occurring amino acid
XTEVRRLGGILPLVTILQCMKTDSIQNRTARALGNLAMEPESCGDIHCAGAVPLLVESLTACQDSQCLQSVALGLVPLLAGQLCGEAGEEEEEGREAASWDFPEERTPERAQGGSFRSLRSWLISEGYATGPDDISPDWSPEQCPPEPMEPASPAPTPTSLRAPRTQRTPGRSPAAAIEEPWGREGPALLLLSRFSQAPDPSGALVTGPALYGLLTYVTGAPGPPSPRALRILSRLTCNPACLEAFVRSYGAALLRAWLVLGVAPDDWPAPRARPTLHSRHRELGERLLQNLTVQAESPFGVGALTHLLLSGSPEDRVACALTLPFICRKPSLWRRLLLEQGGLRLLLAALTRPAPHPLFLFFAADSLSCLQDLVSPTVSPAVPQAVPMDLDSPSPCLYEPLLGPAPVPAPDLHFLLDSGLQLPAQRAASATASPFFRALLSGSFAEAQMDLVPLRGLSPGAAWPVLHHLHGCRGCGAALGPVPPPGQPLLGSEAEEALEAAGRFLLPGLEEELEEAVGRIHLGPQGGPESVGEVFRLGRPRLAAHCARWTLGSEQCPRKRGLALVGLVEAAGEEAGPLTEALLAVVMGIELGARVPA

SEQ ID NO: 1076 - protein, 23 aa, Homo Sapiens
MADQRMDISSTISDFMSPGPTDL

SEQ ID NO: 1077 - protein, 59 aa, Homo Sapiens
MADQRMDISSTISDFMSPGPTDLLSSSLGTSGVDCNRKRKGSSTDYQESMDTDKDDPHG

SEQ ID NO: 1078 - protein, 76 aa, Homo Sapiens
MADQRMDISSTISDFMSPGPTDLLSSSLGTSGVDCNRKRKGSSTDYQESMDTDKDDPHGRLEYTEHQGRIKNAREA

SEQ ID NO: 1079 - protein, 101 aa, Homo Sapiens
MADQRMDISSTISDFMSPGPTDLLSSSLGTSGVDCNRKRKGSSTDYQESMDTDKDDPHGRLEYTEHQGRIKNAREAHSQIEKRRRDKMNSFIDELASLVPT

SEQ ID NO: 1080 - protein, 135 aa, Homo Sapiens
MADQRMDISSTISDFMSPGPTDLLSSSLGTSGVDCNRKRKGSSTDYQESMDTDKDDPHGRLEYTEHQGRIKNAREAHSQIEKRRRDKMNSFIDELASLVPTCNAMSRKLDKLTVLRMAVQHMKTLRGATNPYTEA

SEQ ID NO: 1081 - protein, 626 aa, Homo Sapiens
MADQRMDISSTISDFMSPGPTDLLSSSLGTSGVDCNRKRKGSSTDYQESMDTDKDDPHGRLEYTEHQGRIKNAREAHSQIEKRRRDKMNSFIDELASLVPTCNAMSRKLDKLTVLRMAVQHMKTLRGATNPYTEANYKPTFLSDDELKHLILRAADGFLFVVGCDRGKILFVSESVFKILNYSQNDLIGQSLFDYLHPKDIAKVKEQLSSSDTAPRERLIDAKTGLPVKTDITPGPSRLCSGARRSFFCRMKCNRPSVKVEDKDFPSTCSKKKADRKSFCTIHSTGYLKSWPPTKMGLDEDNEPDNEGCNLSCLVAIGRLHSHVVPQPVNGEIRVKSMEYVSRHAIDGKFVFVDQRATAILAYLPQELLGTSCYEYFHQDDIGHLAECHRQVLQTREKITTNCYKFKIKDGSFITLRSRWFSFMNPWTKEVEYIVSTNTVVLANVLEGGDPTFPQLTASPHSMDSMLPSGEGGPKRTHPTVPGIPGGTRAGAGKIGRMIAEEIMEIHRIRGSSPSSCGSSPLNITSTPPPDASSPGGKKILNGGTPDIPSSGLLSGQAQENPGYPYSDSSSILGENPHIGIDMIDNDQGSSSPSNDEAAMAVIMSLLEADAGLGGPVDFSDLPWPL

SEQ ID NO: 1082 - protein, 625 aa, Homo Sapiens
MADQRMDISSTISDFMSPGPTDLLSSSLGTSGVDCNRKRKGSSTDYQESMDTDKDDPHGRLEYTEHQGRIKNAREAHSQIEKRRRDKMNSFIDELASLVPTCNAMSRKLDKLTVLRMAVQHMKTLRGATNPYTEANYKPTFLSDDELKHLILRAADGFLFVVGCDRGKILFVSESVFKILNYSQNDLIGQSLFDYLHPKDIAKVKEQLSSSDTAPRERLIDAKTGLPVKTDITPGPSRLCSGARRSFFCRMKCNRPSVKVEDKDFPSTCSKKKDRKSFCTIHSTGYLKSWPPTKMGLDEDNEPDNEGCNLSCLVAIGRLHSHVVPQPVNGEIRVKSMEYVSRHAIDGKFVFVDQRATAILAYLPQELLGTSCYEYFHQDDIGHLAECHRQVLQTREKITTNCYKFKIKDGSFITLRSRWFSFMNPWTKEVEYIVSTNTVVLANVLEGGDPTFPQLTASPHSMDSMLPSGEGGPKRTHPTVPGIPGGTRAGAGKIGRMIAEEIMEIHRIRGSSPSSCGSSPLNITSTPPPDASSPGGKKILNGGTPDIPSSGLLSGQAQENPGYPYSDSSSILGENPHIGIDMIDNDQGSSSPSNDEAAMAVIMSLLEADAGLGGPVDFSDLPWPL

SEQ ID NO: 1083 - protein, 60 aa, Homo Sapiens
MADQRMDISSTISDFMSPGPTDLLSSSLGTSGVDCNRKRKGSSTDYQLEYTEHQGRIKNA

SEQ ID NO: 1084 - protein, 46 aa, Homo Sapiens
MINIESMDTDKDDPHGRLEYTEHQGRIKNAREAHSQIEKRRRDKMN

SEQ ID NO: 1085 - protein, 72 aa, Homo Sapiens
MINIESMDTDKDDPHGRLEYTEHQGRIKNAREAHSQIEKRRRDKMNSFIDELASLVPTCNAMSRKLDKLTVL

SEQ ID NO: 1086 - protein, 141 aa, Homo Sapiens
MINIESMDTDKDDPHGRLEYTEHQGRIKNAREAHSQIEKRRRDKMNSFIDELASLVPTCNAMSRKLDKLTVLRMAVQHMKTLRGATNPYTEANYKPTFLSDDELKHLILRAADGFLFVVGCDRGKILFVSESVFKILNYSQ

SEQ ID NO: 1087 - protein, 583 aa, Homo Sapiens
MINIESMDTDKDDPHGRLEYTEHQGRIKNAREAHSQIEKRRRDKMNSFIDELASLVPTCNAMSRKLDKLTVLRMAVQHMKTLRGATNPYTEANYKPTFLSDDELKHLILRAADGFLFVVGCDRGKILFVSESVFKILNYSQNDLIGQSLFDYLHPKDIAKVKEQLSSSDTAPRERLIDAKTGLPVKTDITPGPSRLCSGARRSFFCRMKCNRPSVKVEDKDFPSTCSKKKADRKSFCTIHSTGYLKSWPPTKMGLDEDNEPDNEGCNLSCLVAIGRLHSHVVPQPVNGEIRVKSMEYVSRHAIDGKFVFVDQRATAILAYLPQELLGTSCYEYFHQDDIGHLAECHRQVLQTREKITTNCYKFKIKDGSFITLRSRWFSFMNPWTKEVEYIVSTNTVVLANVLEGGDPTFPQLTASPHSMDSMLPSGEGGPKRTHPTVPGIPGGTRAGAGKIGRMIAEEIMEIHRIRGSSPSSCGSSPLNITSTPPPDASSPGGKKILNGGTPDIPSSGLLSGQAQENPGYPYSDSSSILGENPHIGIDMIDNDQGSSSPSNDEAAMAVIMSLLEADAGLGGPVDFSDLPWPL

SEQ ID NO: 1088 - protein, 582 aa, Homo Sapiens
MINIESMDTDKDDPHGRLEYTEHQGRIKNAREAHSQIEKRRRDKMNSFIDELASLVPTCNAMSRKLDKLTVLRMAVQHMKTLRGATNPYTEANYKPTFLSDDELKHLILRAADGFLFVVGCDRGKILFVSESVFKILNYSQNDLIGQSLFDYLHPKDIAKVKEQLSSSDTAPRERLIDAKTGLPVKTDITPGPSRLCSGARRSFFCRMKCNRPSVKVEDKDFPSTCSKKKDRKSFCTIHSTGYLKSWPPTKMGLDEDNEPDNEGCNLSCLVAIGRLHSHVVPQPVNGEIRVKSMEYVSRHAIDGKFVFVDQRATAILAYLPQELLGTSCYEYFHQDDIGHLAECHRQVLQTREKITTNCYKFKIKDGSFITLRSRWFSFMNPWTKEVEYIVSTNTVVLANVLEGGDPTFPQLTASPHSMDSMLPSGEGGPKRTHPTVPGIPGGTRAGAGKIGRMIAEEIMEIHRIRGSSPSSCGSSPLNITSTPPPDASSPGGKKILNGGTPDIPSSGLLSGQAQENPGYPYSDSSSILGENPHIGIDMIDNDQGSSSPSNDEAAMAVIMSLLEADAGLGGPVDFSDLPWPL

SEQ ID NO: 1089 - protein, 624 aa, Homo Sapiens
MSKEAVSLWALTVSLQPPVPLCVCREMTGSGRRKQQCVTLPFISRELCFYLLLFPPPRLEYTEHQGRIKNAREAHSQIEKRRRDKMNSFIDELASLVPTCNAMSRKLDKLTVLRMAVQHMKTLRGATNPYTEANYKPTFLSDDELKHLILRAADGFLFVVGCDRGKILFVSESVFKILNYSQNDLIGQSLFDYLHPKDIAKVKEQLSSSDTAPRERLIDAKTGLPVKTDITPGPSRLCSGARRSFFCRMKCNRPSVKVEDKDFPSTCSKKKADRKSFCTIHSTGYLKSWPPTKMGLDEDNEPDNEGCNLSCLVAIGRLHSHVVPQPVNGEIRVKSMEYVSRHAIDGKFVFVDQRATAILAYLPQELLGTSCYEYFHQDDIGHLAECHRQVLQTREKITTNCYKFKIKDGSFITLRSRWFSFMNPWTKEVEYIVSTNTVVLANVLEGGDPTFPQLTASPHSMDSMLPSGEGGPKRTHPTVPGIPGGTRAGAGKIGRMIAEEIMEIHRIRGSSPSSCGSSPLNITSTPPPDASSPGGKKILNGGTPDIPSSGLLSGQAQENPGYPYSDSSSILGENPHIGIDMIDNDQGSSSPSNDEAAMAVIMSLLEADAGLGGPVDFSDLPWPL

SEQ ID NO: 1090 - protein, 171 aa, Homo Sapiens
RATAILAYLPQELLGTSCYEYFHQDDIGHLAECHRQVLQTREKITTNCYKFKIKDGSFITLRSRWFSFMNPWTKEVEYIVSTNTVVLSRVDTGHLGQVEWCTVLSRPDSRFLIAGMFTEPTSWKAGTQPSHSSQHPPTAWTACCPLEKVAQRGPTPLFQGFQGEPGLGQEK

SEQ ID NO: 1091 - protein, 423 aa, Homo Sapiens
MGMYPGVLVPSSRGGLPLEEVTVAEVLAARGYLTGMAGKWHLGVGPEGAFLPPHQGFHRFLGIPYSHDQGPCQNLTCFPPATPCDGGCDQGLVPIPLLANLSVEAQPPWLPGLEARYMAFAHDLMADAQRQDRPFFLYYASHHTHYPQFSGQSFAERSGRGPFGDSLMELDAAVGTLMTAIGDLGLLEETLVIFTADNGPETMRMSRGGCSGLLRCGKGTTYEGGVREPALAFWPGHIAPGVTHELASSLDLLPTLAALAGAPLPNVTLDGFDLSPLLLGTGKSPRQSLFFYPSYPDEVRGVFAVRTGKYKAHFFTQGSAHSDTTADPACHASSSLTAHEPPLLYDLSKDPGENYNLLGGVAGATPEVLQALKQLQLLKAQLDAAVTFGPSQVARGEDPALQICCHPGCTPRPACCHCPDPHA

SEQ ID NO: 1092 - protein, 509 aa, Homo Sapiens
MSMGAPRSLLLALAAGLAVARPPNIVLIFADDLGYGDLGCYGHPSSTTPNLDQLAAGGLRFTDFYVPVSLCTPSRAALLTGRLPVRMGMYPGVLVPSSRGGLPLEEVTVAEVLAARGYLTGMAGKWHLGVGPEGAFLPPHQGFHRFLGIPYSHDQGPCQNLTCFPPATPCDGGCDQGLVPIPLLANLSVEAQPPWLPGLEARYMAFAHDLMADAQRQDRPFFLYYASHHTHYPQFSGQSFAERSGRGPFGDSLMELDAAVGTLMTAIGDLGLLEETLVIFTADNGPETMRMSRGGCSGLLRCGKGTTYEGGVREPALAFWPGHIAPGVTHELASSLDLLPTLAALAGAPLPNVTLDGFDLSPLLLGTGKSPRQSLFFYPSYPDEVRGVFAVRTGKYKAHFFTQGSAHSDTTADPACHASSSLTAHEPPLLYDLSKDPGENYNLLGGVAGATPEVLQALKQLQLLKAQLDAAVTFGPSQVARGEDPALQICCHPGCTPRPACCHCPDPHA

SEQ ID NO: 1093 - protein, 509 aa, Homo Sapiens; identical to SEQ ID NO: 1092

SEQ ID NO: 1094 - protein, 509 aa, Homo Sapiens; identical to SEQ ID NO: 1092

SEQ ID NO: 1095 - protein, 509 aa, Homo Sapiens; identical to SEQ ID NO: 1092

SEQ ID NO: 1096 - protein, 69 aa, Homo Sapiens
  misc_feature (1)..(1): Xaa can be any naturally occurring amino acid
XPSYPDEVRGVFAVRTGKYKAHFFTQGSAHSDTTADPACHASSSLTAHEPPLLYDLSKDPDGVSLCRPG

SEQ ID NO: 1097 - protein, 45 aa, Homo Sapiens
MGPRGAASLPRGPGPRRLLLPVVLPLLLLLLLAPPGSGAGASRPP

SEQ ID NO: 1098 - protein, 533 aa, Homo Sapiens
MGPRGAASLPRGPGPRRLLLPVVLPLLLLLLLAPPGSGAGASRPPHLVFLLADDLGWNDVGFHGSRIRTPHLDALAAGGVLLDNYYTQPLCTPSRSQLLTGRYQIRTGLQHQIIWPCQPSCVPLDEKLLPQLLKEAGYTTHMVGKWHLGMYRKECLPTRRGFDTYFGYLLGSEDYYSHERCTLIDALNVTRCALDFRDGEEVATGYKNMYSTNIFTKRAIALITNHPPEKPLFLYLALQSVHEPLQVPEEYLKPYDFIQDKNRHHYAGMVSLMDEAVGNVTAALKSSGLWNNTVFIFSTDNGGQTLAGGNNWPLRGRKWSLWEGGVRGVGFVASPLLKQKGVKNRELIHISDWLPTLVKLARGHTNGTKPLDGFDVWKTISEGSPSPRIELLHNIDPNFVDSSPCPRNSMAPAKDDSSLPEYSAFNTSVHAAIRHGNWKLLTGYPGCGYWFPPPSQYNVSEIPSSDPPTKTLWLFDIDRDPEERHDLSREYPHIVTKLLSRLQFYHKHSVPVYFPAQDPRCDPKATGVWGPWM

SEQ ID NO: 1099 - protein, 413 aa, Homo Sapiens
MGPRGAASLPRGPGPRRLLLPVVLPLLLLLLLAPPGSGAGASRPPHLVFLLADDLGWNDVGFHGSRIRTPHLDALAAGGVLLDNYYTQPLCTPSRSQLLTGRYQIRTGLQHQIIWPCQPSCVPLDEKLLPQLLKEAGYTTHMVGKWHLGMYRKECLPTRRGFDTYFGYLLGSEDYYSHERCTLIDALNVTRCALDFRDGEEVATGYKNMYSTNIFTKRAIALITNHPPEKPLFLYLALQSVHEPLQVPEEYLKPYDFIQDKNRHHYAGMVSLMDEAVGNVTAALKSSGLWNNTVFIFSTDNGGQTLAGGNNWPLRGRKWSLWEGGVRGVGFVASPLLKQKGVKNRELIHISDWLPTLVKLARGHTNGTKPLDGFDVWKTISEGSPSPRIELLHNIDPNFVDSSPYWPECSLLL

SEQ ID NO: 1100 - protein, 398 aa, Homo Sapiens
MGPRGAASLPRGPGPRRLLLPVVLPLLLLLLLAPPGSGAGASRPPHLVFLLADDLGWNDVGFHGSRIRTPHLDALAAGGVLLDNYYTQPLCTPSRSQLLTGRYQIRTGLQHQIIWPCQPSCVPLDEKLLPQLLKEAGYTTHMVGKWHLGMYRKECLPTRRGFDTYFGYLLGSEDYYSHERCTLIDALNVTRCALDFRDGEEVATGYKNMYSTNIFTKRAIALITNHPPEKPLFLYLALQSVHEPLQVPEEYLKPYDFIQDKNRHHYAGMVSLMDEAVGNVTAALKSSGLWNNTVFIFSTDNGGQTLAGGNNWPLRGRKWSLWEGGVRGVGFVASPLLKQKGVKNRELIHISDWLPTLVKLARGHTNGTKPLDGFDVWKTIRYLHPALFPPRTETPRAA

SEQ ID NO: 1101 - protein, 178 aa, Homo Sapiens
MLHLHHSCLCFRSWLPAMLAVLLSLAPSASSDISASRPNILLLMADDLGIGDIGCYGNNTMRTPNIDRLAEDGVKLTQHISAASLCTPSRAAFLTGRYPVRSGMVSSIGYRVLQWTGASGGLPTNETTFAKILKEKGYATGLIGKWHLGLNCESASDHCHHPLHHGFDHFYGMPFSLM

SEQ ID NO: 1102 - protein, 589 aa, Homo Sapiens
MLHLHHSCLCFRSWLPAMLAVLLSLAPSASSDISASRPNILLLMADDLGIGDIGCYGNNTMRTPNIDRLAEDGVKLTQHISAASLCTPSRAAFLTGRYPVRSGMVSSIGYRVLQWTGASGGLPTNETTFAKILKEKGYATGLIGKWHLGLNCESASDHCHHPLHHGFDHFYGMPFSLMGDCARWELSEKRVNLEQKLNFLFQVLALVALTLVAGKLTHLIPVSWMPVIWSALSAVLLLASSYFVGALIVHADCFLMRNHTITEQPMCFQRTTPLILQEVASFLKRNKHGPFLLFVSFLHVHIPLITMENFLGKSLHGLYGDNVEEMDWMVGRILDTLDVEGLSNSTLIYFTSDHGGSLENQLGNTQYGGWNGIYKGGKGMGGWEGGIRVPGIFRWPGVLPAGRVIGEPTSLMDVFPTVVRLAGGEVPQDRVIDGQDLLPLLLGTAQHSDHEFLMHYCERFLHAARWHQRDRGTMWKVHFVTPVFQPEGAGACYGRKVCPCFGEKVVHHDPPLLFDLSRDPSETHILTPASEPVFYQVMERVQQAVWEHQRTLSPVPLQLDRLGNIWRPWLQPCCGPFPLCWCLREDDPQ

SEQ ID NO: 1103 - protein, 614 aa, Homo Sapiens
MRPVINRCAPGSLDLMLPQAASEGIVFHSLQISLCFRSWLPAMLAVLLSLAPSASSDISASRPNILLLMADDLGIGDIGCYGNNTMRTPNIDRLAEDGVKLTQHISAASLCTPSRAAFLTGRYPVRSGMVSSIGYRVLQWTGASGGLPTNETTFAKILKEKGYATGLIGKWHLGLNCESASDHCHHPLHHGFDHFYGMPFSLMGDCARWELSEKRVNLEQKLNFLFQVLALVALTLVAGKLTHLIPVSWMPVIWSALSAVLLLASSYFVGALIVHADCFLMRNHTITEQPMCFQRTTPLILQEVASFLKRNKHGPFLLFVSFLHVHIPLITMENFLGKSLHGLYGDNVEEMDWMVGRILDTLDVEGLSNSTLIYFTSDHGGSLENQLGNTQYGGWNGIYKGGKGMGGWEGGIRVPGIFRWPGVLPAGRVIGEPTSLMDVFPTVVRLAGGEVPQDRVIDGQDLLPLLLGTAQHSDHEFLMHYCERFLHAARWHQRDRGTMWKVHFVTPVFQPEGAGACYGRKVCPCFGEKVVHHDPPLLFDLSRDPSETHILTPASEPVFYQVMERVQQAVWEHQRTLSPVPLQLDRLGNIWRPWLQPCCGPFPLCWCLREDDPQ

SEQ ID NO: 1104 - protein, 544 aa, Homo Sapiens
MSGSRERDNMLHLHHSWTPNIDRLAEDGVKLTQHISAASLCTPSRAAFLTGRYPVRSGMVSSIGYRVLQWTGASGGLPTNETTFAKILKEKGYATGLIGKWHLGLNCESASDHCHHPLHHGFDHFYGMPFSLMGDCARWELSEKRVNLEQKLNFLFQVLALVALTLVAGKLTHLIPVSWMPVIWSALSAVLLLASSYFVGALIVHADCFLMRNHTITEQPMCFQRTTPLILQEVASFLKRNKHGPFLLFVSFLHVHIPLITMENFLGKSLHGLYGDNVEEMDWMVGRILDTLDVEGLSNSTLIYFTSDHGGSLENQLGNTQYGGWNGIYKGGKGMGGWEGGIRVPGIFRWPGVLPAGRVIGEPTSLMDVFPTVVRLAGGEVPQDRVIDGQDLLPLLLGTAQHSDHEFLMHYCERFLHAARWHQRDRGTMWKVHFVTPVFQPEGAGACYGRKVCPCFGEKVVHHDPPLLFDLSRDPSETHILTPASEPVFYQVMERVQQAVWEHQRTLSPVPLQLDRLGNIWRPWLQPCCGPFPLCWCLREDDPQ

SEQ ID NO: 1105 - protein, 361 aa, Homo Sapiens
MGCTDTPGYNHPPCPACPQGDGPSRNLQRDCYTDVALPLYENLNIVEQPVNLSSLAQKYAEKATQFIQRASTSGRPFLLYVALAHMHVPLPVTQLPAAPRGRSLYGAGLWEMDSLVGQIKDKVDHTVKENTFLWFTGDNGPWAQKCELAGSVGPFTGFWQTRQGGSPAKQTTWEGGHRVPALAYWPGRVPVNVTSTALLSVLDIFPTVVALAQASLPQGRRFDGVDVSEVLFGRSQPGHRVLFHPNSGAAGEFGALQTVRLERYKAFYITGGARACDGSTGPELQHKFPLIFNLEDDTAEAVPLERGGAEYQAVLPEVRKVLADVLQDIANDNISSADYTQDPSVTPCCNPYQIACRCQAA

SEQ ID NO: 1106 - protein, 29 aa, Homo Sapiens
MGWLFLKVLLAGVSFSGFLYPLVDFCISG

SEQ ID NO: 1107 - protein, 525 aa, Homo Sapiens
MGWLFLKVLLAGVSFSGFLYPLVDFCISGKTRGQKPNFVIILADDMGWGDLGANWAETKDTANLDKMASEGMRFVDFHAAASTCSPSRASLLTGRLGLRNGVTRNFAVTSVGGLPLNETTLAEVLQQAGYVTGIIGKWHLGHHGSYHPNFRGFDYYFGIPYSHDMGCTDTPGYNHPPCPACPQGDGPSRNLQRDCYTDVALPLYENLNIVEQPVNLSSLAQKYAEKATQFIQRASTSGRPFLLYVALAHMHVPLPVTQLPAAPRGRSLYGAGLWEMDSLVGQIKDKVDHTVKENTFLWFTGDNGPWAQKCELAGSVGPFTGFWQTRQGGSPAKQTTWEGGHRVPALAYWPGRVPVNVTSTALLSVLDIFPTVVALAQASLPQGRRFDGVDVSEVLFGRSQPGHRVLFHPNSGAAGEFGALQTVRLERYKAFYITGGARACDGSTGPELQHKFPLIFNLEDDTAEAVPLERGGAEYQAVLPEVRKVLADVLQDIANDNISSADYTQDPSVTPCCNPYQIACRCQAA

SEQ ID NO: 1108 - protein, 525 aa, Homo Sapiens; identical to SEQ ID NO: 1107

SEQ ID NO: 1109 - protein, 569 aa, Homo Sapiens
MHTLTGFSLVSLLSFGYLSWDWAKPSFVADGPGEAGEQPSAAPPQPPHIIFILTDDQGYHDVGYHGSDIETPTLDRLAAKGVKLENYYIQPICTPSRSQLLTGRYQIHTGLQHSIIRPQQPNCLPLDQVTLPQKLQEAGYSTHMVGKWHLGFYRKECLPTRRGFDTFLGSLTGNVDYYTYDNCDGPGVCGFDLHEGENVAWGLSGQYSTMLYAQRASHILASHSPQRPLFLYVAFQAVHTPLQSPREYLYRYRTMGNVARRKYAAMVTCMDEAVRNITWALKRYGFYNNSVIIFSSDNGGQTFSGGSNWPLRGRKGTYWEGGVRGLGFVHSPLLKRKQRTSRALMHITDWYPTLVGLAGGTTSAADGLDGYDVWPAISEGRASPRTEILHNIDPLYNHAQHGSLEGGFGIWNTAVQAAIRVGEWKLLTGDPGYGDWIPPQTLATFPGSWWNLERMASVRQAVWLFNISADPYEREDLAGQRPDVVRTLLARLAEYNRTAIPVRYPAENPRAHPDFNGGAWGPWASDEEEEEEEGRARSFSRGRRKKKCKICKLRSFFRKLNTRLMSQRI

SEQ ID NO: 1110 - protein, 86 aa, Homo Sapiens
MVGKWHLGFYRKECLPTRRGFDTFLGSLTGNVDYYTYDNCDGPGVCGFDLHEGENVAWGLSGQYSTMLYAQRASHILASHSPQRPL

SEQ ID NO: 1111 - protein, 426 aa, Homo Sapiens
MVGKWHLGFYRKECLPTRRGFDTFLGSLTGNVDYYTYDNCDGPGVCGFDLHEGENVAWGLSGQYSTMLYAQRASHILASHSPQRPLFLYVAFQAVHTPLQSPREYLYRYRTMGNVARRKYAAMVTCMDEAVRNITWALKRYGFYNNSVIIFSSDNGGQTFSGGSNWPLRGRKGTYWEGGVRGLGFVHSPLLKRKQRTSRALMHITDWYPTLVGLAGGTTSAADGLDGYDVWPAISEGRASPRTEILHNIDPLYNHAQHGSLEGGFGIWNTAVQAAIRVGEWKLLTGDPGYGDWIPPQTLATFPGSWWNLERMASVRQAVWLFNISADPYEREDLAGQRPDVVRTLLARLAEYNRTAIPVRYPAENPRAHPDFNGGAWGPWASDEEEEEEEGRARSFSRGRRKKKCKICKLRSFFRKLNTRLMSQRI

SEQ ID NO: 1112 - protein, 153 aa, Homo Sapiens
MLLLWVSVVAALALAVLAPGAGEQRRRAAKAPNVVLVVSDSFDGRLTFHPGSQVVKLPFINFMKTRGTSFLNAYTNSPICCPSRAAMWSGLFTHLTESWNNFKGLDPNYTTWMDVMERHGYRTQKFGKLDYTSGHHSIRHSERGSTNQRSEKV

SEQ ID NO: 1113 - protein, 536 aa, Homo Sapiens
MLLLWVSVVAALALAVLAPGAGEQRRRAAKAPNVVLVVSDSFDGRLTFHPGSQVVKLPFINFMKTRGTSFLNAYTNSPICCPSRAAMWSGLFTHLTESWNNFKGLDPNYTTWMDVMERHGYRTQKFGKLDYTSGHHSISNRVEAWTRDVAFLLRQEGRPMVNLIRNRTKVRVMERDWQNTDKAVNWLRKEAINYTEPFVIYLGLNLPHPYPSPSSGENFGSSTFHTSLYWLEKVSHDAIKIPKWSPLSEMHPVDYYSSYTKNCTGRFTKKEIKNIRAFYYAMCAETDAMLGEIILALHQLDLLQKTIVIYSSDHGELAMEHRQFYKMSMYEASAHVPLLMMGPGIKAGLQVSNVVSLVDIYPTMLDIAGIPLPQNLSGYSLLPLSSETFKNEHKVKNLHPPWILSEFHGCNVNASTYMLRTNHWKYIAYSDGASILPQLFDLSSDPDELTNVAVKFPEITYSLDQKLHSIINYPKVSASVHQYNKEQFIKWKQSIGQNYSNVIANLRWHQDWQKEPRKYENAIDQWLKTHMNPRAV

SEQ ID NO: 1114 - protein, 395 aa, Homo Sapiens
MLLLWVSVVAALALAVLAPGAGEQRRRAAKAPNVVLVVSDSFDGRLTFHPGSQVVKLPFINFMKTRGTSFLNAYTNSPICCPSRAAMWSGLFTHLTESWNNFKGLDPNYTTWMDVMERHGYRTQKFGKLDYTSGHHSISNRVEAWTRDVAFLLRQEGRPMVNLIRNRTKVRVMERDWQNTDKAVNWLRKEAINYTEPFVIYLGLNLPHPYPSPSSGENFGSSTFHTSLYWLEKVSHDAIKIPKWSPLSEMHPVDYYSSYTKNCTGRFTKKEIKNIRAFYYAMCAETDAMLGEIILALHQLDLLQKTIVIYSSDHGELAMEHRQFYKMSMYEASAHVPLLMMGPGIKAGLQVSNVVSLVDIYPTMLDEKTEVEISKLLAEVHMASGILLEFLCLRT

SEQ ID NO: 1115 - protein, 46 aa, Homo Sapiens
MLLLWVSVVAALALAVLAPGAGEQRRRAAKAPNVVLVVSDSFIPDD

SEQ ID NO: 1116 - protein, 92 aa, Homo Sapiens
RAAKAPNVVLVVSDSFDGRLTFHPGSQVVKLPFINFMKTRGTSFLNAYTNSPICCPSRAVIVWKRGQEMLLSYSDKKAGPWLILSVTGLKSE

SEQ ID NO: 1117 - protein, 117 aa, Homo Sapiens
KTCSHYECAFLGGLKTENCIENLEYFQPIYVYNPGEKNQKLEDHSEKNWKLEDHGEKNQKLEDHGVKILEPTQIPGMKIPEPFPLPGIKMIQLNEKPEDKSQGNINNPTPGPVPVPG

SEQ ID NO: 1118 - protein, 107 aa, Homo Sapiens
MKTGHFEIVTMLLATMILVDIFQVKAEVLDMADNAFDDEYLKCTDRMEIKYVPQLLKEEKASHQQLDTVWENAKAKWAARKTQIFLPMNFKDNHGIALMAYISEAQE

SEQ ID NO: 1119 - protein, 129 aa, Homo Sapiens
MKTGHFEIVTMLLATMILVDIFQVKAEVLDMADNAFDDEYLKCTDRMEIKYVPQLLKEEKASHQQLDTVWENAKAKWAARKTQIFLPMNFKDNHGIALMAYISEAQEQTPFYHLFSEAVKMAGQSREDY

SEQ ID NO: 1120 - protein, 175 aa, Homo Sapiens
MKTGHFEIVTMLLATMILVDIFQVKAEVLDMADNAFDDEYLKCTDRMEIKYVPQLLKEEKASHQQLDTVWENAKAKWAARKTQIFLPMNFKDNHGIALMAYISEAQEQTPFYHLFSEAVKMAGQSREDYIYGFQFKAFHFYLTRALQLLRKPCEASSKTVVYRTSQGTSFTFGGL

SEQ ID NO: 1121 - protein, 202 aa, Homo Sapiens
MKTGHFEIVTMLLATMILVDIFQVKAEVLDMADNAFDDEYLKCTDRMEIKYVPQLLKEEKASHQQLDTVWENAKAKWAARKTQIFLPMNFKDNHGIALMAYISEAQEQTPFYHLFSEAVKMAGQSREDYIYGFQFKAFHFYLTRALQLLRKPCEASSKTVVYRTSQGTSFTFGGLNQARFGHFTLAYSAKPQAANDQLTVLS

SEQ ID NO: 1122 - protein, 389 aa, Homo Sapiens
MKTGHFEIVTMLLATMILVDIFQVKAEVLDMADNAFDDEYLKCTDRMEIKYVPQLLKEEKASHQQLDTVWENAKAKWAARKTQIFLPMNFKDNHGIALMAYISEAQEQTPFYHLFSEAVKMAGQSREDYIYGFQFKAFHFYLTRALQLLRKPCEASSKTVVYRTSQGTSFTFGGLNQARFGHFTLAYSAKPQAANDQLTVLSIYTCLGVDIENFLDKESERITLIPLNEVFQVSQEGAGNNLILQSINKTCSHYECAFLGGLKTENCIENLEYFQPIYVYNPGEKNQKLEDHSEKNWKLEDHGEKNQKLEDHGVKILEPTQIPGMKIPEPFPLPEDKSQGNINNPTPGPVPVPGPKSHPSASSGKLLLPQFGMVIILISVSAINLFVAL

SEQ ID NO: 1123 - protein, 378 aa, Homo Sapiens
MKTGHFEIVTMLLATMILVDIFQVKAEVLDMADNAFDDEYLKCTDRMEIKYVPQLLKEEKASHQQLDTVWENAKAKWAARKTQIFLPMNFKDNHGIALMAYISEAQEQTPFYHLFSEAVKMAGQSREDYIYGFQFKAFHFYLTRALQLLRKPCEASSKTVVYRTSQGTSFTFGGLNQARFGHFTLAYSAKPQAANDQLTVLSIYTCLGVDIENFLDKESERITLIPLNEVFQVSQEGAGNNLILQSINKTCSHYECAFLGGLKTENCIENLEYFQPIYVYNPGEKNQKLEDHSEKNWKLEDHGEKNQKLEDHGVKILEPTQIPEDKSQGNINNPTPGPVPVPGPKSHPSASSGKLLLPQFGMVIILISVSAINLFVAL

SEQ ID NO: 1124 - protein, 367 aa, Homo Sapiens
MKTGHFEIVTMLLATMILVDIFQVKAEVLDMADNAFDDEYLKCTDRMEIKYVPQLLKEEKASHQQLDTVWENAKAKWAARKTQIFLPMNFKDNHGIALMAYISEAQEQTPFYHLFSEAVKMAGQSREDYIYGFQFKAFHFYLTRALQLLRKPCEASSKTVVYRTSQGTSFTFGGLNQARFGHFTLAYSAKPQAANDQLTVLSIYTCLGVDIENFLDKESERITLIPLNEVFQVSQEGAGNNLILQSINKTCSHYECAFLGGLKTENCIENLEYFQPIYVYNPGEKNQKLEDHSEKNWKLEDHGEKNQKLEDHGVKILEPTQIPAPGPVPVPGPKSHPSASSGKLLLPQFGMVIILISVSAINLFVAL

SEQ ID NO: 1125 - protein, 314 aa, Homo Sapiens
MGPLINRCKKILLPTTVPPATMRIWLLGGLLPFLLLLSGLQRPTEGSEVAIKIDFDFAPGSFDDQYQGCSKQVMEKLTQGDYFTKDIEAQKNYFRMWQKAHLAWLNQGKVLPQNMTTTHAVAILFYTLNSNVHSDFTRAMASVARTPQQYERSFHFKYLHYYLTSAIQLLRKDSIMENGTLCYEVHYRTKDVHFNAYTGATIRFGQFLSTSLLKEEAQEFGNQTLFTIFTCLGAPVQYFSLKKEVLIPPYELFKVINMSYHPRGDWLQLRSTGNLSTYNCQLLKASSKKCIPDPIAIASLSFLTSVIIFSKSRV

SEQ ID NO: 1126 - protein, 41 aa, Homo Sapiens
PPATMRIWLLGGLLPFLLLLSGLQRPTEGSELPARNASLIL

SEQ ID NO: 1127 - protein, 65 aa, Homo Sapiens
PPATMRIWLLGGLLPFLLLLSGLQRPTEGSEVAIKIDFDFAPGSFDDQYQGCSKQLPARNASLIL

SEQ ID NO: 1128 - protein, 273 aa, Homo Sapiens
PPATMRIWLLGGLLPFLLLLSGLQRPTEGSEVAIKIDFDFAPGSFDDQYQGCSKQVMEKLTQGDYFTKDIEAQKNYFRMWQKAHLAWLNQGKVLPQNMTTTHAVAILFYTLNSNVHSDFTRAMASVARTPQQYERSFHFKYLHYYLTSAIQLLRKDSIMENGTLCYEVHYRTKDVHFNAYTGATIRFGQFLSTSLLKEEAQEFGNQTLFTIFTCLGAPVQYFSLKKEVLIPPYELFKVINMSYHPRGDWLQLRSTGNLSTYNCQLLKGILYLN

SEQ ID NO: 1129 - protein, 152 aa, Homo Sapiens
AVPILPLGLAPDTFDDTYVGCAEEMEEKAAPLLKEEMAHHALLRESWEAAQETWEDKRRGLTLPPGFKAQNGIAIMVYTNSSNTLYWELNQAAFSVFPKEREVLIPPHEVFLVTRFSQDGAQSLVTLWSYNQTCSHFNCAYLGGEKRRGCVS

SEQ ID NO: 1130 - protein, 239 aa, Homo Sapiens
MALAALMIALGSLGLHTWQAQAVPILPLGLAPDTFDDTYVGCAEEMEEKAAPLLKEEMAHHALLRESWEAAQETWEDKRRGLTLPPGFKAQNGIAIMVYTNSSNTLYWELNQAVRTGGGSRELYMRHFPFKALHFYLIRALQLLRGSGGCSRGPGEVVFRGVGSLRFEPKRLGDSVRLGQFASSSLDKAVAHRFGEKRRGCVSAPGVQLGSQSEGASSLPPWKTLLLAPGEFQLSGVGP

SEQ ID NO: 1131 - protein, 291 aa, Homo Sapiens
MALAALMIALGSLGLHTWQAQAVPILPLGLAPDTFDDTYVGCAEEMEEKAAPLLKEEMAHHALLRESWEAAQETWEDKRRGLTLPPGFKAQNGIAIMVYTNSSNTLYWELNQAVRTGGGSRELYMRHFPFKALHFYLIRALQLLRGSGGCSRGPGEVVFRGVGSLRFEPKRLGDSVRLGQFASSSLDKAVAHRFGNATLFSLTTCFGAPIQAFSVFPKEREVLIPPHEVFLVTRFSQDGAQSLVTLWSYNQTCSHFNCAYLGGEKRRGCVSAPGALGTGDLHMTKRHLQQP

SEQ ID NO: 1132 - protein, 291 aa, Homo Sapiens; identical to SEQ ID NO: 1131

SEQ ID NO: 1133 - protein, 264 aa, Homo Sapiens
  misc_feature (1)..(1): Xaa can be any naturally occurring amino acid
XEMEEKAAPLLKEEMAHHALLRESWEAAQETWEDKRRGLTLPPGFKAQNGIAIMVYTNSSNTLYWELNQAVRTGGGSRELYMRHFPFKALHFYLIRALQLLRGSGGCSRGPGEVVFRGVGSLRFEPKRLGDSVRLGQFASSSLDKAVAHRFGNATLFSLTTCFGAPIQAFSVFPKEREVLIPPHEVFLVTRFSQDGAQSLVTLWSYNQTCSHFNCAYLGGEKRRGCVSAPGVQLGSQSEGASSLPPWKTLLLAPGEFQLSGVGP

SEQ ID NO: 1134 - protein, 89 aa, Homo Sapiens
MELGLGGLSTLSHCPWPRQQAPLGLSAQPALWPTLAALALLSSVAEASLGSAPRSPAPREGPPPVLASPAGHLPGGRTARWCSGRARRP

SEQ ID NO: 1135 - protein, 89 aa, Homo Sapiens; identical to SEQ ID NO: 1134

SEQ ID NO: 1136 - protein, 228 aa, Homo Sapiens
MELGLGGLSTLSHCPWPRQQAPLGLSAQPALWPTLAALALLSSVAEASLGSAPRSPAPREGPPPVLASPAGHLPGGRTARWCSGRARRPPPQPSRPAPPPPAPPSALPRGGRAARAGGPGSRARAAGARGCRLRSQLVPVRALGLGHRSDELVRFRFCSGSCRRARSPHDLSLASLLGAGALRPPPGSRPVSQPCCRPTRYEAVSFMDVNSTWRTVDRLSATACGCLG

SEQ ID NO: 1137 - protein, 228 aa, Homo Sapiens; identical to SEQ ID NO: 1136

SEQ ID NO: 1138 - protein, 76 aa, Homo Sapiens
MELGLGGLSTLSHCPWPRQQAPLGLSAQPALWPTLAALALLSSVAEASLGSAPRSPAPREGPPPVLASPAGHLPGR

SEQ ID NO: 1139 - protein, 76 aa, Homo Sapiens; identical to SEQ ID NO: 1138

SEQ ID NO: 1140 - protein, 66 aa, Homo Sapiens
MELGLGGLSTLSHCPWPRQQPALWPTLAALALLSSVAEASLGSAPRSPAPREGPPPVLASPAGHLP

SEQ ID NO: 1141 - protein, 66 aa, Homo Sapiens; identical to SEQ ID NO: 1140

SEQ ID NO: 1142 - protein, 220 aa, Homo Sapiens
MELGLGGLSTLSHCPWPRQQPALWPTLAALALLSSVAEASLGSAPRSPAPREGPPPVLASPAGHLPGGRTARWCSGRARRPPPQPSRPAPPPPAPPSALPRGGRAARAGGPGSRARAAGARGCRLRSQLVPVRALGLGHRSDELVRFRFCSGSCRRARSPHDLSLASLLGAGALRPPPGSRPVSQPCCRPTRYEAVSFMDVNSTWRTVDRLSATACGCLG

SEQ ID NO: 1143 - protein, 220 aa, Homo Sapiens; identical to SEQ ID NO: 1142

SEQ ID NO: 1144 - protein, 237 aa, Homo Sapiens
MPGLISARGQPLLEVLPPQAHLGALFLPEAPLGLSAQPALWPTLAALALLSSVAEASLGSAPRSPAPREGPPPVLASPAGHLPGGRTARWCSGRARRPPPQPSRPAPPPPAPPSALPRGGRAARAGGPGSRARAAGARGCRLRSQLVPVRALGLGHRSDELVRFRFCSGSCRRARSPHDLSLASLLGAGALRPPPGSRPVSQPCCRPTRYEAVSFMDVNSTWRTVDRLSATACGCLG

SEQ ID NO: 1145 - protein, 31 aa, Homo Sapiens
GRAVDRGLQKINLSSFRTNVQRCSSMVHHKS

SEQ ID NO: 1146 - protein, 125 aa, Homo Sapiens
MLDKAPVLKVIVNSLKNMINTFVPSGKIMQVVDEKLPGLLGNFPGPFEEEMKGIAAVTDIPLGEIISFNIFYELFTICTSIVAEDKKGHLIHGRNMDFGVFLGWNINNDTWVITEQLKPLTVNLD

SEQ ID NO: 1147 - protein, 151 aa, Homo Sapiens
MLDKAPVLKVIVNSLKNMINTFVPSGKIMQVVDEKLPGLLGNFPGPFEEEMKGIAAVTDIPLGEIISFNIFYELFTICTSIVAEDKKGHLIHGRNMDFGVFLGWNINNDTWVITEQLKPLTVNLDFQRNNKTVFKASSFAGYVGMLTGFKP

SEQ ID NO: 1148 - protein, 330 aa, Homo Sapiens
MLDKAPVLKVIVNSLKNMINTFVPSGKIMQVVDEKLPGLLGNFPGPFEEEMKGIAAVTDIPLGEIISFNIFYELFTICTSIVAEDKKGHLIHGRNMDFGVFLGWNINNDTWVITEQLKPLTVNLDFQRNNKTVFKASSFAGYVGMLTGFKPGLFSLTLNERFSINGGYLGILEWILGKKDVMWIGFLTRTVLENSTSYEEAKNLLTKTKILAPAYFILGGNQSGEGCVITRDRKESLDVYELDAKQGRWYVVQTNYDRWKHPFFLDDRRTPAKMCLNRTSQENISFETMYDVLSTKPVLNKLTVYTTLIDVTKGQFETYLRDCPDPCIGW

SEQ ID NO: 1149 - protein, 330 aa, Homo Sapiens; identical to SEQ ID NO: 1148

SEQ ID NO: 1150 - protein, 110 aa, Homo Sapiens
MLDKAPVLKVIVNSLKNMINTFVPSGKIMQVVDEKLPGLLGNFPGPFEEEMKGIAAVTDIPLGKVHLEALKKKVIKFFYKFPLRCDIHTAQVLYVLDIQHRCTGLRYTAQ

SEQ ID NO: 1151 - protein, 110 aa, Homo Sapiens; identical to SEQ ID NO: 1150

SEQ ID NO: 1152 - protein, 187 aa, Homo Sapiens
MNCCIGLGEKARGSHRASYPSLSALFTEASILGFGSFAVKAQVAWKALSLSLRHPFRGTEKPRPLLPVPPPPSVPPTAWNGAVPGRGSRGGGGVACPRPSRLFFASAGVRGVALAARAMPGRSCVALVLLAAAVSCAVAQHAPPWTEDCRKSTYPPSGPTYRGAVPWYTINLDLPPYKRWHELMLDK

SEQ ID NO: 1153 - protein, 72 aa, Homo Sapiens
MNCCIGLGEKARGSHRASYPSLSALFTEASILGFGSFAVKAQVGNQQLGGPEWIRFSLTPRPLNCSLSLTPR

SEQ ID NO: 1154 - protein, 97 aa, Homo Sapiens
MNCCIGLGEKARGSHRASYPSLSALFTEASILGFGSFAVKAQVGNQQLGGPEWIRFSLTPRPLNCSLSLTPRGQRTAENQPILLQDQRTEVQFHGTP

SEQ ID NO: 1155 - protein, 74 aa, Homo Sapiens
MNCCIGLGEKARGSHRASYPSLSALFTEASILGFGSFAVKAQVGNQQLGGPEWIRFSLTPRPLNCSLSLTPRWG

SEQ ID NO: 1156 - protein, 74 aa, Homo Sapiens; identical to SEQ ID NO: 1155

SEQ ID NO: 1157 - protein, 74 aa, Homo Sapiens; identical to SEQ ID NO: 1155

SEQ ID NO: 1158 - protein, 74 aa, Homo Sapiens; identical to SEQ ID NO: 1155

SEQ ID NO: 1159 - protein, 74 aa, Homo Sapiens; identical to SEQ ID NO: 1155

SEQ ID NO: 1160 - protein, 71 aa, Homo Sapiens
MNCCIGLGEKARGSHRASYPSLSALFTEASILGFGSFAVKAQVVDRGLQKINLSSFRTNVQRCSSMVHHKS

SEQ ID NO: 1161 - protein, 58 aa, Homo Sapiens
MNCCIGLGEKARGSHRASYPSLSALFTEASILGFGSFAVKAQWTEDCRKSTYPPSGPT

SEQ ID NO: 1162 - protein, 59 aa, Homo Sapiens
MNCCIGLGEKARGSHRASYPSLSALFTEASILGFGSFAVKAQWTEDCRKSTYPPSGPTL

SEQ ID NO: 1163 - protein, 389 aa, Homo Sapiens
MNCCIGLGEKARGSHRASYPSLSALFTEASILGFGSFAVKAQWTEDCRKSTYPPSGPTVFPAVIRYRGAVPWYTINLDLPPYKRWHELMLDKAPVPGLLGNFPGPFEEEMKGIAAVTDIPLGEIISFNIFYELFTICTSIVAEDKKGHLIHGRNMDFGVFLGWNINNDTWVITEQLKPLTVNLDFQRNNKTVFKASSFAGYVGMLTGFKPGLFSLTLNERFSINGGYLGILEWILGKKDVMWIGFLTRTVLENSTSYEEAKNLLTKTKILAPAYFILGGNQSGEGCVITRDRKESLDVYELDAKQGRWYVVQTNYDRWKHPFFLDDRRTPAKMCLNRTSQENISFETMYDVLSTKPVLNKLTVYTTLIDVTKGQFETYLRDCPDPCIGW

SEQ ID NO: 1164 - protein, 411 aa, Homo Sapiens
MNCCIGLGEKARGSHRASYPSLSALFTEASILGFGSFAVKAQWTEDCRKSTYPPSGPTYRGAVPWYTINLDLPPYKRWHELMLDKAPVLKVIVNSLKNMINTFVPSGKIMQVVDEKLPGLLGNFPGPFEEEMKGIAAVTDIPLGEIISFNIFYELFTICTSIVAEDKKGHLIHGRNMDFGVFLGWNINNDTWVITEQLKPLTVNLDFQRNNKTVFKASSFAGYVGMLTGFKPGLFSLTLNERFSINGGYLGILEWILGKKDVMWIGFLTRTVLENSTSYEEAKNLLTKTKILAPAYFILGGNQSGEGCVITRDRKESLDVYELDAKQGRWYVVQTNYDRWKHPFFLDDRRTPAKMCLNRTSQENISFETMYDVLSTKPVLNKLTVYTTLIDVTKGQFETYLRDCPDPCIGW

SEQ ID NO: 1165 - protein, 341 aa, Homo Sapiens
MNCCIGLGEKARGSHRASYPSLSALFTEASILGFGSFAVKAQWTEDCRKSTYPPSGPTYRGAVPWYTINLDLPPYKRWHELMLDKAPVLKVIVNSLKNMINTFVPSGKIMQVVDEKLPGLLGNFPGPFEEEMKGIAAVTDIPLGEIISFNIFYELFTICTSIVAEDKKGHLIHGRNMDFGVFLGWNINNDTWVITEQLKPLTVNLDFQRNNKTVFKASSFAGYVGMLTGFKPGLFSLTLNERFSINGGYLGILEWILGKKDVMWIGFLTRTVLENSTSYEEAKNLLTKTKILAPAYFILGGNQSGEGCVITRDRKESLDVYEISHLKPCMMSCQQNLSSTS

SEQ ID NO: 1166 - protein, 386 aa, Homo Sapiens
MNCCIGLGEKARGSHRASYPSLSALFTEASILGFGSFAVKAQWTEDCRKSTYPPSGPTYRGAVPWYTINLDLPPYKRWHELMLDKAPVLKVIVNSLKNMINTFVPSGKIMQVVDEKLPGLLGNFPGPFEEEMKGIAAVTDIPLGHLIHGRNMDFGVFLGWNINNDTWVITEQLKPLTVNLDFQRNNKTVFKASSFAGYVGMLTGFKPGLFSLTLNERFSINGGYLGILEWILGKKDVMWIGFLTRTVLENSTSYEEAKNLLTKTKILAPAYFILGGNQSGEGCVITRDRKESLDVYELDAKQGRWYVVQTNYDRWKHPFFLDDRRTPAKMCLNRTSQENISFETMYDVLSTKPVLNKLTVYTTLIDVTKGQFETYLRDCPDPCIGW

SEQ ID NO: 1167 - protein, 191 aa, Homo Sapiens
MNCCIGLGEKARGSHRASYPSLSALFTEASILGFGSFAVKAQWTEDCRKSTYPPSGPTYRGAVPWYTINLDLPPYKRWHELMLDKAPVLKVIVNSLKNMINTFVPSGKIMQVVDEKLPGLLGNFPGPFEEEMKGIAAVTDIPLGKVHLEALKKKVIKFFYKFPLRCDIHTAQVLYVLDIQHRCTGLRYTAQ

SEQ ID NO: 1168 - protein, 140 aa, Homo Sapiens
MNCCIGLGEKARGSHRASYPSLSALFTEASILGFGSFAVKAQWTEDCRKSTYPPSGPTYRGAVPWYTINLDLPPYKRWHELMLDKAPVVIVNSLKNMINTFVPSGKIMQVVDEKLPGLLGNFPGPFEEEMKGIAAVTDIP

SEQ ID NO: 1169 - protein, 49 aa, Homo Sapiens
MPGRSCVALVLLAAAVSCAVAQHAPPRTAENQPILLQDQRTEVQFHGTP

SEQ ID NO: 1170 - protein, 81 aa, Homo Sapiens
MPGRSCVALVLLAAAVSCAVAQHAPPVSELEPRRREGRAGAGADGGAGVAARAVDRGLQKINLSSFRTNVQRCSSMVHHKS

SEQ ID NO: 1171 - protein, 75 aa, Homo Sapiens
MPGRSCVALVLLAAAVSCAVAQHAPPVSELEPRRREGRAGAGADGGAVDRGLQKINLSSFRTNVQRCSSMVHHKS

SEQ ID NO: 1172 - protein, 75 aa, Homo Sapiens; identical to SEQ ID NO: 1171

SEQ ID NO: 1173 - protein, 67 aa, Homo Sapiens
MPGRSCVALVLLAAAVSCAVAQHAPPVSELEPRRREGRAVDRGLQKINLSSFRTNVQRCSSMVHHKS

SEQ ID NO: 1174 - protein, 42 aa, Homo Sapiens
MPGRSCVALVLLAAAVSCAVAQHAPPWTEDCRKSTYPPSGPT

SEQ ID NO: 1175 - protein, 42 aa, Homo Sapiens; identical to SEQ ID NO: 1174

SEQ ID NO: 1176 - protein, 42 aa, Homo Sapiens; identical to SEQ ID NO: 1174

SEQ ID NO: 1177 - protein, 56 aa, Homo Sapiens
MPGRSCVALVLLAAAVSCAVAQHAPPWTEDCRKSTYPPSGPTLAYLATFLALLKRK

SEQ ID NO: 1178 - protein, 184 aa, Homo Sapiens
MPGRSCVALVLLAAAVSCAVAQHAPPWTEDCRKSTYPPSGPTVFPAVIRYRGAVPWYTINLDLPPYKRWHELMLDKAPVLKVIVNSLKNMINTFVPSGKIMQVVDEKLPGLLGNFPGPFEEEMKGIAAVTDIPLGEIISFNIFYELFTICTSIVAEDKKGHLIHGRNMDFGVFLGWNINNDTWV

SEQ ID NO: 1179 - protein, 62 aa, Homo Sapiens
MPGRSCVALVLLAAAVSCAVAQHAPPWTEDCRKSTYPPSGPTYRGAVPWYTINLDLPPYKRC

SEQ ID NO: 1180 - protein, 185 aa, Homo Sapiens
MPGRSCVALVLLAAAVSCAVAQHAPPWTEDCRKSTYPPSGPTYRGAVPWYTINLDLPPYKRWHELMLDKAPVLKVIVNSLKNMINTFVPSGKIMQVVDEKLPGLLGNFPGPFEEEMKGEIISFNIFYELFTICTSIVAEDKKGHLIHGRNMDFGVFLGWNINNDTWVITEQLKPLTVNLDFQRNN

SEQ ID NO: 1181 - protein, 375 aa, Homo Sapiens
MPGRSCVALVLLAAAVSCAVAQHAPPWTEDCRKSTYPPSGPTYRGAVPWYTINLDLPPYKRWHELMLDKAPVLKVIVNSLKNMINTFVPSGKIMQVVDEKLPGLLGNFPGPFEEEMKGIAAVTDIPLAEDKKGHLIHGRNMDFGVFLGWNINNDTWVITEQLKPLTVNLDFQRNNKTVFKASSFAGYVGMLTGFKPGLFSLTLNERFSINGGYLGILEWILGKKDVMWIGFLTRTVLENSTSYEEAKNLLTKTKILAPAYFILGGNQSGEGCVITRDRKESLDVYELDAKQGRWYVVQTNYDRWKHPFFLDDRRTPAKMCLNRTSQENISFETMYDVLSTKPVLNKLTVYTTLIDVTKGQFETYLRDCPDPCIGW

SEQ ID NO: 1182 - protein, 374 aa, Homo Sapiens
MPGRSCVALVLLAAAVSCAVAQHAPPWTEDCRKSTYPPSGPTYRGAVPWYTINLDLPPYKRWHELMLDKAPVLKVIVNSLKNMINTFVPSGKIMQVVDEKLPGLLGNFPGPFEEEMKGIAAVTDIPLEDKKGHLIHGRNMDFGVFLGWNINNDTWVITEQLKPLTVNLDFQRNNKTVFKASSFAGYVGMLTGFKPGLFSLTLNERFSINGGYLGILEWILGKKDVMWIGFLTRTVLENSTSYEEAKNLLTKTKILAPAYFILGGNQSGEGCVITRDRKESLDVYELDAKQGRWYVVQTNYDRWKHPFFLDDRRTPAKMCLNRTSQENISFETMYDVLSTKPVLNKLTVYTTLIDVTKGQFETYLRDCPDPCIGW

SEQ ID NO: 1183 - protein, 395 aa, Homo Sapiens
MPGRSCVALVLLAAAVSCAVAQHAPPWTEDCRKSTYPPSGPTYRGAVPWYTINLDLPPYKRWHELMLDKAPVLKVIVNSLKNMINTFVPSGKIMQVVDEKLPGLLGNFPGPFEEEMKGIAAVTDIPLGEIISFNIFYELFTICTSIVAEDKKGHLIHGRNMDFGVFLGWNINNDTWVITEQLKPLTVNLDFQRNNKTVFKASSFAGYVGMLTGFKPGLFSLTLNERFSINGGYLGILEWILGKKDVMWIGFLTRTVLENSTSYEEAKNLLTKTKILAPAYFILGGNQSGEGCVITRDRKESLDVYELDAKQGRWYVVQTNYDRWKHPFFLDDRRTPAKMCLNRTSQENISFETMYDVLSTKPVLNKLTVYTTLIDVTKGQFETYLRDCPDPCIGW

SEQ ID NO: 1184 - protein, 395 aa, Homo Sapiens; identical to SEQ ID NO: 1183

SEQ ID NO: 1185 - protein, 395 aa, Homo Sapiens; identical to SEQ ID NO: 1183

SEQ ID NO: 1186 - protein, 173 aa, Homo Sapiens
MPGRSCVALVLLAAAVSCAVAQHAPPWTEDCRKSTYPPSGPTYRGAVPWYTINLDLPPYKRWHELMLDKAPVLKVIVNSLKNMINTFVPSGKIMQVVDEKLPGLLGNFPGPFEEEMKGIAAVTDIPLGEIISFNIFYELFTICTSIVAEDKKGNCALREGGQHEALHKEKSSK

SEQ ID NO: 1187 - protein, 370 aa, Homo Sapiens
MPGRSCVALVLLAAAVSCAVAQHAPPWTEDCRKSTYPPSGPTYRGAVPWYTINLDLPPYKRWHELMLDKAPVLKVIVNSLKNMINTFVPSGKIMQVVDEKLPGLLGNFPGPFEEEMKGIAAVTDIPLGHLIHGRNMDFGVFLGWNINNDTWVITEQLKPLTVNLDFQRNNKTVFKASSFAGYVGMLTGFKPGLFSLTLNERFSINGGYLGILEWILGKKDVMWIGFLTRTVLENSTSYEEAKNLLTKTKILAPAYFILGGNQSGEGCVITRDRKESLDVYELDAKQGRWYVVQTNYDRWKHPFFLDDRRTPAKMCLNRTSQENISFETMYDVLSTKPVLNKLTVYTTLIDVTKGQFETYLRDCPDPCIGW

SEQ ID NO: 1188 - protein, 288 aa, Homo Sapiens
MPGRSCVALVLLAAAVSCAVAQHAPPWTEDCRKSTYPPSGPTYRGAVPWYTINLDLPPYKRWHELMLDKAPVLKVIVNSLKNMINTFVPSGKIMQVVDEKLPGLLGNFPGPFEEEMKGIAAVTDIPLGILEWILGKKDVMWIGFLTRTVLENSTSYEEAKNLLTKTKILAPAYFILGGNQSGEGCVITRDRKESLDVYELDAKQGRWYVVQTNYDRWKHPFFLDDRRTPAKMCLNRTSQENISFETMYDVLSTKPVLNKLTVYTTLIDVTKGQFETYLRDCPDPCIGW

SEQ ID NO: 1189 - protein, 175 aa, Homo Sapiens
MPGRSCVALVLLAAAVSCAVAQHAPPWTEDCRKSTYPPSGPTYRGAVPWYTINLDLPPYKRWHELMLDKAPVLKVIVNSLKNMINTFVPSGKIMQVVDEKLPGLLGNFPGPFEEEMKGIAAVTDIPLGKVHLEALKKKVIKFFYKFPLRCDIHTAQVLYVLDIQHRCTGLRYTAQ

SEQ ID NO: 1190 - protein, 376 aa, Homo Sapiens
MPGRSCVALVLLAAAVSCAVAQHAPPWTEDCRKSTYPPSGPTYRGAVPWYTINLDLPPYKRWHELMLDKAPVLKVIVNSLKNMINTFVPSGKIMQVVDEKLPGLLGNFPGPFEEEMKGIAAVTDIPLVAEDKKGHLIHGRNMDFGVFLGWNINNDTWVITEQLKPLTVNLDFQRNNKTVFKASSFAGYVGMLTGFKPGLFSLTLNERFSINGGYLGILEWILGKKDVMWIGFLTRTVLENSTSYEEAKNLLTKTKILAPAYFILGGNQSGEGCVITRDRKESLDVYELDAKQGRWYVVQTNYDRWKHPFFLDDRRTPAKMCLNRTSQENISFETMYDVLSTKPVLNKLTVYTTLIDVTKGQFETYLRDCPDPCIGW

SEQ ID NO: 1191 - protein, 246 aa, Homo Sapiens
MPGRSCVALVLLAAAVSCAVAQHAPPWTEDCRKSTYPPSGPTYRGAVPWYTINLDLPPYKRWHELMLDKAPVLKVIVNSLKNMINTFVPSGKIMQVVDEKLPGLLGNFPGPFEEEMKGIAAVTDIPLVNLDFQRNNKTVFKASSFAGYVGMLTGFKPGLFSLTLNERFSINGGYLGILEWILGKKDVMWIGFLTRTVLENSTSYEEAKNLLTKTKILAPAYFILGGNQSGEGCVITRDRKESLDVY

SEQ ID NO: 1192 - protein, 366 aa, Homo Sapiens
MPGRSCVALVLLAAAVSCAVAQHAPPWTEDCRKSTYPPSGPTYRGAVPWYTINLDLPPYKRWHELMLDKAPVPGLLGNFPGPFEEEMKGIAAVTDIPLGEIISFNIFYELFTICTSIVAEDKKGHLIHGRNMDFGVFLGWNINNDTWVITEQLKPLTVNLDFQRNNKTVFKASSFAGYVGMLTGFKPGLFSLTLNERFSINGGYLGILEWILGKKDVMWIGFLTRTVLENSTSYEEAKNLLTKTKILAPAYFILGGNQSGEGCVITRDRKESLDVYELDAKQGRWYVVQTNYDRWKHPFFLDDRRTPAKMCLNRTSQENISFETMYDVLSTKPVLNKLTVYTTLIDVTKGQFETYLRDCPDPCIGW

SEQ ID NO: 1193 - protein, 393 aa, Homo Sapiens
MPGRSCVALVLLAAAVSCAVAQHAPPWTEDCRKSTYPPSGPTYRGAVPWYTINLDLPPYKRWHELMLDKAPVVIVNSLKNMINTFVPSGKIMQVVDEKLPGLLGNFPGPFEEEMKGIAAVTDIPLGEIISFNIFYELFTICTSIVAEDKKGHLIHGRNMDFGVFLGWNINNDTWVITEQLKPLTVNLDFQRNNKTVFKASSFAGYVGMLTGFKPGLFSLTLNERFSINGGYLGILEWILGKKDVMWIGFLTRTVLENSTSYEEAKNLLTKTKILAPAYFILGGNQSGEGCVITRDRKESLDVYELDAKQGRWYVVQTNYDRWKHPFFLDDRRTPAKMCLNRTSQENISFETMYDVLSTKPVLNKLTVYTTLIDVTKGQFETYLRDCPDPCIGW

SEQ ID NO: 1194 - protein, 368 aa, Homo Sapiens
  misc_feature (1)..(1): Xaa can be any naturally occurring amino acid
XLAAAVSCAVAQHAPPVSELEPRRREGRAVDRGLQKINLSSFRTNLKVIVNSLKNMINTFVPSGKIMQVVDEKLPGLLGNFPGPFEEEMKGIAAVTDIPLGEIISFNIFYELFTICTSIVAEDKKGHLIHGRNMDFGVFLGWNINNDTWVITEQLKPLTVNLDFQRNNKTVFKASSFAGYVGMLTGFKPGLFSLTLNERFSINGGYLGILEWILGKKDVMWIGFLTRTVLENSTSYEEAKNLLTKTKILAPAYFILGGNQSGEGCVITRDRKESLDVYELDAKQGRWYVVQTNYDRWKHPFFLDDRRTPAKMCLNRTSQENISFETMYDVLSTKPVLNKLTVYTTLIDVTKGQFETYLRDCPDPCIGW

SEQ ID NO: 1195 - protein, 200 aa, Homo Sapiens
  misc_feature (1)..(1): Xaa can be any naturally occurring amino acid
XNNKTVFKASSFAGYVGMLTGFKPGLFSLTLNERFSINGGYLEWILGKKDVMWIGFLTRTVLENSTSYEEAKNLLTKTKILAPAYFILGGNQSGEGCVITRDRKESLDVYELDAKQGRWYVVQTNYDRWKHPFFLDDRRTPAKMCLNRTSQENISFETMYDVLSTKPVLNKLTVYTTLIDVTKGQFETYLRDCPDPCIGW

SEQ ID NO: 1196 - protein, 51 aa, Homo Sapiens
AQRYEAASTIYGPHTLSAYIQLFRNLAKAIATELHLWKSSLWMQLFMKLQL

SEQ ID NO: 1197 - protein, 144 aa, Homo Sapiens
AQRYEAASTIYGPHTLSAYIQLFRNLAKAIATGEVAEVIFVGANPKNSVQNQTHQTFLTVEKYEATSTSWQIVCNDASWETRFYWHKGLLGLSNATVEWHIPDTAQPGIYRIRYFGHNRKQDILKPAVILSFEGTSPAFEVVTI

SEQ ID NO: 1198 - protein, 780 aa, Homo Sapiens
MAKRTFSNLETFLIFLLVMMSAITVALLSLLFITSGTIENHKDLGGHFFSTTQSPPATQGSTAAQRSTATQHSTATQSSTATQTSPVPLTPESPLFQNFSGYHIGVGRADCTGQVADINLMGYGKSGQNAQGILTRLYSRAFIMAEPDGSNRTVFVSIDIGMVSQRLRLEVLNRLQSKYGSLYRRDNVILSGTHTHSGPAGYFQYTVFVIASEGFSNQTFQHMVTGILKSIDIAHTNMKPGKIFINKGNVDGVQINRSPYSYLQNPQSERARYSSNTDKEMIVLKMVDLNGDDLGLISWFAIHPVSMNNSNHLVNSDNVGYASYLLEQEKNKGYLPGQGPFVAAFASSNLGDVSPNILGPRCINTGESCDNANSTCPIGGPSMCIAKGPGQDMFDSTQIIGRAMYQRAKELYASASQEVTGPLASAHQWVDMTDVTVWLNSTHASKTCKPALGYSFAAGTIDGVGGLNFTQGKTEGDPFWDTIRDQILGKPSEEIKECHKPKPILLHTGELSKPHPWHPDIVDVQIITLGSLAITAIPGEFTTMSGRRLREAVQAEFASHGMQNMTVVISGLCNVYTHYITTYEEYQAQRYEAASTIYGPHTLSAYIQLFRNLAKAIATDTVANLSRGPEPPFFKQLIVPLIPSIVDRAPKGRTFGDVLQPAKPEYRVGEVAEVIFVGANPKNSVQNQTHQTFLTVEKYEATSTSWQIVCNDASWETRFYWHKGLLGLSNATVEWHIPDTAQPGIYRIRYFGHNRKQDILKPAVILSFEGTSPAFEVVTI

SEQ ID NO: 1199 - protein, 745 aa, Homo Sapiens
MAKRTFSNLETFLIFLLVMMSAITVALLSLLFITSGTIENHKDLGGHFFSTTQSPPATQGSTAAQRSTATQHSTATQSSTATQTSPVPLTPESPLFQNFSGYHIGVGRADCTGQVADINLMGYGKSGQNAQGILTRLYSRAFIMAEPDGSNRTVFVSIDIGMVSQRLRLEVLNRLQSKYGSLYRRDNVILSGTHTHSGPAGYFQYTVFVIASEGFSNQTFQHMVTGILKSIDIAHTNMKPGKIFINKGNVDGVQINRSPYSYLQNPQSERARYSSNTDKEMIVLKMVDLNGDDLGLISWFAIHPVSMNNSNHLVNSDNVGYASYLLEQEKNKGYLPGQGPFVAAFASSNLGDVSPNILGPRCINTGESCDNANSTCPIGGPSMCIAKGPGQDMFDSTQIIGRAMYQRAKSKTCKPALGYSFAAGTIDGVGGLNFTQGKTEGDPFWDTIRDQILGKPSEEIKECHKPKPILLHTGELSKPHPWHPDIVDVQIITLGSLAITAIPGEFTTMSGRRLREAVQAEFASHGMQNMTVVISGLCNVYTHYITTYEEYQAQRYEAASTIYGPHTLSAYIQLFRNLAKAIATDTVANLSRGPEPPFFKQLIVPLIPSIVDRAPKGRTFGDVLQPAKPEYRVGEVAEVIFVGANPKNSVQNQTHQTFLTVEKYEATSTSWQIVCNDASWETRFYWHKGLLGLSNATVEWHIPDTAQPGIYRIRYFGHNRKQDILKPAVILSFEGTSPAFEVVTI

SEQ ID NO: 1200 - protein, 622 aa, Homo Sapiens
MDSEKSSEWRSDVLNRLQSKYGSLYRRDNVILSGTHTHSGPAGYFQYTVFVIASEGFSNQTFQHMVTGILKSIDIAHTNMKPGKIFINKGNVDGVQINRSPYSYLQNPQSERARYSSNTDKEMIVLKMVDLNGDDLGLISWFAIHPVSMNNSNHLVNSDNVGYASYLLEQEKNKGYLPGQGPFVAAFASSNLGDVSPNILGPRCINTGESCDNANSTCPIGGPSMCIAKGPGQDMFDSTQIIGRAMYQRAKELYASASQEVTGPLASAHQWVDMTDVTVWLNSTHASKTCKPALGYSFAAGTIDGVGGLNFTQGKTEGDPFWDTIRDQILGKPSEEIKECHKPKPILLHTGELSKPHPWHPDIVDVQIITLGSLAITAIPGEFTTMSGRRLREAVQAEFASHGMQNMTVVISGLCNVYTHYITTYEEYQAQRYEAASTIYGPHTLSAYIQLFRNLAKAIATDTVANLSRGPEPPFFKQLIVPLIPSIVDRAPKGRTFGDVLQPAKPEYRVGEVAEVIFVGANPKNSVQNQTHQTFLTVEKYEATSTSWQIVCNDASWETRFYWHKGLLGLSNATVEWHIPDTAQPGIYRIRYFGHNRKQDILKPAVILSFEGTSPAFEVVTI

SEQ ID NO: 1201 - protein, 726 aa, Homo Sapiens
MSAITVALLSLLFITSGTIENHKDLGGHFFSTTQSPPATQGSTAAQRSTATQHSTATQSSTATQTSPVPLTPESPLFQNFSGYHIGVGRADCTGQVADINLMGYGKSGQNAQGILTRLYSRAFIMAEPDGSNRTVFVSIDIGMVSQRLRLEVLNRLQSKYGSLYRRDNVILSGTHTHSGPAGYFQYTVFVIASEGFSNQTFQHMVTGILKSIDIAHTNMKPGKIFINKGNVDGVQINRSPYSYLQNPQSERARYSSNTDKEMIVLKMVDLNGDDLGLISWFAIHPVSMNNSNHLVNSDNVGYASYLLEQEKNKGYLPGQGPFVAAFASSNLGDVSPNILGPRCINTGESCDNANSTCPIGGPSMCIAKGPGQDMFDSTQIIGRAMYQRAKSKTCKPALGYSFAAGTIDGVGGLNFTQGKTEGDPFWDTIRDQILGKPSEEIKECHKPKPILLHTGELSKPHPWHPDIVDVQIITLGSLAITAIPGEFTTMSGRRLREAVQAEFASHGMQNMTVVISGLCNVYTHYITTYEEYQAQRYEAASTIYGPHTLSAYIQLFRNLAKAIATDTVANLSRGPEPPFFKQLIVPLIPSIVDRAPKGRTFGDVLQPAKPEYRVGEVAEVIFVGANPKNSVQNQTHQTFLTVEKYEATSTSWQIVCNDASWETRFYWHKGLLGLSNATVEWHIPDTAQPGIYRIRYFGHNRKQDILKPAVILSFEGTSPAFEVVTI

SEQ ID NO: 1202 - protein, 236 aa, Homo Sapiens
MESSAKMESGGAGQQPQPQPQQPFLPPAACFFATAAAAAAAAAAAAAQSAQQQQQQQQQQQQAPQLRPAADGQPSGGGHKSAPKQVKRQRSSSPELMRCKRRLNFSGFGYSLPQQQPAAVARRNERERNRVKLVNLGFATLREHVPNGAANKKMSKVETLRSAVEYIRALQQLLDEHDAVSAAFQAGVLSPTISPNYSNDLNSMAGSPVSSYSSDEGSYDPLSPEEQELLDFTNWF

SEQ ID NO: 1203 - protein, 132 aa, Homo Sapiens
MDVTRLLLATLLVFLCFFTANSHLPPEEKLRDDRSLRSNSSVNLLDVPSVSIVALNKKSKQIGRKAAEKKRSSKKEASMKKVVRPRTPLSAPCVATRNSCKPPAPACCDPCASCQCRFFRSACSCRVLSLNC

SEQ ID NO: 1204 - protein, 132 aa, Homo Sapiens; identical to SEQ ID NO: 1203

SEQ ID NO: 1205 - protein, 243 aa, Homo Sapiens
MKEYVLLLFLALCSAKPFFSPSHIALKNMMLKDMEDTDDDDDDDDDDDDDDEDNSLFPTREPRSHFFPFDLFPMCPFGCQCYSRVVHCSDLGLTSVPTNIPFDTRMLDLQNNKIKEIKENDFKGLTSLYGLILNNNKLTKIHPKAFLTTKKLRRLYLSHNQLSEIPLNLPKSLAELRIHENKVKKIQKDTFKGMNALHVLEMSANPLDNNGIEPGAFEGVTVFHIRIAEAKLTSVPKDNLPSF

SEQ ID NO: 1206 - protein, 380 aa, Homo Sapiens
MKEYVLLLFLALCSAKPFFSPSHIALKNMMLKDMEDTDDDDDDDDDDDDDDEDNSLFPTREPRSHFFPFDLFPMCPFGCQCYSRVVHCSDLGLTSVPTNIPFDTRMLDLQNNKIKEIKENDFKGLTSLYGLILNNNKLTKIHPKAFLTTKKLRRLYLSHNQLSEIPLNLPKSLAELRIHENKVKKIQKDTFKGMNALHVLEMSANPLDNNGIEPGAFEGVTVFHIRIAEAKLTSVPKGLPPTLLELHLDYNKISTVELEDFKRYKELQRLGLGNNKITDIENGSLANIPRVREIHLENNKLKKIPSGLPELKYLQIIFLHSNSIARVGVNDFCPTVPKMKKSLYSAISLFNNPVKYWEMQPATFRCVLSRMSVQLGNFGM

SEQ ID NO: 1207 - protein, 431 aa, Homo Sapiens
MEGVGGLWPWVLGLLSLPGVILGAPLASSCAGACGTSFPDGLTPEGTQASGDKDIPAINQGLILEETPESSFLIEGDIIRPSPFRLLSATSNKWPMGGSGVVEVPFLLSSKYDEPSRQVILEALAEFERSTCIRFVTYQDQRDFISIIPMYGCFSSVGRSGGMQVVSLAPTCLQKGRGIVLHELMHVLGFWHEHTRADRDRYIRVNWNEILPGFEINFIKSQSSNMLTPYDYSSVMHYGRLAFSRRGLPTITPLWAPSVHIGQRWNLSASDITRVLKLYGCSPSGPRPRGRGSHAHSTGRSPAPASLSLQRLLEALSAESRSPDPSGSSAGGQPVPAGPGESPHGWESPALKKLSAEASARQPQTLASSPRSRPGAGAPGVAQEQSWLAGVSTKPTVPSSEAGIQPVPVQGSPALPGGCVPRNHFKGMSED

SEQ ID NO: 1208 - protein, 1844 aa, Homo Sapiens
MVGVLAMAAAAAPPPVKDCEIEPCKKRKKDDDTSTCKTITKYLSPLGKTRDRVFAPPKPSNILDYFRKTSPTNEKTQLGKECKIKSPESVPVDSNKDCTTPLEMFSNVEFKKKRKRVNLSHQLNNIKTENEAPIEISSDDSKEDYSLNNDFVESSTSVLRYKKQVEVLAENIQDTKSQPNTMTSLQNSKKVNPKQGTTKNDFKKLRKRKCRDVVDLSESLPLAEELNLLKKDGKDTKQMENTTSHANSRDNVTEAAQLNDSIITVSYEEFLKSHKENKVEEIPDSTMSICVPSETVDEIVKSGYISESENSEISQQVRFKTVTVLAQVHPIPPKKTGKIPRIFLKQKQFEMENSLSDPENEQTVQKRKSNVVIQEEELELAVLEAGSSEAVKPKCTLEERQQFMKAFRQPASDALKNGVKKSSDKQKDLNEKCLYEVGRDDNSKKIMENSGIQMVSKNGNLQLHTDKGSFLKEKNKKLKKKNKKTLDTGAIPGKNREGNTQKKETTFFLKEKQYQNRMSLRQRKTEFFKSSTLFNNESLVYEDIANDDLLKVSSLCNNNKLSRKTSIPVKDIKLTQSKAESEASLLNVSTPKSTRRSGRISSTPTTETIRGIDSDDVQDNSQLKASTQKAANLSEKHSLYTAELITVPFDSESPIRMKFTRISTPKKSKKKSNKRSEKSEATDGGFTSQIRKASNTSKNISKAKQLIEKAKALHISRSKVTEEIAIPLRRSSRHQTLPERKKLSETEDSVIIIDSSPTALKHPEKNQKKLQCLNDVLGKKLNTSTKNVPGKMKVAPLFLVRKAQKAADPVPSFDESSQDTSEKSQDCDVQCKAKRDFLMSGLPDLLKRQIAKKAAALDVYNAVSTSFQRVVHVQQKDDGCCLWHLKPPSCPLLTKFKELNTKVIDLSKCGIALGEFSTLNSKLKSGNSAAVFMRTRKEFTEEVRNLLLEEIRWSNPEFSLKKYFPLLLKKQIEHQVLSSECHSKQELEADVSHKETKRKLVEAENSKSKRKKPNEYSKNLEKTNRKSEELSKRNNSSGIKLDSSKDSGTEDMLWTEKYQPQTASELIGNELAIKKLHSWLKDWKRRAELEERQNLKGKRDEKHEDFSGGIDFKGSSDDEEESRLCNTVLITGPTGVGKTAAVYACAQELGFKIFEVNASSQRSGRQILSQLKEATQSHQVDKQGVNSQKPCFFNSYYIGKSPKKISSPKKVVTSPRKVPPPSPKSSGPKRALPPKTLANYFKVSPKPKNNEEIGMLLENNKGIKNSFEQKQITQTKSTNATNSNVKDVGAEEPSRKNATSLILFEEVDVIFDEDAGFLNAIKTFMATTKRPVILTTSDPTFSLMFDGCFEEIKFSTPSLLNVASYLQMICLTENFRTDVKDFVTLLTANTCDIRKSILYLQFWIRSGGGVLEERPLTLYRGNSRNVQLVCSEHGLDNKIYPKNTKKKRVDLPKCDSGCAETLFGLKNIFSPSEDLFSFLKHKITMKEEWHKFIQLLTEFQMRNVDFLYSNLEFILPLPVDTIPETKNFCGPSVTVDASAATKSMNCLARKHSEREQPLKKSQKKKQKKTLVILDDSDLFDTDLDFPDQSISLSSVSSSSNAEESKTGDEESKARDKGNNPETKKSIPCPPKTTAGKKCSALVSHCLNSLSEFMDNMSFLDALLTDVREQNKYGRNDFSWTNGKVTSGLCDEFSLESNDGWTSQSSGELKAAAEALSFTKCSSAISKALETLNSCKKLGRDPTNDLTFYVSQKRNNVYFSQSAANLDNAWKRISVIKSVFSSRSLLYVGNRQASIIEYLPTLRNICKTEKLKEQGKSKRRFLHYFEGIHLDIPKETVNTLAADFP

SEQ ID NO: 1209 - protein, 1224 aa, Homo Sapiens
MVGVLAMAAAAAPPPVKDCEIEPCKKRKKDDDTSTCKTITKYLSPLGKTRDRVFAPPKPSNILDYFRKTSPTNEKTQLGKECKIKSPESVPVDSNKDCTTPLEMFSNVEFKKKRKRVNLSHQLNNIKTENEAPIEISSDDSKEDYSLNNDFVESSTSVLRYKKQVEVLAENIQDTKSQPNTMTSLQNSKKVNPKQGTTKNDFKKLRKRKCRDVVDLSESLPLAEELNLLKKDGKDTKQMENTTSHANSRDNVTEAAQLNDSIITVSYEEFLKSHKENKVEEIPDSTMSICVPSETVDEIVKSGYISESENSEISQQVRFKTVTVLAQVHPIPPKKTGKIPRIFLKQKQFEMENSLSDPENEQTVQKRKSNVVIQEEELELAVLEAGSSEAVKPKCTLEERQQFMKAFRQPASDALKNGVKKSSDKQKDLNEKCLYEVGRDDNSKKIMENSGIQMVSKNGNLQLHTDKGSFLKEKNKKLKKKNKKTLDTGAIPGKNREGNTQKKETTFFLKEKQYQNRMSLRQRKTEFFKSSTLFNNESLVYEDIANDDLLKVSSLCNNNKLSRKTSIPVKDIKLTQSKAESEASLLNVSTPKSTRRSGRISSTPTTETIRGIDSDDVQDNSQLKASTQKAANLSEKHSLYTAELITVPFDSESPIRMKFTRISTPKKSKKKSNKRSEKSEATDGGFTSQIRKASNTSKNISKAKQLIEKAKALHISRSKVTEEIAIPLRRSSRHQTLPERKKLSETEDSVIIIDSSPTALKHPEKNQKKLQCLNDVLGKKLNTSTKNVPGKMKVAPLFLVRKAQKAADPVPSFDESSQDTSEKSQDCDVQCKAKRDFLMSGLPDLLKRQIAKKAAALDVYNAVSTSFQRVVHVQQKDDGCCLWHLKPPSCPLLTKFKELNTKVIDLSKCGIALGEFSTLNSKLKSGNSAAVFMRTRKEFTEEVRNLLLEEIRWSNPEFSLKKYFPLLLKKQIEHQVLSSECHSKQELEADVSHKETKRKLVEAENSKSKRKKPNEYSKNLEKTNRKSEELSKRNNSSGIKLDSSKDSGTEDMLWTEKYQPQTASELIGNELAIKKLHSWLKDWKRRAELEERQNLKGKRDEKHEDFSGGIDFKGSSDDEEESRLCNTVLITGPTGVGKTAAVYACAQELGFKIFEVNASSQRSGRQILSQLKEATQSHQVDKQGVNSQKPCFFNSYYIGKSPKKISSPKKVVTSPRKVPPPSPK

SEQ ID NO: 1210 - protein, 310 aa, Homo Sapiens
MEFPFDVDALFPERITVLDQHLRPPARRPGTTTPARVDLQQQIMTIIDELGKASAKAQNLSAPITSASRMQSNRHVVYILKDSSARPAGKGAIIGFIKVGYKKLFVLDDREAHNEVEPLCILDFYIHESVQRHGHGRELFQYMLQKERVEPHQLAIDRPSQKLLKFLNKHYNLETTVPQVNNFVIFEGFFAHQHPPARKLPPKRAEGDIKPYSSSDREFLKVAVEPPWPLNRAPRRATPPAHPPPRSSSLGNSPERGPLRPFVPEQELLRSLRLCPPHPTARLLLAADPGGSPAQRRRTSSLPRSEESRY

SEQ ID NO: 1211 - protein, 300 aa, Homo Sapiens
MEFPFDVDALFPERITVLDQHLRPPARRPGTTTPARVDLQQQIMTIIDELGKASAKAQNLSAPITSASRMQSNRHVVYILKDSSARPAGKGAIIGFIKVGYKKLFVLDDREAHNEVEPLCILDFYIHESVQRHGHGRELFQYMLQKERVEPHQLAIDRPSQKLLKFLNKHYNLETTVPQVNNFVIFEGFFAHQHPPARKLPPKRAEGDIKPYSSSDREFLKVAVEPPWPLNRAPRRATPPAHPPPRSSSLGNSPERGPLRPFVPEQELLRSLRLCPPHPTARLLLAADPGGSPAQRRRTR

SEQ ID NO: 1212 - protein, 333 aa, Homo Sapiens
MEFPFDVDALFPERITVLDQHLRPPARRPGTTTPARVDLQQQIMTIIDELGKASAKAQNLSAPITSASRMQSNRHVVYILKDSSARPAGKGAIIGFIKVGYKKLFVLDDREAHNEVEPLCILDFYIHESVQRHGHGRELFQYMLQKERVEPHQLAIDRPSQKLLKFLNKHYNLETTVPQVNNFVIFEGFFAHQHRPPAPSLRATRHSRAAAVDPTPAAPARKLPPKRAEGDIKPYSSSDREFLKVAVEPPWPLNRAPRRATPPAHPPPRSSSLGNSPERGPLRPFVPEQELLRSLRLCPPHPTARLLLAADPGGSPAQRRRTSSLPRSEESRY

SEQ ID NO: 1213 - protein, 421 aa, Homo Sapiens
MEFPFDVDALFPERITVLDQHLRPPARRPGTTTPARVDLQQQIMTIIDELGKASAKAQNLSAPITSASRMQSNRHVVYILKDSSARPAGKGAIIGFIKVGYKKLFVLDDREAHNEVEPLCILDFYIHESVQRHGHGRELFQYMLQKERVEPHQLAIDRPSQKLLKFLNKHYNLETTVPQVNNFVIFEGFFAHQHRPPAPSLRATRHSRAAAVDPTPAAPARKLPPKRAEGDIKPYSSSDREFLKVAVEPPWPLNRAPRRATPPAHPPPRSSSLGNSPERGPLRPFVPEQELLRSLRLCPPHPTARLLLAADPGGSPAQRRRTRGTPPGLVAQSCCYSRHGGVNSSSPNTGNQDSKQGEQETKNRSASEEQALSQDGSGEKPMHTAPPQAPAPPAQSWTVGGDILNARFIRNLQERRSTRPW

SEQ ID NO: 1214 - protein, 323 aa, Homo Sapiens
MEFPFDVDALFPERITVLDQHLRPPARRPGTTTPARVDLQQQIMTIIDELGKASAKAQNLSAPITSASRMQSNRHVVYILKDSSARPAGKGAIIGFIKVGYKKLFVLDDREAHNEVEPLCILDFYIHESVQRHGHGRELFQYMLQKERVEPHQLAIDRPSQKLLKFLNKHYNLETTVPQVNNFVIFEGFFAHQHRPPAPSLRATRHSRAAAVDPTPAAPARKLPPKRAEGDIKPYSSSDREFLKVAVEPPWPLNRAPRRATPPAHPPPRSSSLGNSPERGPLRPFVPEQELLRSLRLCPPHPTARLLLAADPGGSPAQRRRTR

SEQ ID NO: 1215 - protein, 409 aa, Homo Sapiens
MWLTWPFCFLTITLREEGVCHLESVDLQQQIMTIIDELGKASAKAQNLSAPITSASRMQSNRHVVYILKDSSARPAGKGAIIGFIKVGYKKLFVLDDREAHNEVEPLCILDFYIHESVQRHGHGRELFQYMLQKERVEPHQLAIDRPSQKLLKFLNKHYNLETTVPQVNNFVIFEGFFAHQHRPPAPSLRATRHSRAAAVDPTPAAPARKLPPKRAEGDIKPYSSSDREFLKVAVEPPWPLNRAPRRATPPAHPPPRSSSLGNSPERGPLRPFVPEQELLRSLRLCPPHPTARLLLAADPGGSPAQRRRTRGTPPGLVAQSCCYSRHGGVNSSSPNTGNQDSKQGEQETKNRSASEEQALSQDGSGEKPMHTAPPQAPAPPAQSWTVGGDILNARFIRNLQERRSTRPW

SEQ ID NO: 1216 - protein, 331 aa, Homo Sapiens
MAVAMVKLCERAGLPLLAAPLLRSLLPRAPQPGPAQPRSVQGQRCPARHPPGNLVCERGAGVNGVTAGAGGRLRGLHRGGRALGCSAHRPLHSARVRPPAHLAAPPGSSARGCRLTELGYALNEWLQDIRKNQLPGLLGGVGPMHSVVQLFQGFRDLLWLPIEQYRKDGRLMRGLQRGAASFGSSTASAALELSNRLVQAIQATAETVYDILSPAAPVSRSLQDKRSARRLRRGQQPADLREGVAKAYDTVREGILDTAQTICDVASRGHEQKGLTGAVGGVIRQLPPTVVKPLILATEATSSLLGGMRNQIVPDAHKDHALKWRSDSAQD

SEQ ID NO: 1217 - protein, 1938 aa, Homo Sapiens
MSRWLWPWSNCVKERVCRYLLHHYLGHFFQEHLSLDQLSLDLYKGSVALRDIHLEIWSVNEVLESMESPLELVEGFVGSIEVAVPWAALLTDHCTVRVSGLQLTLQPRRGPAPGAADSQSWASCMTTSLQLAQECLRDGLPEPSEPPQPLEGLEMFAQTIETVLRRIKVTFLDTVVRVEHSPGDGERGVAVEVRVQRLEYCDEAVRDPSQAPPVDVHQPPAFLHKLLQLAGVRLHYEELPAQEEPPEPPLQIGSCSGYMELMVKLKQNEAFPGPKLEVAGQLGSLHLLLTPRQLQQLQELLSAVSLTDHEGLADKLNKSRPLGAEDLWLIEQDLNQQLQAGAVAEPLSPDPLTNPLLNLDNTDLFFSMAGLTSSVASALSELSLSDVDLASSVRSDMASRRLSAQAHPAGKMAPNPLLDTMRPDSLLKMTLGGVTLTLLQTSAPSSGPPDLATHFFTEFDATKDGPFGSRDFHHLRPRFQRACPCSHVRLTGTAVQLSWELRTGSRGRRTTSMEVHFGQLEVLECLWPRGTSEPEYTEILTFPGTLGSQASARPCAHLRHTQILRRVPKSRPRRSVACHCHSELALDLANFQADVELGALDRLAALLRLATVPAEPPAGLLTEPLPAMEQQTVFRLSAPRATLRLRFPIADLRPEPDPWAGQAVRAEQLRLELSEPQFRSELSSGPGPPVPTHLELTCSDLHGIYEDGGKPPVPCLRVSKALDPKSTGRKYFLPQVVVTVNPQSSSTQWEVAPEKGEELELSVESPCELREPEPSPFSSKRTMYETEEMVIPGDPEEMRTFQSRTLALSRCSLEVILPSVHIFLPSKEVYESIYNRINNDLLMWEPADLLPTPDPAAQPSGFPGPSGFWHDSFKMCKSAFKLANCFDLTPDSDSDDEDAHFFSVGASGGPQAAAPEAPSLHLQSTFSTLVTVLKGRITALCETKDEGGKRLEAVHGELVLDMEHGTLFSVSQYCGQPGLGYFCLEAEKATLYHRAAVDDYPLPSHLDLPSFAPPAQLAPTIYPSEEGVTERGASGRKGQGRGPHMLSTAVRIHLDPHKNVKEFLVTLRLHKATLRHYMALPEQSWHSQLLEFLDVLDDPVLGYLPPTVITILHTHLFSCSVDYRPLYLPVRVLITAETFTLSSNIIMDTSTFLLRFILDDSALYLSDKCEVETLDLRRDYVCVLDVDLLELVIKTWKGSTEGKLSQPLFELRCSNNVVHVHSCADSCALLVNLLQYVMSTGDLHPPPRPPSPTEIAGQKLSESPASLPSCPPVETALINQRDLADALLDTERSLRELAQPSGGHLPQASPISVYLFPGERSGAPPPSPPVGGPAGSLGSCSEEKEDEREEEGDGDTLDSDEFCILDAPGLGIPPRDGEPVVTQLHPGPIVVRDGYFSRPIGSTDLLRAPAHFPVPSTRVVLREVSLVWHLYGGRDFGPHPGHRARTGLSGPRSSPSRCSGPNRPQNSWRTQGGSGRQHHVLMEIQLSKVSFQHEVYPAEPATGPAAPSQELEERPLSRQVFIVQELEVRDRLASSQINKFLYLHTSERMPRRAHSNMLTIKALHVAPTTNLGGPECCLRVSLMPLRLNVDQDALFFLKDFFTSLVAGINPVVPGETSAEARPETRAQPSSPLEGQAEGVETTGSQEAPGGGHSPSPPDQQPIYFREFRFTSEVPIWLDYHGKHVTMDQVGTFAGLLIGLAQLNCSELKLKRLCCRHGLLGVDKVLGYALNEWLQDIRKNQLPGLLGGVGPMHSVVQLFQGFRDLLWLPIEQYRKDGRLMRGLQRGAASFGSSTASAALELSNRLVQAIQATAETVYDILSPAAPVSRSLQDKRSARRLRRGQQPADLREGVAKAYDTVREGILDTAQTICDVASRGHEQKGLTGAVGGVIRQLPPTVVKPLILATEATSSLLGGMRNQIVPDAHKDHALKWRSDSAQD

SEQ ID NO: 1218 - protein, 1742 aa, Homo Sapiens
  misc_feature (1)..(1): Xaa can be any naturally occurring amino acid
XYCDEAVRDPSQAPPVDVHQPPAFLHKLLQLAGVRLHYEELPAQEEPPEPPLQIGSCSGYMELMVKLKQNEAFPGPKLEVAGQLGSLHLLLTPRQLQQLQELLSAVSLTDHEGLADKLNKSRPLGAEDLWLIEQDLNQQLQAGAVAEPLSPDPLTNPLLNLDNTDLFFSMAGLTSSVASALSELSLSDVDLASSVRSDMASRRLSAQAHPAGKMAPNPLLDTMRPDSLLKMTLGGVTLTLLQTSAPSSGPPDLATHFFTEFDATKDGPFGSRDFHHLRPRFQRACPCSHVRLTGTAVQLSWELRTGSRGRRTTSMEVHFGQLEVLECLWPRGTSEPEYTEILTFPGTLGSQASARPCAHLRHTQILRRVPKSRPRRSVACHCHSELALDLANFQADVELGALDRLAALLRLATVPAEPPAGLLTEPLPAMEQQTVFRLSAPRATLRLRFPIADLRPEPDPWAGQAVRAEQLRLELSEPQFRSELSSGPGPPVPTHLELTCSDLHGIYEDGGKPPVPCLRVSKALDPKSTGRKYFLPQVVVTVNPQSSSTQWEVAPEKGEELELSVESPCELREPEPSPFSSKRTMYETEEMVIPGDPEEMRTFQSRTLALSRCSLEVILPSVHIFLPSKEVYESIYNRINNDLLMWEPADLLPTPDPAAQPSGFPGPSGFWHDSFKMCKSAFKLANCFDLTPDSDSDDEDAHFFSVGASGGPQAAAPEAPSLHLQSTFSTLVTVLKGRITALCETKDEGGKRLEAVHGELVLDMEHGTLFSVSQYCGQPGLGYFCLEAEKATLYHRAAVDDYPLPSHLDLPSFAPPAQLAPTIYPSEEGVTERGASGRKGQGRGPHMLSTAVRIHLDPHKNVKEFLVTLRLHKATLRHYMALPEQSWHSQLLEFLDVLDDPVLGYLPPTVITILHTHLFSCSVDYRPLYLPVRVLITAETFTLSSNIIMDTSTFLLRFILDDSALYLSDKCEVETLDLRRDYVCVLDVDLLELVIKTWKGSTEGKLSQPLFELRCSNNVVHVHSCADSCALLVNLLQYVMSTGDLHPPPRPPSPTEIAGQKVQLSESPASLPSCPPVETALINQRDLADALLDTERSLRELAQPSGGHLPQASPISVYLFPGERSGAPPPSPPVGGPAGSLGSCSEEKEDEREEEGDGDTLDSDEFCILDAPGLGIPPRDGEPVVTQLHPGPIVVRDGYFSRPIGSTDLLRAPAHFPVPSTRVVLREVSLVWHLYGGRDFGPHPGHRARTGLSGPRSSPSRCSGPNRPQNSWRTQGGSGRQHHVLMEIQLSKVSFQHEVYPAEPATGPAAPSQELEERPLSRQVFIVQELEVRDRLASSQINKFLYLHTSERMPRRAHSNMLTIKALHVAPTTNLGGPECCLRVSLMPLRLNVDQDALFFLKDFFTSLVAGINPVVPGETSAEARPETRAQPSSPLEGQAEGVETTGSQEAPGGGHSPSPPDQQPIYFREFRFTSEVPIWLDYHGKHVTMDQVGTFAGLLIGLAQLNCSELKLKRLCCRHGLLGVDKVLGYALNEWLQDIRKNQLPGLLGGVGPMHSVVQLFQGFRDLLWLPIEQYRKDGRLMRGLQRGAASFGSSTASAALELSNRLVQAIQATAETVYDILSPAAPVSRSLQDKRSARRLRRGQQPADLREGVAKAYDTVREGILDTAQTICDVASRGHEQKGLTGAVGGVIRQLPPTVVKPLILATEATSSLLGGMRNQIVPDAHKDHALKWRSDSAQD

SEQ ID NO: 1219 - protein, 153 aa, Homo Sapiens
MHYPIGLLFDLLASSSALPWNITVHFKSFPEKDLLHCPSKDAIEAHFMSCMKEADALKHKSQVINEMQKKDHKQLWMGLQNDRFDQFWAINRKLMEYPAEENGFRYIPFRIYQTTTERPFIQKLFRPVAADGQLHTLGDLLKEVCPSAIDPED

SEQ ID NO: 1220 - protein, 197 aa, Homo Sapiens
MHYPIGLLFDLLASSSALPWNITVHFKSFPEKDLLHCPSKDAIEAHFMSCMKEADALKHKSQVINEMQKKDHKQLWMGLQNDRFDQFWAINRKLMEYPAEENGFRYIPFRIYQTTTERPFIQKLFRPVAADGQLHTLGDLLKEVCPSAIDPEDGEKKNQVMIHGIEPMLETPLQWLSEHLSYPDNFLHISIIPQPTD

SEQ ID NO: 1221 - protein, 159 aa, Homo Sapiens
MHYPIGLLFDLLASSSALPWNITVHFKSFPEKDLLHCPSKDAIEAHFMSCMKEADALKHKSQVINEMQKKDHKQLWMGLQNDRFDQFWAINRKLMEYPAEENGFRYIPFRIYQTTTERPFIQKLFRPVAADGQLHTLGDLLKEVCPSAIDPEEIPPGED

SEQ ID NO: 1222 - protein, 44 aa, Homo Sapiens
MTDDKDVLRDVWFGRIPTCFTLYQDEITEREAEPYYALSNWFAI

SEQ ID NO: 1223 - protein, 162 aa, Homo Sapiens
MTDDKDVLRDVWFGRIPTCFTLYQDEITEREAEPYYLLLPRVSYLTLVTDKVKKHFQKVMRQEDISEIWFEYEGTPLKWHYPIGLLFDLLASSSALPWNITVHFKSFPEKDLLHCPSKDAIEAHFMSCMKEADALKHKSQVINEMQKKDHKQLWMGLQNDND

SEQ ID NO: 1224 - protein, 275 aa, Homo Sapiens
MTDDKDVLRDVWFGRIPTCFTLYQDEITEREAEPYYLLLPRVSYLTLVTDKVKKHFQKVMRQEDISEIWFEYEGTPLKWHYPIGLLFDLLASSSALPWNITVHFKSFPEKDLLHCPSKDAIEAHFMSCMKEADALKHKSQVINEMQKKDHKQLWMGLQNDRFDQFWAINRKLMEYPAEENGFRYIPFRIYQTTTERPFIQKLFRPVAADGQLHTLGDLLKEVCPSAIDPEDGEKKNQVMIHGIEPMLETPLQWLSEHLSYPDNFLHISIIPQPTD

SEQ ID NO: 1225 - protein, 275 aa, Homo Sapiens; identical to SEQ ID NO: 1224

SEQ ID NO: 1226 - protein, 233 aa, Homo Sapiens
MTDDKDVLRDVWFGRIPTCFTLYQDEITEREAEPYYLLLPRVSYLTLVTDKVKKHFQKVMRQEDISEIWFEYEGTPLKWHYPIGLLFDLLASSSALPWNITVHFKSFPEKDLLHCPSKDAIEAHFMSCMKEADALKHKSQVINEMQKKDHKQLWMGLQNDRFDQFWAINRKLMEYPAEENGFRYIPFRIYQVTAVWVGIQRFQASEEESEDEEFLATLTGGERSGKARKQWTQ

SEQ ID NO: 1227 - protein, 91 aa, Homo Sapiens
MTDDKDVLRDVWFGRIPTCFTLYQDEITEREAEPYYTDLTSFGPSIGNSWNILQKKMDFVISPLEYIRQRLKDLSFRSCFVLWLQMDSCTH

SEQ ID NO: 1228 - protein, 823 aa, Homo Sapiens
MAASEAAAAAGSAALAAGARAVPAATTGAAAAASGPWVPPGPRLRGSRPRPAGATQQPAVPAPPAGELIQPSVSELSRAVRTNILCTVRGCGKILPNSPALNMHLVKSHRLQDGIVNPTIRKDLKTGPKFYCCPIEGCPRGPERPFSQFSLVKQHFMKMHAEKKHKCSKCSNSYGTEWDLKRHAEDCGKTFRCTCGCPYASRTALQSHIYRTGHEIPAEHRDPPSKKRKMENCAQNQKLSNKTIESLNNQPIPRPDTQELEASEIKLEPSFEDSCGSNTDKQTLTTPPRYPQKLLLPKPKVALVKLPVMQFSVMPVFVPTADSSAQPVVLGVDQGSATGAVHLMPLSVGTLILGLDSEACSLKESLPLFKIANPIAGEPISTGVQVNFGKSPSNPLQELGNTCQKNSISSINVQTDLSYASQNFIPSAQWATADSSVSSCSQTDLSFDSQVSLPISVHTQTFLPSSKVTSSIAAQTDAFMDTCFQSGGVSRETQTSGIESPTDDHVQMDQAGMCGDIFESVHSSYNVATGNIISNSLVAETVTHSLLPQNEPKTLNQDIEKSAPIINFSAQNSMLPSQNMTDNQTQTIDLLSDLENILSSNLPAQTLDHRSLLSDTNPGPDTQLPSGPAQNPGIDFDIEEFFSASNIQTQTEESELSTMTTEPVLESLDIETQTDFLLADTSAQSYGCRGNSNFLGLEMFDTQTQTDLNFFLDSSPHLPLGSILKHSSFSVSTDSSDTETQTEGVSTAKNIPALESKVQLNSTETQTMSSGFETLGSLFFTSNETQTAMDDFLLADLAWNTMESQFSSVETQTSAEPHTVSNF

SEQ ID NO: 1229 - protein, 55 aa, Homo Sapiens
MKMHAEKKHKCSKCSNSYGTEWDLKRHAEDCGKTFRCTCGCPYASRTALQSHIYR

SEQ ID NO: 1230 - protein, 667 aa, Homo Sapiens
MKMHAEKKHKCSKCSNSYGTEWDLKRHAEDCGKTFRCTCGCPYASRTALQSHIYRTGHEIPAEHRDPPSKKRKMENCAQNQKLSNKTIESLNNQPIPRPDTQELEASEIKLEPSFEDSCGSNTDKQTLTTPPRYPQKLLLPKPKVALVKLPVMQFSVMPVFVPTADSSAQPVVLGVDQGSATGAVHLMPLSVGTLILGLDSEACSLKESLPLFKIANPIAGEPISTGVQVNFGKSPSNPLQELGNTCQKNSISSINVQTDLSYASQNFIPSAQWATADSSVSSCSQTDLSFDSQVSLPISVHTQTFLPSSKVTSSIAAQTDAFMDTCFQSGGVSRETQTSGIESPTDDHVQMDQAGMCGDIFESVHSSYNVATGNIISNSLVAETVTHSLLPQNEPKTLNQDIEKSAPIINFSAQNSMLPSQNMTDNQTQTIDLLSDLENILSSNLPAQTLDHRSLLSDTNPGPDTQLPSGPAQNPGIDFDIEEFFSASNIQTQTEESELSTMTTEPVLESLDIETQTDFLLADTSAQSYGCRGNSNFLGLEMFDTQTQTDLNFFLDSSPHLPLGSILKHSSFSVSTDSSDTETQTEGVSTAKNIPALESKVQLNSTETQTMSSGFETLGSLFFTSNETQTAMDDFLLADLAWNTMESQFSSVETQTSAEPHTVSNF

SEQ ID NO: 1231 - protein, 667 aa, Homo Sapiens; identical to SEQ ID NO: 1230

SEQ ID NO: 1232 - protein, 1204 aa, Homo Sapiens
MAAAAAVGNAVPCGARPCGVRPDGQPKPGPQPRALLAAGPALIANGDELVAAVWPYRRLALLRRLTVLPFAGLLYPAWLGAAAAGCWGWGSSWVQIPEAALLVLATICLAHALTVLSGHWSVHAHCALTCTPEYDPSKATFVKVVPTPNNGSTELVALHRNEGEDGLEVLSFEFQKIKYSYDALEKKQFLPVAFPVGNAFSYYQSNRGFQEDSEIRAAEKKFGSNKAEMVVPDFSELFKERATAPFFVFQVFCVGLWCLDEYWYYSVFTLSMLVAFEASLVQQQMRNMSEIRKMGNKPHMIQVYRSRKWRPIASDEIVPGDIVSIGRSPQENLVPCDVLLLRGRCIVDEAMLTGESVPQMKEPIEDLSPDRVLDLQADSRLHVIFGGTKVVQHIPPQKATTGLKPVDSGCVAYVLRTGFNTSQGKLLRTILFGVKRVTANNLETFIFILFLLVFAIAAAAYVWIEGTKDPSRNRYKLFLECTLILTSVVPPELPIELSLAVNTSLIALAKLYMYCTEPFRIPFAGKVEVCCFDKTGTLTSDSLVVRGVAGLRDGKEVTPVSSIPVETHRALASCHSLMQLDDGTLVGDPLEKAMLTAVDWTLTKDEKVFPRSIKTQGLKIHQRFHFASALKRMSVLASYEKLGSTDLCYIAAVKGAPETLHSMFSQCPPDYHHIHTEISREGARVLALGYKELGHLTHQQAREVKREALECSLKFVGFIVVSCPLKADSKAVIREIQNASHRVVMITGDNPLTACHVAQELHFIEKAHTLILQPPSEKGRQCEWRSIDGSIVLPLARGSPKALALEYALCLTGDGLAHLQATDPQQLLRLIPHVQVFARVAPKQKEFVITSLKELGYVTLMCGDGTNDVGALKHADVGVALLANAPERVVERRRRPRDSPTLSNSGIRATSRTAKQRSGLPPSEEQPTSQRDRLSQVLRDLEDESTPIVKLGDASIAAPFTSKLSSIQCICHVIKQGRCTLVTTLQMFKILALNALILAYSQSVLYLEGVKFSDFQATLQGLLLAGCFLFISRSKPLKTLSRERPLPNIFNLYTILTVMLQFFVHFLSLVYLYREAQARSPEKQEQFVDLYKEFEPSLVNSTVYIMAMAMQMATFAINYKGPPFMESLPENKPLVWSLAVSLLAIIGLLLGSSPDFNSQFGLVDIPVEFKLVIAQVLLLDFCLALLADRVLQFFLGTPKLKVPS

SEQ ID NO: 1233 - protein, 1086 aa, Homo Sapiens
MEKWEELNSHQPGEEYDPSKATFVKVVPTPNNGSTELVALHRNEGEDGLEVLSFEFQKIKYSYDALEKKQFLPVAFPVGNAFSYYQSNRGFQEDSEIRAAEKKFGSNKAEMVVPDFSELFKERATAPFFVFQVFCVGLWCLDEYWYYSVFTLSMLVAFEASLVQQQMRNMSEIRKMGNKPHMIQVYRSRKWRPIASDEIVPGDIVSIGRSPQENLVPCDVLLLRGRCIVDEAMLTGESVPQMKEPIEDLSPDRVLDLQADSRLHVIFGGTKVVQHIPPQKATTGLKPVDSGCVAYVLRTGFNTSQGKLLRTILFGVKRVTANNLETFIFILFLLVFAIAAAAYVWIEGTKDPSRNRYKLFLECTLILTSVVPPELPIELSLAVNTSLIALAKLYMYCTEPFRIPFAGKVEVCCFDKTGTLTSDSLVVRGVAGLRDGKEVTPVSSIPVETHRALASCHSLMQLDDGTLVGDPLEKAMLTAVDWTLTKDEKVFPRSIKTQGLKIHQRFHFASALKRMSVLASYEKLGSTDLCYIAAVKGAPETLHSMFSQCPPDYHHIHTEISREGARVLALGYKELGHLTHQQAREVKREALECSLKFVGFIVVSCPLKADSKAVIREIQNASHRVVMITGDNPLTACHVAQELHFIEKAHTLILQPPSEKGRQCEWRSIDGSIVLPLARGSPKALALEYALCLTGDGLAHLQATDPQQLLRLIPHVQVFARVAPKQKEFVITSLKELGYVTLMCGDGTNDVGALKHADVGVALLANAPERVVERRRRPRDSPTLSNSGIRATSRTAKQRSGLPPSEEQPTSQRDRLSQVLRDLEDESTPIVKLGDASIAAPFTSKLSSIQCICHVIKQGRCTLVTTLQMFKILALNALILAYSQSVLYLEGVKFSDFQATLQGLLLAGCFLFISRSKPLKTLSRERPLPNIFNLYTILTVMLQFFVHFLSLVYLYREAQARSPEKQEQFVDLYKEFEPSLVNSTVYIMAMAMQMATFAINYKGPPFMESLPENKPLVWSLAVSLLAIIGLLLGSSPDFNSQFGLVDIPVEFKLVIAQVLLLDFCLALLADRVLQFFLGTPKLKVPS

SEQ ID NO: 1234 - protein, 185 aa, Homo Sapiens
  misc_feature (1)..(1): Xaa can be any naturally occurring amino acid
XASPWVPAAAFLSVTIATWATHLPGLDSQGHPLHFGAGLIMTPLLTCCACLEYDPSKATFVKVVPTPNNGSTELVALHRNEGEDGLEVLSFEFQKIKYSYDALEKKQFLPVAFPVGNAFSYYQSNRGFQEDSEIRAAEKKFGSNKAEMVVPDFSELFKERATAPFFVFQVFCVGLWCLDEYWYYS

SEQ ID NO: 1235 - protein, 256 aa, Homo Sapiens
MLSRVVLSAAATAAPSLKNAAFLGPGVLQATRTFHTGQPHLVPVPPLPEYGGKVRYGLIPEEFFQFLYPKTGVTGPYVLGTGLILYALSKEIYVISAETFTALSVLGVMVYGIKKYGPFVADFADKLNEQKLAQLEEAKQASIQHIQNAIDTEKSQQALVQKRHYLFDVQRNNIAMALEVTYRERLYRVYKEVKNRLDYHISVQNMMRRKEQEHMINWVEKHVVQSISTQQEKETIAKCIADLKLLAKKAQAQPVM

SEQ ID NO: 1236 - protein, 195 aa, Homo Sapiens
MLSRVVLSAAATAGPYVLGTGLILYALSKEIYVISAETFTALSVLGVMVYGIKKYGPFVADFADKLNEQKLAQLEEAKQASIQHIQNAIDTEKSQQALVQKRHYLFDVQRNNIAMALEVTYRERLYRVYKEVKNRLDYHISVQNMMRRKEQEHMINWVEKHVVQSISTQQEKETIAKCIADLKLLAKKAQAQPVM

SEQ ID NO: 1237 - protein, 128 aa, Homo Sapiens
AQALWRMPWLPVFLSLAAAAAAAAAEQQVPLVLWSSDRDLWAPAADTHEGHITSDLQLSTYLDPALELGPRNVLLFLQDKLSIEDFTAYGGVFGNKQDSAFSNLEHTQVRRCPIHSGPHSGPPFQGGP

SEQ ID NO: 1238 - protein, 281 aa, Homo Sapiens
MAPREVLTGNDEVIGQVLSTLKSEDVPYTAALTAVRPSRVARDVAVVAGGLGRQLLQKQPVSPVIHPPVSYNDTAPRILFWAQNFSVAYKDQWEDLTPLTFGVQELNLTGSFWNDSFARLSLTYERLFGTTVTFKFILANRLYPVSARHWFTMERLEVHSNGSVAYFNASQVTGPSIYSFHCEYVSSLSKKGSLLVARTQPSPWQMMLQDFQIQAFNVMGEQFSYASDCASFFSPGIWMGLLTSLFMLFIFTYGLHMILSLKTMDRFDDHKGPTISLTQIV

SEQ ID NO: 1239 - protein, 273 aa, Homo Sapiens
MMAAMATARVRMGPRCAQALWRMPWLPVFLSLAAAAAAAAAEQQVPLVLWSSDRDLWAPAADTHEGHITSDLQLSTYLDPALELGPRNVLLFLQDKLSIEDFTAYGGVFGNKQDSAFSNLENALDLAPSSLVLPAVDWYAVSTLTTYLQEKLGASPLHVARDVAVVAGGLGRQLLQKQPVSPVIHPPVSYNDTAPRILFWAQNFSVAYKDQWEDLTPLTFGVQELNLTGSFWNDSFARFILANRLYPVSARHWFTMERLEVHSNGSVAYFNAS

SEQ ID NO: 1240 - protein, 230 aa, Homo Sapiens
MMAAMATARVRMGPRCAQALWRMPWLPVFLSLAAAAAAAAAEQQVPLVLWSSDRDLWAPAADTHEGHITSDLQLSTYLDPALELGPRNVLLFLQDKLSIEDFTAYGGVFGNKQDSAFSNLENALDLAPSSLVLPAVDWYAVSTLTTYLQEKLGASPLHVDLATLRELKLNASLPALLLIRLPYTASSGLMAPREVLTDEVIGQVLSTLKSEDVPYTAALTAVRPSRVARD

SEQ ID NO: 1241 - protein, 470 aa, Homo Sapiens
MMAAMATARVRMGPRCAQALWRMPWLPVFLSLAAAAAAAAAEQQVPLVLWSSDRDLWAPAADTHEGHITSDLQLSTYLDPALELGPRNVLLFLQDKLSIEDFTAYGGVFGNKQDSAFSNLENALDLAPSSLVLPAVDWYAVSTLTTYLQEKLGASPLHVDLATLRELKLNASLPALLLIRLPYTASSGLMAPREVLTGNDEVIGQVLSTLKSEDVPYTAALTAVRPSRVARDVAVVAGGLGRQLLQKQPVSPVIHPPVSYNDTAPRILFWAQNFSVAYKDQWEDLTPLTFGVQELNLTGSFWNDSFARLSLTYERLFGTTVTFKFILANRLYPVSARHWFTMERLEVHSNGSVAYFNASQVTGPSIYSFHCEYVSSLSKKGSLLVARTQPSPWQMMLQDFQIQAFNVMGEQFSYASDCASFFSPGIWMGLLTSLFMLFIFTYGLHMILSLKTMDRFDDHKGPTISLTQIV

SEQ ID NO: 1242 - protein, 134 aa, Homo Sapiens
MMAAMATARVRMGPRCAQALWRMPWLPVFLSLAAAAAAAAAEQQVPLVLWSSDRDLWAPAADTHEGHITSDLQLSTYLDPALELGPRNVLLFLQDKVRPPQPTLPRSSGGSQAPSPHDTDAHSPREASVTLSQL

SEQ ID NO: 1243 - protein, 134 aa, Homo Sapiens; identical to SEQ ID NO: 1242

SEQ ID NO: 1244 - protein, 133 aa, Homo Sapiens
  misc_feature (1)..(1): Xaa can be any naturally occurring amino acid
XAAMATARVRMGPRCAQALWRMPWLPVFLSLAAAAAAAAAEQQVPLVLWSSDRDLWAPAADTHEGHITSDLQLSTYLDPALELGPRNVLLFLQDKVRPPQPTLPRSSGGSQAPSPHDTDAHSPREASVTLSQL

SEQ ID NO: 1245 - protein, 186 aa, Homo Sapiens
FHRPRATVMVMVKGVNKLALPPGSVISYPLENLSRHKHLAKDHSPDLYSLELAGLDEIGKRYGEDSEQFRDASKILVDALQKFADDMYSLYGGNAVVELVTVKSFDTSLIRKTRTILEAKQAKNPASPYNLAYKYNFEYSVVFNMVLWIMIALALAVIITSYNIWNMDPGYDSIIYRMTNQKIRMD

SEQ ID NO: 1246 - protein, 186 aa, Homo Sapiens
MAVFVVLLALVAGVLGNEFSILKSPGSVVFRNGNWPIPGERIPDVAALSMGFSVKEDLSWPGLAVGNLFHRPRATVMVMVKGVNKLALPPGSVISYPLENAVPFSLDSVANSIHSLFSEETPVVLQLAPSEERVYMVGKANSVFEDLSVTLRQLRNRLFQENSVLSSLPLNSLSRNNENALFFWAL

SEQ ID NO: 1247 - protein, 209 aa, Homo Sapiens
MAVFVVLLALVAGVLGNEFSILKSPGSVVFRNGNWPIPGERIPDVAALSMGFSVKEDLSWPGLAVGNLFHRPRATVMVMVKGVNKLALPPGSVISYPLENAVPFSLDSVANSIHSLFSEETPVVLQLAPSEERVYMVGKANSVFEDLSVTLRQLRNRLFQENSVLSSLPLNSLSRNNEVDLLFLSELQVLHDISSLGETTYLPRTQAWA

SEQ ID NO: 1248 - protein, 345 aa, Homo Sapiens
MAVFVVLLALVAGVLGNEFSILKSPGSVVFRNGNWPIPGERIPDVAALSMGFSVKEDLSWPGLAVGNLFHRPRATVMVMVKGVNKLALPPGSVISYPLENAVPFSLDSVANSIHSLFSEETPVVLQLAPSEERVYMVGKANSVFEDLSVTLRQLRNRLFQENSVLSSLPLNSLSRNNEVDLLFLSELQVLHDISSLHLAKDHSPDLYSLELAGLDEIGKRYGEDSEQFRDASKILVDALQKFADDMYSLYGGNAVVELVTVKSFDTSLIRKTRTILEAKQAKNPASPYNLAYKYNFEYSVVFNMVLWIMIALALAVIITSYNIWNMDPGYDSIIYRMTNQKIRMD

SEQ ID NO: 1249 - protein, 331 aa, Homo Sapiens
MAVFVVLLALVAGVLGNEFSILKSPGSVVFRNGNWPIPGERIPDVAALSMGFSVKEDLSWPGLAVGNLFHRPRATVMVMVKGVNKLALPPGSVISYPLENAVPFSLDSVANSIHSLFSEETPVVLQLAPSEERVYMVGKANSVFEDLSVTLRQLRNRLFQENSVLSSLPLNSLSRNNEVDLLFLSELQVLHDISSLLAGLDEIGKRYGEDSEQFRDASKILVDALQKFADDMYSLYGGNAVVELVTVKSFDTSLIRKTRTILEAKQAKNPASPYNLAYKYNFEYSVVFNMVLWIMIALALAVIITSYNIWNMDPGYDSIIYRMTNQKIRMD

SEQ ID NO: 1250 - protein, 349 aa, Homo Sapiens
MAVFVVLLALVAGVLGNEFSILKSPGSVVFRNGNWPIPGERIPDVAALSMGFSVKEDLSWPGLAVGNLFHRPRATVMVMVKGVNKLALPPGSVISYPLENAVPFSLDSVANSIHSLFSEETPVVLQLAPSEERVYMVGKANSVFEDLSVTLRQLRNRLFQENSVLSSLPLNSLSRNNEVDLLFLSELQVLHDISSLLSRHKHLAKDHSPDLYSLELAGLDEIGKRYGEDSEQFRDASKILVDALQKFADDMYSLYGGNAVVELVTVKSFDTSLIRKTRTILEAKQANPASPYNLAYKYNFEYSVVFNMVLWIMIALALAVIITSYNIWNMDPGYDSIIYRMTNQKIRMD

SEQ ID NO: 1251 - protein, 350 aa, Homo Sapiens
MAVFVVLLALVAGVLGNEFSILKSPGSVVFRNGNWPIPGERIPDVAALSMGFSVKEDLSWPGLAVGNLFHRPRATVMVMVKGVNKLALPPGSVISYPLENAVPFSLDSVANSIHSLFSEETPVVLQLAPSEERVYMVGKANSVFEDLSVTLRQLRNRLFQENSVLSSLPLNSLSRNNEVDLLFLSELQVLHDISSLLSRHKHLAKDHSPDLYSLELAGLDEIGKRYGEDSEQFRDASKILVDALQKFADDMYSLYGGNAVVELVTVKSFDTSLIRKTRTILEAKQAKNPASPYNLAYKYNFEYSVVFNMVLWIMIALALAVIITSYNIWNMDPGYDSIIYRMTNQKIRMD

SEQ ID NO: 1252 - protein, 258 aa, Homo Sapiens
MAVFVVLLALVAGVLGNEFSILKSPGSVVFRNGNWPIPGERIPDVAALSMGFSVKEDLSWPGLAVGNLFHRPRATVMVMVKGVNKLALPPGSVISYPLENAVPFSLDSVANSIHSLFSEETPVVLQLAPSEERVYMVGKANSVFEDLSVTLRQLRNRLFQENSVLSSLPLNSLSRNNEVDLLFLSELQVLHDISSLLSRHKHLAKDHSPDLYSLELAGLDEIGKRYGEDSEQFRDASKILVDALQKMTCTVFMVGMQW

SEQ ID NO: 1253 - protein, 262 aa, Homo Sapiens
MAVFVVLLALVAGVLGNEFSILKSPGSVVFRNGNWPIPGERIPDVAALSMGFSVKEDLSWPGLAVGNLFHRPRATVMVMVKGVNKLALPPGSVISYPLENAVPFSLDSVANSIHSLFSEETPVVLQLAPSEERVYMVGKANSVFEDLSVTLRQLRNRLFQENSVLSSLPLNSLSRNNEVDLLFLSELQVLHDISSLLSRHKHLAKDHSPDLYSLELAGLDEIGKRYGEDSEQFRDASKILVDALQKSLWWECSGRVSHCQVI

SEQ ID NO: 1254 - protein, 143 aa, Homo Sapiens
MAVFVVLLALVAGVLGNEFSILKSPGSVVFRNGNWPIPGERIPDVAALSMGFSVKEDLSWPGLAVGNLFHRPRATVMVMVKGVNKLALPPGSVISYPLENAVPFSLDSVANSIHSLFSEETPVVLQLAPSEESVYGREGKLSV

SEQ ID NO: 1255 - protein, 318 aa, Homo Sapiens
MAVFVVLLALVAGVLGNEFSILKSPGSVVFRNGNWPIPGERIPDVAALSMGFSVKEDLSWPGLAVGNLFHRPRATVMVMVKGVNKLALPPGSVISYPLENRVYMVGKANSVFEDLSVTLRQLRNRLFQENSVLSSLPLNSLSRNNEVDLLFLSELQVLHDISSLLSRHKHLAKDHSPDLYSLELAGLDEIGKRYGEDSEQFRDASKILVDALQKFADDMYSLYGGNAVVELVTVKSFDTSLIRKTRTILEAKQAKNPASPYNLAYKYNFEYSVVFNMVLWIMIALALAVIITSYNIWNMDPGYDSIIYRMTNQKIRMD

SEQ ID NO: 1256 - protein, 317 aa, Homo Sapiens
MAVFVVLLALVAGVLGNEFSILKSPGSVVFRNGNWPIPGERIPDVAALSMGFSVKEDLSWPGLAVGNLFHRPRATVMVMVKGVNKLALPPGSVISYPLENRVYMVGKANSVFEDLSVTLRQLRNRLFQENSVLSSLPLNSLSRNNEVDLLFLSELQVLHDISSLLSRHKHLAKDHSPDLYSLELAGLDEIGKRYGEDSEQFRDASKILVDALQKFADDMYSLYGGNAVVELVTVKSFDTSLIRKTRTILEAKQANPASPYNLAYKYNFEYSVVFNMVLWIMIALALAVIITSYNIWNMDPGYDSIIYRMTNQKIRMD

SEQ ID NO: 1257 - protein, 272 aa, Homo Sapiens
MAVFVVLLALVAGVLGNEFSILKSPGSVVFRNGNWPIPGERIPDVAALSMGFSVKEDLSWPGLAVGNLFHRPRATVMVMVKGVNKLALPPGSVISYPLENVDLLFLSELQVLHDISSLLSRHKHLAKDHSPDLYSLELAGLDEIGKRYGEDSEQFRDASKILVDALQKFADDMYSLYGGNAVVELVTVKSFDTSLIRKTRTILEAKQAKNPASPYNLAYKYNFEYSVVFNMVLWIMIALALAVIITSYNIWNMDPGYDSIIYRMTNQKIRMD

SEQ ID NO: 1258 - protein, 128 aa, Homo Sapiens
MGFSVKEDLSWPGLAVGNLFHRPRATVMVMVKGVNKLALPPGSVISYPLENAVPFSLDSVANSIHSLFSEETPVVLQLAPSEERVYMVGKANSVFEDLSVTLRQLRNRLFQENSVLSSLPLNSLSRNN

SEQ ID NO: 1259 - protein, 301 aa, Homo Sapiens
MGFSVKEDLSWPGLAVGNLFHRPRATVMVMVKGVNKLALPPGSVISYPLENAVPFSLDSVANSIHSLFSEETPVVLQLAPSEERVYMVGKANSVFEDLSVTLRQLRNRLFQENSVLSSLPLNSLSRNNEVDLLFLSELQVLHDISSLLSRHKHLAKDHSPDLYSLELAGLDEIGKRYGEDSEQFRDASKILVDALQKFADDMYSLYGGNAVVELVTVKSFDTSLIRKTRTILEAKQAKNPASPYNLAYKYNFEYSVVFNMVLWIMIALALAVIITSYNIWNMDPGYDSIIYRMTNQKIRMD

SEQ ID NO: 1260 - protein, 274 aa, Homo Sapiens
MVMVKGVNKLALPPGSVISYPLENAVPFSLDSVANSIHSLFSEETPVVLQLAPSEERVYMVGKANSVFEDLSVTLRQLRNRLFQENSVLSSLPLNSLSRNNEVDLLFLSELQVLHDISSLLSRHKHLAKDHSPDLYSLELAGLDEIGKRYGEDSEQFRDASKILVDALQKFADDMYSLYGGNAVVELVTVKSFDTSLIRKTRTILEAKQAKNPASPYNLAYKYNFEYSVVFNMVLWIMIALALAVIITSYNIWNMDPGYDSIIYRMTNQKIRMD

SEQ ID NO: 1261 - protein, 273 aa, Homo Sapiens
MVMVKGVNKLALPPGSVISYPLENAVPFSLDSVANSIHSLFSEETPVVLQLAPSEERVYMVGKANSVFEDLSVTLRQLRNRLFQENSVLSSLPLNSLSRNNEVDLLFLSELQVLHDISSLLSRHKHLAKDHSPDLYSLELAGLDEIGKRYGEDSEQFRDASKILVDALQKFADDMYSLYGGNAVVELVTVKSFDTSLIRKTRTILEAKQANPASPYNLAYKYNFEYSVVFNMVLWIMIALALAVIITSYNIWNMDPGYDSIIYRMTNQKIRMD

SEQ ID NO: 1262 - protein, 59 aa, Homo Sapiens
MVMVKGVNKLALPPGSVISYPLENFLLVLTVLQIPFTPYFLRKLLLFCSWLPVRKECIW

SEQ ID NO: 1263 - protein, 101 aa, Homo Sapiens
MVMVKGVNKLALPPGSVISYPLENRVYMVGKANSVFEDLSVTLRQLRNRLFQENSVLSSLPLNSLSRNNEVDLLFLSELQVLHDISSLGETTYLPRTQAWA

SEQ ID NO: 1264 - protein, 242 aa, Homo Sapiens
MVMVKGVNKLALPPGSVISYPLENRVYMVGKANSVFEDLSVTLRQLRNRLFQENSVLSSLPLNSLSRNNEVDLLFLSELQVLHDISSLLSRHKHLAKDHSPDLYSLELAGLDEIGKRYGEDSEQFRDASKILVDALQKFADDMYSLYGGNAVVELVTVKSFDTSLIRKTRTILEAKQAKNPASPYNLAYKYNFEYSVVFNMVLWIMIALALAVIITSYNIWNMDPGYDSIIYRMTNQKIRMD

SEQ ID NO: 1265 - protein, 196 aa, Homo Sapiens
MVMVKGVNKLALPPGSVISYPLENVDLLFLSELQVLHDISSLLSRHKHLAKDHSPDLYSLELAGLDEIGKRYGEDSEQFRDASKILVDALQKFADDMYSLYGGNAVVELVTVKSFDTSLIRKTRTILEAKQAKNPASPYNLAYKYNFEYSVVFNMVLWIMIALALAVIITSYNIWNMDPGYDSIIYRMTNQKIRMD

SEQ ID NO: 1266 - protein, 294 aa, Homo Sapiens
  misc_feature (1)..(1): Xaa can be any naturally occurring amino acid
XEFSILKSPGSVVFRNGNWPIPGERIPDVAALSMGFSVKEDLSWPGLAVGNLFHRPRATVMVMVKGVNKLALPPGSVISYPLENAVPFSLDSVANSIHSLFSEETPVVLQLAPSEERVYMVGKANSVFEDLSVTLRQLRNRLFQENSVLSSLPLNSLSRNNEVDLLFLSELQVLHDISSLLSRHKHLAKDHSPDLYSLELAGLDEIGKRYGEDSEQFRDASKILVDALQKKNPASPYNLAYKYNFEYSVVFNMVLWIMIALALAVIITSYNIWNMDPGYDSIIYRMTNQKIRMD

SEQ ID NO: 1267 - protein, 76 aa, Homo Sapiens
  misc_feature (1)..(1): Xaa can be any naturally occurring amino acid
XSLYGGNAVVELVTVKSFDTSLIRKTRTILEAKQAEKEHVYQKKKKERNKEVFMGVKSFNVCLSSELPAEEPSKSL

SEQ ID NO: 1268 - protein, 113 aa, Homo Sapiens
FLCALPRREGYEFFVGQWTGTELHFTALINIQTRGEAAASQLILYHYPELKEEKGIVLMTAEMDSTFLNVAEAQCIANQVQLFYATDRKETYGWAQLLAIHSTLIHLHQRVRK

SEQ ID NO: 1269 - protein, 174 aa, Homo Sapiens
LIRSDPAAFESRLEKRSEFRKQPVGHSRQGDFIKCVEQKTDALGKQSVNRGFTKDKTLSSIFNIEMVKEKTAEEIKQIWQQYFAAKDTVYAVIPAEKFDLIWNRAQSCPTNVAEAQCIANQVQLFYATDRKETYGLVETFNLRPNEFKYMSVIAELEQSGLGAELKCAQNQNKT

SEQ ID NO: 1270 - protein, 328 aa, Homo Sapiens
MAAVVVAAAGGAGPAVLQVAGLYRGLCAVRSRALGLGLVSPAQLRVFPVRPGSGRPEGGADSSGVGAEAELQANPFYDRYRDKIQLLRRSDPAAFESRLEKRSEFRKQPVGHSRQGDFIKCVEQKTDALGKQSVNRGFTKDKTLSSIFNIEMVKEKTAEEIKQIWQQYFAAKDTVYAVIPAEKFDLIWNRAQSCPTFLCALPRREGYEFFVGQWTGTELHFTALINIQTRGEAAASQLILYHYPELKEEKGIVLMTAEMDSTFLNVAEAQCIANQVQLFYATDRKETYGLVETFNLRPNEFKYMSVIAELEQSGLGAELKCAQNQNKT

SEQ ID NO: 1271 - protein, 351 aa, Homo Sapiens
MERARGPRAEADAPEEEEEAGAAMAAVVVAAAGGAGPAVLQVAGLYRGLCAVRSRALGLGLVSPAQLRVFPVRPGSGRPEGGADSSGVGAEAELQANPFYDRYRDKIQLLRRSDPAAFESRLEKRSEFRKQPVGHSRQGDFIKCVEQKTDALGKQSVNRGFTKDKTLSSIFNIEMVKEKTAEEIKQIWQQYFAAKDTVYAVIPAEKFDLIWNRAQSCPTFLCALPRREGYEFFVGQWTGTELHFTALINIQTRGEAAASQLILYHYPELKEEKGIVLMTAEMDSTFLNVAEAQCIANQVQLFYATDRKETYGLVETFNLRPNEFKYMSVIAELEQSGLGAELKCAQNQNKT

SEQ ID NO: 1272 - protein, 351 aa, Homo Sapiens; identical to SEQ ID NO: 1271

SEQ ID NO: 1273 - protein, 283 aa, Homo Sapiens
MERARGPRAEADAPEEEEEAGAAMAAVVVAAAGGAGPAVLQVAGLYRGLCAVRSRALGLGLVSPAQLRVFPVRPGSGRPEGGADSSGVGAEAELQANPFYDRYRDKIQLLRRSDPAAFESRLEKRSEFRKQPVGHSRQGDFIKCVEQKTDALGKQSVNRGFTKDKTLSSIFNIEMVKEKTAEEIKQIWQQYFAAKDTVYAVIPAEKFDLIWNRAQSCPTNVAEAQCIANQVQLFYATDRKETYGLVETFNLRPNEFKYMSVIAELEQSGLGAELKCAQNQNKT

SEQ ID NO: 1274 - protein, 45 aa, Homo Sapiens
MSDPAAFESRLEKRSEFRKQPVGHSRQGDFIKCVEQKDGAQNKLV

SEQ ID NO: 1275 - protein, 240 aa, Homo Sapiens
MSDPAAFESRLEKRSEFRKQPVGHSRQGDFIKCVEQKTDALGKQSVNRGFTKDKTLSSIFNIEMVKEKTAEEIKQIWQQYFAAKDTVYAVIPAEKFDLIWNRAQSCPTFLCALPRREGYEFFVGQWTGTELHFTALINIQTRGEAAASQLILYHYPELKEEKGIVLMTAEMDSTFLNVAEAQCIANQVQLFYATDRKETYGLVETFNLRPNEFKYMSVIAELEQSGLGAELKCAQNQNKT

SEQ ID NO: 1276 - protein, 177 aa, Homo Sapiens
MVKEKTAEEIKQIWQQYFAAKDTVYAVIPAEKFDLIWNRAQSCPTFLCALPRREGYEFFVGQWTGTELHFTALINIQTRGEAAASQLILYHYPELKEEKGIVLMTAEMDSTFLNVAEAQCIANQVQLFYATDRKETYGLVETFNLRPNEFKYMSVIAELEQSGLGAELKCAQNQNKT

SEQ ID NO: 1277 - protein, 183 aa, Homo Sapiens
  misc_feature (1)..(1): Xaa can be any naturally occurring amino acid
XGKQSVNRGFTKDKTLSSIFNIEMVKEKTAEEIKQAEKFDLIWNRAQSCPTFLCALPRREGYEFFVGQWTGTELHFTALINIQTRGEAAASQLILYHYPELKEEKGIVLMTAEMDSTFLNVAEAQCIANQVQLFYATDRKETYGLVETFNLRPNEFKYMSVIAELEQSGLGAELKCAQNQNKT

SEQ ID NO: 1278 - protein, 86 aa, Homo Sapiens
  misc_feature (1)..(1): Xaa can be any naturally occurring amino acid
XVRPGSGRPEGGADSSGVGAEAELQANPFYDRYRDKIQLLRRSDPAAFESRLEKRSEFRKQPVGHSRQGDFIKCVEQKDGAQNKLV

SEQ ID NO: 1279 - protein, 310 aa, Homo Sapiens
MAAAVAAAPGALGSLHAGGARLVAACSAWLCPGLRLPGSLAGRRAGPAIWAQGWVPAAGGPAPKRGYSSEMKTEDELRVRHLEEENRGIVVLGINRAYGKNSLSKNLIKMLSKAVDALKSDKKVRTIIIRSEVPGIFCAANLPVPTIAAIDGLALGGGLELALACDIRVAASSAKMGLVETKLAIIPGGGGTQRLPRAIGMSLAKELIFSARVLDGKEAKAVGLISHVLEQNQEGDAAYRKALDLAREFLPQGPVAMRVAKLAINQGMEVDLVTGLAIEEACYAQTIPTKDRLEGLLAFKEKRPPRYKGE

SEQ ID NO: 1280 - protein, 339 aa, Homo Sapiens
MAAAVAAAPGALGSLHAGGARLVAACSAWLCPGLRLPGSLAGRRAGPAIWAQGWVPAAGGPAPKRGYSSEMKTEDELRVRHLEEENRGIVVLGINRAYGKNSLSKNLIKMLSKAVDALKSDKKVRTIIIRSEVPGIFCAGADLKERAKMSSSEVGPFVSKIRAVINDIANLPVPTIAAIDGLALGGGLELALACDIRVAASSAKMGLVETKLAIIPGGGGTQRLPRAIGMSLAKELIFSARVLDGKEAKAVGLISHVLEQNQEGDAAYRKALDLAREFLPQGPVAMRVAKLAINQGMEVDLVTGLAIEEACYAQTIPTKDRLEGLLAFKEKRPPRYKGE

SEQ ID NO: 1281 - protein, 164 aa, Homo Sapiens
MPDTMLPACFLGLLAFSSACYFQNCPRGGKRAMSDLELRQCLPCGPGGKGRCFGPSICCADELGCFVGTAEALRCQEENYLPSPCQSGQKACGSGGRCAAFGVCCNDESCVTEPECREGFHRRARASDRSNATQLDGPAGALLLRLVQLAGAPEPFEPAQPDAY

SEQ ID NO: 1282 - protein, 151 aa, Homo Sapiens
MSSAMLVTCLPDPSSSFREDAPRPPVPGEEGETPPCQPGVGKGQVTKPMPVSSNTRRNEDGLGEPEGRASPDSPLTRWTKSLHSLLGDQDGAYLFRTFLEREKCVDTLDFWFACNGFRQMNLKDTKTLRVAKAIYKRYIENNSIVSKQLKP

SEQ ID NO: 1283 - protein, 192 aa, Homo Sapiens
MSSAMLVTCLPDPSSSFREDAPRPPVPGEEGETPPCQPGVGKGQVTKPMPVSSNTRRNEDGLGEPEGRASPDSPLTRWTKSLHSLLGDQDGAYLFRTFLEREKCVDTLDFWFACNGFRQMNLKDTKTLRVAKAIYKRYIENNSIVSKQLKPATKTYIRDGIKKQQIDSIMFDQAQTEIQSVMEENAYQMFLT

SEQ ID NO: 1284 - protein, 192 aa, Homo Sapiens; identical to SEQ ID NO: 1283

SEQ ID NO: 1285 - protein, 843 aa, Homo Sapiens
MSSAMLVTCLPDPSSSFREDAPRPPVPGEEGETPPCQPGVGKGQVTKPMPVSSNTRRNEDGLGEPEGRASPDSPLTRWTKSLHSLLGDQDGAYLFRTFLEREKCVDTLDFWFACNGFRQMNLKDTKTLRVAKAIYKRYIENNSIVSKQLKPATKTYIRDGIKKQQIDSIMFDQAQTEIQSVMEENAYQMFLTSDIYLEYVRSGGENTAYMSNGGLGSLKVVCGYLPTLNEEEEWTCADFKCKLSPTVVGLSSKTLRATASVRSTETVDSGYRSFKRSDPVNPYHIGSGYVFAPATSANDSEISSDALTDDSMSMTDSSVDGIPPYRVGSKKQLQREMHRSVKANGQVSLPHFPRTHRLPKEMTPVEPATFAAELISRLEKLKLELESRHSLEERLQQIREDEEREGSELTLNSREGAPTQHPLSLLPSGSYEEDPQTILDDHLSRVLKTPGCQSPGVGRYSPRSRSPDHHHHHHSQYHSLLPPGGKLPPAAASPGACPLLGGKGFVTKQTTKHVHHHYIHHHAVPKTKEEIEAEATQRVHCFCPGGSEYYCYSKCKSHSKAPETMPSEQFGGSRGSTLPKRNGKGTEPGLALPAREGGAPGGAGALQLPREEGDRSQDVWQWMLESERQSKPKPHSAQSTKKAYPLESARSSPGERASRHHLWGGNSGHPRTTPRAHLFTQDPAMPPLTPPNTLAQLEEACRRLAEVSKPPKQRCCVASQQRDRNHSATVQTGATPFSNPSLAPEDHKEPKKLAGVHALQASELVVTYFFCGEEIPYRRMLKAQSLTLGHFKEQLSKKGNYRYYFKKASDEFACGAVFEEIWEDETVLPMYEGRILGKVERID

SEQ ID NO: 1286 - protein, 778 aa, Homo Sapiens
MSSAMLVTCLPDPSSSFREDAPRPPVPGEEGETPPCQPGVGKGQVTKPMPVSSNTRRNEDGLGEPEGRASPDSPLTRWTKSLHSLLGDQDGAYLFRTFLEREKCVDTLDFWFACNGFRQMNLKDTKTLRVAKAIYKRYIENNSIVSKQLKPATKTYIRDGIKKQQIDSIMFDQAQTEIQSVMEENAYQMFLTSDIYLEYVRSGGENTAYMSNGGLGSLKVVCGYLPTLNEEEEWTCADFKCKLSPTVVGLSSKTLRATASVRSTETVDSGYRSFKRSDPVNPYHIGSGYVFAPATSANDSEISSDALTDDSMSMTDSSVDGIPPYRVGSKKQLQREMHRSVKANGQVSLPHFPRTHRLPKEMTPVEPATFAAELISRLEKLKLELESRHSLEERLQQIREDEEREGSELTLNSREGAPTQHPLSLLPSGSYEEDPQTILDDHLSRVLKTPGCQSPGVGRYSPRSRSPDHHHHHHSQYHSLLPPGGKLPPAAASPGACPLLGGKGFVTKQTTKHVHHHYIHHHAVPKTKEEIEAEATQRVHCFCPGGSEYYCYSKCKSHSKAPETMPSEQFGAQSTKKAYPLESARSSPGERASRHHLWGGNSGHPRTTPRAHLFTQDPAMPPLTPPNTLAQLEEACRRLAEVSKPPKQRCCVASQQRDRNHSATVQTGATPFSNPSLAPEDHKEPKKLAGVHALQASELVVTYFFCGEEIPYRRMLKAQSLTLGHFKEQLSKKGNYRYYFKKASDEFACGAVFEEIWEDETVLPMYEGRILGKVERID

SEQ ID NO: 1287 - protein, 271 aa, Homo Sapiens
MSSAMLVTCLPDPSSSFREDAPRPPVPGEEGETPPCQPGVGKGQVTKPMPVSSNTRRNEDGLGEPEGRASPDSPLTRWTKSLHSLLGDQDGAYLFRTFLEREKCVDTLDFWFACNGFRQMNLKDTKTLRVAKAIYKRYIENNSIVSKQLKPATKTYIRDGIKKQQIDSIMFDQAQTEIQSVMEENAYQMFLTSDIYLEYVRSGGENTAYMSNGGLGSLKVVCGYLPTLNEEEEWTCADFKCKLSPTVVGLSSKTLRATASVRSTETVDSGY

SEQ ID NO: 1288 - protein, 778 aa, Homo Sapiens; identical to SEQ ID NO: 1286

SEQ ID NO: 1289 - protein, 160 aa, Homo Sapiens
MSSAMLVTCLPDPSSSFREDAPRPPVPGEEGETPPCQPGVGKGQVTKPMPVSSNTRRNEDGLGEPEGRASPDSPLTRWTKSLHSLLGDQDGAYLFRTFLEREKCVDTLDFWFACNGFRQMNLKDTKTLRVAKDFCHDILFYLYCKLCIIKSSFKENYLVQ

SEQ ID NO: 1290 - protein, 227 aa, Homo Sapiens
MVPVLLSLLLLLGPAVPQENQDGRYSLTYIYTGLSKHVEDVPAFQALGSLNDLQFFRYNSKDRKSQPMGLWRQVEGMEDWKQDSQLQKAREDIFMETLKDIVEYYNDSNGSHVLQGRFGCEIENNRSSGAFWKYYYDGKDYIEFNKEIPAWVPFDPAAQITKQKWEAEPVYVQRAKAYLEEECPATLRKYLKYSKNILDRQGTHCFLLPSTEPRIKDDLRLGAQATS

SEQ ID NO: 1291 - protein, 298 aa, Homo Sapiens
MVRMVPVLLSLLLLLGPAVPQENQDGRYSLTYIYTGLSKHVEDVPAFQALGSLNDLQFFRYNSKDRKSQPMGLWRQVEGMEDWKQDSQLQKAREDIFMETLKDIVEYYNDSNGSHVLQGRFGCEIENNRSSGAFWKYYYDGKDYIEFNKEIPAWVPFDPAAQITKQKWEAEPVYVQRAKAYLEEECPATLRKYLKYSKNILDRQDPPSVVVTSHQAPGEKKKLKCLAYDFYPGKIDVHWTRAGEVQEPELRGDVLHNGNGTYQSWVVVAVPPQDTAPYSCHVQHSSLAQPLVVPWEAS

SEQ ID NO: 1292 - protein, 85 aa, Homo Sapiens
  misc_feature (1)..(1): Xaa can be any naturally occurring amino acid
XTYIYTGLSKHVEDVPAFQALGSLNDLQFFRYNSKDRKSQPMGLWRQQKYPGPARSSLCGGHQPPGPRRKEETEVPGLRLLPREN

SEQ ID NO: 1293 - protein, 150 aa, Homo Sapiens
MTAASCFQSQNPGVSTVVLGAYDLRRRERQSRQTFSISSMSENGYDPQQNLNDLMLLQLDREANLTSSVTILPLPLQNATVEAGTRCQVAGWGSQRSGGRLSRFPRFVNVTVTPEDQCRPNNVCTGVLTRRGGICNVSAPCGGRRGPERY

SEQ ID NO: 1294 - protein, 251 aa, Homo Sapiens
MTRLTVLALLAGLLASSRAGSSPLLDIVGGRKARPRQFPFLASIQNQGRHFCGGALIHARFVMTAASCFQSQNPGVSTVVLGAYDLRRRERQSRQTFSISSMSENGYDPQQNLNDLMLLQLDREANLTSSVTILPLPLQNATVEAGTRCQVAGWGSQRSGGRLSRFPRFVNVTVTPEDQCRPNNVCTGVLTRRGGICNGDGGTPLVCEGLAHGVASFSLGPCGRGPDFFTRVALFRDWIDGVLNNPGPGPA

SEQ ID NO: 1295 - protein, 71 aa, Homo Sapiens
GFHPSDIEVDLLKNGERIEKVEHSDLSFSKDWSFYLLYYTEFTPTEKDEYACRVNHVTLSQPKIVKWDRDM

SEQ ID NO: 1296 - protein, 51 aa, Homo Sapiens
MSRSVALAVLALLSLSGLEAIQHSGLLTSSSREWKVKFPELLCVWVSSIRH

SEQ ID NO: 1297 - protein, 101 aa, Homo Sapiens
MSRSVALAVLALLSLSGLEAIQRTPKIQVYSRHPADIEVDLLKNGERIEKVEHSDLSFSKDWSFYLLYYTEFTPTEKDEYACRVNHVTLSQPKIVKWDRDM

SEQ ID NO: 1298 - protein, 119 aa, Homo Sapiens
MSRSVALAVLALLSLSGLEAIQRTPKIQVYSRHPAENGKSNFLNCYVSGFHPSDIEVDLLKNGERIEKVEHSDLSFSKDWSFYLLYYTEFTPTEKDEYACRVNHVTLSQPKIVKWDRDM

SEQ ID NO: 1299 - protein, 119 aa, Homo Sapiens; identical to SEQ ID NO: 1298

SEQ ID NO: 1300 - protein, 119 aa, Homo Sapiens; identical to SEQ ID NO: 1298

SEQ ID NO: 1301 - protein, 57 aa, Homo Sapiens
MSRSVALAVLALLSLSGLERELKKWSIQTCLSARTGLSISCTTLNSPPLKKMSMPAV

SEQ ID NO: 1302 - protein, 41 aa, Homo Sapiens
MASALWTVLPSRMSLRSLKWSLLLLSLLSFFVMWYLSLPHY

SEQ ID NO: 1303 - protein, 46 aa, Homo Sapiens
MASALWTVLPSRMSLRSLKWSLLLLSLLSFFVMWYLSLPHYNVIER

SEQ ID NO: 1304 - protein, 54 aa, Homo Sapiens
MASALWTVLPSRMSLRSLKWSLLLLSLLSFFVMWYLSLPHYNVIERVNWMYFYE

SEQ ID NO: 1305 - protein, 91 aa, Homo Sapiens
MASALWTVLPSRMSLRSLKWSLLLLSLLSFFVMWYLSLPHYNVIERVNWMYFYEIHLDVCQLRRVIAAHGFSSKEIITFWQVMLRNTTCHY

SEQ ID NO: 1306 - protein, 58 aa, Homo Sapiens
MASALWTVLPSRMSLRSLKWSLLLLSLLSFFVMWYLSLPHYNVIERVNWMYFYEYEPI

SEQ ID NO: 1307 - protein, 65 aa, Homo Sapiens
MASALWTVLPSRMSLRSLKWSLLLLSLLSFFVMWYLSLPHYNVIERVNWMYFYEYEPIYRQDFHF

SEQ ID NO: 1308 - protein, 111 aa, Homo Sapiens
MASALWTVLPSRMSLRSLKWSLLLLSLLSFFVMWYLSLPHYNVIERVNWMYFYEYEPIYRQDFHFTLREHSNCSHQNPFLVILVTSHPSDVKARQAIRVTWGEKKSWWGYE

SEQ ID NO: 1309 - protein, 331 aa, Homo Sapiens
MASALWTVLPSRMSLRSLKWSLLLLSLLSFFVMWYLSLPHYNVIERVNWMYFYEYEPIYRQDFHFTLREHSNCSHQNPFLVILVTSHPSDVKARQAIRVTWGEKKSWWGYEVLTFFLLGQEAEKEDKMLALSLEDEHLLYGDIIRQDFLDTYNNLTLKTIMAFRWVTEFCPNAKYVMKTDTDVFINTGNLVKYLLNLNHSEKFFTGYPLIDNYSYRGFYQKTHISYQEYPFKVFPPYCSGLGYIMSRDLVPRIYEMMGHVKPIKFEDVYVGICLNLLKVNIHIPEDTNLFFLYRIHLDVCQLRRVIAAHGFSSKEIITFWQVMLRNTTCHY

SEQ ID NO: 1310 - protein, 331 aa, Homo Sapiens; identical to SEQ ID NO: 1309

SEQ ID NO: 1311 - protein, 331 aa, Homo Sapiens; identical to SEQ ID NO: 1309

SEQ ID NO: 1312 - protein, 331 aa, Homo Sapiens; identical to SEQ ID NO: 1309

SEQ ID NO: 1313 - protein, 331 aa, Homo Sapiens; identical to SEQ ID NO: 1309

SEQ ID NO: 1314 - protein, 150 aa, Homo Sapiens
MSFFLFSEFTTDLSVLIKHGIQKTTKNLSFNFIWNSTVFLAPWTRLTCWLFPLAALSRGALRLLTPSVKSCCSVAQAGVQWQDLSSLQSPSLRFKQFSCLSLPSRWDYRTFGSRASELLWMASALWTVLPSRMSLRSLKWSLLLLSLLSF

SEQ ID NO: 1315 - protein, 92 aa, Homo Sapiens
MRNWLVLLCPCVLGAALHLWLRLRSPPPACASGAGPADQLALFPQWKSTHYDVVVGVLSARNNHELRNVIRSTWMRHLLQHPTLSQRFESGN

SEQ ID NO: 1316 - protein, 500 aa, Homo Sapiens
MRNWLVLLCPCVLGAALHLWLRLRSPPPACASGAGPADQLALFPQWKSTHYDVVVGVLSARNNHELRNVIRSTWMRHLLQHPTLSQRVLVKFIIGAHGCEVPVEDREDPYSCKLLNITNPVLNQEIEAFSLSEDTSSGLPEDRVVSVSFRVLYPIVITSLGVFYDANDVGFQRNITVKLYQAEQEEALFIARFSPPSCGVQVNKLWYKPVEQFILPESFEGTIVWESQDLHGLVSRNLHKVTVNDGGGVLRVITAGEGALPHEFLEGVEGVAGGFIYTIQEGDALLHNLHSRPQRLIDHIRNLHEEDALLKEESSIYDDIVFVDVVDTYRNVPAKLLNFYRWTVETTSFNLLLKTDDDCYIDLEAVFNRIVQKNLDGPNFWWGNFRLNWAVDRTGKWQELEYPSPAYPAFACGSGYVISKDIVKWLASNSGRLKTYQGEDVSMGIWMAAIGPKRYQDSLWLCEKTCETGMLSSPQYSPWELTELWKLKERCGDPCRCQAR

SEQ ID NO: 1317 - protein, 326 aa, Homo Sapiens
MRNWLVLLCPCVLGAALHLWLRLRSPPPACASGAGPAGGVSLLLPRLECNGAVSAHPNLHLPGSRDSPASASQVAGITDQLALFPQWKSTHYDVVVGVLSARNNHELRNVIRSTWMRHLLQHPTLSQRVLVKFIIGAHGCEVPVEDREDPYSCKLLNITNPVLNQEIEAFSLSEDTSSGLPEDRVVSVSFRVLYPIVITSLGVFYDANDVGFQRNITVKLYQAEQEEALFIARFSPPSCGVQVNKLWYKPVEQFILPESFEGTIVWESQDLHGLVSRNLHKVTVNDGGGVLRVITAGEGALPHEFLEGVEGVAGGFIYTIQGKFAS

SEQ ID NO: 1318 - protein, 326 aa, Homo Sapiens
MASKVSCLYVLTVVCWASALWYLSITRPTSSYTGSKPFSHLTVARKNFTFGNIRTRPINPHSFEFLINEPNKCEKNIPFLVILISTTHKEFDARQAIRETWGDENNFKGIKIATLFLLGKNADPVLNQMVEQESQIFHDIIVEDFIDSYHNLTLKTLMGMRWVATFCSKAKYVMKTDSDIFVNMDNLIYKLLKPSTKPRRRYFTGYVINGGPIRDVRSKWYMPRDLYPDSNYPPFCSGTGYIFSADVAELIYKTSLHTRLLHLEDVYVGLCLRKLGIHPFQNSGFNHWKMAYSLCRYRRVITVHQISPEEMHRIWNDMSSKKHLRC

SEQ ID NO: 1319 - protein, 378 aa, Homo Sapiens
MQLRLFRRLLLAALLLVIVWTLFGPSGLGEELLSLSLASLLPAPASPGPPLALPRLLIPNQEACSGPGAPPFLLILVCTAPENLNQRNAIRASWGGLREARGLRVQTLFLLGEPNAQHPVWGSQGSDLASESAAQGDILQAAFQDSYRNLTLKTLSGLNWAEKHCPMARYVLKTDDDVYVNVPELVSELVLRGGRWGQWERSTEPQREAEQEGGQVLHSEEVPLLYLGRVHWRVNPSRTPGGRHRVSEEQWPHTWGPFPPYASGTGYVLSASAVQLILKVASRAPLLPLEDVFVGVSARRGGLAPTQCVKLAGATHYPLDRCCYGKFLLTSHRLDPWKMQEAWKLVGGSDGERTAPFCSWFQGVLGILRCRAIAWLQS

SEQ ID NO: 1320 - protein, 310 aa, Homo Sapiens
MAFPKMRLMYICLLVLGALCLYFSMYSLNPFKEQSFVYKKDGNFLKLPDTDCRQTPPFLVLLVTSSHKQLAERMAIRQTWGKERMVKGKQLKTFFLLGTTSSAAETKEVDQESQRHGDIIQKDFLDVYYNLTLKTMMGIEWVHRFCPQAAFVMKTDSDMFINVDYLTELLLKKNRTTRFFTGFLKLNEFPIRQPFSKWFVSKSEYPWDRYPPFCSGTGYVFSGDVASQVYNVSKSVPYIKLEDVFVGLCLERLNIRLEELHSQPTFFPGGLRFSVCLFRRIVACHFIKPRTLLDYWQALENSRGEDCPPV

SEQ ID NO: 1321 - protein, 310 aa, Homo Sapiens; identical to SEQ ID NO: 1320

SEQ ID NO: 1322 - protein, 310 aa, Homo Sapiens; identical to SEQ ID NO: 1320

SEQ ID NO: 1323 - protein, 310 aa, Homo Sapiens; identical to SEQ ID NO: 1320

SEQ ID NO: 1324 - protein, 314 aa, Homo Sapiens
MCLEMAFPKMRLMYICLLVLGALCLYFSMYSLNPFKEQSFVYKKDGNFLKLPDTDCRQTPPFLVLLVTSSHKQLAERMAIRQTWGKERMVKGKQLKTFFLLGTTSSAAETKEVDQESQRHGDIIQKDFLDVYYNLTLKTMMGIEWVHRFCPQAAFVMKTDSDMFINVDYLTELLLKKNRTTRFFTGFLKLNEFPIRQPFSKWFVSKSEYPWDRYPPFCSGTGYVFSGDVASQVYNVSKSVPYIKLEDVFVGLCLERLNIRLEELHSQPTFFPGGLRFSVCLFRRIVACHFIKPRTLLDYWQALENSRGEDCPPV

SEQ ID NO: 1325 - protein, 329 aa, Homo Sapiens
MKLLRRAWRRRAALGLGTLALCGAALLYLARCAAEPGDPRAMSGRSPPPPAPARAAAFLAVLVASAPRAAERRSVIRSTWLARRGAPGDVWARFAVGTAGLGAEERRALEREQARHGDLLLLPALRDAYENLTAKVLAMLAWLDEHVAFEFVLKADDDSFARLDALLAELRAREPARRRRLYWGFFSGRGRVKPGGRWREAAWQLCDYYLPYALGGGYVLSADLVHYLRLSRDYLRAWHSEDVSLGAWLAPVDVQREHDPRFDTEYRSRGCSNQYLVTHKQSLEDMLEKHATLAREGRLCKREVQLRLSYVYDWSAPPSQCCQRREGIP

SEQ ID NO: 1326 - protein, 223 aa, Homo Sapiens
MKLKLKNVFLAYFLVSIAGLLYALVQLAKGMDRTLPLMQRFRDSATALSSGQPCDCLPPLRAAAEQLRQKDLRISQLQAELRRPPPAPAQPPEPEALPTIYVVTPTYARLVQKAELVRLSQTLSLVPRLHWLLVEDAEGPTPLVSGLLAASGLLFTHLVVLTPKAQRLREGEPGWVHPRGVEQRNKALDWLRGRGGAVGGEKDPPPPGTQGVVYFADDDNTYS

SEQ ID NO: 1327 - protein, 335 aa, Homo Sapiens
MKLKLKNVFLAYFLVSIAGLLYALVQLGQPCDCLPPLRAAAEQLRQKDLRISQLQAELRRPPPAPAQPPEPEALPTIYVVTPTYARLVQKAELVRLSQTLSLVPRLHWLLVEDAEGPTPLVSGLLAASGLLFTHLVVLTPKAQRLREGEPGWVHPRGVEQRNKALDWLRGRGGAVGGEKDPPPPGTQGVVYFADDDNTYSRELFEEMRWTRGVSVWPVGLVGGLRFEGPQVQDGRVVGFHTAWEPSRPFPVDMAGFAVALPLLLDKPNAQFDSTAPRGHLESSLLSHLVDPKDLEPRAANCTRVLVWHTRTEKPKMKQEEQLQRQGRGSDPAIEV

SEQ ID NO: 1328 - protein, 319 aa, Homo Sapiens
MKLKLKNVFLAYFLVSIAGLLYALVQLGQPCDCLPPLRAAAEQLRQKDLRISQLQAELRRPPPAPAQPPEPEALPTIYVVTPTYARLVQKAELVRLSQTLSLVPRLHWLLVEDAEGPTPLVSGLLAASGLLFTHLVVLTPKAQRLREGEPGWVHPRGVEQRNKALDWLRGRGGAVGGEKDPPPPGTQGVVYFADDDNTYSRELFEEMRWTRGVSVWPVGLVGGLRFEGPQVQDGRVVGFHTAWEPSRPFPVDMAGFAVALPLLLDKPNAQFDSTAPRGHLESSLLSHLVDPKDLEPRAANCTRSLAVSPRLECSSAILA

SEQ ID NO: 1329 - protein, 315 aa, Homo Sapiens
MKLKLKNVFLAYFLVSIAGLLYALVQLGQPCDCLPPLRAAAEQLRQKDLRISQLQAELRRPPPAPAQPPEPEALPTIYVVTPTYARLVQKAELVRLSQTLSLVPRLHWLLVEDAEGPTPLVSGLLAASGLLFTHLVVLTPKAQRLREGEPGWVHPRGVEQRNKALDWLRGRGGAVGGEKDPPPPGTQGVVYFADDDNTYSRELFEEMRWTRGVSVWPVGLVGGLRFEGPQVQDGRVVGFHTAWEPSRPFPVDMAGFAVALPLLLDKPNAQFDSTAPRGHLESSLLSHLVDPKDLEPRAANCTRTESRCVTQAGVQ

SEQ ID NO: 1330 - protein, 38 aa, Homo Sapiens
MKLKLKNVFLAYFLVSIAGLLYALVQLVSASSTKQKAR

SEQ ID NO: 1331 - protein, 498 aa, Homo Sapiens
MRPPACWWLLAPPALLALLTCSLAFGLASEDTKKEVKQSQDLEKSGISRKNDIDLKGIVFVIQSQSNSFHAKRAEQLKKSILKQAADLTQELPSVLLLHQLAKQEGAWTILPLLPHFSVTYSRNSSWIFFCEEETRIQIPKLLETLRRYDPSKEWFLGKALHDEEATIIHHYAFSENPTVFKYPDFAAGWALSIPLVNKLTKRLKSESLKSDFTIDLKHEIALYIWDKGGGPPLTPVPEFCTNDVDFYCATTFHSFLPLCRKPVKKKDIFVAVKTCKKFHGDRIPIVKQTWESQASLIEYYSDYTENSIPTVDLGIPNTDRGHCGKTFAILERFLNRSQDKTAWLVIVDDDTLISISRLQHLLSCYDSGEPVFLGERYGYGLGTGGYSYITGGGGMVFSREAVRRLLASKCRCYSNDAPDDMVLGMCFSGLGIPVTHSPLFHQARPVDYPKDYLSHQVPISFHKHWNIDPVKVYFTWLAPSDEDKARQETQKGFREEL

SEQ ID NO: 1332 - protein, 127 aa, Homo Sapiens
MKYLRHRRPNATLILAIGAFTLLLFSLLVSPPTCKVQEQPPAIPEALAWPTPPTRPAPAPCHANTSMVTHPDFATQPQHVQNFLLYRHCRHFPLLQDVPPSKCAQPVFLLLVIKSSPSNYVRRELLR

SEQ ID NO: 1333 - protein, 250 aa, Homo Sapiens
MKYLRHRRPNATLILAIGAFTLLLFSLLVSPPTCKVQEQPPAIPEALAWPTPPTRPAPAPCHANTSMVTHPDFATQPQHVQNFLLYRHCRHFPLLQDVPPSKCAQPVFLLLVIKSSPSNYVRRELLRRTWGRERKVRGLQLRLLFLVGTASNPHEARKVNRLLELEAQTHGDILQWDFHDSFFNLTLKQVLFLQWQETRCANASFVLNGDDDVFAHTDNMVFYLQDHDPGRHLFVGQLIQNVGPIRAFWS

SEQ ID NO: 1334 - protein, 372 aa, Homo Sapiens
MKYLRHRRPNATLILAIGAFTLLLFSLLVSPPTCKVQEQPPAIPEALAWPTPPTRPAPAPCHANTSMVTHPDFATQPQHVQNFLLYRHCRHFPLLQDVPPSKCAQPVFLLLVIKSSPSNYVRRELLRRTWGRERKVRGLQLRLLFLVGTASNPHEARKVNRLLELEAQTHGDILQWDFHDSFFNLTLKQVLFLQWQETRCANASFVLNGDDDVFAHTDNMVFYLQDHDPGRHLFVGQLIQNVGPIRAFWSKYYVPEVVTQNERYPPYCGGGGFLLSRFTAAALRRAAHVLDIFPIDDVFLGMCLELEGLKPASHSGIRTSGVRAPSQRLSSFDPCFYRDLLLVHRFLPYEMLLMWDALNQPNLTCGNQTQIY

SEQ ID NO: 1335 - protein, 372 aa, Homo Sapiens; identical to SEQ ID NO: 1334

SEQ ID NO: 1336 - protein, 353 aa, Homo Sapiens
MLCRLCWLVSYSLAVLLLGCLLFLRKAAKPAGDPTAHQPFWAPPTPRHSRCPPNHTVSSASLSLPSRHRLFLTYRHCRNFSILLEPSGCSKDTFLLLAIKSQPGHVERRAAIRSTWGRVGGWARGRQLKLVFLLGVAGSAPPAQLLAYESREFDDILQWDFTEDFFNLTLKELHLQRWVVAACPQAHFMLKGDDDVFVHVPNVLEFLDGWDPAQDLLVGDVIRQALPNRNTKVKYFIPPSMYRATHYPPYAGGGGYVMSRATVRRLQAIMEDAELFPIDDVFVGMCLRRLGLSPMHHAGFKTFGIRRPLDPLDPCLYRGLLLVHRLSPLEMWTMWALVTDEGLKCAAGPIPQR

SEQ ID NO: 1337 - protein, 353 aa, Homo Sapiens; identical to SEQ ID NO: 1336

SEQ ID NO: 1338 - protein, 378 aa, Homo Sapiens
MLPPQPSAAHQGRGGRSGLLPKGPAMLCRLCWLVSYSLAVLLLGCLLFLRKAAKPAGDPTAHQPFWAPPTPRHSRCPPNHTVSSASLSLPSRHRLFLTYRHCRNFSILLEPSGCSKDTFLLLAIKSQPGHVERRAAIRSTWGRVGGWARGRQLKLVFLLGVAGSAPPAQLLAYESREFDDILQWDFTEDFFNLTLKELHLQRWVVAACPQAHFMLKGDDDVFVHVPNVLEFLDGWDPAQDLLVGDVIRQALPNRNTKVKYFIPPSMYRATHYPPYAGGGGYVMSRATVRRLQAIMEDAELFPIDDVFVGMCLRRLGLSPMHHAGFKTFGIRRPLDPLDPCLYRGLLLVHRLSPLEMWTMWALVTDEGLKCAAGPIPQR

SEQ ID NO: 1339 - protein, 55 aa, Homo Sapiens
MLPPQPSAAHQGRGGRSGLLPKGWQDPLPQPSCWPMRVGSLMTSSSGTSLRTSST

SEQ ID NO: 1340 - protein, 121 aa, Homo Sapiens
MAFPCRRSLTAKTLACLLVGVSFLALQQWFLQAPRSPREERSPQEETPEGPTDAPAADEPPSELVPGPPCVANASANATADFEQLPARIQDFLRYRHCRHFPLLWDAPAKCAGGRGVFLLL

SEQ ID NO: 1341 - protein, 384 aa, Homo Sapiens
MAFPCRRSLTAKTLACLLVGVSFLALQQWFLQAPRSPREERSPQEETPEGPTDAPAADEPPSELVPGPPCVANASANATADFEQLPARIQDFLRYRHCRHFPLLWDAPAKCAGGRGVFLLLAVKSAPEHYERRELIRRTWGQERSYGGRPVRRLFLLGTPGPEDEARAERLAELVALEAREHGDVLQWAFADTFLNLTLKHLHLLDWLAARCPHARFLLSGDDDVFVHTANVVRFLQAQPPGRHLFSGQLMEGSVPIRDSWSKYFVPPQLFPGSAYPVYCSGGGFLLSGPTARALRAAARHTPLFPIDDAYMGMCLERAGLAPSGHEGIRPFGVQLPGAQQSSFDPCMYRELLLVHRFAPYEMLLMWKALHSPALSCDRGHRVS

SEQ ID NO: 1342 - protein, 401 aa, Homo Sapiens
MSLWKKTVYRSLCLALALLVAVTVFQRSLTPGQFLQEPPPPTLEPQKAQKPNGQLVNPNNFWKNPKDVAAPTPMASQGPQAWDVTTTNCSANINLTHQPWFQVLEPQFRQFLFYRHCRYFPMLLNHPEKCRGDVYLLVVVKSVITQHDRREAIRQTWGRERQSAGGGRGAVRTLFLLGTASKQEERTHYQQLLAYEDRLYGDILQWGFLDTFFNLTLKEIHFLKWLDIYCPHVPFIFKGDDDVFVNPTNLLEFLADRQPQENLFVGDVLQHARPIRRKDNKYYIPGALYGKASYPPYAGGGGFLMAGSLARRLHHACDTLELYPIDDVFLGMCLEVLGVQPTAHEGFKTFGISRNRNSRMNKEPCFFRAMLVVHKLLPPELLAMWGLVHSNLTCSRKLQVL

SEQ ID NO: 1343 - protein, 397 aa, Homo Sapiens
MRCPKCLLCLSALLTLLGLKVYIEWTSESRLSKAYPSPRGTPPSPTPANPEPTLPANLSTRLGQTIPLPFAYWNQQQWRLGSLPSGDSTETGGCQAWGAAAATEIPDFASYPKDLRRFLLSAACRSFPQWLPGGGGSQVSSCSDTDVPYLLLAVKSEPGRFAERQAVRETWGSPAPGIRLLFLLGSPVGEAGPDLDSLVAWESRRYSDLLLWDFLDVPFNQTLKDLLLLAWLGRHCPTVSFVLRAQDDAFVHTPALLAHLRALPPASARSLYLGEVFTQAMPLRKPGGPFYVPESFFEGGYPAYASGGGYVIAGRLAPWLLRAAARVAPFPFEDVYTGLCIRALGLVPQAHPGFLTAWPADRTADHCAFRNLLLVRPLGPQASIRLWKQLQDPRLQC

SEQ ID NO: 1344 - protein, 402 aa, Homo Sapiens
MRRRLRLRRDALLTLLLGASLGLLLYAQRDGAAPTASAPRGRGRAAPRPTPGPRAFQLPDAGAAPPAYEGDTPAPPTPTGPFDFARYLRAKDQRRFPLLINQPHKCRGDGAPGGRPDLLIAVKSVAEDFERRQAVRQTWGAEGRVQGALVRRVFLLGVPRGAGSGGADEVGEGARTHWRALLRAESLAYADILLWAFDDTFFNLTLKEIHFLAWASAFCPDVRFVFKGDADVFVNVGNLLEFLAPRDPAQDLLAGDVIVHARPIRTRASKYYIPEAVYGLPAYPAYAGGGGFVLSGATLHRLAGACAQVELFPIDDVFLGMCLQRLRLTPEPHPAFRTFGIPQPSAAPHLSTFDPCFYRELVVVHGLSAADIWLMWRLLHGPHGPACAHPQPVAAGPFQWDS

SEQ ID NO: 1345 - protein, 96 aa, Homo Sapiens
MWLGRRALCALVLLLACASLGLLYASTRDAPGLRLPLAPWAPPQSPRRPELPDLAPEPRYAHIPVRIKEQVVGAEGCLCHKRAGVPGLSVEEPVPS

SEQ ID NO: 1346 - protein, 81 aa, Homo Sapiens
MWLGRRALCALVLLLACASLGLLYASTRDAPGLRLPLAPWAPPQSPRRPELPDLAPEPRYAHIPVRIKEQVVGLLAWNNCS

SEQ ID NO: 1347 - protein, 120 aa, Homo Sapiens
MWLGRRALCALVLLLACASLGLLYASTRDAPGLRLPLAPWAPPQSPRRPELPDLAPEPRYAHIPVRIKEQVVGLLAWNNCSCESSGGGLPLPFQKQVRAIDLTKAFDPAELRAASATREQ

SEQ ID NO: 1348 - protein, 231 aa, Homo Sapiens
MWLGRRALCALVLLLACASLGLLYASTRDAPGLRLPLAPWAPPQSPRRPELPDLAPEPRYAHIPVRIKEQVVGLLAWNNCSCESSGGGLPLPFQKQVRAIDLTKAFDPAELRAASATREQEFQAFLSRSQSPADQLLIAPANSPLQYPLQGVEVQPLRSILVPGEPDCLPRHLGRGRGSDWSYSHWRGSGRSHPCQPRAGPTQQATTTGHLQQPKLPDQHSRHSPVLHRGT

SEQ ID NO: 1349 - protein, 237 aa, Homo Sapiens
MWLGRRALCALVLLLACASLGLLYASTRDAPGLRLPLAPWAPPQSPRRPELPDLAPEPRYAHIPVRIKEQVVGLLAWNNCSCESSGGGLPLPFQKQVRAIDLTKAFDPAELRAASATREQEFQAFLSRSQSPADQLLIAPANSPLQYPLQGVEVQPLRSILVPGLSLQAASGQEVYQVNLTASLGTWDVAGEVTGVTLTGEGQADLTLVSPGLDQLNRQLQLVTYSSRSYQTNTADT

SEQ ID NO: 1350 - protein, 304 aa, Homo Sapiens
MWLGRRALCALVLLLACASLGLLYASTRDAPGLRLPLAPWAPPQSPRRPELPDLAPEPRYAHIPVRIKEQVVGLLAWNNCSCESSGGGLPLPFQKQVRAIDLTKAFDPAELRAASATREQEFQAFLSRSQSPADQLLIAPANSPLQYPLQGVEVQPLRSILVPGLSLQAASGQEVYQVNLTASLGTWDVAGEVTGVTLTGEGQADLTLVSPGLDQLNRQLQLVTYSSRSYQTNTADTAQYNISALVTIATKTFLRYDRLRALITSIRRFYPTVTVVIADDSDKPERVSGPYVEHYLMPFGKVCS

SEQ ID NO: 1351 - protein, 328 aa, Homo Sapiens
MWLGRRALCALVLLLACASLGLLYASTRDAPGLRLPLAPWAPPQSPRRPELPDLAPEPRYAHIPVRIKEQVVGLLAWNNCSCESSGGGLPLPFQKQVRAIDLTKAFDPAELRAASATREQEFQAFLSRSQSPADQLLIAPANSPLQYPLQGVEVQPLRSILVPGLSLQAASGQEVYQVNLTASLGTWDVAGEVTGVTLTGEGQADLTLVSPGLDQLNRQLQLVTYSSRSYQTNTADTGARPGWRDGQAGQTEKNQKGWSGQMAEGMGGIWAMARAVQPHNGCFNWTSRARGRKGAFVHLGLEQARGKPEPWVCLPFRPTVGGPRKRLV

SEQ ID NO: 1352 - protein, 328 aa, Homo Sapiens; identical to SEQ ID NO: 1351

SEQ ID NO: 1353 - protein, 533 aa, Homo Sapiens
MWLGRRALCALVLLLACASLGLLYASTRDAPGLRLPLAPWAPPQSPRRPELPDLAPEPRYAHIPVRIKEQVVGLLAWNNCSCESSGGGLPLPFQKQVRAIDLTKAFDPAELRAASATREQEFQAFLSRSQSPADQLLIAPANSPLQYPLQGVEVQPLRSILVPGLSLQAASGQEVYQVNLTASLGTWDVAGEVTGVTLTGEGQADLTLVSPGLDQLNRQLQLVTYSSRSYQTNTADTVRFSTEGHEAAFTIRIRHPPNPRLYPPGSLPQGAQYNISALVTIATKTFLRYDRLRALITSIRRFYPTVTVVIADDSDKPERVSGPYVEHYLMPFGKGWFAGRNLAVSQVTTKYVLWVDDDFVFTARTRLERLVDVLERTPLDLVGGAVREISGFATTYRQLLSVEPGAPGLGNCLRQRRGFHHELVGFPGCVVTDGVVNFFLARTDKVREVGFDPRLSRVAHLEFFLDGLGSLRVGSCSDVVVDHASKLKLPWTSRDAGAETYARYRYPGSLDESQMAKHRLLFFKHRLQCMTSQ

SEQ ID NO: 1354 - protein, 478 aa, Homo Sapiens
MWLGRRALCALVLLLACASLGLLYASTRDAPGLRLPLAPWAPPQSPRRPELPDLAPEPRYAHIPVRIKEQVVGSQSPADQLLIAPANSPLQYPLQGVEVQPLRSILVPGLSLQAASGQEVYQVNLTASLGTWDVAGEVTGVTLTGEGQADLTLVSPGLDQLNRQLQLVTYSSRSYQTNTADTVRFSTEGHEAAFTIRIRHPPNPRLYPPGSLPQGAQYNISALVTIATKTFLRYDRLRALITSIRRFYPTVTVVIADDSDKPERVSGPYVEHYLMPFGKGWFAGRNLAVSQVTTKYVLWVDDDFVFTARTRLERLVDVLERTPLDLVGGAVREISGFATTYRQLLSVEPGAPGLGNCLRQRRGFHHELVGFPGCVVTDGVVNFFLARTDKVREVGFDPRLSRVAHLEFFLDGLGSLRVGSCSDVVVDHASKLKLPWTSRDAGAETYARYRYPGSLDESQMAKHRLLFFKHRLQCMTSQ

SEQ ID NO: 1355 - protein, 151 aa, Homo Sapiens
  misc_feature (1)..(1): Xaa can be any naturally occurring amino acid
XMPFGKGWFAGRNLAVSQVTTKYVLWVDDDFVFTARTRLERLVDVLERTPLDLARLEATSLSLQVGGAVREISGFATTYRQLLSVEPGAPGLGNCLRQRRGFHHELVGFPGCVVTDGVVNFFLARTDKVREVGFDPRLSRVAHLEFFLDGL

SEQ ID NO: 1356 - protein, 127 aa, Homo Sapiens
  misc_feature (1)..(1): Xaa can be any naturally occurring amino acid
XSQSPADQLLIAPANSPLQYPLQGVEVQPLRSILVPGLSLQAASGQEVYQVNLTASLGTWDVAGEVTGVTLTGEGQADLTLVSPGLDQLNRQLQLVTYSSRSYQTNTADTGSNAMSFLPSPVLHRGT

SEQ ID NO: 1357 - protein, 637 aa, Homo Sapiens [sequence omitted]

SEQ ID NO: 1358 - protein, 998 aa, Homo Sapiens [sequence omitted]

SEQ ID NO: 1359 - protein, 53 aa, Homo Sapiens
DASSIVFLCDLHIHFPPNILDGIRKHCVEGRLAFAPVVMRLSCGSSPRDPHGS

SEQ ID NO: 1360 - protein, 26 aa, Homo Sapiens
DVERALRAARLPRDRACDSPSPGTST

SEQ ID NO: 1361 - protein, 1039 aa, Homo Sapiens
MPRLPVKKIRKQMKLLLLLLLLSCAAWLTYVHLGLVRQGRALRQRLGYGRDGEKLTSETDGRGVHAAPSTQRAEDSSESREEEQAPEGRDLDMLFPGGAGRLPLNFTHQTPPWREEYKGQVNLHVFEDWCGGAVGHLRRNLHFPLFPHTRTTVKKLAVSPKWKNYGLRIFGFIHPARDGDVQFSVASDDNSEFWLSLDESPAAAQLVAFVGKTGSEWTAPGEFTKFSSQVSKPRRLMASRRYYFELLHKQDDRGSDHVEVGWRAFLPGLKFEVISSAHISLYTDESALKMDHVAHVPQSPASHVGGRPPQEETSADMLRPDPRDTFFLTPRMESSSLENVLEPCAYAPTYVVKDFPIARYQGLQFVYLSFVYPNDYTRLTHMETDNKCFYRESPLYLERFGFYKYMKMDKEEGDEDEEDEVQRRAFLFLNPDDFLDDEDEGELLDSLEPTEAAPPRSGPQSPAPAAPAQPGATLAPPTPPRPRDGGTPRHSRALSWAARAARPLPLFLGRAPPPRPAVEQPPPKVYVTRVRPGQRASPRAPAPRAPWPPFPGVFLHPRPLPRVQLRAPPRPPRPHGRRTGGPQATQPRPPARAQATQGGREGQARTLGPAAPTVDSNLSSEARPVTSFLSLSQVSGPQLPGEGEEEEEGEDDGAPGDEAASEDSEEAAGPALGRWREDAIDWQRTFSVGAVDFELLRSDWNDLRCNVSGNLQLPEAEAVDVTAQYMERLNARHGGRFALLRIVNVEKRRDSARGSRFLLELELQERGGGRLRLSEYVFLRLPGARVGDADGESPEPAPAASVRPDGRPELCRPLRLAWRQDVMVHFIVPVKNQARWVAQFLADMAALHARTGDSRFSVVLVDFESEDMDVERALRAARLPRYQYLRRTGNFERSAGLQAGVDAVEDASSIVFLCDLHIHFPPNILDGIRKHCVEGRLAFAPVVMRLSCGSSPRDPHGYWEVNGFGLFGIYKSDFDRVGGMNTEEFRDQWGGEDWELLDRVLQAGLEVERLRLRNFYHHYHSKRGMWSVRSRKGSRTGAS

SEQ ID NO: 1362 - protein, 62 aa, Homo Sapiens
MANFHKTLILGKGKTLTNEASTKKVELDNCPSVSPYLRGQSKLIFKPDLTLEEVQEIRLLNV

SEQ ID NO: 1363 - skipped

SEQ ID NO: 1364 - protein, 6 aa, Homo Sapiens
MGFNLT

SEQ ID NO: 1365 - protein, 21 aa, Homo Sapiens
MGFNLTFHLSYKFRLLLLLTL

SEQ ID NO: 1366 - protein, 42 aa, Homo Sapiens
MGFNLTFHLSYKFRLLLLLTLCLTVVGWATSNYFVGAIQEIP

SEQ ID NO: 1367 - protein, 55 aa, Homo Sapiens
MGFNLTFHLSYKFRLLLLLTLCLTVVGWATSNYFVGAIQEIPKAKEFMANFHKTL

SEQ ID NO: 1368 - protein, 118 aa, Homo Sapiens
MGFNLTFHLSYKFRLLLLLTLCLTVVGWATSNYFVGAIQEIPKAKEFMANFHKTLILGKGKTLTNEASTKKVELDNCPSVSPYLRGQSKLIFKPDLTLEEVQAENPKVSRGRYRPQEC

SEQ ID NO: 1369 - protein, 136 aa, Homo Sapiens
MGFNLTFHLSYKFRLLLLLTLCLTVVGWATSNYFVGAIQEIPKAKEFMANFHKTLILGKGKTLTNEASTKKVELDNCPSVSPYLRGQSKLIFKPDLTLEEVQAENPKVSRGRYRPQECKALQRVAILVPHRNREKH

SEQ ID NO: 1370 - protein, 246 aa, Homo Sapiens
MGFNLTFHLSYKFRLLLLLTLCLTVVGWATSNYFVGAIQEIPKAKEFMANFHKTLILGKGKTLTNEASTKKVELDNCPSVSPYLRGQSKLIFKPDLTLEEVQAENPKVSRGRYRPQECKALQRVAILVPHRNREKHLMYLLEHLHPFLQRQQLDYGIYVIHQAEGKKFNRAKLLNVGYLEALKEENWDCFIFHDVDLVPENDFNLYKCEEHPKHLVVGRNSTGYRLRYSGYFGGVTALSREQFFKG

SEQ ID NO: 1371 - protein, 344 aa, Homo Sapiens
MGFNLTFHLSYKFRLLLLLTLCLTVVGWATSNYFVGAIQEIPKAKEFMANFHKTLILGKGKTLTNEASTKKVELDNCPSVSPYLRGQSKLIFKPDLTLEEVQAENPKVSRGRYRPQECKALQRVAILVPHRNREKHLMYLLEHLHPFLQRQQLDYGIYVIHQAEGKKFNRAKLLNVGYLEALKEENWDCFIFHDVDLVPENDFNLYKCEEHPKHLVVGRNSTGYRLRYSGYFGGVTALSREQFFKVNGFSNNYWGWGGEDDDLRLRVELQRMKISRPLPEVGKYTMVFHTRDKGNEVNAERMKLLHQVSRVWRTDGLSSCSYKLVSVEHNPLYINITVDFWFGA

SEQ ID NO: 1372 - protein, 344 aa, Homo Sapiens; identical to SEQ ID NO: 1371

SEQ ID NO: 1373 - protein, 344 aa, Homo Sapiens; identical to SEQ ID NO: 1371

SEQ ID NO: 1374 - protein, 301 aa, Homo Sapiens
MGFNLTFHLSYKFRLLLLLTLCLTVVGWATSNYFVGAIQEIPKAKEFMANFHKTLILGKGKTLTNEASTKKVELDNCPSVSPYLRGQSKLIFKPDLTLEEVQAENPKVSRGRYRPQECKALQRVAILVPHRNREKHLMYLLEHLHPFLQRQQLDYGIYVIHQAEGKKFNRAKLLNVGYLEALKEENWDCFIFHDVDLVPENDFNLYKCEEHPKHLVVGRNSTGYRLRYSGYFGGVTALSREQFFKVNGFSNNYWGWGGEDDDLRLRVELQRMKISRPLPEVGKYTMVFHTRDKGNEVNAER

SEQ ID NO: 1375 - protein, 25 aa, Homo Sapiens
MYLLEHLHPFLQRQQLDYGIYVIHQ

SEQ ID NO: 1376 - protein, 388 aa, Homo Sapiens
MRARRGLLRLPRRSLLAALFFFSLSSSLLYFVYVAPGIVNTYLFMMQAQGILIRDNVRTIGAQVYEQVLRSAYAKRNSSVNDSDYPLDLNHSETFLQTTTFLPEDFTYFANHTCPERLPSMKGPIDINMSEIGMDYIHELFSKDPTIKLGGHWKPSDCMPRWKVAILIPFRNRHEHLPVLFRHLLPMLQRQRLQFAFYVVEQVGTQPFNRAMLFNVGFQEAMKDLDWDCLIFHDVDHIPESDRNYYGCGQMPRHFATKLDKYMYLLPYTEFFGGVSGLTVEQFRKINGFPNAFWGWGGEDDDLWNRVQNAGYSVSRPEGDTGKYKSIPHHHRGEVQFLGRYALLRKSKERQGLDGLNNLNYFANITYDALYKNITVNLTPELAQVNEY

SEQ ID NO: 1377 - protein, 343 aa, Homo Sapiens
MSVLRRMMRVSNRSLLAFIFFFSLSSSCLYFIYVAPGIANTYLFMVQARGIMLRENVKTIGHMIRLYTNKNSTLNGTDYPEGNNSSDYLVQTTTYLPENFTYSPYLPCPEKLPYMRGFLNVNVSEVSFDEIHQLFSKDLDIEPGGHWRPKDCKPRWKTGTQPFNRAMLFNVGFKEAMKDSVWDCVIFHDVDHLPENDRNYYGCGEMPRHFAAKLDKYMYILPYKEFFGGVSGLTVEQFRKINGFPNAFWGWGGEDDDLWNRVHYAGYNVTRPEGDLGKYKSIPHHHRGEVQFLGRYKLLRYSKERQYIDGLNNLIYRPKILVDRLYTNISVNLMPELAPIEDY

SEQ ID NO: 1378 - protein, 382 aa, Homo Sapiens
MSVLRRMMRVSNRSLLAFIFFFSLSSSCLYFIYVAPGIANTYLFMVQARGIMLRENVKTIGHMIRLYTNKNSTLNGTDYPEGNNSSDYLVQTTTYLPENFTYSPYLPCPEKLPYMRGFLNVNVSEVSFDEIHQLFSKDLDIEPGGHWRPKDCKPRWKVAVLIPFRNRHEHLPIFFLHLIPMLQKQRLEFAFYVIEQTGTQPFNRAMLFNVGFKEAMKDSVWDCVIFHDVDHLPENDRNYYGCGEMPRHFAAKLDKYMYILPYKEFFGGVSGLTVEQFRKINGFPNAFWGWGGEDDDLWNRVHYAGYNVTRPEGDLGKYKSIPHHHRGEVQFLGRYKLLRYSKERQYIDGLNNLIYRPKILVDRLYTNISVNLMPELAPIEDY

SEQ ID NO: 1379 - protein, 343 aa, Homo Sapiens
MSVLRRMMRVSNRSLLAFIFFFSLSSSCLYFIYVAPGIDYPEGNNSSDYLVQTTTYLPENFTYSPYLPCPEKLPYMRGFLNVNVSEVSFDEIHQLFSKDLDIEPGGHWRPKDCKPRWKVAVLIPFRNRHEHLPIFFLHLIPMLQKQRLEFAFYVIEQTGTQPFNRAMLFNVGFKEAMKDSVWDCVIFHDVDHLPENDRNYYGCGEMPRHFAAKLDKYMYILPYKEFFGGVSGLTVEQFRKINGFPNAFWGWGGEDDDLWNRVHYAGYNVTRPEGDLGKYKSIPHHHRGEVQFLGRYKLLRYSKERQYIDGLNNLIYRPKILVDRLYTNISVNLMPELAPIEDY

SEQ ID NO: 1380 - protein, 72 aa, Homo Sapiens
MVQARGIMLRENVKTIGHMIRLYTNKNSTLNGTDYPEGNNSSDYLVQTTTYLPENFTYSPYLPCPEKLPYMR

SEQ ID NO: 1381 - protein, 415 aa, Homo Sapiens
MQMSYAIRCAFYQLLLAALMLVAMLQLLYLSLLSGLHGQEEQDQYFEFFPPSPRSVDQVKAQLRTALASGGVLDASGDYRVYRGLLKTTMDPNDVILATHASVDNLLHLSGLLERWEGPLSVSVFAATKEEAQLATVLAYALSSHCPDMRARVAMHLVCPSRYEAAVPDPREPGEFALLRSCQEVFDKLARVAQPGINYALGTNVSYPNNLLRNLAREGANYALVIDVDMVPSEGLWRGLREMLDQSNQWGGTALVVPAFEIRRARRMPMNKNELVQLYQVGEVRPFYYGLCTPCQAPTNYSRWVNLPEESLLRPAYVVPWQDPWEPFYVAGGKVPTFDERFRQYGFNRISQACELHVAGFDFEVLNEGFLVHKGFKEALKFHPQKEAENQHNKILYRQFKQELKAKYPNSPRRC

SEQ ID NO: 1382 - protein, 92 aa, Homo Sapiens
IDVTFKSTNPYGWPQIVLSVYGPDVFGNDVVRGYGAVHVPFSPGRHKRTIPMFVPESTSKLQKFTSWFMGRRPEYTDPKVVAQGEGREAQPG

SEQ ID NO: 1383 - protein, 133 aa, Homo Sapiens
LLMVNGQVESAQFPEYDDLYCKYCFVYGQDWAPTAGLEEGISQITSKSQDVRQALVWNFPIDVTFKSTNPYGWPQIVLSVYGPDVFGNDVVRGYGAVHVPFSPGRHKRTIPMFVPESTSKLQKFTRSASCSTH

SEQ ID NO: 1384 - protein, 135 aa, Homo Sapiens
MATASPSVFLLMVNGQVESAQFPEYDDLYCKYCFVYGQDWAPTAGLEEGISQITSKSQDVRQALVWNFPIDVTFKSTNPYGWPQIVLSVYGPDVFGNDVVRGYGAVHVPFSPGRHKRTIPMFVPESTSKLQKFTR

SEQ ID NO: 1385 - protein, 153 aa, Homo Sapiens
MATASPSVFLLMVNGQVESAQFPEYDDLYCKYCFVYGQDWAPTAGLEEGISQITSKSQDVRQALVWNFPIDVTFKSTNPYGWPQIVLSVYGPDVFGNDVVRGYGAVHVPFSPGRHKRTIPMFVPESTSKLQKFTSLCLVASSDLQAAPPTEDK

SEQ ID NO: 1386 - protein, 186 aa, Homo Sapiens
MATASPSVFLLMVNGQVESAQFPEYDDLYCKYCFVYGQDWAPTAGLEEGISQITSKSQDVRQALVWNFPIDVTFKSTNPYGWPQIVLSVYGPDVFGNDVVRGYGAVHVPFSPGRHKRTIPMFVPESTSKLQKFTSWFMGRRPEYTDPKVVAQGEGREAITAPRKAVFSVHGLTSPRALALVHIKGT

SEQ ID NO: 1387 - protein, 161 aa, Homo Sapiens
MATASPSVFLLMVNGQVESAQFPEYDDLYCKYCFVYGQDWAPTAGLEEGISQITSKSQDVRQALVWNFPIDVTFKSTNPYGWPQIVLSVYGPDVFGNDVVRGYGAVHVPFSPGRHKRTIPMFVPESTSKLQKFTSWFMGRRPEYTDPKVVAQGEGREAQPG

SEQ ID NO: 1388 - protein, 187 aa, Homo Sapiens
MATASPSVFLLMVNGQVESAQFPEYDDLYCKYCFVYGQDWAPTAGLEEGISQITSKSQDVRQALVWNFPIDVTFKSTNPYGWPQIVLSVYGPDVFGNDVVRGYGAVHVPFSPGRHKRTIPMFVPESTSKLQKFTSWFMGRRPEYTDPKVVAQGEGREDENAEAEIPRSTWVSLCPSPAWLMLPFCPQ

SEQ ID NO: 1389 - protein, 183 aa, Homo Sapiens
MATASPSVFLLMVNGQVESAQFPEYDDLYCKYCFVYGQDWAPTAGLEEGISQITSKSQDVRQALVWNFPIDVTFKSTNPYGWPQIVLSVYGPDVFGNDVVRGYGAVHVPFSPGRHKRTIPMFVPESTSKLQKFTSWFMGRRPEYTDPKVVAQGEGREGKAPSPLLPPSPIQVTAWEWVGPGLG

SEQ ID NO: 1390 - protein, 204 aa, Homo Sapiens
MATASPSVFLLMVNGQVESAQFPEYDDLYCKYCFVYGQDWAPTAGLEEGISQITSKSQDVRQALVWNFPIDVTFKSTNPYGWPQIVLSVYGPDVFGNDVVRGYGAVHVPFSPGRHKRTIPMFVPESTSKLQKFTSWFMGRRPEYTDPKVVAQGEGREVTRVRSQGFVTLLFNVVTKDMRKLGYDTGPSDTQGVLGPSPPQSFPQ

SEQ ID NO: 1391 - protein, 125 aa, Homo Sapiens
MATASPSVFLLMVNGQVESAQFPEYDDLYCKYCFVYGQDWAPTAGLEEGISQITSKSQDVRQALVWNFPIDVTFKSTNPYGYRAQRVWTRCVRERCGSRLWGRARALLTWPAQKDHPHVCPRIYV

SEQ ID NO: 1392 - protein, 19 aa, Homo Sapiens
MMTSTASTALCTARTGPPQ

SEQ ID NO: 1393 - protein, 106 aa, Homo Sapiens
MMTSTASTALCTARTGPPQRVWRRGSHRSHPRAKMCGKHWCGTSPLMSPLKAPTPTAGHRSCSACMDQMCSGTMWFEAMGPCTCPSHLAGTKGPSPCLSQNLRLNC

SEQ ID NO: 1394 - protein, 133 aa, Homo Sapiens
MMTSTASTALCTARTGPPQRVWRRGSHRSHPRAKMCGKHWCGTSPLMSPLKAPTPTAGHRSCSACMDQMCSGTMWFEAMGPCTCPSHLAGTKGPSPCLSQNLRLNCRSLQAGSWGGGPSTQTPRWWLRVKAGK

SEQ ID NO: 1395 - protein, 147 aa, Homo Sapiens
MMTSTASTALCTARTGPPQRVWRRGSHRSHPRAKMCGKHWCGTSPLMSPLKAPTPTAGHRSCSACMDQMCSGTMWFEAMGPCTCPSHLAGTKGPSPCLSQNLRLNCRSLQAGSWGGGPSTQTPRWWLRVKAGKPPSGLSVKDSSVSR

SEQ ID NO: 1396 - protein, 153 aa, Homo Sapiens
MMTSTASTALCTARTGPPQRVWRRGSHRSHPRAKMCGKHWCGTSPLMSPLKAPTPTAGHRSCSACMDQMCSGTMWFEAMGPCTCPSHLAGTKGPSPCLSQNLRLNCRSLQAGSWGGGPSTQTPRWWLRVKAGKVKLPPLSYPHPPYRLQPGSG

SEQ ID NO: 1397 - protein, 213 aa, Homo Sapiens
MMTSTASTALCTARTGPPQRVWRRGSHRSHPRAKMCGKHWCGTSPLMSPLKAPTPTAGHRSCSACMDQMCSGTMWFEAMGPCTCPSHLAGTKGPSPCLSQNLRLNCRSLQAGSWGGGPSTQTPRWWLRVKAGKVKLPPLSYPHPPYRLQPGSGWAQGWGECRGPARHIGASPQMFPDEGLVGAQRVCHVCLSRQPLYLPVRGLGQALLSPFYR

SEQ ID NO: 1398 - protein, 112 aa, Homo Sapiens
SNRARPRWVPPAPPDLPWRPRVLASFYSWSTGRWRAPSFQSMMTSTASTALCTARTGPPQRVWRRGSHRSHPRAKMCGKHWCGTSPLMSPLKAPTPTAAVQLAFWKFRVHQG

SEQ ID NO: 1399 - protein, 396 aa, Homo Sapiens
MGALARALLLPLLAQWLLRAAPELAPAPFTLPLRVAAATNRVVAPTPGPGTPAERHADGLALALEPALASPAGAANFLAMVDNLQGDSGRGYYLEMLIGTPPQKLQILVDTGSSNFAVAGTPHSYIDTYFDTERSSTYRSKGFDVTVKYTQGSWTGFVGEDLVTIPKGFNTSFLVNIATIFESENFFLPGIKWNGILGLAYATLAKPSSSLETFFDSLVTQANIPNVFSMQMCGAGLPVAGSGTNGGSLVLGGIEPSLYKGDIWYTPIKEEWYYQIEILKLEIGGQSLNLDCREYNADKAIVDSGTTLLRLPQKVFDAVVEAVARASLIPEFSDGFWTGSQLACWTNSETPWSYFPKISIYLRDENSSRSFRITILPQKLQVLQCLKFPGLSQQRM

SEQ ID NO: 1400 - protein, 518 aa, Homo Sapiens
MGALARALLLPLLAQWLLRAAPELAPAPFTLPLRVAAATNRVVAPTPGPGTPAERHADGLALALEPALASPAGAANFLAMVDNLQGDSGRGYYLEMLIGTPPQKLQILVDTGSSNFAVAGTPHSYIDTYFDTERSSTYRSKGFDVTVKYTQGSWTGFVGEDLVTIPKGFNTSFLVNIATIFESENFFLPGIKWNGILGLAYATLAKPSSSLETFFDSLVTQANIPNVFSMQMCGAGLPVAGSGTNGGSLVLGGIEPSLYKGDIWYTPIKEEWYYQIEILKLEIGGQSLNLDCREYNADKAIVDSGTTLLRLPQKVFDAVVEAVARASLIPEFSDGFWTGSQLACWTNSETPWSYFPKISIYLRDENSSRSFRITILPQLYIQPMMGAGLNYECYRFGISPSTNALVIGATVMEGFYVIFDRAQKRVGFAASPCAEIAGAAVSEISGPFSTEDVASNCVPAQSLSEPILWIVSYALMSVCGAILLVLIVLLLLPFRCQRRPRDPEVVNDESSLVRHRWK

SEQ ID NO: 1401 - protein, 468 aa, Homo Sapiens
MGALARALLLPLLAQWLLRAAPELAPAPFTLPLRVAAATNRVVAPTPGPGTPAERHADGLALALEPALASPAGAANFLAMVDNLQGDSGRGYYLEMLIGTPPQKLQILVDTGSSNFAVAGTPHSYIDTYFDTERSSTYRSKGFDVTVKYTQGSWTGFVGEDLVTIPKGFNTSFLVNIATIFESENFFLPGIKWNGILGLAYATLAKPSSSLETFFDSLVTQANIPNVFSMQMCGAGLPVAGSGTNGGSLVLGGIEPSLYKGDIWYTPIKEEWYYQIEILKLEIGGQSLNLDCREYNADKAIVDSGTTLLRLPQKVFDAVVEAVARASLLYIQPMMGAGLNYECYRFGISPSTNALVIGATVMEGFYVIFDRAQKRVGFAASPCAEIAGAAVSEISGPFSTEDVASNCVPAQSLSEPILWIVSYALMSVCGAILLVLIVLLLLPFRCQRRPRDPEVVNDESSLVRHRWK

SEQ ID NO: 1402 - protein, 43 aa, Homo Sapiens
MAAGAVFLALSAQLLQARLMKEESPVVSWRLEPEDGTALCFIF

SEQ ID NO: 1403 - protein, 628 aa, Homo Sapiens
MEPPDAPAQARGAPRLLLLAVLLAAHPDAQAEVRLSVPPLVEVMRGKSVILDCTPTGTHDHYMLEWFLTDRSGARPRLASAEMQGSELQVTMHDTRGRSPPYQLDSQGRLVLAEAQVGDERDYVCVVRAGAAGTAEATARLNVFAKPEATEVSPNKGTLSVMEDSAQEIATCNSRNGNPAPKITWYRNGQRLEVPVEMNPEGYMTSRTVREASGLLSLTSTLYLRLRKDDRDASFHCAAHYSLPEGRHGRLDSPTFHLTLHYPTEHVQFWVGSPSTPAGWVREGDTVQLLCRGDGSPSPEYTLFRLQDEQEEVLNVNLEGNLTLEGVTRGQSGTYGCRVEDYDAADDVQLSKTLELRVAYLDPLELSEGKVLSLPLNSSAVVNCSVHGLPTPALRWTKDSTPLGDGPMLSLSSITFDSNGTYVCEASLPTVPVLSRTQNFTLLVQGSPELKTAEIEPKADGSWREGDEVTLICSARGHPDPKLSWSQLGGSPAEPIPGRQGWVSSSLTLKVTSALSRDGISCEASNPHGNKRHVFHFGTVSPQTSQAGVAVMAVAVSVGLLLLVVAVFYCVRRKGGPCCRQRREKGAPPPGEPGLSHSGSEQPEQTGLLMGGASGGARGGSGGFGDEC

SEQ ID NO: 1404 - protein, 588 aa, Homo Sapiens
MEPPDAPAQARGAPRLLLLAVLLAAHPDAQAEVRLSVPPLVEVMRGKSVILDCTPTGTHDHYMLEWFLTDRSGARPRLASAEMQGSELQVTMHDTRGRSPPYQLDSQGRLVLAEAQVGDERDYVCVVRAGAAGTAEATARLNVFAKPEATEVSPNKGTLSVMEDSAQEIATCNSRNGNPAPKITWYRNGQRLEVPVEMNPEGYMTSRTVREASGLLSLTSTLYLRLRKDDRDASFHCAAHYSLPEGRHGRLDSPTFHLTLHYPTEHVQFWVGSPSTPAGWVREGDTVQLLCRGDGSPSPEYTLFRLQDEQEEVLNVNLEGNLTLEGVTRGQSGTYGCRVEDYDAADDVQLSKTLELRVAYLDPLELSEGKVLSLPLNSSAVVNCSVHGLPTPALRWTKDSTPLGDGPMLSLSSITFDSNGTYVCEASLPTVPVLSRTQNFTLLVQGSPELKTAEIEPKADGSWREGDEVTLICSARGHPDPKLSWSQLGGSPAEPIPGRQGWVSSSLTLKVTSALSRDGISCEASNPHGNKRHVFHFGTVSPQTSQAGVAVMAVAVSVGLLLLVVAVFYCVRRKGGPCCRQRREKGAP

SEQ ID NO: 1405 - protein, 286 aa, Homo Sapiens
MEPPDAPAQARGAPRLLLLAVLLAAHPDAQAEVRLSVPPLVEVMRGKSVILDCTPTGTHDHYMLEWFLVTMHDTRGRSPPYQLDSQGRLVLAEAQVGDERDYVCVVRAGAAGTAEATARLNVFAKPEATEVSPNKGTLSVMEDSAQEIATCNSRNGNPAPKITWYRNGQRLEVPVEMNPEGYMTSRTVREASGLLSLTSTLYLRLRKDDRDASFHCAAHYSLPEGRHGRLDSPTFHLTLHYPTEHVQFWVGSPSTPAGWVREGDTVQLLCRGDGSPSPEYTLFRLQ

SEQ ID NO: 1406 - protein, 61 aa, Homo Sapiens
  misc_feature (1)..(1): Xaa can be any naturally occurring amino acid
XGYMTSRTVREASGLLSLTSTLYLRLRKDDRDASFHCAAHYSLPEGRHGRLDSPTFHLTLH

SEQ ID NO: 1407 - protein, 145 aa, Homo Sapiens
MAQLFLPLLAALVLAQAPAALADVLEGDSSEDRAFRVRIAGDAPLQGVLGGALTIPCHVHYLRPPPSRRAVLGSPRVKWTFLSRGREAEVLVARGVRVKVNEAYRFRVALPAYPASLTDVSLALSELRPNDSGIYRCEVQHGIDD

SEQ ID NO: 1408 - protein, 196 aa, Homo Sapiens
MAQLFLPLLAALVLAQAPAALADVLEGDSSEDRAFRVRIAGDAPLQGVLGGALTIPCHVHYLRPPPSRRAVLGSPRVKWTFLSRGREAEVLVARGVRVKVNEAYRFRVALPAYPASLTDVSLALSELRPNDSGIYRCEVQHGIDDSSDAVEVKVKGIPSRPHERPVTETWMASPGSGTMVWWTRMTSMMCTVMLKT

SEQ ID NO: 1409 - protein, 213 aa, Homo Sapiens
MAQLFLPLLAALVLAQAPAALADVLEGDSSEDRAFRVRIAGDAPLQGVLGGALTIPCHVHYLRPPPSRRAVLGSPRVKWTFLSRGREAEVLVARGVRVKVNEAYRFRVALPAYPASLTDVSLALSELRPNDSGIYRCEVQHGIDDSSDAVEVKVKGVVFLYREGSARYAFSFSGAQEACARIGAHIATPEQLYAAYLGGYEQCDAGWLSDQTV

SEQ ID NO: 1410 - protein, 911 aa, Homo Sapiens
MAQLFLPLLAALVLAQAPAALADVLEGDSSEDRAFRVRIAGDAPLQGVLGGALTIPCHVHYLRPPPSRRAVLGSPRVKWTFLSRGREAEVLVARGVRVKVNEAYRFRVALPAYPASLTDVSLALSELRPNDSGIYRCEVQHGIDDSSDAVEVKVKGVVFLYREGSARYAFSFSGAQEACARIGAHIATPEQLYAAYLGGYEQCDAGWLSDQTVRYPIQTPREACYGDMDGFPGVRNYGVVDPDDLYDVYCYAEDLNGELFLGDPPEKLTLEEARAYCQERGAEIATTGQLYAAWDGGLDHCSPGWLADGSVRYPIVTPSQRCGGGLPGVKTLFLFPNQTGFPNKHSRFNVYCFRDSAQPSAIPEASNPASNPASDGLEAIVTVTETLEELQLPQEATESESRGAIYSIPIMEDGGGGSSTPEDPAEAPRTLLEFETQSMVPPTGFSEEEGKALEEEEKYEDEEEKEEEEEEEEVEDEALWAWPSELSSPGPEASLPTEPAAQEESLSQAPARAVLQPGASPLPDGESEASRPPRVHGPPTETLPTPRERNLASPSPSTLVEAREVGEATGGPELSGVPRGESEETGSSEGAPSLLPATRAPEGTRELEAPSEDNSGRTAPAGTSVQAQPVLPTDSASRGGVAVVPASGDCVPSPCHNGGTCLEEEEGVRCLCLPGYGGDLCDVGLRFCNPGWDAFQGACYKHFSTRRSWEEAETQCRMYGAHLASISTPEEQDFINNRYREYQWIGLNDRTIEGDFLWSDGVPLLYENWNPGQPDSYFLSGENCVVMVWHDQGQWSDVPCNYHLSYTCKMGLVSCGPPPELPLAQVFGRPRLRYEVDTVLRYRCREGLAQRNLPLIRCQENGRWEAPQISCVPRRPARALHPEEDPEGRQGRLLGRWKALLIPPSSPMPGP

SEQ ID NO: 1411 - protein, 671 aa, Homo Sapiens
MAQLFLPLLAALVLAQAPAALADVLEGDSSEDRAFRVRIAGDAPLQGVLGGALTIPCHVHYLRPPPSRRAVLGSPRVKWTFLSRGREAEVLVARGVRVKVNEAYRFRVALPAYPASLTDVSLALSELRPNDSGIYRCEVQHGIDDSSDAVEVKVKGVVFLYREGSARYAFSFSGAQEACARIGAHIATPEQLYAAYLGGYEQCDAGWLSDQTVRYPIQTPREACYGDMDGFPGVRNYGVVDPDDLYDVYCYAEDLNGELFLGDPPEKLTLEEARAYCQERGAEIATTGQLYAAWDGGLDHCSPGWLADGSVRYPIVTPSQRCGGGLPGVKTLFLFPNQTGFPNKHSRFNVYCFRDSAQPSAIPEASNPASNPASDGLEAIVTVTETLEELQLPQEATESESRGAIYSIPIMEDGGGGSSTPEDPAEAPRTLLEFETQSMVPPTGFSEEEGKALEEEEKYEDEEEKEEEEEEEEVEDEALWAWPSELSSPGPEASLPTEPAAQEESLSQAPARAVLQPGASPLPDGESEASRPPRVHGPPTETLPTPRERNLASPSPSTLVEAREVGEATGGPELSGVPRGESEETGSSEGAPSLLPATRAPEGTRELEAPSEDNSGRTAPAGTSVQAQPVLPTDSASRGGVAVVPASGNSAQGSTALSILLLFFPLQLWVT

SEQ ID NO: 1412 - protein, 231 aa, Homo Sapiens
MAQLFLPLLAALVLAQAPAALADVLEGDSSGIYRCEVQHGIDDSSDAVEVKVKGVVFLYREGSARYAFSFSGAQEACARIGAHIATPEQLYAAYLGGYEQCDAGWLSDQTVRYPIQTPREACYGDMDGFPGVRNYGVVDPDDLYDVYCYAEDLNGELFLGDPPEKLTLEEARAYCQERGAEIATTGQLYAAWDGGLDHCSPGWLADGSVRYPIVTPSQRCGGGLPGVKTLF

SEQ ID NO: 1413 - protein, 26 aa, Homo Sapiens
  misc_feature (1)..(1): Xaa can be any naturally occurring amino acid
XHGIDDSSDAVEVKVKGGGHSTHNLT

SEQ ID NO: 1414 - protein, 294 aa, Homo Sapiens
IATFWNKAFLTIIILLIVLFLDAVREVRKYSSVHTIEKSSTSRPDAYEHTQMKLFRSQRNLYISGFSLFFWLVLRRLVTLITQLAKELSNKGVLKTQAENTNKAAKKFMEENEKLKRILKSHGKDEECVLEAENKKLVEDQEKLKTELRKTSDALSKAQNDVMEMKMQSERLSKEYDQLLKEHSELQKQREILPHRRGESTVTTEAEIGVMEPQQRNADSHQKLEEAKNRFFPRASSSRSMALQIPIKLILDFLASRTMGINLLFQAIKFVIICYCCHSKLIQEHAGQICNGLN

SEQ ID NO: 1415 - protein, 147 aa, Homo Sapiens
MKLFRSQRNLYISGFSLFFWLVLRRLVTLITQLAKELSNKGVLKTQAENTNKAAKKFMEENEKLKRILKSHGKDEECVLEAENKKLVEDQEKLKTELRKTSDALSKAQNDVMEMKMQSERLSKEYDQLLKEHSELQDRLERGNKKRL

SEQ ID NO: 1416 - protein, 64 aa, Homo Sapiens
MTLQWAAVATFLYAEIGLILIFCLPFIPPQRWQKIFSFNVWGKIATFWNKAFLTIIILLIVLFL

SEQ ID NO: 1417 - protein, 133 aa, Homo Sapiens
MTLQWAAVATFLYAEIGLILIFCLPFIPPQRWQKIFSFNVWGKIATFWNKAFLTIIILLIVLFLDAVREVRKYSSVHTIEKSSTSRPDAYEHTQMKLFRSQRNLYISGFSLFFWLVLRRLVTLITQLAKELSN

SEQ ID NO: 1418 - protein, 171 aa, Homo Sapiens
MTLQWAAVATFLYAEIGLILIFCLPFIPPQRWQKIFSFNVWGKIATFWNKAFLTIIILLIVLFLDAVREVRKYSSVHTIEKSSTSRPDAYEHTQMKLFRSQRNLYISGFSLFFWLVLRRLVTLITQLAKELSNKGVLKTQAENTNKAAKKFMEENEKLKRFLLAKVHCRKL

SEQ ID NO: 1419 - protein, 196 aa, Homo Sapiens
MTLQWAAVATFLYAEIGLILIFCLPFIPPQRWQKIFSFNVWGKIATFWNKAFLTIIILLIVLFLDAVREVRKYSSVHTIEKSSTSRPDAYEHTQMKLFRSQRNLYISGFSLFFWLVLRRLVTLITQLAKELSNKGVLKTQAENTNKAAKKFMEENEKLKRILKSHGKDEECVLEAENKKLVEDQEKLKTELRKTSD

SEQ ID NO: 1420 - protein, 230 aa, Homo Sapiens
MTLQWAAVATFLYAEIGLILIFCLPFIPPQRWQKIFSFNVWGKIATFWNKAFLTIIILLIVLFLDAVREVRKYSSVHTIEKSSTSRPDAYEHTQMKLFRSQRNLYISGFSLFFWLVLRRLVTLITQLAKELSNKGVLKTQAENTNKAAKKFMEENEKLKRILKSHGKDEECVLEAENKKLVEDQEKLKTELRKTSDALSKAQNDVMEMKMQSERLSKEYDQLLKEHSELQ

SEQ ID NO: 1421 - protein, 241 aa, Homo Sapiens
MTLQWAAVATFLYAEIGLILIFCLPFIPPQRWQKIFSFNVWGKIATFWNKAFLTIIILLIVLFLDAVREVRKYSSVHTIEKSSTSRPDAYEHTQMKLFRSQRNLYISGFSLFFWLVLRRLVTLITQLAKELSNKGVLKTQAENTNKAAKKFMEENEKLKRILKSHGKDEECVLEAENKKLVEDQEKLKTELRKTSDALSKAQNDVMEMKMQSERLSKEYDQLLKEHSELQDRLERGNKKRL

SEQ ID NO: 1422 - protein, 241 aa, Homo Sapiens; identical to SEQ ID NO: 1421

SEQ ID NO: 1423 - protein, 348 aa, Homo Sapiens
MTLQWAAVATFLYAEIGLILIFCLPFIPPQRWQKIFSFNVWGKIATFWNKAFLTIIILLIVLFLDAVREVRKYSSVHTIEKSSTSRPDAYEHTQMKLFRSQRNLYISGFSLFFWLVLRRLVTLITQLAKELSNKGVLKTQAENTNKAAKKFMEENEKLKRILKSHGKDEECVLEAENKKLVEDQEKLKTELRKTSDALSKAQNDVMEMKMQSERLSKEYDQLLKEHSELQHSSFGEFLSKRSHKNGSIGKQTGSRKGSFRKRQQEKTVNFIKDTCNILCQNDNFVMLASRKFKFRKMHYDRFVIFLMPHIGCIVMALSKYLMMFQIYCKVCIPALKKNISMLNTIFTY

SEQ ID NO: 1424 - protein, 348 aa, Homo Sapiens; identical to SEQ ID NO: 1423

SEQ ID NO: 1425 - protein, 66 aa, Homo Sapiens
MTLQWAAVATFLYAEIGLILIFCLPFIPPQRWQKIFSFNVWGKIATFWNKAFLTIIILLIVLFLEF

SEQ ID NO: 1426 - protein, 163 aa, Homo Sapiens
  misc_feature (1)..(1): Xaa can be any naturally occurring amino acid
XDAYEHTQMKLFRSQRNLYISGFSLFFWLVLRRLVTLITQLAKELSNKGVLKTQAENTNKAAKKFMEENEKLKRILKSHGKDEECVLEAENKKLVEDQEKLKTELRKTSDALSKAQNDVMEMKMQSERLSKEYDQLLKEHSELQKSHSQPGAAAFLVKEVESF

SEQ ID NO: 1427 - protein, 868 aa, Homo Sapiens
MENVLAKALYDNVAESPDELSFRKGDIMTVLEQDTQGLDGWWLCSLHGRQGIVPGNRLKILVGMYDKKPAGPGPGPPATPAQPQPGLHAPAPPASQYTPMLPNTYQPQPDSVYLVPTPSKAQQGLYQVPGPSPQFQSPPAKQTSTFSKQTPHHPFPSPATDLYQVPPGPGGPAQDIYQVPPSAGMGHDIYQVPPSMDTRSWEGTKPPAKVVVPTRVGQGYVYEAAQPEQDEYDIPRHLLAPGPQDIYDVPPVRGLLPSQYGQEVYDTPPMAVKGPNGRDPLLEVYDVPPSVEKGLPPSNHHAVYDVPPSVSKDVPDGPLLREETYDVPPAFAKAKPFDPARTPLVLAAPPPDSPPAEDVYDVPPPAPDLYDVPPGLRRPGPGTLYDVPRERVLPPEVADGGVVDSGVYAVPPPAEREAPAEGKRLSASSTGSTRSSQSASSLEVAGPGREPLELEVAVEALARLQQGVSATVAHLLDLAGSAGATGSWRSPSEPQEPLVQDLQAAVAAVQSAVHELLEFARSAVGNAAHTSDRALHAKLSRQLQKMEDVHQTLVAHGQALDAGRGGSGATLEDLDRLVACSRAVPEDAKQLASFLHGNASLLFRRTKATAPGPEGGGTLHPNPTDKTSSIQSRPLPSPPKFTSQDSPDGQYENSEGGWMEDYDYVHLQGKEEFEKTQKELLEKGSITRQGKSQLELQQLKQFERLEQEVSRPIDHDLANWTPAQPLAPGRTGGLGPSDRQLLLFYLEQCEANLTTLTNAVDAFFTAVATNQPPKIFVAHSKFVILSAHKLVFIGDTLSRQAKAADVRSQVTHYSNLLCDLLRGIVATTKAAALQYPSPSAAQDMVERVKELGHSTQQFRRVLGQLAAA

SEQ ID NO: 1428 - protein, 888 aa, Homo Sapiens
MHCPGEAPLAAPRPTPKDPCLRNVLAKALYDNVAESPDELSFRKGDIMTVLEQDTQGLDGWWLCSLHGRQGIVPGNRLKILVGMYDKKPAGPGPGPPATPAQPQPGLHAPAPPASQYTPMLPNTYQPQPDSVYLVPTPSKAQQGLYQVPGPSPQFQSPPAKQTSTFSKQTPHHPFPSPATDLYQVPPGPGGPAQDIYQVPPSAGMGHDIYQVPPSMDTRSWEGTKPPAKVVVPTRVGQGYVYEAAQPEQDEYDIPRHLLAPGPQDIYDVPPVRGLLPSQYGQEVYDTPPMAVKGPNGRDPLLEVYDVPPSVEKGLPPSNHHAVYDVPPSVSKDVPDGPLLREETYDVPPAFAKAKPFDPARTPLVLAAPPPDSPPAEDVYDVPPPAPDLYDVPPGLRRPGPGTLYDVPRERVLPPEVADGGVVDSGVYAVPPPAEREAPAEGKRLSASSTGSTRSSQSASSLEVAGPGREPLELEVAVEALARLQQGVSATVAHLLDLAGSAGATGSWRSPSEPQEPLVQDLQAAVAAVQSAVHELLEFARSAVGNAAHTSDRALHAKLSRQLQKMEDVHQTLVAHGQALDAGRGGSGATLEDLDRLVACSRAVPEDAKQLASFLHGNASLLFRRTKATAPGPEGGGTLHPNPTDKTSSIQSRPLPSPPKFTSQDSPDGQYENSEGGWMEDYDYVHLQGKEEFEKTQKELLEKGSITRQGKSQLELQQLKQFERLEQEVSRPIDHDLANWTPAQPLAPGRTGGLGPSDRQLLLFYLEQCEANLTTLTNAVDAFFTAVATNQPPKIFVAHSKFVILSAHKLVFIGDTLSRQAKAADVRSQVTHYSNLLCDLLRGIVATTKAAALQYPSPSAAQDMVERVKELGHSTQQFRRVLGQLAAA

SEQ ID NO: 1429 - protein, 888 aa, Homo Sapiens
MLTHRPQEAEQRGRTPGPSFEWNVLAKALYDNVAESPDELSFRKGDIMTVLEQDTQGLDGWWLCSLHGRQGIVPGNRLKILVGMYDKKPAGPGPGPPATPAQPQPGLHAPAPPASQYTPMLPNTYQPQPDSVYLVPTPSKAQQGLYQVPGPSPQFQSPPAKQTSTFSKQTPHHPFPSPATDLYQVPPGPGGPAQDIYQVPPSAGMGHDIYQVPPSMDTRSWEGTKPPAKVVVPTRVGQGYVYEAAQPEQDEYDIPRHLLAPGPQDIYDVPPVRGLLPSQYGQEVYDTPPMAVKGPNGRDPLLEVYDVPPSVEKGLPPSNHHAVYDVPPSVSKDVPDGPLLREETYDVPPAFAKAKPFDPARTPLVLAAPPPDSPPAEDVYDVPPPAPDLYDVPPGLRRPGPGTLYDVPRERVLPPEVADGGVVDSGVYAVPPPAEREAPAEGKRLSASSTGSTRSSQSASSLEVAGPGREPLELEVAVEALARLQQGVSATVAHLLDLAGSAGATGSWRSPSEPQEPLVQDLQAAVAAVQSAVHELLEFARSAVGNAAHTSDRALHAKLSRQLQKMEDVHQTLVAHGQALDAGRGGSGATLEDLDRLVACSRAVPEDAKQLASFLHGNASLLFRRTKATAPGPEGGGTLHPNPTDKTSSIQSRPLPSPPKFTSQDSPDGQYENSEGGWMEDYDYVHLQGKEEFEKTQKELLEKGSITRQGKSQLELQQLKQFERLEQEVSRPIDHDLANWTPAQPLAPGRTGGLGPSDRQLLLFYLEQCEANLTTLTNAVDAFFTAVATNQPPKIFVAHSKFVILSAHKLVFIGDTLSRQAKAADVRSQVTHYSNLLCDLLRGIVATTKAAALQYPSPSAAQDMVERVKELGHSTQQFRRVLGQLAAA

SEQ ID NO: 1430 - protein, 870 aa, Homo Sapiens
MNHLNVLAKALYDNVAESPDELSFRKGDIMTVLEQDTQGLDGWWLCSLHGRQGIVPGNRLKILVGMYDKKPAGPGPGPPATPAQPQPGLHAPAPPASQYTPMLPNTYQPQPDSVYLVPTPSKAQQGLYQVPGPSPQFQSPPAKQTSTFSKQTPHHPFPSPATDLYQVPPGPGGPAQDIYQVPPSAGMGHDIYQVPPSMDTRSWEGTKPPAKVVVPTRVGQGYVYEAAQPEQDEYDIPRHLLAPGPQDIYDVPPVRGLLPSQYGQEVYDTPPMAVKGPNGRDPLLEVYDVPPSVEKGLPPSNHHAVYDVPPSVSKDVPDGPLLREETYDVPPAFAKAKPFDPARTPLVLAAPPPDSPPAEDVYDVPPPAPDLYDVPPGLRRPGPGTLYDVPRERVLPPEVADGGVVDSGVYAVPPPAEREAPAEGKRLSASSTGSTRSSQSASSLEVAGPGREPLELEVAVEALARLQQGVSATVAHLLDLAGSAGATGSWRSPSEPQEPLVQDLQAAVAAVQSAVHELLEFARSAVGNAAHTSDRALHAKLSRQLQKMEDVHQTLVAHGQALDAGRGGSGATLEDLDRLVACSRAVPEDAKQLASFLHGNASLLFRRTKATAPGPEGGGTLHPNPTDKTSSIQSRPLPSPPKFTSQDSPDGQYENSEGGWMEDYDYVHLQGKEEFEKTQKELLEKGSITRQGKSQLELQQLKQFERLEQEVSRPIDHDLANWTPAQPLAPGRTGGLGPSDRQLLLFYLEQCEANLTTLTNAVDAFFTAVATNQPPKIFVAHSKFVILSAHKLVFIGDTLSRQAKAADVRSQVTHYSNLLCDLLRGIVATTKAAALQYPSPSAAQDMVERVKELGHSTQQFRRVLGQLAAA

SEQ ID NO: 1431 - protein, 888 aa, Homo Sapiens
MNHLNVLAKALYDNVAESPDELSFRKGDIMTVLEQDTQGLDGWWLCSLHGRQGIVPGNRLKILVGMYDKKPAGPGPGPPATPAQPQPGLHAPAPPASQYTPMLPNTYQPQPDSVYLVPTPSKAQQGLYQVPGPSPQFQSPPAKQTSTFSKQTPHHPFPSPATDLYQVPPGPGGPAQDIYQVPPSAGMGHDIYQVPPSMDTRSWEGTKPPAKVVVPTRVGQGYVYEAAQPEQDEYDIPRHLLAPGPQDIYDVPPVRGLLPSQYGQEVYDTPPMAVKGPNGRDPLLEVYDVPPSVEKGLPPSNHHAVSKCQGNARARLRLWGVWVYDVPPSVSKDVPDGPLLREETYDVPPAFAKAKPFDPARTPLVLAAPPPDSPPAEDVYDVPPPAPDLYDVPPGLRRPGPGTLYDVPRERVLPPEVADGGVVDSGVYAVPPPAEREAPAEGKRLSASSTGSTRSSQSASSLEVAGPGREPLELEVAVEALARLQQGVSATVAHLLDLAGSAGATGSWRSPSEPQEPLVQDLQAAVAAVQSAVHELLEFARSAVGNAAHTSDRALHAKLSRQLQKMEDVHQTLVAHGQALDAGRGGSGATLEDLDRLVACSRAVPEDAKQLASFLHGNASLLFRRTKATAPGPEGGGTLHPNPTDKTSSIQSRPLPSPPKFTSQDSPDGQYENSEGGWMEDYDYVHLQGKEEFEKTQKELLEKGSITRQGKSQLELQQLKQFERLEQEVSRPIDHDLANWTPAQPLAPGRTGGLGPSDRQLLLFYLEQCEANLTTLTNAVDAFFTAVATNQPPKIFVAHSKFVILSAHKLVFIGDTLSRQAKAADVRSQVTHYSNLLCDLLRGIVATTKAAALQYPSPSAAQDMVERVKELGHSTQQFRRVLGQLAAA

SEQ ID NO: 1432 - protein, 916 aa, Homo Sapiens
MPAKPFLSSVLLSWKVLDFSGPGPQGTGQPCSCGHWAEGQGGPPEPAGGPNVLAKALYDNVAESPDELSFRKGDIMTVLEQDTQGLDGWWLCSLHGRQGIVPGNRLKILVGMYDKKPAGPGPGPPATPAQPQPGLHAPAPPASQYTPMLPNTYQPQPDSVYLVPTPSKAQQGLYQVPGPSPQFQSPPAKQTSTFSKQTPHHPFPSPATDLYQVPPGPGGPAQDIYQVPPSAGMGHDIYQVPPSMDTRSWEGTKPPAKVVVPTRVGQGYVYEAAQPEQDEYDIPRHLLAPGPQDIYDVPPVRGLLPSQYGQEVYDTPPMAVKGPNGRDPLLEVYDVPPSVEKGLPPSNHHAVYDVPPSVSKDVPDGPLLREETYDVPPAFAKAKPFDPARTPLVLAAPPPDSPPAEDVYDVPPPAPDLYDVPPGLRRPGPGTLYDVPRERVLPPEVADGGVVDSGVYAVPPPAEREAPAEGKRLSASSTGSTRSSQSASSLEVAGPGREPLELEVAVEALARLQQGVSATVAHLLDLAGSAGATGSWRSPSEPQEPLVQDLQAAVAAVQSAVHELLEFARSAVGNAAHTSDRALHAKLSRQLQKMEDVHQTLVAHGQALDAGRGGSGATLEDLDRLVACSRAVPEDAKQLASFLHGNASLLFRRTKATAPGPEGGGTLHPNPTDKTSSIQSRPLPSPPKFTSQDSPDGQYENSEGGWMEDYDYVHLQGKEEFEKTQKELLEKGSITRQGKSQLELQQLKQFERLEQEVSRPIDHDLANWTPAQPLAPGRTGGLGPSDRQLLLFYLEQCEANLTTLTNAVDAFFTAVATNQPPKIFVAHSKFVILSAHKLVFIGDTLSRQAKAADVRSQVTHYSNLLCDLLRGIVATTKAAALQYPSPSAAQDMVERVKELGHSTQQFRRVLGQLAAA

SEQ ID NO: 1433 - protein, 57 aa, Homo Sapiens
MPAKPFLSSVLLSWKVLDFSGPGPQGTGQPCSCGHWAEGQGGPPEPAGGPVSQGSSD

SEQ ID NO: 1434 - protein, 57 aa, Homo Sapiens; identical to SEQ ID NO: 1433

SEQ ID NO: 1435 - protein, 722 aa, Homo Sapiens
MQGKNVLAKALYDNVAESPDELSFRKGDIMTVLEQDTQGLDGWWLCSLHGRQGIVPGNRLKILVVVPTRVGQGYVYEAAQPEQDEYDIPRHLLAPGPQDIYDVPPVRGLLPSQYGQEVYDTPPMAVKGPNGRDPLLEVYDVPPSVEKGLPPSNHHAVYDVPPSVSKDVPDGPLLREETYDVPPAFAKAKPFDPARTPLVLAAPPPDSPPAEDVYDVPPPAPDLYDVPPGLRRPGPGTLYDVPRERVLPPEVADGGVVDSGVYAVPPPAEREAPAEGKRLSASSTGSTRSSQSASSLEVAGPGREPLELEVAVEALARLQQGVSATVAHLLDLAGSAGATGSWRSPSEPQEPLVQDLQAAVAAVQSAVHELLEFARSAVGNAAHTSDRALHAKLSRQLQKMEDVHQTLVAHGQALDAGRGGSGATLEDLDRLVACSRAVPEDAKQLASFLHGNASLLFRRTKATAPGPEGGGTLHPNPTDKTSSIQSRPLPSPPKFTSQDSPDGQYENSEGGWMEDYDYVHLQGKEEFEKTQKELLEKGSITRQGKSQLELQQLKQFERLEQEVSRPIDHDLANWTPAQPLAPGRTGGLGPSDRQLLLFYLEQCEANLTTLTNAVDAFFTAVATNQPPKIFVAHSKFVILSAHKLVFIGDTLSRQAKAADVRSQVTHYSNLLCDLLRGIVATTKAAALQYPSPSAAQDMVERVKELGHSTQQFRRVLGQLAAA

SEQ ID NO: 1436 - protein, 870 aa, Homo Sapiens
MSVPNVLAKALYDNVAESPDELSFRKGDIMTVLEQDTQGLDGWWLCSLHGRQGIVPGNRLKILVGMYDKKPAGPGPGPPATPAQPQPGLHAPAPPASQYTPMLPNTYQPQPDSVYLVPTPSKAQQGLYQVPGPSPQFQSPPAKQTSTFSKQTPHHPFPSPATDLYQVPPGPGGPAQDIYQVPPSAGMGHDIYQVPPSMDTRSWEGTKPPAKVVVPTRVGQGYVYEAAQPEQDEYDIPRHLLAPGPQDIYDVPPVRGLLPSQYGQEVYDTPPMAVKGPNGRDPLLEVYDVPPSVEKGLPPSNHHAVYDVPPSVSKDVPDGPLLREETYDVPPAFAKAKPFDPARTPLVLAAPPPDSPPAEDVYDVPPPAPDLYDVPPGLRRPGPGTLYDVPRERVLPPEVADGGVVDSGVYAVPPPAEREAPAEGKRLSASSTGSTRSSQSASSLEVAGPGREPLELEVAVEALARLQQGVSATVAHLLDLAGSAGATGSWRSPSEPQEPLVQDLQAAVAAVQSAVHELLEFARSAVGNAAHTSDRALHAKLSRQLQKMEDVHQTLVAHGQALDAGRGGSGATLEDLDRLVACSRAVPEDAKQLASFLHGNASLLFRRTKATAPGPEGGGTLHPNPTDKTSSIQSRPLPSPPKFTSQDSPDGQYENSEGGWMEDYDYVHLQGKEEFEKTQKELLEKGSITRQGKSQLELQQLKQFERLEQEVSRPIDHDLANWTPAQPLAPGRTGGLGPSDRQLLLFYLEQCEANLTTLTNAVDAFFTAVATNQPPKIFVAHSKFVILSAHKLVFIGDTLSRQAKAADVRSQVTHYSNLLCDLLRGIVATTKAAALQYPSPSAAQDMVERVKELGHSTQQFRRVLGQLAAA

SEQ ID NO: 1437 - protein, 50 aa, Homo Sapiens
MTVLEQDTQGLDGWWLCSLHGRQGIVPGNRLKILVGMYDKKPAGPGPGPP

SEQ ID NO: 1438 - protein, 59 aa, Homo Sapiens
MTVLEQDTQGLDGWWLCSLHGRQGIVPGNRLKILVGMYDKKPAGPGPGPPATPAQPQPG

SEQ ID NO: 1439 - protein, 80 aa, Homo Sapiens
MTVLEQDTQGLDGWWLCSLHGRQGIVPGNRLKILVGMYDKKPAGPGPGPPATPAQPQPGLHAPAPPASQYTPMLPNTYQP

SEQ ID NO: 1440 - protein, 120 aa, Homo Sapiens
MTVLEQDTQGLDGWWLCSLHGRQGIVPGNRLKILVGMYDKKPAGPGPGPPATPAQPQPGLHAPAPPASQYTPMLPNTYQPQPDSVYLVPTPSKAQQGLYQVPGPSPQFQSPPAKQTSTFS

SEQ ID NO: 1441 - protein, 128 aa, Homo Sapiens
MTVLEQDTQGLDGWWLCSLHGRQGIVPGNRLKILVGMYDKKPAGPGPGPPATPAQPQPGLHAPAPPASQYTPMLPNTYQPQPDSVYLVPTPSKAQQGLYQVPGPSPQFQSPPAKQTSTFSKQTPHHPF

SEQ ID NO: 1442 - protein, 133 aa, Homo Sapiens
MTVLEQDTQGLDGWWLCSLHGRQGIVPGNRLKILVGMYDKKPAGPGPGPPATPAQPQPGLHAPAPPASQYTPMLPNTYQPQPDSVYLVPTPSKAQQGLYQVPGPSPQFQSPPAKQTSTFSKQTPHHPFPSPAT

SEQ ID NO: 1443 - protein, 135 aa, Homo Sapiens
MTVLEQDTQGLDGWWLCSLHGRQGIVPGNRLKILVGMYDKKPAGPGPGPPATPAQPQPGLHAPAPPASQYTPMLPNTYQPQPDSVYLVPTPSKAQQGLYQVPGPSPQFQSPPAKQTSTFSKQTPHHPFPSPATDL

SEQ ID NO: 1444 - protein, 238 aa, Homo Sapiens
  misc_feature (1)..(1): Xaa can be any naturally occurring amino acid
XPQFQSPPAKQTSTFSKQTPHHPFPSPATDLYQVPPGPGGPAQDIYQVPPSAGMGHDIYQVPPSMDTRSWEGTKPPAKVVVPTRVGQGYVYEAAQPEQDEYDIPRHLLAPGPQDIYDVPPVRGLLPSQYGQEVYDVPPSVSKDVPDGPLLREETYDVPPAFAKAKPFDPARTPLVLAAPPPDSPPAEDVYDVPPPAPDLYDVPPGLRRPGPGTLYDVPRERVLPPEVADGGVVDSGVY

SEQ ID NO: 1445 - protein, 120 aa, Homo Sapiens
AVQFTGWSSSCILHFPEVLHDFHSLQTLPSLLQRIGNPNETQNNSTSWPVFKSTEQKYLTLNTESTRIMTKLRAQQCRFWTSFFPKVLEMTEPICCYCEPGTALAARAAQMKMTGSAYSQ

SEQ ID NO: 1446 - protein, 132 aa, Homo Sapiens
AVQFTGWSSSCILHFPEVLHDFHSLQTLPSLLQRIGNPNETQNNSTSWPVFKSTEQKYLTLNTESTRIMTKLRAQQCRFWTSFFPKVLEMTGNIDEAEWEWKAGFHRWNNYMMDWKNQFNDYTSKKESCVGL

SEQ ID NO: 1447 - protein, 602 aa, Homo Sapiens
MHSKVTIICIRFLFWFLLLCMLIGKSHTEDDIIIATKNGKVRGMNLTVFGGTVTAFLGIPYAQPPLGRLRFKKPQSLTKWSDIWNATKYANSCCQNIDQSFPGFHGSEMWNPNTDLSEDCLYLNVWIPAPKPKNATVLIWIYGGGFQTGTSSLHVYDGKFLARVERVIVVSMNYRVGALGFLALPGNPEAPGNMGLFDQQLALQWVQKNIAAFGGNPKSVTLFGESAGAASVSLHLLSPGSHSLFTRAILQSGSFNAPWAVTSLYEARNRTLNLAKLTGCSRENETEIIKCLRNKDPQEILLNEAFVVPYGTPLSVNFGPTVDGDFLTDMPDILLELGQFKKTQILVGVNKDEGTAFLVYGAPGFSKDNNSIITRKEFQEGLKIFFPGVSEFGKESILFHYTDWVDDQRPENYREALGDVVGDYNFICPALEFTKKFSEWGNNAFFYYFEHRSSKLPWPEWMGVMHGYEIEFVFGLPLERRDNYTKAEEILSRSIVKRWANFAKYGNPNETQNNSTSWPVFKSTEQKYLTLNTESTRIMTKLRAQQCRFWTSFFPKVLEMTGNIDEAEWEWKAGFHRWNNYMMDWKNQFNDYTSKKESCVGL

SEQ ID NO: 1448 - protein, 525 aa, Homo Sapiens
MHSKVTIICIRFLFWFLLLCMLIGKSHTEDDIIIATKNGKVRGMNLTVFGGTVTAFLGIPYAQPPLGRLRFKKPQSLTKWSDIWNATKYANSCCQNIDQSFPGFHGSEMWNPNTDLSEDCLYLNVWIPAPKPKNATVLIWIYGGGFQTGTSSLHVYDGKFLARVERVIVVSMNYRVGALGFLALPGNPEAPGNMGLFDQQLALQWVQKNIAAFGGNPKSVTLFGESAGAASVSLHLLSPGSHSLFTRAILQSGSFNAPWAVTSLYEARNRTLNLAKLTGCSRENETEIIKCLRNKDPQEILLNEAFVVPYGTPLSVNFGPTVDGDFLTDMPDILLELGQFKKTQILVGVNKDEGTAFLVYGAPGFSKDNNSIITRKEFQEGLKIFFPGVSEFGKESILFHYTDWVDDQRPENYREALGDVVGDYNFICPALEFTKKFSEWGNNAFFYYFEHRSSKLPWPEWMGVMHGYEIEFVFGLPLERRDNYTKAEEILSRSIVKRWANFAKYGCSSSTILNYVLETEPVVLI

SEQ ID NO: 1449 - protein, 562 aa, Homo Sapiens
MHSKVTIICIRFLFWFLLLCMLIGKSHTEDDIIIATKNGKVRGMNLTVFGGTVTAFLGIPYAQPPLGRLRFKKPQSLTKWSDIWNATKYANSCCQNIDQSFPGFHGSEMWNPNTDLSEDCLYLNVWIPAPKPKNATVLIWIYGGGFQTGTSSLHVYDGKFLARVERVIVVSMNYRVGALGFLALPGNPEAPGNMGLFDQQLALQWVQKNIAAFGGNPKSVTLFGESAGAASVSLHLLSPGSHSLFTRAILQSGSFNAPWAVTSLYEARNRTLNLAKLTGCSRENETEIIKCLRNKDPQEILLNEAFVVPYGTPLSVNFGPTVDGDFLTDMPDILLELGQFKKTQILVGVNKDEGTAFLVYGAPGFSKDNNSIITRKEFQEGLKIFFPGVSEFGKESILFHYTDWVDDQRPENYREALGDVVGDYNFICPALEFTKKFSEWGNNAFFYYFEHRSSKLPWPEWMGVMHGYEIEFVFGLPLERRDNYTKAEEILSRSIVKRWANFAKYGNPNETQNNSTSWPVFKSTEQKYLTLNTESTRIMTKLRAQQCRFWTSFFPKVLEMTG

SEQ ID NO: 1450 - protein, 218 aa, Homo Sapiens
MAVVAAAAGWLLRLRAAGAEGHWRRLPGAGLARGFLHPAATVEDAAQRRQVAHFTFQPDPEPREYGQTQKMNLFQSVTSALDNSLAKDPTAVIFGEDVAFGGVFRCTVGLRDKYGKDRVFNTPLCEQGIVGFGIGIAVTGATAIAEIQFADYIFPAFDQIVNEAAKYRYRSGDLFNCGSLTIRSPWGCVGHGALYHSQSPEAFFAHCPGIKIKVISLS

SEQ ID NO: 1451 - protein, 392 aa, Homo Sapiens
MAVVAAAAGWLLRLRAAGAEGHWRRLPGAGLARGFLHPAATVEDAAQRRQVAHFTFQPDPEPREYGQTQKMNLFQSVTSALDNSLAKDPTAVIFGEDVAFGGVFRCTVGLRDKYGKDRVFNTPLCEQGIVGFGIGIAVTGATAIAEIQFADYIFPAFDQIVNEAAKYRYRSGDLFNCGSLTIRSPWGCVGHGALYHSQSPEAFFAHCPGIKVVIPRSPFQAKGLLLSCIEDKNPCIFFEPKILYRAAAEEVPIEPYNIPLSQAEVIQEGSDVTLVAWGTQVHVIREVASMAKEKLGVSCEVIDLRTIIPWDVDTICKSVIKTGRLLISHEAPLTGGFASEISSTVQEECFLNLEAPISRVCGYDTPFPHIFEPFYIPDKWKCYDALRKMINY

SEQ ID NO: 1452 - protein, 392 aa, Homo Sapiens; identical to SEQ ID NO: 1451

SEQ ID NO: 1453 - protein, 329 aa, Homo Sapiens
MCGATSFLHECTRLILVTTQNAEFLQKGLQVHTCFGVYPHASVWHDCASQKKGCAVYLHVSVEFNKLIPENGFIKFHQVRRVMTILFLTMVISYFGCMKAAPMKEANIRGQGGLAYPGVRTHGTLESVNGPKAGSRGLTSLADTFEHVIEELLDEDQKVRPNEENNKDADLYTSRVMLSSQVPLEPPLLFLLEEYKNYLDAANMSMRVRRHSDPARRGELSVCDSISEWVTAADKKTAVDMSGGTVTVLEKVPVSKGQLKQYFYETKCNPMGYTKEGCRGIDKRHWNSQCRTTQSYVRALTMDSKKRIGWRFIRIDTSCVCTLTIKRGR

SEQ ID NO: 1454 - protein, 77 aa, Homo Sapiens
MCGATSFLHECTRLILVTTQNAEFLQKGLQVHTCFGVYPHASVWHDCASQKKGCAVYLHVSVEFNKLIPENGFIKGW

SEQ ID NO: 1455 - protein, 255 aa, Homo Sapiens
MFHQVRRVMTILFLTMVISYFGCMKAAPMKEANIRGQGGLAYPGVRTHGTLESVNGPKAGSRGLTSLADTFEHVIEELLDEDQKVRPNEENNKDADLYTSRVMLSSQVPLEPPLLFLLEEYKNYLDAANMSMRVRRHSDPARRGELSVCDSISEWVTAADKKTAVDMSGGTVTVLEKVPVSKGQLKQYFYETKCNPMGYTKEGCRGIDKRHWNSQCRTTQSYVRALTMDSKKRIGWRFIRIDTSCVCTLTIKRGR

SEQ ID NO: 1456 - protein, 262 aa, Homo Sapiens
MQSREEEWFHQVRRVMTILFLTMVISYFGCMKAAPMKEANIRGQGGLAYPGVRTHGTLESVNGPKAGSRGLTSLADTFEHVIEELLDEDQKVRPNEENNKDADLYTSRVMLSSQVPLEPPLLFLLEEYKNYLDAANMSMRVRRHSDPARRGELSVCDSISEWVTAADKKTAVDMSGGTVTVLEKVPVSKGQLKQYFYETKCNPMGYTKEGCRGIDKRHWNSQCRTTQSYVRALTMDSKKRIGWRFIRIDTSCVCTLTIKRGR

SEQ ID NO: 1457 - protein, 247 aa, Homo Sapiens
MTILFLTMVISYFGCMKAAPMKEANIRGQGGLAYPGVRTHGTLESVNGPKAGSRGLTSLADTFEHVIEELLDEDQKVRPNEENNKDADLYTSRVMLSSQVPLEPPLLFLLEEYKNYLDAANMSMRVRRHSDPARRGELSVCDSISEWVTAADKKTAVDMSGGTVTVLEKVPVSKGQLKQYFYETKCNPMGYTKEGCRGIDKRHWNSQCRTTQSYVRALTMDSKKRIGWRFIRIDTSCVCTLTIKRGR

SEQ ID NO: 1458 - protein, 247 aa, Homo Sapiens; identical to SEQ ID NO: 1457

SEQ ID NO: 1459 - protein, 247 aa, Homo Sapiens; identical to SEQ ID NO: 1457

SEQ ID NO: 1460 - protein, 247 aa, Homo Sapiens; identical to SEQ ID NO: 1457

SEQ ID NO: 1461 - protein, 247 aa, Homo Sapiens; identical to SEQ ID NO: 1457

SEQ ID NO: 1462 - protein, 247 aa, Homo Sapiens; identical to SEQ ID NO: 1457

SEQ ID NO: 1463 - protein, 247 aa, Homo Sapiens; identical to SEQ ID NO: 1457

SEQ ID NO: 1464 - protein, 247 aa, Homo Sapiens; identical to SEQ ID NO: 1457

SEQ ID NO: 1465 - protein, 247 aa, Homo Sapiens; identical to SEQ ID NO: 1457

SEQ ID NO: 1466 - protein, 247 aa, Homo Sapiens; identical to SEQ ID NO: 1457

SEQ ID NO: 1467 - protein, 247 aa, Homo Sapiens; identical to SEQ ID NO: 1457

SEQ ID NO: 1468 - protein, 247 aa, Homo Sapiens; identical to SEQ ID NO: 1457

SEQ ID NO: 1469 - protein, 247 aa, Homo Sapiens; identical to SEQ ID NO: 1457

SEQ ID NO: 1470 - protein, 247 aa, Homo Sapiens; identical to SEQ ID NO: 1457

SEQ ID NO: 1471 - protein, 100 aa, Homo Sapiens
MRALTLLALLALAALCIAGQAGAKPSGAESSKGAAFVSKQEGSEVVKRPRRYLYQWLGAPVPYPDPLEPRREVCELNPDCDELADHIGFQEAYRRFYGPV

SEQ ID NO: 1472 - protein, 368 aa, Homo Sapiens
MWPLWRLVSLLALSQALPFEQRGFWDFTLDDGPFMMNDEEASGADTSGVLDPDSVTPTYSAMCPFGCHCHLRVVQCSDLGLKSVPKEISPDTTLLDLQNNDISELRKDDFKGLQHLYALVLVNNKISKIHEKAFSPLRKLQKLYISKNHLVEIPPNLPSSLVELRIHDNRIRKVPKGVFSGLRNMNCIEMGGNPLENSGFEPGAFDGLKLNYLRISEAKLTGIPKDLPETLNELHLDHNKIQAIELEDLLRYSKLYRLGLGHNQIRMIENGSLSFLPTLRELHLDNNKLARVPSGLPDLKLLQVVYLHSNNITKVGVNDFCPMGFGVKRAYYNGISLFNNPVPYWEVQPATFRCVTDRLAIQFGNYKK

SEQ ID NO: 1473 - protein, 238 aa, Homo Sapiens
MWPLWRLVSLLALSQALPFEQRGFWDFTLDDGPFMMNDEEASGADTSGVLDPDSVTPTYSAMCPFGCHCHLRVVQCSDLGLKSVPKEISPDTTLLDLQNNDISELRKDDFKGLQHLYVRSWEEPAGLQQRAGVRALVLVNNKISKIHEKAFSPLRKLQKLYISKNHLVEIPPNLPSSLVELRIHDNRIRKVPKGVFSGLRNMNCIEMGGNPLENSGFEPGAFDGLKLNYLRISEAKLT

SEQ ID NO: 1474 - protein, 121 aa, Homo Sapiens
MAVKKIAIFGATGQTGLTTLAQAVQAGYEVTVLVRDSSRLPSEGPRPAHVVVGDVLQAADVDKTVAGQDAVIVLLGTRNDLSPTTVMSEGARNIVAAMKAHGVDKLSCSGTLPRCPHDCRL

SEQ ID NO: 1475 - protein, 206 aa, Homo Sapiens
MAVKKIAIFGATGQTGLTTLAQAVQAGYEVTVLVRDSSRLPSEGPRPAHVVVGDVLQAADVDKTVAGQDAVIVLLGTRNDLSPTTVMSEGARNIVAAMKAHGVDKVVACTSAFLLWDPTKVPPRLQAVTDDHIRMHKVLRESGLKYVAVMPPHIGDQPLTGAYTVTLDGRGPSRVISKHDLGHFMLRCLTTDEYDGHSTYPSHQYQ

SEQ ID NO: 1476 - protein, 163 aa, Homo Sapiens
MAVKKIAIFGATGQTGLTTLAQAVQAGYEVTVLVRDSSRLPSEGPRPAHVVVGDVLQAADVDKTVAGQDAVIVLLGTRNDLSPTTVMSEGARNIVAAMKAHGVDKVVACTSGDQPLTGAYTVTLDGRGPSRVISKHDLGHFMLRCLTTDEYDGHSTYPSHQYQ

SEQ ID NO: 1477 - protein, 154 aa, Homo Sapiens
MAVKKIAIFGATGQTGLTTLAQAVQAGYEVTVLVRDSSRLPSEGPRPAHVVVGDVLQAADVDKTVAGQDAVIVLLGTRNDLSPTTVMSEGARNIVAAMKAHGVDKVVACTSGGWWDHGGGAELGGTGEAAQGPLKGDAEAIPCYCAFTEHQLCA

SEQ ID NO: 1478 - protein, 245 aa, Homo Sapiens
MAVKKIAIFGATGQTGLTTLAQAVQAGYEVTVLVRDSSRLPSEGPRPAHVVVGDVLQAADVDKTVAGQDAVIVLLGTRNDLSTEPPLCPRPSPTPRPPAPPPPPAPPLPPLPPPPPTSDSHSLSPLRSHDSDVRGRPEHCGSHEGSWCGQAFLLWDPTKVPPRLQAVTDDHIRMHKVLRESGLKYVAVMPPHIGDQPLTGAYTVTLDGRGPSRVISKHDLGHFMLRCLTTDEYDGHSTYPSHQYQ

SEQ ID NO: 1479 - protein, 730 aa, Homo Sapiens
MPGVARLPLLLGLLLLPRPGRPLDLADYTYDLAEEDDSEPLNYKDPCKAAAFLGDIALDEEDLRAFQVQQAVDLRRHTARKSSIKAAVPGNTSTPSCQSTNGQPQRGACGRWRGRSRSRRAATSRPERVWPDGVIPFVIGGNFTGSQRAVFRQAMRHWEKHTCVTFLERTDEDSYIVFTYRPCGCCSYVGRRGGGPQAISIGKNCDKFGIVVHELGHVVGFWHEHTRPDRDRHVSIVRENIQPGQEYNFLKMEPQEVESLGETYDFDSIMHYARNTFSRGIFLDTIVPKYEVNGVKPPIGQRTRLSKGDIAQARKLYKCPACGETLQDSTGNFSSPEYPNGYSAHMHCVWRISVTPGEKIILNFTSLDLYRSRLCWYDYVEVRDGFWRKAPLRGRFCGSKLPEPIVSTDSRLWVEFRSSSNWVGKGFFAVYEAICGGDVKKDYGHIQSPNYPDDYRPSKVCIWRIQVSEGFHVGLTFQSFEIERHDSCAYDYLEVRDGHSESSTLIGRYCGYEKPDDIKSTSSRLWLKFVSDGSINKAGFAVNFFKEVDECSRPNRGGCEQRCLNTLGSYKCSCDPGYELAPDKRRCEAACGGFLTKLNGSITSPGWPKEYPPNKNCIWQLVAPTQYRISLQFDFFETEGNDVCKYDFVEVRSGLTADSKLHGKFCGSEKPEVITSQYNNMRVEFKSDNTVSKKGFKAHFFSEKRPALQPPRGRPHQLKFRVQKRNRTPQ

SEQ ID NO: 1480 - protein, 986 aa, Homo Sapiens
MPGVARLPLLLGLLLLPRPGRPLDLADYTYDLAEEDDSEPLNYKDPCKAAAFLGDIALDEEDLRAFQVQQAVDLRRHTARKSSIKAAVPGNTSTPSCQSTNGQPQRGACGRWRGRSRSRRAATSRPERVWPDGVIPFVIGGNFTGSQRAVFRQAMRHWEKHTCVTFLERTDEDSYIVFTYRPCGCCSYVGRRGGGPQAISIGKNCDKFGIVVHELGHVVGFWHEHTRPDRDRHVSIVRENIQPGQEYNFLKMEPQEVESLGETYDFDSIMHYARNTFSRGIFLDTIVPKYEVNGVKPPIGQRTRLSKGDIAQARKLYKCPACGETLQDSTGNFSSPEYPNGYSAHMHCVWRISVTPGEKIILNFTSLDLYRSRLCWYDYVEVRDGFWRKAPLRGRFCGSKLPEPIVSTDSRLWVEFRSSSNWVGKGFFAVYEAICGGDVKKDYGHIQSPNYPDDYRPSKVCIWRIQVSEGFHVGLTFQSFEIERHDSCAYDYLEVRDGHSESSTLIGRYCGYEKPDDIKSTSSRLWLKFVSDGSINKAGFAVNFFKEVDECSRPNRGGCEQRCLNTLGSYKCSCDPGYELAPDKRRCEAACGGFLTKLNGSITSPGWPKEYPPNKNCIWQLVAPTQYRISLQFDFFETEGNDVCKYDFVEVRSGLTADSKLHGKFCGSEKPEVITSQYNNMRVEFKSDNTVSKKGFKAHFFSDKDECSKDNGGCQQDCVNTFGSYECQCRSGFVLHDNKHDCKEAGCDHKVTSTSGTITSPNWPDKYPSKKECTWAISSTPGHRVKLTFMEMDIESQPECAYDHLEVFDGRDAKAPVLGRFCGSKKPEPVLATGSRMFLRFYSDNSVQRKGFQASHATECGGQVRADVKTKDLYSHAQFGDNNYPGGVDCEWVIVAEEGYGVELVFQTFEVEEETDCGYDYMELFDGYDSTAPRLGRYCGSGPPEEVYSAGDSVLVKFHSDDTITKKGFHLRYTSTKFQDTLHSRK

SEQ ID NO: 1481 - protein, 622 aa, Homo Sapiens
MPGVARLPLLLGLLLLPRPGRPLDLADYTYDLAEEDDSEPLNYKDPCKAAAFLGDIALDEEDLRAFQVQQAVDLRRHTARKSSIKAAVPGNTSTPSCQSTNGQPQRGACGRWRGRSRSRRAATSRPERVWPDGVIPFVIGGNFTGSQRAVFRQAMRHWEKHTCVTFLERTDEDSYIVFTYRPCGCCSYVGRRGGGPQAISIGKNCDKFGIVVHELGHVVGFWHEHTRPDRDRHVSIVRENIQPGQEYNFLKMEPQEVESLGETYDFDSIMHYARNTFSRGIFLDTIVPKYEVNGVKPPIGQRTRLSKGDIAQARKLYKCPACGETLQDSTGNFSSPEYPNGYSAHMHCVWRISVTPGEKIILNFTSLDLYRSRLCWYDYVEVRDGFWRKAPLRGRFCGSKLPEPIVSTDSRLWVEFRSSSNWVGKGFFAVYEAICGGDVKKDYGHIQSPNYPDDYRPSKVCIWRIQVSEGFHVGLTFQSFEIERHDSCAYDYLEVRDGHSESSTLIGRYCGYEKPDDIKSTSSRLWLKFVSDGSINKAGFAVNFFKEVDECSRPNRGGCEQRCLNTLGSYKCSCDPGYELAPDKRRCEGCYDLQVGKPLLWDRHCFRLSTHGPEMLGTALRG

SEQ ID NO: 1482 - protein, 717 aa, Homo Sapiens
MPGVARLPLLLGLLLLPRPGRPLDLADYTYDLAEEDDSEPLNYKDPCKAAAFLGDIALDEEDLRAFQVQQAVDLRRHTARKSSIKAAVPGNTSTPSCQSTNGQPQRGACGRWRGRSRSRRAATSRPERVWPDGVIPFVIGGNFTGSQRAVFRQAMRHWEKHTCVTFLERTDEDSYIVFTYRPCGCCSYVGRRGGGPQAISIGKNCDKFGIVVHELGHVVGFWHEHTRPDRDRHVSIVRENIQPGQEYNFLKMEPQEVESLGETYDFDSIMHYARNTFSRGIFLDTIVPKYEVNGVKPPIGQRTRLSKGDIAQARKLYKCPACGETLQDSTGNFSSPEYPNGYSAHMHCVWRISVTPGEKIILNFTSLDLYRSRLCWYDYVEVRDGFWRKAPLRGRFCGSKLPEPIVSTDSRLWVEFRSSSNWVGKGFFAVYEAICGGDVKKDYGHIQSPNYPDDYRPSKVCIWRIQVSEGFHVGLTFQSFEIERHDSCAYDYLEVRDGHSESSTLIGRYCGYEKPDDIKSTSSRLWLKFVSDGSINKAGFAVNFFKEVDECSRPNRGGCEQRCLNTLGSYKCSCDPGYELAPDKRRCEAACGGFLTKLNGSITSPGWPKEYPPNKNCIWQLVAPTQYRISLQFDFFETEGNDVCKYDFVEVRSGLTADSKLHGKFCGSEKPEVITSQYNNMRVEFKSDNTVSKKGFKAHFFSGGELFGLLGHPPRRP

SEQ ID NO: 1483 - protein, 730 aa, Homo Sapiens; identical to SEQ ID NO: 1479

SEQ ID NO: 1484 - protein, 302 aa, Homo Sapiens
MPGVARLPLLLGLLLLPRPGRPLDLADYTYDLAEEDDSEPLNYKDPCKAAAFLGDIALDEEDLRAFQVQQAVDLRRHTARKSSIKAAVPGNTSTPSCQSTNGQPQRGACGRWRGRSRSRRAATSRPERVWPDGVIPFVIGGNFTGSQRAVFRQAMRHWEKHTCVTFLERTDEDSYIVFTYRPCGCCSYVGRRGGGPQAISIGKNCDKFGIVVHELGHVVGFWHEHTRPDRDRHVSIVRENIQPGVLHSSLLLLSCGSRNGASFPCSLESSIHQALCWTGLFLRPSPFPRLPLAAPRTLRAGV

SEQ ID NO: 1485 - protein, 302 aa, Homo Sapiens; identical to SEQ ID NO: 1484

SEQ ID NO: 1486 - protein, 189 aa, Homo Sapiens
MPGVARLPLLLGLLLLPRPGRPLDLADYTYDLAEEDDSEPLNYKDPCKAAAFLGDIALDEEDLRAFQVQQAVDLRRHTARKSSIKAAVPGNTSTPSCQSTNGQPQRGACGRWRGRSRSRRAATSRPERVWPDGVIPFVIGGNFTGSQRAVFRQAMRHWEKHTCVTFLERTDEDSYIVFTYRPCGSGPPP

SEQ ID NO: 1487 - protein, 189 aa, Homo Sapiens; identical to SEQ ID NO: 1486

SEQ ID NO: 1488 - protein, 189 aa, Homo Sapiens; identical to SEQ ID NO: 1486

SEQ ID NO: 1489 - protein, 189 aa, Homo Sapiens; identical to SEQ ID NO: 1486

SEQ ID NO: 1490 - protein, 61 aa, Homo Sapiens
MPGVARLPLLLGLLLLPRPGRPLDLADYTYDLAEEDDSEPLNYKDPCKLPFLGTLPWTKRT

SEQ ID NO: 1491 - protein, 424 aa, Homo Sapiens
MGSLVLTLCALFCLAAYLVSGSPIMNLEQSPLEEDMSLFGDVFSEQDGVDFNTLLQSMKDEFLKTLNLSDIPTQDSAKVDPPEYMLELYNKFATDRTSMPSANIIRSFKNEDLFSQPVSFNGLRKYPLLFNVSIPHHEEVIMAELRLYTLVQRDRMIYDGVDRKITIFEVLESKGDNEGERNMLVLVSGEIYGTNSEWETFDVTDAIRRWQKSGSSTHQLEVHIESKHDEAEDASSGRLEIDTSAQNKHNPLLIVFSDDQSSDKERKEELNEMISHEQLPELDNLGLDSFSSGPGEEALLQMRSNIIYDSTARIRRNAKGNYCKRTPLYIDFKEIGWDSWIIAPPGYEAYECRGVCNYPLAEHLTPTKHAIIQALVHLKNSQKASKACCVPTKLEPISILYLDKGVVTYKFKYEGMAVSECGCR

SEQ ID NO: 1492 - protein, 392 aa, Homo Sapiens
MVLLSILRILFLCELVLFMEHRAQMAEGGQSSIALLAEAPTLPLIEELLEESPGEQPRKPRLLGHSLRYMLELYRRSADSHGHPRENRTIGATMVRLVKPLTNVARPHRGTWHIQILGFPLRPNRGLYQLVRATVVYRHHLQLTRFNLSCHVEPWVQKNPTNHFPSSEGDSSKPSLMSNAWKEMDITQLVQQRFWNNKGHRILRLRFMCQQQKDSGGLELWHGTSSLDIAFLLLYFNDTHKSIRKAKFLPRGMEEFMERESLLRRTRQADGISAEVTASSSKHSGPENNQCSLHPFQISFRQLGWDHWIIAPPFYTPNYCKGTCLRVLRDGLNSPNHAIIQNLINQLVDQSVPRPSCVPYKYVPISVLMIEANGSILYKEYEGMIAESCTCR

SEQ ID NO: 1493 - protein, 396 aa, Homo Sapiens
MVAGTRCLLALLLPQVLLGGAAGLVPELGRRKFAAASSGRPSSQPSDEVLSEFELRLLSMFGLKQRPTPSRDAVVPPYMLDLYRRHSGQPGSPAPDHRLERAASRANTVRSFHHEESLEELPETSGKTTRRFFFNLSSIPTEEFITSAELQVFREQMQDALGNNSSFHHRINIYEIIKPATANSKFPVTRLLDTRLVNQNASRWESFDVTPAVMRWTAQGHANHGFVVEVAHLEEKQGVSKRHVRISRSLHQDEHSWSQIRPLLVTFGHDGKGHPLHKREKRQAKHKQRKRLKSSCKRHPLYVDFSDVGWNDWIVAPPGYHAFYCHGECPFPLADHLNSTNHAIVQTLVNSVNSKIPKACCVPTELSAISMLYLDENEKVVLKNYQDMVVEGCGCR

SEQ ID NO: 1494 - protein, 472 aa, Homo Sapiens
MAGASRLLFLWLGCFCVSLAQGERPKPPFPELRKAVPGDRTAGGGPDSELQPQDKVSEHMLRLYDRYSTVQAARTPGSLEGGSQPWRPRLLREGNTVRSFRAAAAETLERKGLYIFNLTSLTKSENILSATLYFCIGELGNISLSCPVSGGCSHHAQRKHIQIDLSAWTLKFSRNQSQLLGHLSVDMAKSHRDIMSWLSKDITQLLRKAKENEEFLIGFNITSKGRQLPKRRLPFPEPYILVYANDAAISEPESVVSSLQGHRNFPTGTVPKWDSHIRAALSIERRKKRSTGVLLPLQNNELPGAEYQYKKDEVWEERKPYKTLQAQAPEKSKNKKKQRKGPHRKSQTLQFDEQTLKKARRKQWIEPRNCARRYLKVDFADIGWSEWIISPKSFDAYYCSGACQFPMPKSLKPSNHATIQSIVRAVGVVPGIPEPCCVPEKMSSLSILFFDENKNVVLKVYPNMTVESCACR

SEQ ID NO: 1495 - protein, 104 aa, Homo Sapiens
LIPETGKKKVAEIQGHAGGRRSGQSHELLRDFEATLLQMFGLRRRPQPSKSAVIPDYMRDLYRLQSGEEEEEQIHSTGLEYPERPASRANTVRSFHHEASLRTR

SEQ ID NO: 1496 - protein, 271 aa, Homo Sapiens
MFGLRRRPQPSKSAVIPDYMRDLYRLQSGEEEEEQIHSTGLEYPERPASRANTVRSFHHEEHLENIPGTSENSAFRFLFNLSSIPENEVISSAELRLFREQVDQGPDWERGFHRINIYEVMKPPAEVVPGHLITRLLDTRLVHHNVTRWETFDVSPAVLRWTREKQPNYGLAIEVTHLHQTRTHQGQHVRISRSLPQGSGNWAQLRPLLVTFGHDGRGHALTRRRRAKRSPKHHSQRARKKNKNCRRHSLYVDFSDVGWNDWIVAPPGYQA

SEQ ID NO: 1497 - protein, 110 aa, Homo Sapiens
MIPGNRMLMVVLLCQVLLGGASHASLIPETGKKKVAEIQGHAGGRRSGQSHELLRDFEATLLQMFGLRRRPQPSKSAVIPDYMRDLYRLQSGEEEEEQIHSTGLEYPERP

SEQ ID NO: 1498 - protein, 408 aa, Homo Sapiens
MIPGNRMLMVVLLCQVLLGGASHASLIPETGKKKVAEIQGHAGGRRSGQSHELLRDFEATLLQMFGLRRRPQPSKSAVIPDYMRDLYRLQSGEEEEEQIHSTGLEYPERPASRANTVRSFHHEEHLENIPGTSENSAFRFLFNLSSIPENEVISSAELRLFREQVDQGPDWERGFHRINIYEVMKPPAEVVPGHLITRLLDTRLVHHNVTRWETFDVSPAVLRWTREKQPNYGLAIEVTHLHQTRTHQGQHVRISRSLPQGSGNWAQLRPLLVTFGHDGRGHALTRRRRAKRSPKHHSQRARKKNKNCRRHSLYVDFSDVGWNDWIVAPPGYQAFYCHGDCPFPLADHLNSTNHAIVQTLVNSVNSSIPKACCVPTELSAISMLYLDEYDKVVLKNYQEMVVEGCGCR

SEQ ID NO: 1499 - protein, 408 aa, Homo Sapiens; identical to SEQ ID NO: 1498

SEQ ID NO: 1500 - protein, 408 aa, Homo Sapiens; identical to SEQ ID NO: 1498

SEQ ID NO: 1501 - protein, 408 aa, Homo Sapiens; identical to SEQ ID NO: 1498

SEQ ID NO: 1502 - protein, 29 aa, Homo Sapiens
NTVRSFHHEGQSLPPVCVGEGWWDWLEGQ

SEQ ID NO: 1503 - protein, 513 aa, Homo Sapiens
MPGLGRRAQWLCWWWGLLCSCCGPPPLRPPLPAAAAAAAGGQLLGDGGSPGRTEQPPPSPQSSSGFLYRRLKTQEKREMQKEILSVLGLPHRPRPLHGLQQPQPPALRQQEEQQQQQQLPRGEPPPGRLKSAPLFMLDLYNALSADNDEDGASEGERQQSWPHEAASSSQRRQPPPGAAHPLNRKSLLAPGSGSGGASPLTSAQDSAFLNDADMVMSFVNLVEYDKEFSPRQRHHKEFKFNLSQIPEGEVVTAAEFRIYKDCVMGSFKNQTFLISIYQVLQEHQHRDSDLFLLDTRVVWASEEGWLEFDITATSNLWVVTPQHNMGLQLSVVTRDGVHVHPRAAGLVGRDGPYDKQPFMVAFFKVSEVHVRTTRSASSRRRQQSRNRSTQSQDVARVSSASDYNSSELKTACRKHELYVSFQDLGWQDWIIAPKGYAANYCDGECSFPLNAHMNATNHAIVQTLVHLMNPEYVPKPCCAPTKLNAISVLYFDDNSNVILKKYRNMVVRACGCH

SEQ ID NO: 1504 - protein, 365 aa, Homo Sapiens
MHVRSLRAAAPHSFVALWAPLFLLRSALADFSLDNEVHSSFIHRRLRSQERREMQREILSILGLPHRPRPHLQGKHNSAPMFMLDLYNAMAVEEGGGPGGQGFSYPYKAVFSTQGPPLASLQDSHFLTDADMVMSFVNLVEHDKEFFHPRYHHREFRFDLSKIPEGEAVTAAEFRIYKDYIRERFDNETFRISVYQVLQEHLGRESDLFLLDSRTLWASEEGWLVFDITATSNHWVVNPRHNLGLQLSVETLDENSSSDQRQACKKHELYVSFRDLGWQDWIIAPEGYAAYYCEGECAFPLNSYMNATNHAIVQTLVHFINPETVPKPCCAPTQLNAISVLYFDDSSNVILKKYRNMVVRACGCH

SEQ ID NO: 1505 - protein, 431 aa, Homo Sapiens
MHVRSLRAAAPHSFVALWAPLFLLRSALADFSLDNEVHSSFIHRRLRSQERREMQREILSILGLPHRPRPHLQGKHNSAPMFMLDLYNAMAVEEGGGPGGQGFSYPYKAVFSTQGPPLASLQDSHFLTDADMVMSFVNLVEHDKEFFHPRYHHREFRFDLSKIPEGEAVTAAEFRIYKDYIRERFDNETFRISVYQVLQEHLGRESDLFLLDSRTLWASEEGWLVFDITATSNHWVVNPRHNLGLQLSVETLDGQSINPKLAGLIGRHGPQNKQPFMVAFFKATEVHFRSIRSTGSKQRSQNRSKTPKNQEALRMANVAENSSSDQRQACKKHELYVSFRDLGWQDWIIAPEGYAAYYCEGECAFPLNSYMNATNHAIVQTLVHFINPETVPKPCCAPTQLNAISVLYFDDSSNVILKKYRNMVVRACGCH

SEQ ID NO: 1506 - protein, 412 aa, Homo Sapiens
MHVRSLRAAAPHSFVALWAPLFLLRSALADFSLDNEVHSSFIHRRLRSQERREMQREILSILGLPHRPRPHLQGKHNSAPMFMLDLYNAMAVEEGGGPGGQGFSYPYKAVFSTQGPPLASLQDSHFLTDADMVMSFVNLVEHDKEFFHPRYHHREFRFDLSKIPEGEAVTAAEFRIYKDYIRERFDNETFRISVYQVLQEHLGRESDLFLLDSRTLWASEEGWLVFDITATSNHWVVNPRHNLGLQLSVETLDGQSINPKLAGLIGRHGPQNKQPFMVAFFKATEVHFRSIRSTGSKQRSQNRSKTPKNQEALRMANVAENSSSDQRQACKKHELYVSFRDLGWQDWIIAPEGYAAYYCEGECAFPLNSYMNATNHAIVQTLVGVTPSWGVVTWAGQAAGPPDPAASKLGPE

SEQ ID NO: 1507 - protein, 297 aa, Homo Sapiens
  misc_feature (1)..(1): Xaa can be any naturally occurring amino acid
XPPLASLQDSHFLTDADMVMSFVNLVEHDKEFFHPRYHHREFRFDLSKIPEGEAVTAAEFRIYKDYIRERFDNETFRISVYQVLQEHLGSTGTCCMPCLRASTRTNQTRVPALWKLTFQQRRGHGRESDLFLLDSRTLWASEEGWLVFDITATSNHWVVNPRHNLGLQLSVETLDGQSINPKLAGLIGRHGPQNKQPFMVAFFKATEVHFRSIRSTGSKQRSQNRSKTPKNQEALRMANVAENSSSDQRQACKKHELYVSFRDLGWQDWIIAPEGYAAYYCEGECAFPLNSYMNATN

SEQ ID NO: 1508 - protein, 402 aa, Homo Sapiens
MAARPGPLWLLGLTLCALGGGGPGLRPPPGCPQRRLGARERRDVQREILAVLGLPGRPRPRAPPAASRLPASAPLFMLDLYHAMAGDDDEDGAPAEQRLGRADLVMSFVNMVERDRALGHQEPHWKEFRFDLTQIPAGEAVTAAEFRIYKVPSIHLLNRTLHVSMFQVVQEQSNRESDLFFLDLQTLRAGDEGWLVLDVTAASDCWLLKRHKDLGLRLYVETEDGHSVDPGLAGLLGQRAPRSQQPFVVTFFRASPSPIRTPRAVRPLRRRQPKKSNELPQANRLPGIFDDVRGSHGRQVCRRHELYVSFQDLGWLDWVIAPQGYSAYYCEGECSFPLDSCMNATNHAILQSLVHLMKPNAVPKACCAPTKLSATSVLYYDSSNNVILRKHRNMVVKACGCH

SEQ ID NO: 1509 - protein, 402 aa, Homo Sapiens
MTALPGPLWLLGLALCALGGGGPGLRPPPGCPQRRLGARERRDVQREILAVLGLPGRPRPRAPPAASRLPASAPLFMLDLYHAMAGDDDEDGAPAERRLGRADLVMSFVNMVERDRALGHQEPHWKEFRFDLTQIPAGEAVTAAEFRIYKVPSIHLLNRTLHVSMFQVVQEQSNRESDLFFLDLQTLRAGDEGWLVLDVTAASDCWLLKRHKDLGLRLYVETEDGHSVDPGLAGLLGQRAPRSQQPFVVTFFRASPSPIRTPRAVRPLRRRQPKKSNELPQANRLPGIFDDVHGSHGRQVCRRHELYVSFQDLGWLDWVIAPQGYSAYYCEGECSFPLDSCMNATNHAILQSLVHLMMPDAVPKACCAPTKLSATSVLYYDSSNNVILRKHRNMVVKACGCH

SEQ ID NO: 1510 - protein, 90 aa, Homo Sapiens
MLWFSGVGALAERYCRRSPGITCCVLLLLNCSGVPMSLASSFLTGSVAKCENEGEVLQIPFITDNPCIMCVCLHEPTRWSNLTQNPGFYD

SEQ ID NO: 1511 - protein, 685 aa, Homo Sapiens
MLWFSGVGALAERYCRRSPGITCCVLLLLNCSGVPMSLASSFLTGSVAKCENEGEVLQIPFITDNPCIMCVCLNKEVTCKREKCPVLSRDCALAIKQRGACCEQCKGCTYEGNTYNSSFKWQSPAEPCVLRQCQEGVVTESGVRCVVHCKNPLEHLGMCCPTCPGCVFEGVQYQEGEEFQPEGSKCTKCSCTGGRTQCVREVCPILSCPQHLSHIPPGQCCPKCLGQRKVFDLPFGSCLFRSDVYDNGSSFLYDNCTACTCRDSTVVCKRKCSHPGGCDQGQEGCCEECLLRVPPEDIKVCKFGNKIFQDGEMWSSINCTICACVKGRTECRNKQCIPISSCPQGKILNRKGCCPICTEKPGVCTVFGDPHYNTFDGRTFNFQGTCQYVLTKDCSSPASPFQVLVKNDARRTRSFSWTKSVELVLGESRVSLQQHLTVRWNGSRIALPCRAPHFHIDLDGYLLKVTTKAGLEISWDGDSFVEVMAAPHLKGKLCGLCGNYNGHKRDDLIGGDGNFKFDVDDFAESWRVESNEFCNRPQRKPVPELCQGTVKVKLRAHRECQKLKSWEFQTCHSTVDYATFYRSCVTDMCECPVHKNCYCESFLAYTRACQREGIKVHWEPQQNCAATQCKHGAVYDTCGPGCIKTCDNWNEIGPCNKPCVAGCHCPANLVLHKGRCIKPVLCPQR

SEQ ID NO: 1512 - protein, 133 aa, Homo Sapiens
MLWFSGVGALAERYCRRSPGITCCVLLLLNCSGVPMSLASSFLTGSVAKCENEGEVLQIPFITDNPCIMCVCLNKEVTCKREKCPVLSRDCALAIKQRGACCEQCKVLVSRVLRDTVLFTLKYWRLPVFWLHL

SEQ ID NO: 1513 - protein, 161 aa, Homo Sapiens
MLWFSGVGALAERYCRRSPGITCCVLLLLNCSGVPMSLASSFLTGSVAKCENEGEVLQIPFITDNPCIMCVCLVAPMKEIPITAPSNGRARLSLVFYASARRALSQSLGCAVLFIVKTLWSIWECAAPHVQAVCLRVCSIKKGRNFSQKEANVPSVPALEA

SEQ ID NO: 1514 - protein, 987 aa, Homo Sapiens
MRCRNMFFSFKASLCGCGAATAPSLTAISCTLNCSCQSFKPGKINHRQCDQCKHGWVAHALSKLRIPPMYPTSQVEIVQSNVVFDISSLMLYGTQAIPVRLKILLDRLFSVLKQDEVLQILHALDWTLQDYIRGYVLQDASGKVLDHWSIMTSEEEVATLQQFLRFGETKSIVELMAIQEKEEQSIIIPPSTANVDIRAFIESCSHRSSSLPTPVDKGNPSSIHPFENLISNMTFMLPFQFFNPLPPALIGSLPEQYMLEQGHDQSQDPKQEVHGPFPDSSFLTSSSTPFQVEKDQCLNCPDAITKKEDSTHLSDSSSYNIVTKFERTQLSPEAKVKPERNSLGTKKGRVFCTACEKTFYDKGTLKIHYNAVHLKIKHKCTIEGCNMVFSSLRSRNRHSANPNPRLHMPMNRNNRDKDLRNSLNLASSENYKCPGFTVTSPDCRPPPSYPGSGEDSKGQPAFPNIGQNGVLFPNLKTVQPVLPFYRSPATPAEVANTPGILPSLPLLSSSIPEQLISNEMPFDALPKKKSRKSSMPIKIEKEAVEIANEKRHNLSSDEDMPLQVVSEDEQEACSPQSHRVSEEQHVQSGGLGKPFPEGERPCHRESVIESSGAISQTPEQATHNSERETEQTPALIMVPREVEDGGHEHYFTPGMEPQVPFSDYMELQQRLLAGGLFSALSNRGMAFPCLEDSKELEHVGQHALARQIEENRFQCDICKKTFKNACSVKIHHKNMHVKEMHTCTVEGCNATFPSRRSRDRHSSNLNLHQKALSQEALESSEDHFRAAYLLKDVAKEAYQDVAFTQQASQTSVIFKGTSRMGSLVYPITQVHSASLESYNSGPLSEGTILDLSTTSSMKSESSSHSSWDSDGVSEEGTVLMEDSDGNCEGSSLVPGEDEYPICVLMEKADQSLASLPSGLPITCHLCQKTYSNKGTFRAHYKTVHLRQLHKCKVPGCNTMFSSVRSRNRHSQNPNLHKSLASSPSHLQ

SEQ ID NO: 1515 - protein, 994 aa, Homo Sapiens
MRRRPPSRGGRGAARARETRRQPRHRSGRRMAEAISCTLNCSCQSFKPGKINHRQCDQCKHGWVAHALSKLRIPPMYPTSQVEIVQSNVVFDISSLMLYGTQAIPVRLKILLDRLFSVLKQDEVLQILHALDWTLQDYIRGYVLQDASGKVLDHWSIMTSEEEVATLQQFLRFGETKSIVELMAIQEKEEQSIIIPPSTANVDIRAFIESCSHRSSSLPTPVDKGNPSSIHPFENLISNMTFMLPFQFFNPLPPALIGSLPEQYMLEQGHDQSQDPKQEVHGPFPDSSFLTSSSTPFQVEKDQCLNCPDAITKKEDSTHLSDSSSYNIVTKFERTQLSPEAKVKPERNSLGTKKGRVFCTACEKTFYDKGTLKIHYNAVHLKIKHKCTIEGCNMVFSSLRSRNRHSANPNPRLHMPMNRNNRDKDLRNSLNLASSENYKCPGFTVTSPDCRPPPSYPGSGEDSKGQPAFPNIGQNGVLFPNLKTVQPVLPFYRSPATPAEVANTPGILPSLPLLSSSIPEQLISNEMPFDALPKKKSRKSSMPIKIEKEAVEIANEKRHNLSSDEDMPLQVVSEDEQEACSPQSHRVSEEQHVQSGGLGKPFPEGERPCHRESVIESSGAISQTPEQATHNSERETEQTPALIMVPREVEDGGHEHYFTPGMEPQVPFSDYMELQQRLLAGGLFSALSNRGMAFPCLEDSKELEHVGQHALARQIEENRFQCDICKKTFKNACSVKIHHKNMHVKEMHTCTVEGCNATFPSRRSRDRHSSNLNLHQKALSQEALESSEDHFRAAYLLKDVAKEAYQDVAFTQQASQTSVIFKGTSRMGSLVYPITQVHSASLESYNSGPLSEGTILDLSTTSSMKSESSSHSSWDSDGVSEEGTVLMEDSDGNCEGSSLVPGEDEYPICVLMEKADQSLASLPSGLPITCHLCQKTYSNKGTFRAHYKTVHLRQLHKCKVPGCNTMFSSVRSRNRHSQNPNLHKSLASSPSHLQ

SEQ ID NO: 1516 - protein, 22 aa, Homo Sapiens
MLRGTMTAWRGMRPEVTLACLL

SEQ ID NO: 1517 - protein, 32 aa, Homo Sapiens
MLRGTMTAWRGMRPEVTLACLLLATAGCFADL

SEQ ID NO: 1518 - protein, 85 aa, Homo Sapiens
MLRGTMTAWRGMRPEVTLACLLLATAGCFADLNEVPQVTVQPASTVQKPGGTVILGCVVEPPRMNVTWRLNGKELNGSDDALGVL

SEQ ID NO: 1519 - protein, 1115 aa, Homo Sapiens
MLRGTMTAWRGMRPEVTLACLLLATAGCFADLNEVPQVTVQPASTVQKPGGTVILGCVVEPPRMNVTWRLNGKELNGSDDALGVLITHGTLVITALNNHTVGRYQCVARMPAGAVASVPATVTLANLQDFKLDVQHVIEVDEGNTAVIACHLPESHPKAQVRYSVKQEWLEASRGNYLIMPSGNLQIVNASQEDEGMYKCAAYNPVTQEVKTSGSSDRLRVRRSTAEAARIIYPPEAQTIIVTKGQSLILECVASGIPPPRVTWAKDGSSVTGYNKTRFLLSNLLIDTTSEEDSGTYRCMADNGVGQPGAAVILYNVQVFEPPEVTMELSQLVIPWGQSAKLTCEVRGNPPPSVLWLRNAVPLISSQRLRLSRRALRVLSMGPEDEGVYQCMAENEVGSAHAVVQLRTSRPSITPRLWQDAELATGTPPVSPSKLGNPEQMLRGQPALPRPPTSVGPASPQCPGEKGQGAPAEAPIILSSPRTSKTDSYELVWRPRHEGSGRAPILYYVVKHRKQVTNSSDDWTISGIPANQHRLTLTRLDPGSLYEVEMAAYNCAGEGQTAMVTFRTGRRPKPEIMASKEQQIQRDDPGASPQSSSQPDHGRLSPPEAPDRPTISTASETSVYVTWIPRGNGGFPIQSFRVEYKKLKKVGDWILATSAIPPSRLSVEITGLEKGTSYKFRVRALNMLGESEPSAPSRPYVVSGYSGRVYERPVAGPYITFTDAVNETTIMLKWMYIPASNNNTPIHGFYIYYRPTDSDNDSDYKKDMVEGDKYWHSISHLQPETSYDIKMQCFNEGGESEFSNVMICETKARKSSGQPGRLPPPTLAPPQPPLPETIERPVGTGAMVARSSDLPYLIVGVVLGSIVLIIVTFIPFCLWRAWSKQKHTTDLGFPRSALPPSCPYTMVPLGGLPGHQASGQPYLSGISGRACANGIHMNRGCPSAAVGYPGMKPQQHCPGELQQQSDTSSLLRQTHLGNGYDPQSHQITRGPKSSPDEGSFLYTLPDDSTHQLLQPHHDCCQRQEQPAAVGQSGVRRAPDSPVLEAVWDPPFHSGPPCCLGLVPVEEVDSPDSCQVSGGDWCPQHPVGAYVGQEPGMQLSPGPLVRVSFETPPLTI

SEQ ID NO: 1520 - protein, 1114 aa, Homo Sapiens
MLRGTMTAWRGMRPEVTLACLLLATAGCFADLNEVPQVTVQPASTVQKPGGTVILGCVVEPPRMNVTWRLNGKELNGSDDALGVLITHGTLVITALNNHTVGRYQCVARMPAGAVASVPATVTLANLQDFKLDVQHVIEVDEGNTAVIACHLPESHPKAQVRYSVKQEWLEASRGNYLIMPSGNLQIVNASQEDEGMYKCAAYNPVTQEVKTSGSSDRLRVRRSTAEAARIIYPPEAQTIIVTKGQSLILECVASGIPPPRVTWAKDGSSVTGYNKTRFLLSNLLIDTTSEEDSGTYRCMADNGVGQPGAAVILYNVQVFEPPEVTMELSQLVIPWGQSAKLTCEVRGNPPPSVLWLRNAVPLISSQRLRLSRRALRVLSMGPEDEGVYQCMAENEVGSAHAVVQLRTSRPSITPRLWQDAELATGTPPVSPSKLGNPEQMLRGQPALPRPPTSVGPASPQCPGEKGQGAPAEAPIILSSPRTSKTDSYELVWRPRHEGSGRAPILYYVVKHRKVTNSSDDWTISGIPANQHRLTLTRLDPGSLYEVEMAAYNCAGEGQTAMVTFRTGRRPKPEIMASKEQQIQRDDPGASPQSSSQPDHGRLSPPEAPDRPTISTASETSVYVTWIPRGNGGFPIQSFRVEYKKLKKVGDWILATSAIPPSRLSVEITGLEKGTSYKFRVRALNMLGESEPSAPSRPYVVSGYSGRVYERPVAGPYITFTDAVNETTIMLKWMYIPASNNNTPIHGFYIYYRPTDSDNDSDYKKDMVEGDKYWHSISHLQPETSYDIKMQCFNEGGESEFSNVMICETKARKSSGQPGRLPPPTLAPPQPPLPETIERPVGTGAMVARSSDLPYLIVGVVLGSIVLIIVTFIPFCLWRAWSKQKHTTDLGFPRSALPPSCPYTMVPLGGLPGHQASGQPYLSGISGRACANGIHMNRGCPSAAVGYPGMKPQQHCPGELQQQSDTSSLLRQTHLGNGYDPQSHQITRGPKSSPDEGSFLYTLPDDSTHQLLQPHHDCCQRQEQPAAVGQSGVRRAPDSPVLEAVWDPPFHSGPPCCLGLVPVEEVDSPDSCQVSGGDWCPQHPVGAYVGQEPGMQLSPGPLVRVSFETPPLTI

SEQ ID NO: 1521 - protein, 1114 aa, Homo Sapiens; identical to SEQ ID NO: 1520

SEQ ID NO: 1522 - protein, 157 aa, Homo Sapiens
MLRGTMTAWRGMRPEVTLACLLLATAGCFADLNEVPQVTVQPASTVQKPGGTVILGCVVEPPRMNVTWRLNGKELNGSDDALGVLITHGTLVITALNNHTVGRYQCVARMPAGAVASVPATVTLASESAPLPPCHGAVPPHLSHPEAPTIHAASCYS

SEQ ID NO: 1523 - protein, 157 aa, Homo Sapiens; identical to SEQ ID NO: 1522

SEQ ID NO: 1524 - protein, 65 aa, Homo Sapiens
MTHEVLSTFIPSEGSSSKVEEVDLQDFKLDVQHVIEVDEGNTAVIACHLPESHPKAQVRYSVKQE

SEQ ID NO: 1525 - protein, 39 aa, Homo Sapiens
  misc_feature (1)..(1): Xaa can be any naturally occurring amino acid
XQQQSDTSSLLRQTHLGNGYDPQSHQITRAPMLLGPCAS

SEQ ID NO: 1526 - protein, 84 aa, Homo Sapiens
  misc_feature (1)..(1): Xaa can be any naturally occurring amino acid
XRACANGIHMNRGCPSAAVGYPGMKPQQHCPGELQQQSDTSSLLRQTHLGNGYDPQSHQITSCCSPITTAANARSSLLLWASQG

SEQ ID NO: 1527 - protein, 85 aa, Homo Sapiens
MADGGGGGGTGAVGGGGTSQASAGAATGATGASGGGGPINPASLPPGDPQLIALIVEQLKSRGLFDSFRRDCLADVDTKNTPDTF

SEQ ID NO: 1528 - protein, 129 aa, Homo Sapiens
MADGGGGGGTGAVGGGGTSQASAGAATGATGASGGGGPINPASLPPGDPQLIALIVEQLKSRGLFDSFRRDCLADVDTKPAYQNLRQKVDNFVSTHLDKQEWNPTMNKNQLRNGLRQSVVQIRQTPFES

SEQ ID NO: 1529 - protein, 185 aa, Homo Sapiens
MADGGGGGGTGAVGGGGTSQASAGAATGATGASGGGGPINPASLPPGDPQLIALIVEQLKSRGLFDSFRRDCLADVDTKPAYQNLRQKVDNFVSTHLDKQEWNPTMNKNQLRNGLRQSVVQSGMLEAGVDRIISQVVDPKLNHIFRPQIERAIHEFLAAQKKAAVPAPPPEPEGQDPPAPSQDTS

SEQ ID NO: 1530 - protein, 42 aa, Homo Sapiens
MNKNQLRNGLRQSVVQSGMLEAGVDRIISQVVDPKLNHIFRP

SEQ ID NO: 1531 - protein, 118 aa, Homo Sapiens
  misc_feature (1)..(1): Xaa can be any naturally occurring amino acid
XLALLGPAGAVAPSTRPRCLPATRSSSLSSWSSSRAGAFLTASAGTAWPTWTPRSGMLEAGVDRIISQVVDPKLNHIFRPQIERAIHEFLAAQKKAAVPAPPPEPEGQDPPAPSQDTS

SEQ ID NO: 1532 - protein, 137 aa, Homo Sapiens
MLSGRLVLGLVSMAGRVCLCQGSAGSGAIGPVEAAIRTKLEEALSPEVLELRNESGGHAVPPGSETHFRVAVVSSRFEGLSPLQRHRLVHAALAEELGGPVHALAIQARTPAQWRENSQLDTSPPCLGGNKKTLGTP

SEQ ID NO: 1533 - protein, 137 aa, Homo Sapiens; identical to SEQ ID NO: 1532

SEQ ID NO: 1534 - protein, 137 aa, Homo Sapiens; identical to SEQ ID NO: 1532

SEQ ID NO: 1535 - protein, 55 aa, Homo Sapiens
MENVCEKVTNSVSSELQPYFQTLPVMTKIDSVAGINYGLVAPPATTAETLDVQMK

SEQ ID NO: 1536 - protein, 286 aa, Homo Sapiens
MENVCEKVTNSVSSELQPYFQTLPVMTKIDSVAGINYGLVAPPATTAETLDVQMKGEFYSENHHNPPPFAPPVMEFPAAHDRMVYLGLSDYFFNTAGLVYQEAGVLKMTLRDDMIPKESKFRLTTKFFGTFLPEVAKKFPNMKIQIHVSASTPPHLSVQPTGLTFYPAVDVQAFAVLPNSSLASLFLIGMHTTGSMEVSAESNRLVGELKLDRLLLELKHSNIGPFPVELLQDIMNYIVPILVLPRVNEKLQKGFPLPTPARVQLYNVVLQPHQNFLLFGADVVYK

SEQ ID NO: 1537 - protein, 487 aa, Homo Sapiens
MRENMARGPCNAPRWASLMVLVAIGTAVTAAVNPGVVVRISQKGLDYASQQGTAALQKELKRIKIPDYSDSFKIKHLGKGHYSFYSMDIREFQLPSSQISMVPNVGLKFSISNANIKISGKWKAQKRFLKMSGNFDLSIEGMSISADLKLGSNPTSGKPTITCSSCSSHINSVHVHISKSKVGWLIQLFHKKIESALRNKMNSQVCEKVTNSVSSELQPYFQTLPVMTKIDSVAGINYGLVAPPATTAETLDVQMKGEFYSENHHNPPPFAPPVMEFPAAHDRMVYLGLSDYFFNTAGLVYQEAGVLKMTLRDDMIPKESKFRLTTKFFGTFLPEVAKKFPNMKIQIHVSASTPPHLSVQPTGLTFYPAVDVQAFAVLPNSSLASLFLIGMHTTGSMEVSAESNRLVGELKLDRLLLELKHSNIGPFPVELLQDIMNYIVPILVLPRVNEKLQKGFPLPTPARVQLYNVVLQPHQNFLLFGADVVYK

SEQ ID NO: 1538 - protein, 261 aa, Homo Sapiens
MTKIDSVAGINYGLVAPPATTAETLDVQMKGEFYSENHHNPPPFAPPVMEFPAAHDRMVYLGLSDYFFNTAGLVYQEAGVLKMTLRDDMIPKESKFRLTTKFFGTFLPEVAKKFPNMKIQIHVSASTPPHLSVQPTGLTFYPAVDVQAFAVLPNSSLASLFLIGMHTTGSMEVSAESNRLVGELKLDRLLLELKHSNIGPFPVELLQDIMNYIVPILVLPRVNEKLQKGFPLPTPARVQLYNVVLQPHQNFLLFGADVVYK

SEQ ID NO: 1539 - protein, 242 aa, Homo Sapiens
MFQTGGLIVFYGLLAQTLPLNVNPALPLSPTGLAGSLTNALSNGLLSGGLLGILENLPLLDILKPGGGTSGGLLGGLLGKVTSVIPGLNNIIDIKVTDPQLLELGLVQSPDGHRLYVTIPLGIKLQVNTPLVGASLLRLAVKLDITAEILAVRDKQERIHLVLGDCTHSPGSLQISLLDGLGPLPIQGLLDSLTGILNKVLPELVQGNVCPLVNEVLRGLDITLVHDIVNMLIHGLQFVIKV

SEQ ID NO: 1540 - protein, 256 aa, Homo Sapiens
MFQTGGLIVFYGLLAQTMAQFGGLPVPLDQTLPLNVNPALPLSPTGLAGSLTNALSNGLLSGGLLGILENLPLLDILKPGGGTSGGLLGGLLGKVTSVIPGLNNIIDIKVTDPQLLELGLVQSPDGHRLYVTIPLGIKLQVNTPLVGASLLRLAVKLDITAEILAVRDKQERIHLVLGDCTHSPGSLQISLLDGLGPLPIQGLLDSLTGILNKVLPELVQGNVCPLVNEVLRGLDITLVHDIVNMLIHGLQFVIKV

SEQ ID NO: 1541 - protein, 256 aa, Homo Sapiens; identical to SEQ ID NO: 1540

SEQ ID NO: 1542 - protein, 256 aa, Homo Sapiens; identical to SEQ ID NO: 1540

SEQ ID NO: 1543 - protein, 249 aa, Homo Sapiens
MLQLWKLVLLCGVLTGTSESLLDNLGNDLSNVVDKLEPVLHEGLETVDNTLKGILEKLKVDLGVLQKSSAWQLAKQKAQEAEKLLNNVISKLLPTNTDIFGLKISNSLILDVKAEPIDDGKGLNLSFPVTANVTVAGPIIGQIINLKASLDLLTAVTIETDPQTHQPVAVLGECASDPTSISLSLLDKHSQIINKFVNSVINTLKSTVSSLLQKEICPLIRIFIHSLDVNVIQQVVDNPQHKTQLQTLI

SEQ ID NO: 1544 - protein, 249 aa, Homo Sapiens; identical to SEQ ID NO: 1543

SEQ ID NO: 1545 - protein, 218 aa, Homo Sapiens
MMCPLWRLLIFLGLLALPLAPHKQPWPGLAQAHRDNKSTLARIIAQGLIKHNAESRIQNIHFGDRLNASAQVAPGLVGWLISGRKHQQQQESRSFDNNIVKMCAHMSIVVEFWLEKDEFGRRDLVIGKCDAEPSSVHVAILTEAIPPKMNQFLYNLKENLQKVLPHMVESQVCPLIGEILGQLDVKLLKSLIEQEAAHEPTHHETSQPSACQAGESPS

SEQ ID NO: 1546 - protein, 254 aa, Homo Sapiens
MMCPLWRLLIFLGLLALPLAPHKQPWPGLAQAHRDNKSTLARIIAQGLIKHNAESRIQNIHFGDRLNASAQVAPGLVGWLISGRKHQQQQESSINITNIQLDCGGIQISFHKEWFSANISLEFDLELRPSFDNNIVKMCAHMSIVVEFWLEKDEFGRRDLVIGKCDAEPSSVHVAILTEAIPPKMNQFLYNLKENLQKVLPHMVESQVCPLIGEILGQLDVKLLKSLIEQEAAHEPTHHETSQPSACQAGESPS

SEQ ID NO: 1547 - protein, 147 aa, Homo Sapiens
MAGPWTFTLLCGLLAATLIQATLSPTAVLILGPKVIKEKLTQELKDHNATSILQQLPLLSAMREKPAGGIPVLGSLVNTVLKHIIWLKVITANILQLQVKPSANDQELLVKIPLDMVAGFNTPLVKTIVEFHMTTEAQATIRMDTSA

SEQ ID NO: 1548 - protein, 484 aa, Homo Sapiens
MAGPWTFTLLCGLLAATLIQATLSPTAVLILGPKVIKEKLTQELKDHNATSILQQLPLLSAMREKPAGGIPVLGSLVNTVLKHIIWLKVITANILQLQVKPSANDQELLVKIPLDMVAGFNTPLVKTIVEFHMTTEAQATIRMDTSASGPTRLVLSDCATSHGSLRIQLLHKLSFLVNALAKQVMNLLVPSLPNLVKNQLCPVIEASFNGMYADLLQLVKVPISLSIDRLEFDLLYPAIKGDTIQLYLGAKLLDSQGKVTKWFNNSAASLTMPTLDNIPFSLIVSQDVVKAAVAAVLSPEEFMVLLDSVLPESAHRLKSSIGLINEKAADKLGSTQIVKILTQDTPEFFIDQGHAKVAQLIVLEVFPSSEALRPLFTLGIEASSEAQFYTKGDQLILNLNNISSDRIQLMNSGIGWFQPDVLKNIITEIIHSILLPNQNGKLRSGVPVSLVKALGFEAAESSLTKDALVLTPASLWKPSSPVSQ

SEQ ID NO: 1549 - protein, 458 aa, Homo Sapiens
MAWASRLGLLLALLLPVVGASTPGTVVRLNKAALSYVSEIGKAPLQRALQVTVPHFLDWSGEALQPTRIRILNVHVPRLHLKFIAGFGVRLLAAANFTFKVFRAPEPLELTLPVELLADTRVTQSSIRTPVVSISACSLFSGHANEFDGSNSTSHALLVLVQKHIKAVLSNKLCLSISNLVQGVNVHLGTLIGLNPVGPESQIRYSMVSVPTVTSDYISLEVNAVLFLLGKPIILPTDATPFVLPRHVGTEGSMATVGLSQQLFDSALLLLQKAGALNLDITGQLRSDDNLLNTSALGRLIPEVARQFPEPMPVVLKVRLGATPVAMLHTNNATLRLQPFVEVLATASNSAFQSLFSLDVVVNLRLQLSVSKVKLQGTTSVLGDVQLTVASSNVGFIDTDQVRTLMGTVFEKPLLDHLNALLAMGIALPGVVNLHYVAPEIFVYEGYVVISSGLFYQS

SEQ ID NO: 1550 - protein, 476 aa, Homo Sapiens
MQPVMLALWSLLLLWGLATPCQELLETVGTLARIDKDELGKAIQNSLVGEPILQNVLGSVTAVNRGLLGSGGLLGGGGLLGHGGVFGVVEELSGLKIEELTLPKVLLKLLPGFGVQLSLHTKVGMHCSGPLGGLLQLAAEVNVTSRVALAVSSRGTPILILKRCSTLLGHISLFSGLLPTPLFGVVEQMLFKVLPGLLCPVVDSVLGVVNELLGAVLGLVSLGALGSVEFSLATLPLISNQYIELDINPIVKSVAGDIIDFPKSRAPAKVPPKKDHTSQVMVPLYLFNTTFGLLQTNGALDMDITPELVPSDVPLTTTDLAALLPEALGKLPLHQQLLLFLRVREAPTVTLHNKKALVSLPANIHVLFYVPKGTPESLFELNSVMTVRAQLAPSATKLHISLSLERLSVKVASSFTHAFDGSRLEEWLSHVVGAVYAPKLNVALDVGIPLPKVLNINFSNSVLEIVENAVVLTVAS

SEQ ID NO: 1551 - protein, 614 aa, Homo Sapiens
MWMAWCVAALSVVAVCGTSHETNTVLRVTKDVLSNAISGMLQQSDALHSALREVPLGVGDIPYNDFHVRGPPPVYTNGKKLDGIYQYGHIETNDNTAQLGGKYRYGEILESEGSIRDLRNSGYRSAENAYGGHRGLGRYRAAPVGRLHRRELQPGEIPPGVATGAVGPGGLLGTGGMLAADGILAGQGGLLGGGGLLGDGGLLGGGGVLGVLGEGGILSTVQGITGLRIVELTLPRVSVRLLPGVGVYLSLYTRVAINGKSLIGFLDIAVEVNITAKVRLTMDRTGYPRLVIERCDTLLGGIKVKLLRGLLPNLVDNLVNRVLADVLPDLLCPIVDVVLGLVNDQLGLVDSLIPLGILGSVQYTFSSLPLVTGEFLELDLNTLVGEAGGGLIDYPLGWPAVSPKPMPELPPMGDNTKSQLAMSANFLGSVLTLLQKQHALDLDITNGMFEELPPLTTATLGALIPKVFQQYPESCPLIIRIQVLNPPSVMLQKDKALVKVLATAEVMVSQPKDLETTICLIDVDTEFLASFSTEGDKLMIDAKLEKTSLNLRTSNVGNFDIGLMEVLVEKIFDLAFMPAMNAVLGSGVPLPKILNIDFSNADIDVLEDLLVLSA

SEQ ID NO: 1552 - protein, 44 aa, Homo Sapiens
MWMAWCVAALSVVAVCGTSHETNTVLRVTKDVLSNGFSPISWTI

SEQ ID NO: 1553 - protein, 453 aa, Homo Sapiens
MLRILCLALCSLLTGTRADPGALLRLGMDIMNQVQSAMDESHILEKMAAEAGKKQPGMKPIKGITNLKVKDVQLPVITLNFVPGVGIFQCVSTGMTVTGKSFMGGNMEIIVALNITATNRLLRDEETGLPVFKSEGCEVILVNVKTNLPSNMLPKMVNKFLDSTLHKVLPGLMCPAIDAVLVYVNRKWTNLSDPMPVGQMGTVKYVLMSAPATTASYIQLDFSPVVQQQKGKTIKLADAGEALTFPEGYAKGSSQLLLPATFLSAELALLQKSFHVNIQDTMIGELPPQTTKTLARFIPEVAVAYPKSKPLTTQIKIKKPPKVTMKTGKSLLHLHSTLEMFAARWRSKAPMSLFLLEVHFNLKVQYSVHENQLQMATSLDRLLSLSRKSSSIGNFNERELTGFITSYLEEAYIPVVNDVLQVGLPLPDFLAMNYNLAELDIVENALMLDLKLG

SEQ ID NO: 1554 - protein, 88 aa, Homo Sapiens
MLRILCLALCSLLTGTRADPGALLRLGMDIMNREVQSAMDESHILEKMAAEAGKKQPGMKPIKGITNEQGHFEEEMRLESQISTLHAT

SEQ ID NO: 1555 - protein, 82 aa, Homo Sapiens
MCTKTIPVLWGCFLLWNLYVSSSQTIYPGIKARITQRALDYGVQAGMKMIEQMLKEKKLPDLSGSESLEFLKVDYVNYNFSK

SEQ ID NO: 1556 - protein, 507 aa, Homo Sapiens
MCTKTIPVLWGCFLLWNLYVSSSQTIYPGIKARITQRALDYGVQAGMKMIEQMLKEKKLPDLSGSESLEFLKVDYVNYNFSNIKISAFSFPNTSLAFVPGVGIKALTNHGTANISTDWGFESPLFQDTGGADLFLSGVYFTGIIILTRNDFGHPTLKLQDCYAQLSHAHVSFSGELSVLYNSFAEPMEKPILKNLNEMLCPIIASEVKALNANLSTLEVLTKIDNYTLLDYSLISSPEITENYLDLNLKGVFYPLENLTDPPFSPVPFVLPERSNSMLYIGIAEYFFKSASFAHFTAGVFNVTLSTEEISNHFVQNSQGLGNVLSRIAEIYILSQPFMVRIMATEPPIINLQPGNFTLDIPASIMMLTQPKNSTVETIVSMDFVASTSVGLVILGQRLVCSLSLNRFRLALPESNRSNIEVLRFENILSSILHFGVLPLANAKLQQGFPLSNPHKFLFVNSDIEVLEGFLLISTDLKYETSSKQQPSFHVWEGLNLISRQWRGKSAP

SEQ ID NO: 1557 - protein, 507 aa, Homo Sapiens; identical to SEQ ID NO: 1556

SEQ ID NO: 1558 - protein, 264 aa, Homo Sapiens
MEKPILKNLNEMLCPIIASEVKALNANLSTLEVLTKIDNYTLLDYSLISSPEITENYLDLNLKGVFYPLENLTDPPFSPVPFVLPERSNSMLYIGIAEYFFKSASFAHFTAGVFNVTLSTEEISNHFVQNSQGLGNVLSRVASTSVGLVILGQRLVCSLSLNRFRLALPESNRSNIEVLRFENILSSILHFGVLPLANAKLQQGFPLSNPHKFLFVNSDIEVLEGFLLISTDLKYETSSKQQPSFHVWEGLNLISRQWRGKSAP

SEQ ID NO: 1559 - protein, 64 aa, Homo Sapiens
MAVSRHLTRGRKMAHVIAACLYLVCRTEGTPHMLLDLSDLLQVNVYVLGKTFLLLARELCINAP

SEQ ID NO: 1560 - protein, 562 aa, Homo Sapiens
MAVSRHLTRGRKMAHVIAACLYLVCRTEGTPHMLLDLSDLLQVNVYVLGKTFLLLARELCINAPAIDPCLYIPRFAHLLEFGEKNHEVSMTALRLLQRMKRDWMHTGRRPSGLCGAALLVAARMHDFRRTVKEVISVVKVCESTLRKRLTEFEDTPTSQLTIDEFMKIDLEEECDPPSYTAGQRKLRMKQLEQVLSKKLEEVEGEISSYQDAIEIELENSRPKAKGGLASLAKDGSTEDTASSLCGEEDTEDEELEAAASHLNKDLYRELLGGAPGSSEAAGSPEWGGRPPALGSLLDPLPTAASLGISDSIRECISSQSSDPKDASGDGELDLSGIDDLEIDRYILNESEARVKAELWMRENAEYLREQREKEARIAKEKELGIYKEHKPKKSCKRREPIQASTAREAIEKMLEQKKISSKINYSVLRGLSSAGGGSPHREDAQPEHSASARKLSRRRTPASRSGADPVTSVGKRLRPLVSTQPAKKVATGEALLPSSPTLGAEPARPQAVLVESGPVSYHADEEADEEEPDEEDGEPCVSALQMMGSNDYGCDGDEDDGY

SEQ ID NO: 1561 - protein, 584 aa, Homo Sapiens
MAVSRHLTRGRKMAHVIAACLYLVCRTEGTPHMLLDLSDLLQVNVYVLGKTFLLLARELCINAPAIDPCLYIPRFAHLLEFGEKNHEVSMTALRLLQRMKRDWMHTGRRPSGLCGAALLVAARMHDFRRTVKEVISVVKVCESTLRKRLTEFEDTPTSQLTIDEFMKIDLEEECDPPSYTAGQRKLRMKQLEQVLSKKLEEVEGEISSYQDAIEIELENSRPKAKGGLASLAKDGSTEDTASSLCGEEDTEDEELEAAASHLNKDLYRELLGGAPGSSEAAGSPEWGGRPPALGSLLDPLPTAASLGISDSIRECISSQSSDPKDASGDGELDLSGIDDLEIDRRDLSMPRCAKAKSQPHFPVLAQYILNESEARVKAELWMRENAEYLREQREKEARIAKEKELGIYKEHKPKKSCKRREPIQASTAREAIEKMLEQKKISSKINYSVLRGLSSAGGGSPHREDAQPEHSASARKLSRRRTPASRSGADPVTSVGKRLRPLVSTQPAKKVATGEALLPSSPTLGAEPARPQAVLVESGPVSYHADEEADEEEPDEEDGEPCVSALQMMGSNDYGCDGDEDDGY

SEQ ID NO: 1562 - protein, 439 aa, Homo Sapiens
MHDFRRTVKEVISVVKVCESTLRKRLTEFEDTPTSQLTIDEFMKIDLEEECDPPSYTAGQRKLRMKQLEQVLSKKLEEVEGEISSYQDAIEIELENSRPKAKGGLASLAKDGSTEDTASSLCGEEDTEDEELEAAASHLNKDLYRELLGGAPGSSEAAGSPEWGGRPPALGSLLDPLPTAASLGISDSIRECISSQSSDPKDASGDGELDLSGIDDLEIDRYILNESEARVKAELWMRENAEYLREQREKEARIAKEKELGIYKEHKPKKSCKRREPIQASTAREAIEKMLEQKKISSKINYSVLRGLSSAGGGSPHREDAQPEHSASARKLSRRRTPASRSGADPVTSVGKRLRPLVSTQPAKKVATGEALLPSSPTLGAEPARPQAVLVESGPVSYHADEEADEEEPDEEDGEPCVSALQMMGSNDYGCDGDEDDGY

SEQ ID NO: 1563 - protein, 14 aa, Homo Sapiens
MTALRLLQRMKRDW

SEQ ID NO: 1564 - protein, 45 aa, Homo Sapiens
MTALRLLQRMKRDWMHTGRRPSGLCGAALLVAARMHDFRRTVKEV

SEQ ID NO: 1565 - protein, 134 aa, Homo Sapiens [sequence omitted]

SEQ ID NO: 1566 - protein, 184 aa, Homo Sapiens
MTALRLLQRMKRDWMHTGRRPSGLCGAALLVAARMHDFRRTVKEVISVVKVCESTLRKRLTEFEDTPTSQLTIDEFMKIDLEEECDPPSYTAGQRKLRMKQLEQVLSKKLEEVEGEISSYQDAIEIELENSPPSRREGRRRPESLPRPLRGKAPVPLVGGLSSGMAAPDVAEGASPCVLRRGWP

SEQ ID NO: 1567 - protein, 155 aa, Homo Sapiens
MTALRLLQRMKRDWMHTGRRPSGLCGAALLVAARMHDFRRTVKEVISVVKVCESTLRKRLTEFEDTPTSQLTIDEFMKIDLEEECDPPSYTAGQRKLRMKQLEQVLSKKLEEVEGEISSYQDAIEIELENSRPKAKGGLASLAKDGSTEDTASSL

SEQ ID NO: 1568 - protein, 234 aa, Homo Sapiens
MTALRLLQRMKRDWMHTGRRPSGLCGAALLVAARMHDFRRTVKEVISVVKVCESTLRKRLTEFEDTPTSQLTIDEFMKIDLEEECDPPSYTAGQRKLRMKQLEQVLSKKLEEVEGEISSYQDAIEIELENSRPKAKGGLASLAKDGSTEDTASSLCGEEDTEDEELEAAASHLNKDLYRELLGGAPGSSEAAGSPEWGGRPPALGSLLDPLPTAASLGISDSIRECISSQSSDP

SEQ ID NO: 1569 - protein, 473 aa, Homo Sapiens
MTALRLLQRMKRDWMHTGRRPSGLCGAALLVAARMHDFRRTVKEVISVVKVCESTLRKRLTEFEDTPTSQLTIDEFMKIDLEEECDPPSYTAGQRKLRMKQLEQVLSKKLEEVEGEISSYQDAIEIELENSRPKAKGGLASLAKDGSTEDTASSLCGEEDTEDEELEAAASHLNKDLYRELLGGAPGSSEAAGSPEWGGRPPALGSLLDPLPTAASLGISDSIRECISSQSSDPKDASGDGELDLSGIDDLEIDRYILNESEARVKAELWMRENAEYLREQREKEARIAKEKELGIYKEHKPKKSCKRREPIQASTAREAIEKMLEQKKISSKINYSVLRGLSSAGGGSPHREDAQPEHSASARKLSRRRTPASRSGADPVTSVGKRLRPLVSTQPAKKVATGEALLPSSPTLGAEPARPQAVLVESGPVSYHADEEADEEEPDEEDGEPCVSALQMMGSNDYGCDGDEDDGY

SEQ ID NO: 1570 - protein, 161 aa, Homo Sapiens
MTALRLLQRMKRDWMHTGRRPSGLCGAALLVAARMHDFRRTVKEVISVVKVCESTLRKRLTEFEDTPTSQLTIDEFMKIDLEEECDPPSYTAGQRKLRMKQLEQVLSKKLEEVEGEISSYQDAIEIELENSRPKAPHRGGRADGGPRASPGLFVGRPQYHS

SEQ ID NO: 1571 - protein, 208 aa, Homo Sapiens
MTGRVCRGCGGTDIELDAARGDAVCTACGSVLEDNIIVSEVQFVESSGGGSSAVGQFVSLDGAGKTPTLGGGFHVNLGKESRAQTLQNGRRHIHHLGNQLQLNQHCLDTAFNFFKMAVSRHLTRGRKMAHVIAACLYLVCRTEGTPHMLLDLSDLLQVDSLRPASFPTWGCDLGVVTRVVTGVYPRCLHASQWPVCAACPVRKFWSVG

SEQ ID NO: 1572 - protein, 677 aa, Homo Sapiens
MTGRVCRGCGGTDIELDAARGDAVCTACGSVLEDNIIVSEVQFVESSGGGSSAVGQFVSLDGAGKTPTLGGGFHVNLGKESRAQTLQNGRRHIHHLGNQLQLNQHCLDTAFNFFKMAVSRHLTRGRKMAHVIAACLYLVCRTEGTPHMLLDLSDLLQVNVYVLGKTFLLLARELCINAPAIDPCLYIPRFAHLLEFGEKNHEVSMTALRLLQRMKRDWMHTGRRPSGLCGAALLVAARMHDFRRTVKEVISVVKVCESTLRKRLTEFEDTPTSQLTIDEFMKIDLEEECDPPSYTAGQRKLRMKQLEQVLSKKLEEVEGEISSYQDAIEIELENSRPKAKGGLASLAKDGSTEDTASSLCGEEDTEDEELEAAASHLNKDLYRELLGGAPGSSEAAGSPEWGGRPPALGSLLDPLPTAASLGISDSIRECISSQSSDPKDASGDGELDLSGIDDLEIDRYILNESEARVKAELWMRENAEYLREQREKEARIAKEKELGIYKEHKPKKSCKRREPIQASTAREAIEKMLEQKKISSKINYSVLRGLSSAGGGSPHREDAQPEHSASARKLSRRRTPASRSGADPVTSVGKRLRPLVSTQPAKKVATGEALLPSSPTLGAEPARPQAVLVESGPVSYHADEEADEEEPDEEDGEPCVSALQMMGSNDYGCDGDEDDGY

SEQ ID NO: 1573 - protein, 650 aa, Homo Sapiens
MTGRVCRGCGGTDIELDAARGDAVCTACGSVLEDNIIVSEVQFVESSGGGSSAVGQFVSLDGRRHIHHLGNQLQLNQHCLDTAFNFFKMAVSRHLTRGRKMAHVIAACLYLVCRTEGTPHMLLDLSDLLQVNVYVLGKTFLLLARELCINAPAIDPCLYIPRFAHLLEFGEKNHEVSMTALRLLQRMKRDWMHTGRRPSGLCGAALLVAARMHDFRRTVKEVISVVKVCESTLRKRLTEFEDTPTSQLTIDEFMKIDLEEECDPPSYTAGQRKLRMKQLEQVLSKKLEEVEGEISSYQDAIEIELENSRPKAKGGLASLAKDGSTEDTASSLCGEEDTEDEELEAAASHLNKDLYRELLGGAPGSSEAAGSPEWGGRPPALGSLLDPLPTAASLGISDSIRECISSQSSDPKDASGDGELDLSGIDDLEIDRYILNESEARVKAELWMRENAEYLREQREKEARIAKEKELGIYKEHKPKKSCKRREPIQASTAREAIEKMLEQKKISSKINYSVLRGLSSAGGGSPHREDAQPEHSASARKLSRRRTPASRSGADPVTSVGKRLRPLVSTQPAKKVATGEALLPSSPTLGAEPARPQAVLVESGPVSYHADEEADEEEPDEEDGEPCVSALQMMGSNDYGCDGDEDDGY

SEQ ID NO: 1574 - protein, 185 aa, Homo Sapiens
  misc_feature (1)..(1): Xaa can be any naturally occurring amino acid
XGQFVSLDGAGKTPTLGGGFHVNLGKESRAQTLQNDPCLYIPRFAHLLEFGEKNHEVSMTALRLLQRMKRDWMHTGRRPSGLCGAALLVAARMHDFRRTVKEVISVVKVCESTLRKRLTEFEDTPTSQLTIDEFMKIDLEEECDPPSYTAGQRKLRMKQLEQVLSKKLEEVEGEISSYQDAIEIE

SEQ ID NO: 1575 - protein, 761 aa, Homo Sapiens
MNWRFVELLYFLFIWGRISVQPSHQEPAGTDQHVSKEFDWLISDRGPFHHSRSYLSFVERHRQGFTTRYKIYREFARWKVRNTAIERRDLVRHPVPLMPEFQRSIRLLGRRPTTQQFIDTIIKKYGTHLLISATLGGEEALTMYMDKSRLDRKSGNATQSVEALHQLASSYFVDRDGTMRRLHEIQISTGAIKVTETRTGPLGCNSYDNLDSVSSVLLQSTESKLHLQGLQIIFPQYLQEKFVQSALSYIMCNGEGEYLCQNSQCRCQCAEEFPQCNCPITDIQIMEYTLANMAKSWAEAYKDLENSDEFKSFMKRLPSNHFLTIGSIHQHWGNDWDLQNRYKLLQSATEAQRQKIQRTARKLFGLSVRCRHNPNHQLPRERTIQQWLARVQSLLYCNENGFWGTFLESQRSCVCHGSTTLCQRPIPCVIGGNNSCAMCSLANISLCGSCNKGYKLYRGRCEPQNVDSERSEQFISFETDLDFQDLELKYLLQKMDSRLYVHTTFISNEIRLDTFFDPRWRKRMSLTLKSNKNRMDFIHMVIGMSMRICQMRNSSLDPMFFVYVNPFSGSHSEGWNMPFGEFGYPRWEKIRLQNSQCYNWTLLLGNRWKTFFETVHIYLRSRTRLPTLLRNETGQGPVDLSDPSKRQFYIKISDVQVFGYSLRFNADLLRSAVQQVNQSYTQGGQFYSSSSVMLLLLDIRDRINRLAPPVAPGKPQLDLFSCMLKHRLKLTNSEIIRVNHALDLYNTEILKQSDQMTAKLC

SEQ ID NO: 1576 - protein, 320 aa, Homo Sapiens
MNWRFVELLYFLFIWGRISVQPSHQEPAGTDQHVSKEFDWLISDRGPFHHSRSYLSFVERHRQGFTTRYKIYREFARWKVRNTAIERRDLVRHPVPLMPEFQRSIRLLGRRPTTQQFIDTIIKKYGTHLLISATLGGEEALTMYMDKSRLDRKSGNATQSVEALHQLASSYFVDRDGTMRRLHEIQISTGAIKVTETRTGPLGCNSYDNLDSVSSVLLQSTESKLHLQGLQIIFPQYLQEKFVQSALSYIMCNGEGEYLCQNSQCRCQCAEEFPQCNCPITDIQIMEYTLANMAKSWAEAYKDLENSGRESHSVPLHEWP

SEQ ID NO: 1577 - protein, 783 aa, Homo Sapiens
MRWQCGTRFRGLRPAVAPWTALLALGLPGWVLAVSATAAAVVPEQHASVAGQHPLDWLLTDRGPFHRAQEYADFMERYRQGFTTRYRIYREFARWKVNNLALERKDFFSLPLPLAPEFIRNIRLLGRRPNLQQVTENLIKKYGTHFLLSATLGGEESLTIFVDKQKLGRKTETTGGASIIGGSGNSTAVSLETLHQLAASYFIDRESTLRRLHHIQIATGAIKVTETRTGPLGCSNYDNLDSVSSVLVQSPENKVQLLGLQVLLPEYLRERFVAAALSYITCSSEGELVCKENDCWCKCSPTFPECNCPDADIQAMEDSLLQIQDSWATHNRQFEESEEFQALLKRLPDDRFLNSTAISQFWAMDTSLQHRYQQLGAGLKVLFKKTHRILRRLFNLCKRCHRQPRFRLPKERSLSYWWNRIQSLLYCGESTFPGTFLEQSHSCTCPYDQSSCQGPIPCALGEGPACAHCAPDNSTRCGSCNPGYVLAQGLCRPEVAESLENFLGLETDLQDLELKYLLQKQDSRIEVHSIFISNDMRLGSWFDPSWRKRMLLTLKSNKYKPGLVHVMLALSLQICLTKNSTLEPVMAIYVNPFGGSHSESWFMPVNEGSFPDWERTNVDAAAQCQNWTITLGNRWKTFFETVHVYLRSRIKSLDDSSNETIYYEPLEMTDPSKNLGYMKINTLQVFGYSLPFDPDAIRDLILQLDYPYTQGSQDSALLQLIELRDRVNQLSPPGKVRLDLFSCLLRHRLKLANNEVGRIQSSLRAFNSKLPNPVEYETGKLCS

SEQ ID NO: 1578 - protein, 28 aa, Homo Sapiens
MIWRSRAGAELFSLMALWEWIALSLHCW

SEQ ID NO: 1579 - protein, 158 aa, Homo Sapiens
MIWRSRAGAELFSLMALWEWIALSLHCWVLAVAAVSDQHATSPFDWLLSDKGPFHRSQEYTDFVDRSRQGFSTRYKIYREFGRWKVNNLAVERRNFLGSPLPLAPEFFRNIRLLGRRPTLQQITENLIKKYGTHFLLSATLGGEESLTIFVDKRKLSK

SEQ ID NO: 1580 - protein, 766 aa, Homo Sapiens
MIWRSRAGAELFSLMALWEWIALSLHCWVLAVAAVSDQHATSPFDWLLSDKGPFHRSQEYTDFVDRSRQGFSTRYKIYREFGRWKVNNLAVERRNFLGSPLPLAPEFFRNIRLLGRRPTLQQITENLIKKYGTHFLLSATLGGEESLTIFVDKRKLSKRAEGSDSTTNSSSVTLETLHQLAASYFIDRDSTLRRLHHIQIASTAIKVTETRTGPLGCSNYDNLDSVSSVLVQSPENKIQLQGLQVLLPDYLQERFVQAALSYIACNSEGEFICKENDCWCHCGPKFPECNCPSMDIQAMEENLLRITETWKAYNSDFEESDEFKLFMKRLPMNYFLNTSTIMHLWTMDSNFQRRYEQLENSMKQLFLKAQKIVHKLFSLSKRCHKQPLISLPRQRTSTYWLTRIQSFLYCNENGLLGSFSEETHSCTCPNDQVVCTAFLPCTVGDASACLTCAPDNRTRCGTCNTGYMLSQGLCKPEVAESTDHYIGFETDLQDLEMKYLLQKTDRRIEVHAIFISNDMRLNSWFDPSWRKRMLLTLKSNKYKSSLVHMILGLSLQICLTKNSTLEPVLAVYVNPFGGSHSESWFMPVNENSFPDWERTKLDLPLQCYNWTLTLGNKWKTFFETVHIYLRSRIKSNGPNGNESIYYEPLEFIDPSRNLGYMKINNIQVFGYSMHFDPEAIRDLILQLDYPYTQGSQDSALLQLLEIRDRVNKLSPPGQRRLDLFSCLLRHRLKLSTSEVVRIQSALQAFNAKLPNTMDYDTTKLCS

SEQ ID NO: 1581 - protein, 385 aa, Homo Sapiens
MAAALFVLLGFALLGTHGASGAAGFVQAPLSQQRWVGGSVELHCEAVGSPVPEIQWWFEGQGPNDTCSQLWDGARLDRVHIHATYHQHAASTISIDTLVEEDTGTYECRASNDPDRNHLTRAPRVKWVRAQAVVLVLEPGTVFTTVEDLGSKILLTCSLNDSATEVTGHRWLKGGVVLKEDALPGQKTEFKVDSDDQWGEYSCVFLPEPMGTANIQLHGPPRVKAVKSSEHINEGETAMLVCKSESVPPVTDWAWYKITDSEDKALMNGSESRFFVSSSQGRSELHIENLNMEADPGQYRCNGTSSKGSDQAIITLRVRSHLAALWPFLGIVAEVLVLVTIIFIYEKRRKPEDVLDDDDAGSAPLKSSGQHQNDKGKNVRQRNSS

SEQ ID NO: 1582 - protein, 55 aa, Homo Sapiens
MAAALFVLLGFALLGTHGASGAAGTVFTTVEDLGSKILLTCSLNDSATEQRAAPE

SEQ ID NO: 1583 - protein, 132 aa, Homo Sapiens
MAAALFVLLGFALLGTHGASGAAGTVFTTVEDLGSKILLTCSLNDSATEVTGHRWLKGGVVLKEDALPGQKTEFKAPTRPSSRSACAATWPPSGPSWASWLRCWCWSPSSSSTRSAGSPRTSWMMTTPALHP

SEQ ID NO: 1584 - protein, 269 aa, Homo Sapiens
MAAALFVLLGFALLGTHGASGAAGTVFTTVEDLGSKILLTCSLNDSATEVTGHRWLKGGVVLKEDALPGQKTEFKVDSDDQWGEYSCVFLPEPMGTANIQLHGPPRVKAVKSSEHINEGETAMLVCKSESVPPVTDWAWYKITDSEDKALMNGSESRFFVSSSQGRSELHIENLNMEADPGQYRCNGTSSKGSDQAIITLRVRSHLAALWPFLGIVAEVLVLVTIIFIYEKRRKPEDVLDDDDAGSAPLKSSGQHQNDKGKNVRQRNSS

SEQ ID NO: 1585 - protein, 161 aa, Homo Sapiens [sequence omitted]

SEQ ID NO: 1586 - protein, 189 aa, Homo Sapiens
MAAALFVLLGFALLGTHGASGAGPPRVKAVKSSEHINEGETAMLVCKSESVPPVTDWAWYKITDSEDKALMNGSESRFFVSSSQGRSELHIENLNMEADPGQYRCNGTSSKGSDQAIITLRVRSHLAALWPFLGIVAEVLVLVTIIFIYEKRRKPEDVLDDDDAGSAPLKSSGQHQNDKGKNVRQRNSS

SEQ ID NO: 1587 - protein, 221 aa, Homo Sapiens
MAAALFVLLGFALLGTHGASGAVFTTVEDLGSKILLTCSLNDSATEVTGHRWLKGGVVLKEDALPGQKTEFKVDSDDQWGEYSCVFLPEPMGTANIQLHGPPRVKAVKSSEHINEGETAMLVCKSESVPPVTDWAWYKITDSEDKALMNGSESRFFVSSSQGRSELHIENLNMEADPGQYRCNGTSSKGSDQAIITLRVRSHLAALWPFLGIVAEVLVLVT

SEQ ID NO: 1588 - protein, 52 aa, Homo Sapiens
MGTANIQLHGPPRVKAVKSSEHINEGETAMLVCKSESVPPVTDWAWYKITDS

SEQ ID NO: 1589 - protein, 84 aa, Homo Sapiens
MGTANIQLHGPPRVKAVKSSEHINEGETAMLVCKSESVPPVTDWAWYKITDSEDKALMNGSESRFFVSSSQGRSELHIENLNME

SEQ ID NO: 1590 - protein, 176 aa, Homo Sapiens
MGTANIQLHGPPRVKAVKSSEHINEGETAMLVCKSESVPPVTDWAWYKITDSEDKALMNGSESRFFVSSSQGRSELHIENLNMEADPGQYRCNGTSSKGSDQAIITLRVRSHLAALWPFLGIVAEVLVLVTIIFIYEKRRKPEDVLDDDDAGSAPLKSSGQHQNDKGKNVRQRNSS

SEQ ID NO: 1591 - protein, 205 aa, Homo Sapiens
MKQSDASPQERVDSDDQWGEYSCVFLPEPMGTANIQLHGPPRVKAVKSSEHINEGETAMLVCKSESVPPVTDWAWYKITDSEDKALMNGSESRFFVSSSQGRSELHIENLNMEADPGQYRCNGTSSKGSDQAIITLRVRSHLAALWPFLGIVAEVLVLVTIIFIYEKRRKPEDVLDDDDAGSAPLKSSGQHQNDKGKNVRQRNSS

SEQ ID NO: 1592 - protein, 132 aa, Homo Sapiens
MGSLMLLFVETTRNSSACIFPVILNELSSTVETITHFPEVTDGECVFPFHYKNGTYYDCIKSKARHKWCSLNKTYEGYWKFCSAEDFANCVFPFWYRRLIYWECTDDGEAFGKKWCSLTKNFNKDRIWKYCE

SEQ ID NO: 1593 - protein, 155 aa, Homo Sapiens
GLDYQSCPTSEDCENNPVDSFWKRASIQYSKDSSGVIHVMLNGSEPTGAYPIKGFFADYEIPNLQKEKITRIEIWVMHEIGGPNVESCGEGSMKVLEKRLKDMGFQYSCINDYRPVKLLQCVDHSTHPDCALKSPKRLCGTLGVRPRAEPYNRRF

SEQ ID NO: 1594 - protein, 318 aa, Homo Sapiens
MAAQGCAASRLLQLLLQLLLLLLLLAAGGARARWRGEGTSAHLRDIFLGRCAEYRALLSPEQRNKNCTAIWEAFKVALDKDPCSVLPSDYDLFINLSRHSIPRDKSLFWENSHLLVNSFADNTRRFMPLSDVLYGRVADFLSWCRQKNDSGLDYQSCPTSEDCENNPVDSFWKRASIQYSKDSSGVIHVMLNGSEPTGAYPIKGFFADYEIPNLQKEKITRIEIWVMHEIGGPNVESCGEGSMKVLEKRLKDMGFQYSCINDYRPVKLLQCVDHSTHPDCALKSAAAATQRKAPSLYTEQRAGLIIPLFLVLASRTQL

SEQ ID NO: 1595 - protein, 333 aa, Homo Sapiens
MAAQGCAASRLLQLLLQLLLLLLLLAAGGARARWRGEGTSAHLRDIFLGRCAEYRALLSPEQRQIRNSREPPVLHTTQNKNCTAIWEAFKVALDKDPCSVLPSDYDLFINLSRHSIPRDKSLFWENSHLLVNSFADNTRRFMPLSDVLYGRVADFLSWCRQKNDSGLDYQSCPTSEDCENNPVDSFWKRASIQYSKDSSGVIHVMLNGSEPTGAYPIKGFFADYEIPNLQKEKITRIEIWVMHEIGGPNVESCGEGSMKVLEKRLKDMGFQYSCINDYRPVKLLQCVDHSTHPDCALKSAAAATQRKAPSLYTEQRAGLIIPLFLVLASRTQL

SEQ ID NO: 1596 - protein, 97 aa, Homo Sapiens
  misc_feature (1)..(1): Xaa can be any naturally occurring amino acid
XSEPTGAYPIKGFFADYEIPNLQKEKITRIEIWVMHEIGGPNVESCGEGSMKVLEKRLKDMGFQYSCINDYRPVKLLQCVDHSTHPDCALKSKLWEP

SEQ ID NO: 1597 - protein, 186 aa, Homo Sapiens
  misc_feature (1)..(1): Xaa can be any naturally occurring amino acid
XSLFWENSHLLVNSFADNTRRFMPLSDVLYGRVADFLSWCRQKNDSGLDYQSCPTSEDCENNPVDSFWKRASIQYSKDSSGVIHVMLNGSEPTGAYPIKGFFADYEIPNLQKEKITRIEIWVMHEIGGPNVESCGEGSMKVLEKRLKDMGFQYSCINDYRPVKLLQCVDHSTHPDCALKSDGVSPC

SEQ ID NO: 1598 - protein, 478 aa, Homo Sapiens
MPRRGYSKPGSWGSFWAMLTLVGLVTHAAQRADVGGEAAGTSINHSQAVLQRLQELLRQGNASDVVLRVQAAGTDEVRVFHAHRLLLGLHSELFLELLSNQSEAVLQEPQDCAAVFDKFIRYLYCGELTVLLTQAIPLHRLATKYGVSSLQRGVADYMRAHLAGGAGPAVGWYHYAVGTGDEALRESCLQFLAWNLSAVAASTEWGAVSPELLWQLLQRSDLVLQDELELFHALEAWLGRARPPPAVAERALRAIRYPMIPPAQLFQLQARSAALARHGPAVADLLLQAYQFHAASPLHYAKFFDVNGSAFLPRNYLAPAWGAPWVINNPARDDRSTSFQTQLGPSGHDAGRRVTWNVLFSPRWLPVSLRPVYADAAGTALPAARPEDGRPRLVVTPASSGGDAAGVSFQKTVLVGARQQGRLLVRHAYSFHQSSEEAGDFLAHADLQRRNSEYLVENALHLHLIVKPVYHTLIRTPK

SEQ ID NO: 1599 - protein, 179 aa, Homo Sapiens
MAHAHIQGGRRAKSRFVVCIMSGARSKLALFLCGCYVVALGAHTGEESVADHHEAEYYVAAVYEHPSILSLNPLALISRQEALELMNQNLDIYEQQVMTAAQKDVQIIVFPEDGIHGFNFTRTSIYPFLDFMPSPQVVRWNPCLEPHRFNDTEVIPAFFLSRLRVHRGDLSQGPEAVTC

SEQ ID NO: 1600 - protein, 543 aa, Homo Sapiens
MAHAHIQGGRRAKSRFVVCIMSGARSKLALFLCGCYVVALGAHTGEESVADHHEAEYYVAAVYEHPSILSLNPLALISRQEALELMNQNLDIYEQQVMTAAQKDVQIIVFPEDGIHGFNFTRTSIYPFLDFMPSPQVVRWNPCLEPHRFNDTEVLQRLSCMAIRGDMFLVANLGTKEPCHSSDPRCPKDGRYQFNTNVVFSNNGTLVDRYRKHNLYFEAAFDVPLKVDLITFDTPFAGRFGIFTCFDILFFDPAIRVLRDYKVKHVVYPTAWMNQLPLLAAIEIQKAFAVAFGINVLAANVHHPVLGMTGSGIHTPLESFWYHDMENPKSHLIIAQVAKNPVGLIGAENATGETDPSHSKFLKILSGDPYCEKDAQEVHCDEATKWNVNAPPTFHSEMMYDNFTLVPVWGKEGYLHVCSNGLCCYLLYERPTLSKELYALGVFDGLHTVHGTYYIQVCALVRCGGLGFDTCGQEITEATGIFEFHLWGNFSTSYIFPLFLTSGMTLEVPDQLGWENDHYFLRKSRLSSGLVTAALYGRLYERD

SEQ ID NO: 1601 - protein, 545 aa, Homo Sapiens
MARKETQLIIKMNHLARFVVCIMSGARSKLALFLCGCYVVALGAHTGEESVADHHEAEYYVAAVYEHPSILSLNPLALISRQEALELMNQNLDIYEQQVMTAAQKDVQIIVFPEDGIHGFNFTRTSIYPFLDFMPSPQVVRWNPCLEPHRFNDTEVLQRLSCMAIRGDMFLVANLGTKEPCHSSDPRCPKDGRYQFNTNVVFSNNGTLVDRYRKHNLYFEAAFDVPLKVDLITFDTPFAGRFGIFTCFDILFFDPAIRVLRDYKVKHVVYPTAWMNQLPLLAAIEIQKAFAVAFGINVLAANVHHPVLGMTGSGIHTPLESFWYHDMENPKSHLIIAQVAKNPVGLIGAENATGETDPSHSKFLKILSGDPYCEKDAQEVHCDEATKWNVNAPPTFHSEMMYDNFTLVPVWGKEGYLHVCSNGLCCYLLYERPTLSKELYALGVFDGLHTVHGTYYIQVCALVRCGGLGFDTCGQEITEATGIFEFHLWGNFSTSYIFPLFLTSGMTLEVPDQLGWENDHYFLRKSRLSSGLVTAALYGRLYERD

SEQ ID NO: 1602 - protein, 545 aa, Homo Sapiens
MPEGGGTSRRLLPMQSRFVVCIMSGARSKLALFLCGCYVVALGAHTGEESVADHHEAEYYVAAVYEHPSILSLNPLALISRQEALELMNQNLDIYEQQVMTAAQKDVQIIVFPEDGIHGFNFTRTSIYPFLDFMPSPQVVRWNPCLEPHRFNDTEVLQRLSCMAIRGDMFLVANLGTKEPCHSSDPRCPKDGRYQFNTNVVFSNNGTLVDRYRKHNLYFEAAFDVPLKVDLITFDTPFAGRFGIFTCFDILFFDPAIRVLRDYKVKHVVYPTAWMNQLPLLAAIEIQKAFAVAFGINVLAANVHHPVLGMTGSGIHTPLESFWYHDMENPKSHLIIAQVAKNPVGLIGAENATGETDPSHSKFLKILSGDPYCEKDAQEVHCDEATKWNVNAPPTFHSEMMYDNFTLVPVWGKEGYLHVCSNGLCCYLLYERPTLSKELYALGVFDGLHTVHGTYYIQVCALVRCGGLGFDTCGQEITEATGIFEFHLWGNFSTSYIFPLFLTSGMTLEVPDQLGWENDHYFLRKSRLSSGLVTAALYGRLYERD

SEQ ID NO: 1603 - protein, 159 aa, Homo Sapiens
MSGARSKLALFLCGCYVVALGAHTGEESVADHHEAEYYVAAVYEHPSILSLNPLALISRQEALELMNQNLDIYEQQVMTAAQKDVQIIVFPEDGIHGFNFTRTSIYPFLDFMPSPQVVRWNPCLEPHRFNDTEVIPAFFLSRLRVHRGDLSQGPEAVTC

SEQ ID NO: 1604 - protein, 251 aa, Homo Sapiens
MSGARSKLALFLCGCYVVALGAHTGEESVADHHEAEYYVAAVYEHPSILSLNPLALISRQEALELMNQNLDIYEQQVMTAAQKDVQIIVFPEDGIHGFNFTRTSIYPFLDFMPSPQVVRWNPCLEPHRFNDTEVLQRLSCMAIRGDMFLVANLGTKEPCHSSDPRCPKDGRYQFNTNVVFSNNGTLVDRYRKHNLYFEAAFDVPLKVDLITFDTPFAGRFGIFTCFDILFFDPAIRVLRDYKVKHVVYPTA

SEQ ID NO: 1605 - protein, 523 aa, Homo Sapiens
MSGARSKLALFLCGCYVVALGAHTGEESVADHHEAEYYVAAVYEHPSILSLNPLALISRQEALELMNQNLDIYEQQVMTAAQKDVQIIVFPEDGIHGFNFTRTSIYPFLDFMPSPQVVRWNPCLEPHRFNDTEVLQRLSCMAIRGDMFLVANLGTKEPCHSSDPRCPKDGRYQFNTNVVFSNNGTLVDRYRKHNLYFEAAFDVPLKVDLITFDTPFAGRFGIFTCFDILFFDPAIRVLRDYKVKHVVYPTAWMNQLPLLAAIEIQKAFAVAFGINVLAANVHHPVLGMTGSGIHTPLESFWYHDMENPKSHLIIAQVAKNPVGLIGAENATGETDPSHSKFLKILSGDPYCEKDAQEVHCDEATKWNVNAPPTFHSEMMYDNFTLVPVWGKEGYLHVCSNGLCCYLLYERPTLSKELYALGVFDGLHTVHGTYYIQVCALVRCGGLGFDTCGQEITEATGIFEFHLWGNFSTSYIFPLFLTSGMTLEVPDQLGWENDHYFLRKSRLSSGLVTAALYGRLYERD

SEQ ID NO: 1606 - protein, 523 aa, Homo Sapiens; identical to SEQ ID NO: 1605

SEQ ID NO: 1607 - protein, 523 aa, Homo Sapiens; identical to SEQ ID NO: 1605

SEQ ID NO: 1608 - protein, 523 aa, Homo Sapiens; identical to SEQ ID NO: 1605

SEQ ID NO: 1609 - protein, 56 aa, Homo Sapiens
FIIFMAVSICCIKKLQREKKILSGEKKVEQEEKEIAQQLQEELRWRRTFLHAGECL

SEQ ID NO: 1610 - protein, 96 aa, Homo Sapiens
MEPAAALHFSLPASLLLLLLLLLLSLCALVSAQFTVVGPANPILAMVGENTTLRCHLSPEKNAEDMEVRWFRSQFSPAVFVYKGGRERTEEQMEEY

SEQ ID NO: 1611 - protein, 256 aa, Homo Sapiens
MEPAAALHFSLPASLLLLLLLLLLSLCALVSAQFTVVGPANPILAMVGENTTLRCHLSPEKNAEDMEVRWFRSQFSPAVFVYKGGRERTEEQMEEYRGRITFVSKDINRGSVALVIHNVTAQENGIYRCYFQEGRSYDEAILRLVVAESFMPSASPWMVALAVILTASPWMVSMTVILAVFIIFMAVSICCIKKLQREKKILSGEKKVEQEEKEIAQQLQEELRWRRTFLHAGYELPGIRGPSWKRPLHGEPPSAF

SEQ ID NO: 1612 - protein, 239 aa, Homo Sapiens
MEPAAALHFSLPASLLLLLLLLLLSLCALVSAQFTVVGPANPILAMVGENTTLRCHLSPEKNAEDMEVRWFRSQFSPAVFVYKGGRERTEEQMEEYRGRITFVSKDINRGSVALVIHNVTAQENGIYRCYFQEGRSYDEAILRLVVAGLGSKPLIEIKAQEDGSIWLECISGGWYPEPLTVWRDPYGEVVPALKEVSIADADGLFMVTTAVIIRDKYVRNVSCSVNNTLLGQEKETVIF

SEQ ID NO: 1613 - protein, 523 aa, Homo Sapiens
MEPAAALHFSLPASLLLLLLLLLLSLCALVSAQFTVVGPANPILAMVGENTTLRCHLSPEKNAEDMEVRWFRSQFSPAVFVYKGGRERTEEQMEEYRGRITFVSKDINRGSVALVIHNVTAQENGIYRCYFQEGRSYDEAILRLVVAGLGSKPLIEIKAQEDGSIWLECISGGWYPEPLTVWRDPYGEVVPALKEVSIADADGLFMVTTAVIIRDKYVRNVSCSVNNTLLGQEKETVIFIPESFMPSASPWMVALAVILTASPWMVSMTVILAVFIIFMAVSICCIKKLQREKKILSGEKKVEQEEKEIAQQLQEELRWRRTFLHAADVVLDPDTAHPELFLSEDRRSVRRGPYRQRVPDNPERFDSQPCVLGWESFASGKHYWEVEVENVMVWTVGVCRHSVERKGEVLLIPQNGFWTLEMFGNQYRALSSPERILPLKESLCRVGVFLDYEAGDVSFYNMRDRSHIYTCPRSAFTVPVRPFFRLGSDDSPIFICPALTGASGVMVPEEGLKLHRVGTHQSL

SEQ ID NO: 1614 - protein, 336 aa, Homo Sapiens
MEPAAALHFSLPASLLLLLLLLLLSLCALVSAQFTVVGPANPILAMVGENTTLRCHLSPEKNAEDMEVRWFRSQFSPAVFVYKGGRERTEEQMEEYRGRITFVSKDINRGSVALVIHNVTAQENGIYRCYFQEGRSYDEAILRLVVAGLGSKPLIEIKAQEDGSIWLECISGGWYPEPLTVWRDPYGEVVPALKEVSIADADGLFMVTTAVIIRDKYVRNVSCSVNNTLLGQEKETVIFIPESFMPSASPWMVALAVILTASPWMVSMTVILAVFIIFMAVSICCIKKLQREKKILSGEKKVEQEEKEIAQQLQEELRWRRTFLHADVNLTGLRNT

SEQ ID NO: 1615 - protein, 523 aa, Homo Sapiens; identical to SEQ ID NO: 1613

SEQ ID NO: 1616 - protein, 313 aa, Homo Sapiens
MEPAAALHFSLPASLLLLLLLLLLSLCALVSESFMPSASPWMVALAVILTASPWMVSMTVILAVFIIFMAVSICCIKKLQREKKILSGEKKVEQEEKEIAQQLQEELRWRRTFLHAADVVLDPDTAHPELFLSEDRRSVRRGPYRQRVPDNPERFDSQPCVLGWESFASGKHYWEVEVENVMVWTVGVCRHSVERKGEVLLIPQNGFWTLEMFGNQYRALSSPERILPLKESLCRVGVFLDYEAGDVSFYNMRDRSHIYTCPRSAFTVPVRPFFRLGSDDSPIFICPALTGASGVMVPEEGLKLHRVGTHQSL

SEQ ID NO: 1617 - protein, 110 aa, Homo Sapiens
MEPAAALHFSLPASLLLLLLLLLLSLCALVSGLGSKPLIEIKAQEDGSIWLECISGGWYPEPLTVWRDPYGEVVPALKEVSIADADGLFMVTTAVIIRDKYVRNVSCSVN

SEQ ID NO: 1618 - protein, 184 aa, Homo Sapiens
MEPAAALHFSLPASLLLLLLLLLLSLCALVSGLGSKPLIEIKAQEDGSIWLECISGGWYPEPLTVWRDPYGEVVPALKEVSIADADGLFMVTTAVIIRDKYVRNVSCSVNNTLLGQEKETVIFIPESFMPSASPWMVALAVILTASPWMVSMTVILAVFIIFMAVSICCIKKLQREKKILSGEK

SEQ ID NO: 1619 - protein, 407 aa, Homo Sapiens
MEPAAALHFSLPASLLLLLLLLLLSLCALVSGLGSKPLIEIKAQEDGSIWLECISGGWYPEPLTVWRDPYGEVVPALKEVSIADADGLFMVTTAVIIRDKYVRNVSCSVNNTLLGQEKETVIFIPESFMPSASPWMVALAVILTASPWMVSMTVILAVFIIFMAVSICCIKKLQREKKILSGEKKVEQEEKEIAQQLQEELRWRRTFLHAADVVLDPDTAHPELFLSEDRRSVRRGPYRQRVPDNPERFDSQPCVLGWESFASGKHYWEVEVENVMVWTVGVCRHSVERKGEVLLIPQNGFWTLEMFGNQYRALSSPERILPLKESLCRVGVFLDYEAGDVSFYNMRDRSHIYTCPRSAFTVPVRPFFRLGSDDSPIFICPALTGASGVMVPEEGLKLHRVGTHQSL

SEQ ID NO: 1620 - protein, 39 aa, Homo Sapiens
MEPAAALHFSLPASLLLLLLLLLLSLCALVSVLPRSVCV

SEQ ID NO: 1621 - protein, 80 aa, Homo Sapiens
MVTTAVIIRDKYVRNVSCSVNNTLLGQEKETVIFIPESFMPSASPWMVALAVILTASPWMVSMTVILAVFIIFMAVSICC

SEQ ID NO: 1622 - protein, 237 aa, Homo Sapiens
MVTTAVIIRDKYVRNVSCSVNNTLLGQEKETVIFIPESFMPSASPWMVALAVILTASPWMVSMTVILAVFIIFMAVSICCIKKLQREKKILSGEKKVEQEEKEIAQQLQEELRWRRTFLHAADVVLDPDTAHPELFLSEDRRSVRRGPYRQRVPDNPERFDSQPCVLGWESFASGKHYWEVEVENVMVWTVGVCRHSVERKGEVLLIPQNGFWTLEMFGNQYRALSSPERILPLKES

SEQ ID NO: 1623 - protein, 43 aa, Homo Sapiens
MKMASFLAFLLLNFRVCLLLLQLLMPHSAQFSVLGPSGPILAM

SEQ ID NO: 1624 - protein, 92 aa, Homo Sapiens
MKMASFLAFLLLNFRVCLLLLQLLMPHSAQFSVLGPSGPILAMVGEDADLPCHLFPTMSAETMELKWVSSSLRQVVNVYADGKEVEDRQSAP

SEQ ID NO: 1625 - protein, 119 aa, Homo Sapiens
MKMASFLAFLLLNFRVCLLLLQLLMPHSAQFSVLGPSGPILAMVGEDADLPCHLFPTMSAETMELKWVSSSLRQVVNVYADGKEVEDRQSAPYRGRTSILRDGITAGKAALRIHNVTAS

SEQ ID NO: 1626 - protein, 513 aa, Homo Sapiens
MKMASFLAFLLLNFRVCLLLLQLLMPHSAQFSVLGPSGPILAMVGEDADLPCHLFPTMSAETMELKWVSSSLRQVVNVYADGKEVEDRQSAPYRGRTSILRDGITAGKAALRIHNVTASDSGKYLCYFQDGDFYEKALVELKVAALGSDLHVDVKGYKDGGIHLECRSTGWYPQPQIQWSNNKGENIPTVEAPVVADGVGLYAVAASVIMRGSSGEGVSCTIRSSLLGLEKTASISIADPFFRSAQRWIAALAGTLPVLLLLLGGAGYFLWQQQEEKKTQFRKKKREQELREMAWSTMKQEQSTRVKLLEELRWRSIQYASRGERHSAYNEWKKALFKPADVILDPKTANPILLVSEDQRSVQRAKEPQDLPDNPERFNWHYCVLGCESFISGRHYWEVEVGDRKEWHIGVCSKNVQRKGWVKMTPENGFWTMGLTDGNKYRTLTEPRTNLKLPKPPKKVGVFLDYETGDISFYNAVDGSHIHTFLDVSFSEALYPVFRILTLEPTALTICPA

SEQ ID NO: 1627 - protein, 352 aa, Homo Sapiens
MKMASFLAFLLLNFRVCLLLLQLLMPHSAQFSVLGPSGPILAMVGEDADLPCHLFPTMSAETMELKWVSSSLRQVVNVYADGKEVEDRQSAPYRGRTSILRDGITAGKAALRIHNVTASDSGKYLCYFQDGDFYEKALVELKVAALGSDLHVDVKGYKDGGIHLECRSTGWYPQPQIQWSNNKGENIPTVEAPVVADGVGLYAVAASVIMRGSSGEGVSCTIRSSLLGLEKTASISIADPFFRSAQRWIAALAGTLPVLLLLLGGAGYFLWQQQEEKKTQFRKKKREQELREMAWSTMKQEQSTRVKLLEELRWRSIQYASRGERHSAYNEWKKALFKPGEEMLQMRLHFVK

SEQ ID NO: 1628 - protein, 378 aa, Homo Sapiens
MKMASFLAFLLLNFRVCLLLLQLLMPHSAQFSVLGPSGPILAMVGEDADLPCHLFPTMSAETMELKWVSSSLRQVVNVYADGKEVEDRQSAPYRGRTSILRDGITAGKAALRIHNVTASDSGKYLCYFQDGDFYEKALVELKVAALGSDLHVDVKGYKDGGIHLECRSTGWYPQPQIQWSNNKGENIPTVEAPVVADGVGLYAVAASVIMRGSSGEGVSCTIRSSLLGLEKTASISIADPFFRSAQRWIAALAGTLPVLLLLLGGAGYFLWQQQEEKKTQFRKKKREQELREMAWSTMKQEQSTRVKLLEELRWRSIQYASRGERHSAYNEWKKALFKPGPPIGQTQQQTRGQGSPVALSQESAQRTDSWGPEEGGES

SEQ ID NO: 1629 - protein, 461 aa, Homo Sapiens
MKMASFLAFLLLNFRVCLLLLQLLMPHSAQFSVLGPSGPILAMVGEDADLPCHLFPTMSAETMELKWVSSSLRQVVNVYADGKEVEDRQSAPYRGRTSILRDGITAGKAALRIHNVTASDSGKYLCYFQDGDFYEKALVELKVADGVGLYAVAASVIMRGSSGEGVSCTIRSSLLGLEKTASISIADPFFRSAQRWIAALAGTLPVLLLLLGGAGYFLWQQQEEKKTQFRKKKREQELREMAWSTMKQEQSTRVKLLEELRWRSIQYASRGERHSAYNEWKKALFKPADVILDPKTANPILLVSEDQRSVQRAKEPQDLPDNPERFNWHYCVLGCESFISGRHYWEVEVGDRKEWHIGVCSKNVQRKGWVKMTPENGFWTMGLTDGNKYRTLTEPRTNLKLPKPPKKVGVFLDYETGDISFYNAVDGSHIHTFLDVSFSEALYPVFRILTLEPTALTICPA

SEQ ID NO: 1630 - protein, 311 aa, Homo Sapiens
MGIPRAQFSVLGPSGPILAMVGEDADLPCHLFPTMSAETMELKWVSSSLRQVVNVYADGKEVEDRQSAPYRGRTSILRDGITAGKAALRIHNVTASDSGKYLCYFQDGDFYEKALVELKVAALGSNLHVEVKGYEDGGIHLECRSTGWYPQPQIQWSNAKGENIPAVEAPVVADGVGLYEVAASVIMRGGSGEGVSCIIRNSLLGLEKTASISIADPFFRSAQPWIAALAGTLPILLLLLAGASYFLWRQQKEITALSSEIESEQEMKEMGYAATEREISLRESLQEELKRKKIQYLTRGEESSSDTNKSA

SEQ ID NO: 1631 - protein, 334 aa, Homo Sapiens
MKMASSLAFLLLNFHVSLLLVQLLTPCSAQFSVLGPSGPILAMVGEDADLPCHLFPTMSAETMELKWVSSSLRQVVNVYADGKEVEDRQSAPYRGRTSILRDGITAGKAALRIHNVTASDSGKYLCYFQDGDFYEKALVELKVAALGSNLHVEVKGYEDGGIHLECRSTGWYPQPQIQWSNAKGENIPAVEAPVVADGVGLYEVAASVIMRGGSGEGVSCIIRNSLLGLEKTASISIADPFFRSAQPWIAALAGTLPILLLLLAGASYFLWRQQKEITALSSEIESEQEMKEMGYAATEREISLRESLQEELKRKKIQYLTRGEESSSDTNKSA

SEQ ID NO: 1632 - protein, 334 aa, Homo Sapiens; identical to SEQ ID NO: 1631

SEQ ID NO: 1633 - protein, 334 aa, Homo Sapiens; identical to SEQ ID NO: 1631

SEQ ID NO: 1634 - protein, 334 aa, Homo Sapiens; identical to SEQ ID NO: 1631

SEQ ID NO: 1635 - protein, 160 aa, Homo Sapiens
MKMASSLAFLLLNFHVSLLLVQLLTPCSAQFSVLGPSGPILAMVGEDADLPCHLFPTMSAETMELKWVSSSLRQVVNVYADGKEVEDRQSAPYRGRTSILRDGITAGKAALRIHNVTASDSGKYLCYFQDGDFYEKALVELKVADPFFRSAQPWIAALAG

SEQ ID NO: 1636 - protein, 43 aa, Homo Sapiens
MKMASSLAFLLLNFHVSLLLVQLLTPCSGLCSPLGSLYLAFPV

SEQ ID NO: 1637 - protein, 115 aa, Homo Sapiens
MVGEDADLPCHLFPTMSAETMELKWVSSSLRQVVNVYADGKEVEDRQSAPYRGRTSILRDGITAGKAALRIHNVTASDSGKYLCYFQDGDFYEKALVELKVAALGSNLHVEVKGY

SEQ ID NO: 1638 - protein, 196 aa, Homo Sapiens
MVGEDADLPCHLFPTMSAETMELKWVSSSLRQVVNVYADGKEVEDRQSAPYRGRTSILRDGITAGKAALRIHNVTASDSGKYLCYFQDGDFYEKALVELKVAALGSNLHVEVKGYEDGGIHLECRSTGWYPQPQIQWSNAKGENIPAVEAPVVADGVGLYEVAASVIMRGGSGEGVSCIIRNSLLGLEKTASISIA

SEQ ID NO: 1639 - protein, 292 aa, Homo Sapiens
MVGEDADLPCHLFPTMSAETMELKWVSSSLRQVVNVYADGKEVEDRQSAPYRGRTSILRDGITAGKAALRIHNVTASDSGKYLCYFQDGDFYEKALVELKVAALGSNLHVEVKGYEDGGIHLECRSTGWYPQPQIQWSNAKGENIPAVEAPVVADGVGLYEVAASVIMRGGSGEGVSCIIRNSLLGLEKTASISIADPFFRSAQPWIAALAGTLPILLLLLAGASYFLWRQQKEITALSSEIESEQEMKEMGYAATEREISLRESLQEELKRKKIQYLTRGEESSSDTNKSA

SEQ ID NO: 1640 - protein, 115 aa, Homo Sapiens
RGGSGEGVSCIIRNSLLGLEKTASISIADPFFRSAQPWIAALAGTLPILLLLLAGASYFLWRQQKEITALSSEIESEQEMKEMGYAATEREISLRESLQEELKRKKIQYLTREWL

SEQ ID NO: 1641 - protein, 138 aa, Homo Sapiens
MKMASSLAFLLLNFHVSLFLVQLLTPCSAQFSVLGPSGPILAMVGEDADLPCHLFPTMSAETMELRWVSSSLRQVVNVYADGKEVEDRQSAPYRGRTSILRDGITAGKAALRIHNVTASDSGKYLCYFQDGDFYEKAL

SEQ ID NO: 1642 - protein, 238 aa, Homo Sapiens
MKMASSLAFLLLNFHVSLFLVQLLTPCSAQFSVLGPSGPILAMVGEDADLPCHLFPTMSAETMELRWVSSSLRQVVNVYADGKEVEDRQSAPYRGRTSILRDGITAGKAALRIHNVTASDSGKYLCYFQDGDFYEKALVELKVAALGSDLHIEVKGYEDGGIHLECRSTGWYPQPQIKWSDTKGENIPAVEAPVVADGVGLYAVAASVIMRGSSGGGVSCIIRNSLLGLEKTASISIA

SEQ ID NO: 1643 - protein, 584 aa, Homo Sapiens
MKMASSLAFLLLNFHVSLFLVQLLTPCSAQFSVLGPSGPILAMVGEDADLPCHLFPTMSAETMELRWVSSSLRQVVNVYADGKEVEDRQSAPYRGRTSILRDGITAGKAALRIHNVTASDSGKYLCYFQDGDFYEKALVELKVAALGSDLHIEVKGYEDGGIHLECRSTGWYPQPQIKWSDTKGENIPAVEAPVVADGVGLYAVAASVIMRGSSGGGVSCIIRNSLLGLEKTASISIADPFFRSAQPWIAALAGTLPISLLLLAGASYFLWRQQKEKIALSRETEREREMKEMGYAATEQEISLREKLQEELKWRKIQYMARGEKSLAYHEWKMALFKPADVILDPDTANAILLVSEDQRSVQRAEEPRDLPDNPERFEWRYCVLGCENFTSGRHYWEVEVGDRKEWHIGVCSKNVERKKGWVKMTPENGYWTMGLTDGNKYRALTEPRTNLKLPEPPRKVGIFLDYETGEISFYNATDGSHIYTFPHASFSEPLYPVFRILTLEPTALTICPIPKEVESSPDPDLVPDHSLETPLTPGLANESGEPQAEVTSLLLPAHPGAEVSPSATTNQNHKLQARTEALY

SEQ ID NO: 1644 - protein, 127 aa, Homo Sapiens
MKMASSLAFLLLNFHVSLFLVQLLTPCSDADLPCHLFPTMSAETMELRWVSSSLRQVVNVYADGKEVEDRQSAPYRGRTSILRDGITAGKAALRIHNVTASDSGKYLCYFQDGDFYEKALVELKVAA

SEQ ID NO: 1645 - protein, 100 aa, Homo Sapiens
MVGEDADLPCHLFPTMSAETMELRWVSSSLRQVVNVYADGKEVEDRQSAPYRGRTSILRDGITAGKAALRIHNVTASDSGKYLCYFQDGDFYEKALVELK

SEQ ID NO: 1646 - protein, 140 aa, Homo Sapiens
MVGEDADLPCHLFPTMSAETMELRWVSSSLRQVVNVYADGKEVEDRQSAPYRGRTSILRDGITAGKAALRIHNVTASDSGKYLCYFQDGDFYEKALVELKVAALGSDLHIEVKGYEDGGIHLECRSTGWYPQPQIKWSDT

SEQ ID NO: 1647 - protein, 250 aa, Homo Sapiens
MVGEDADLPCHLFPTMSAETMELRWVSSSLRQVVNVYADGKEVEDRQSAPYRGRTSILRDGITAGKAALRIHNVTASDSGKYLCYFQDGDFYEKALVELKVAALGSDLHIEVKGYEDGGIHLECRSTGWYPQPQIKWSDTKGENIPAVEAPVVADGVGLYAVAASVIMRGSSGGGVSCIIRNSLLGLEKTASISIADPFFRSAQPWIAALAGTLPISLLLLAGASYFLWRQQKEKIALSRETEREREMKE

SEQ ID NO: 1648 - protein, 535 aa, Homo Sapiens
MVGEDADLPCHLFPTMSAETMELRWVSSSLRQVVNVYADGKEVEDRQSAPYRGRTSILRDGITAGKAALRIHNVTASDSGKYLCYFQDGDFYEKALVELKVAALGSDLHIEVKGYEDGGIHLECRSTGWYPQPQIKWSDTKGENIPAVEAPVVADGVGLYAVAASVIMRGSSGGGVSCIIRNSLLGLEKTASISIADPFFRSAQPWIAALAGTLPISLLLLAGASYFLWRQQKEKIALSRETEREREMKEMGYAATEQEISLREWRKIQYMARGEKSLAYHEWKMALFKPADVILDPDTANAILLVSEDQRSVQRAEEPRDLPDNPERFEWRYCVLGCENFTSGRHYWEVEVGDRKEWHIGVCSKNVERKKGWVKMTPENGYWTMGLTDGNKYRALTEPRTNLKLPEPPRKVGIFLDYETGEISFYNATDGSHIYTFPHASFSEPLYPVFRILTLEPTALTICPIPKEVESSPDPDLVPDHSLETPLTPGLANESGEPQAEVTSLLLPAHPGAEVSPSATTNQNHKLQARTEALY

SEQ ID NO: 1649 - protein, 210 aa, Homo Sapiens
MVGEDADLPCHLFPTMSAETMELRWVSSSLRQVVNVYADGKEVEDRQSAPYRGRTSILRDGITAGKAALRIHNVTASDSGKYLCYFQDGDFYEKALVELKVAEWRKIQYMARGEKSLAYHEWKMALFKPADVILDPDTANAILLVSEDQRSVQRAEEPRDLPDNPERFEWRYCVLGCENFTSGRHYWEVEVGDRKEWHIGVCSKNVERKK

SEQ ID NO: 1650 - protein, 270 aa, Homo Sapiens
MWLLVSVILISRISSVGGEAMFCDFPKINHGILYDEEKYKPFSQVPTGEVFYYSCEYNFVSPSKSFWTRITCAEEGWSPTPKCLRLCFFPFVENGHSESSGQTHLEGDTVQIICNTGYRLQNNENNISCVERGWSTPPKCRSTISAEKCGPPPPIDNGDITSFLLSVYAPGSSVEYQCQNLYQLEGNNQITCRNGQWSEPPKCLDPCVISQEIMEKYNIKLKWTNQQKLYSRTGDIVEFVCKSGYHPTKSHSFRAMCQNGKLVYPSCEEK

SEQ ID NO: 1651 - protein, 81 aa, Homo Sapiens
MRLLVLSSLLCILLLCFSIFSTEGKRRPAKAWSGRRTRLCCHRVPSPNSTNLKGHHVRLCKPCKLEPEPRLWVVPGALPQV

SEQ ID NO: 1652 - protein, 121 aa, Homo Sapiens
MAASQCLCCSKFLFQRQNLACFLTNPHCGSLVNADGHGEVWTDWNNMSKFFQYGWRCTTNENTYSNRTLMGNWNQERYDLRNIVQPKPLPSQDLSESLTGSQDINLNWILPDTNAQKSQLT

SEQ ID NO: 1653 - protein, 150 aa, Homo Sapiens
MAASQCLCCSKFLFQRQNLACFLTNPHCGSLVNADGHGEVWTDWNNMSKFFQYGWRCTTNENTYSNRTLMGNWNQERYDLRNIVQPKPLPSQFGHYFETTYDTSYNNKMPLSTHRFKREPHWFPGHQPELDPPRYKCTEKSTYMNSYSKP

SEQ ID NO: 1654 - protein, 142 aa, Homo Sapiens
MEQPSKDFCDSHKKSSKSSTYSASSYSSSGKRQNLACFLTNPHCGSLVNADGHGEVWTDWNNMSKFFQYGWRCTTNENTYSNRTLMGNWNQERYDLRNIVQPKPLPSQFGHYFETTYDTSYNNKMPLSTHRFKREPHWFPGH

SEQ ID NO: 1655 - protein, 104 aa, Homo Sapiens
MSKFFQYGWRCTTNENTYSNRTLMGNWNQERYDLRNIVQPKPLPSQFGHYFETTYDTSYNNKMPLSTHRFKREPHWFPGHQPELDPPRYKCTEKSTYMNSYSKP

SEQ ID NO: 1656 - protein, 190 aa, Homo Sapiens
MVIWVILSLLGELGKPGLLTSLKNMEQPSKDFCDSHKKSSKSSTYSASSYSSSGKRQNLACFLTNPHCGSLVNADGHGEVWTDWNNMSKFFQYGWRCTTNENTYSNRTLMGNWNQERYDLRNIVQPKPLPSQFGHYFETTYDTSYNNKMPLSTHRFKREPHWFPGHQPELDPPRYKCTEKSTYMNSYSKP

SEQ ID NO: 1657 - protein, 25 aa, Homo Sapiens
MWTALVLIWIFSLSLSESHAASNDP

SEQ ID NO: 1658 - protein, 114 aa, Homo Sapiens
MWTALVLIWIFSLSLSESHAASNDPRNFVPNKMWKGLVKRNASVETVDNKTSEDVTMAAASPVTLTKGTSAAHLNSMEVTTEDTSRTDAYESYKKKDYTQVDYLINGMYADSEM

SEQ ID NO: 1659 - protein, 449 aa, Homo Sapiens
MWTALVLIWIFSLSLSESHAASNDPRNFVPNKMWKGLVKRNASVETVDNKTSEDVTMAAASPVTLTKGTSAAHLNSMEVTTEDTSRTDVSEPATSGGAADGVTSIAPTAVASSTTAASITTAASSMTVASSAPTTAASSTTVASIAPTTAASSMTAASSTPMTLALPAPTSTSTGRTPSTTATGHPSLSTALAQVPKSSALPRTATLATLATRAQTVATTANTSSPMSTRPSPSKHMPSDTAASPVPPMRPQAQGPISQVSVDQPVVNTTNKSTPMPSNTTPEPAPTPTVVTTTKAQAREPTASPVPVPHTSPIPEMEAMSPTTQPSPMPYTQRAAGPGTSQAPEQVETEATPGTDSTGPTPRSSGGTKMPATDSCQPSTQGQYMVVTTEPLTQAVVDKTLLLVVLLLGVTLFITVLVLFALQAYESYKKKDYTQVDYLINGMYADSEM

SEQ ID NO: 1660 - protein, 145 aa, Homo Sapiens
MLTRLVLSAHLSSTTSPPWTHAAISWELDNVLMPSPRIWPQVTPTGRSASVRSEGNTSSLWNFSAGQDVHAIVTRTCESVLSSAVYTHGCGCVRSATNITCQSSGQQRQAARQEEENSICKAHDSREGRLGYPLSAHQPGSGGPN

SEQ ID NO: 1661 - protein, 145 aa, Homo Sapiens; identical to SEQ ID NO: 1660

SEQ ID NO: 1662 - protein, 98 aa, Homo Sapiens
MVLAMLGALHPRAGLSLFLHLILAVALLRSQPLRSQRSVPEAFSAPLELSQPLSGLVDDYGILPKHPRPRGPRPLLSRAQQRKRDGPDLAEYYYDAHL

SEQ ID NO: 1663 - protein, 376 aa, Homo Sapiens
MGHQFLRGLLTLLLPPPPLYTRHRMLGPESVPPPKRSRSKLMAPPRIGTHNGTFHCDEALACALLRLLPEYRDAEIVRTRDPEKLASCDIVVDVGGEYDPRRHRYDHHQRSFTETMSSLSPGKPWQTKLSSAGLIYLHFGHKLLAQLLGTSEEDSMVGTLYDKMYENFVEEVDAVDNGISQWAEGEPRYALTTTLSARVARLNPTWNHPDQDTEAGFKRAMDLVQEEFLQRLDFYQHSWLPARALVEEALAQRFQVDPSGEIVELAKGACPWKEHLYHLESGLSPPVAIFFVIYTDQAGQWRIQCVPKEPHSFQSRLPLPEPWRGLRDEALDQVSGIPGCIFVHASGFTGGHHTREGALSMARATLAQRSYLPQIS

SEQ ID NO: 1664 - protein, 301 aa, Homo Sapiens
MLGPESVPPPKRSRSKLMAPPRIGTHNGTFHCDEALACALLRLLPEYRDAEIVRTRDPEKLASCDIVVDVGGEYDPRRHRYDHHQRSFTETMSSLSPGKPWQTKLSSAGLIYLHFGHKLLAQLLGTSEEDSMVGTLYDKAGFKRAMDLVQEEFLQRLDFYQHSWLPARALVEEALAQRFQVDPSGEIVELAKGACPWKEHLYHLESGLSPPVAIFFVIYTDQAGQWRIQCVPKEPHSFQSRLPLPEPWRGLRDEALDQVSGIPGCIFVHASGFTGGHHTREGALSMARATLAQRSYLPQIS

SEQ ID NO: 1665 - protein, 213 aa, Homo Sapiens
MYENFVEEVDAVDNGISQWAEGEPRYALTTTLSARVARLNPTWNHPDQDTEAGFKRAMDLVQEEFLQRLDFYQHSWLPARALVEEALAQRFQVDPSGEIVELAKGACPWKEHLYHLESGLSPPVAIFFVIYTDQAGQWRIQCVPKEPHSFQSRLPLPEPWRGLRDEALDQVSGIPGCIFVHASGFTGGHHTREGALSMARATLAQRSYLPQIS

SEQ ID NO: 1666 - protein, 130 aa, Homo Sapiens
  misc_feature (1)..(1): Xaa can be any naturally occurring amino acid
XMVGTLYDKVDPSGEIVELAKGACPWKEHLYHLESGLSPPVAIFFVIYTDQAGQWRIQCVPKEPHSFQSRLPLPEPWRGLRDEALDQVSGIPGCIFVHASGFTGGHHTREGALSMARATLAQRSYLPQIS

SEQ ID NO: 1667 - protein, 46 aa, Homo Sapiens
MAVEDHFELCLAKCRTSSQSVQHENTYRDPIAKYCYGESPPELFPA

SEQ ID NO: 1668 - protein, 47 aa, Homo Sapiens
MVNLAAMVWRRLLRKRWVLALVFGLSLVYFLSSTFKQATFARGRICW

SEQ ID NO: 1669 - protein, 205 aa, Homo Sapiens
MVNLAAMVWRRLLRKRWVLALVFGLSLVYFLSSTFKQEERAVRDRNLLQVHDHNQPIPWKVQFNLGNSSRPSNQCRNSIQGKHLITDELGYVCERKDLLVNGCCNVNVPSTKQYCCDGCWPNGCCSAYEYCVSCCLQPNKQLLLERFLNRAAVAFQNLFMAVEDHFELCLAKCRTSSQSVQHENTYRDPIAKYCYGESPPELFPA

SEQ ID NO: 1670 - protein, 43 aa, Homo Sapiens
  misc_feature (1)..(1): Xaa can be any naturally occurring amino acid
XFGLSLVYFLSSTFKQSVQHENTYRDPIAKYCYGESPPELFPA

SEQ ID NO: 1671 - protein, 53 aa, Homo Sapiens
MPAGVPMSTYLKMFAASLLAMCAGAEVVHRYYRPDLMRNRLRRVKLISQSHIA

SEQ ID NO: 1672 - protein, 53 aa, Homo Sapiens; identical to SEQ ID NO: 1671

SEQ ID NO: 1673 - protein, 59 aa, Homo Sapiens
MPAGVPMSTYLKMFAASLLAMCAGAEVVHRYYRPDLQNWITSLSVGELEGLGRVEQRRP

SEQ ID NO: 1674 - protein, 59 aa, Homo Sapiens; identical to SEQ ID NO: 1673

SEQ ID NO: 1675 - protein, 71 aa, Homo Sapiens
MPAGVPMSTYLKMFAASLLAMCAGAEVVHRYYRPDLTIPEIPPKRGELKTELLGLKERKHKPQVSQQEELK

SEQ ID NO: 1676 - protein, 71 aa, Homo Sapiens; identical to SEQ ID NO: 1675

SEQ ID NO: 1677 - protein, 71 aa, Homo Sapiens; identical to SEQ ID NO: 1675

SEQ ID NO: 1678 - protein, 71 aa, Homo Sapiens; identical to SEQ ID NO: 1675

SEQ ID NO: 1679 - protein, 37 aa, Homo Sapiens
MPAGVPMSTYLKMFAASLLAMCAGAEVVHRYYRPDLV

SEQ ID NO: 1680 - protein, 46 aa, Homo Sapiens
MPAGVPMSTYLKMFAASLLAMCAGAEVVHRYYRPDLVSAGGLLFYF

SEQ ID NO: 1681 - protein, 135 aa, Homo Sapiens [sequence omitted]

SEQ ID NO: 1682 - protein, 135 aa, Homo Sapiens
MFQNLQGTFEKEIGKIIPFTIAFKRAEAVEPDGCVQSWRCCLPCDLGQASRFIHTTVCSAIRWRSCKGERNFAERHILPAELEEQSNHAGMGPILPAMPSVDGNHFQHPAGDCHPYGILCLQAHSASVTARQVLQ

SEQ ID NO: 1683 - protein, 107 aa, Homo Sapiens
MLERENESHGSKSCSRARIGTEVACRACLPPHCAMPPIDAFLCLPFSFALVSGKLYQWKEPVISSVHSKVKRTAEVKEEIVEKEMKKLVHSVFNMADYTFPLQVNTW

SEQ ID NO: 1684 - protein, 49 aa, Homo Sapiens
MLRPALPWLYLGLCSLLVGEAEAPSPVDPLERSRPYAVLRGQNLDQTLH

SEQ ID NO: 1685 - protein, 76 aa, Homo Sapiens
MLRPALPWLYLGLCSLLVGEAEAPSPVDPLERSRPYAVLRGQNLESLSPRLECNGAISARCNLRVWGSSDSPASAP

SEQ ID NO: 1686 - protein, 76 aa, Homo Sapiens; identical to SEQ ID NO: 1685

SEQ ID NO: 1687 - protein, 61 aa, Homo Sapiens
MLRPALPWLYLGLCSLLVGEAEAPSPVDPLERSRPYAVLRGQNLETTGERICLQLFAQHLT

SEQ ID NO: 1688 - protein, 72 aa, Homo Sapiens
MLRPALPWLYLGLCSLLVGEAEAPSPVDPLERSRPYAVLRGQNLVLMGTIFSILLVTVILMAFCVYKPIRRR

SEQ ID NO: 1689 - protein, 126 aa, Homo Sapiens
MRLPGCTLAASEAAPLLNPLVDDYVASEGAVQRVLVPAYAKQLSPATQLAIQRATPETGPENGTKLPPPRPEDMLNAAAALDSALEESGPGSTGELRHSLGLTVSPCRTRGSGQKNSRRKRDLVLS

SEQ ID NO: 1690 - protein, 358 aa, Homo Sapiens
MRLPGCTLAASEAAPLLNPLVDDYVASEGAVQRVLVPAYAKQLSPATQLAIQRATPETGPENGTKLPPPRPEDMLNAAAALDSALEESGPGSTGELRHSLGLTVSPCRTRGSGQKNSRRKRDLVLSKLVHNVHNHITNDKRFNGSESIKSSWNISVVKFLLEKLKQELVTSPHNYTDKELKGACVAYFLTKRREYRNSLNPFKGLKEKEEKKLRSRRYRLFANRSSIMRHFGPEDQRLWNDVTEELMSDEEDSLNEPGVWVARPPRFRAQRLTELCYHLDANSKHGTKANRVYGPPSDRLPSAEAQLLPPELYNPNFQEEEDEGGDENAPGSPSFDQPHKTCCPDLNSFIEIKVEKDE

SEQ ID NO: 1691 - protein, 9 aa, Homo Sapiens
MSFSATILF

SEQ ID NO: 1692 - protein, 9 aa, Homo Sapiens
MSFSATILF

SEQ ID NO: 1693 - protein, 11 aa, Homo Sapiens
MSFSATILFSP

SEQ ID NO: 1694 - protein, 50 aa, Homo Sapiens
MSFSATILFSPPSGSEARCCCCACKSETNGGNTGSQGGNPPPSTPITVTG

SEQ ID NO: 1695 - protein, 79 aa, Homo Sapiens
MSFSATILFSPPSGSEARCCCCACKSETNGGNTGSQGGNPPPSTPITVTGHGLAVQSSEQLLHVIYQRVDKAVGLAEAA

SEQ ID NO: 1696 - protein, 83 aa, Homo Sapiens
MSFSATILFSPPSGSEARCCCCACKSETNGGNTGSQGGNPPPSTPITVTGHGLAVQSSEQLLHVIYQRVDKAVGLAEAALGLA

SEQ ID NO: 1697 - protein, 106 aa, Homo Sapiens
MSFSATILFSPPSGSEARCCCCACKSETNGGNTGSQGGNPPPSTPITVTGHGLAVQSSEQLLHVIYQRVDKAVGLAEAALGLARANNELLKRLQEEVGDLRQGKVS

SEQ ID NO: 1698 - protein, 136 aa, Homo Sapiens
MSFSATILFSPPSGSEARCCCCACKSETNGGNTGSQGGNPPPSTPITVTGHGLAVQSSEQLLHVIYQRVDKAVGLAEAALGLARANNELLKRLQEEVGDLRQGKVSIPDEDGESRAHSSPPEEPGPLKESPGEAFK

SEQ ID NO: 1699 - protein, 199 aa, Homo Sapiens
MSFSATILFSPPSGSEARCCCCACKSETNGGNTGSQGGNPPPSTPITVTGHGLAVQSSEQLLHVIYQRVDKAVGLAEAALGLARANNELLKRLQEEVGDLRQGKVSIPDEDGESRAHSSPPEEPGPLKESPGEAFKALSAVEEECDSVGSGVQVVIEELRQLGAASVGPGPLGFPATQRDMRLPGCTLAASEAAPLLNP

SEQ ID NO: 1700 - protein, 209 aa, Homo Sapiens
MSFSATILFSPPSGSEARCCCCACKSETNGGNTGSQGGNPPPSTPITVTGHGLAVQSSEQLLHVIYQRVDKAVGLAEAALGLARANNELLKRLQEEVGDLRQGKVSIPDEDGESRAHSSPPEEPGPLKESPGEAFKALSAVEEECDSVGSGVQVVIEELRQLGAASVGPGPLGFPATQRDMRLPGCTLAASEAAPLLNPLVDDYVASEG

SEQ ID NO: 1701 - protein, 498 aa, Homo Sapiens
MSFSATILFSPPSGSEARCCCCACKSETNGGNTGSQGGNPPPSTPITVTGHGLAVQSSEQLLHVIYQRVDKAVGLAEAALGLARANNELLKRLQEEVGDLRQGKVSIPDEDGESRAHSSPPEEPGPLKESPGEAFKALSAVEEECDSVGSGVQVVIEELRQLGAASVGPGPLGFPATQRDMRLPGCTLAASEAAPLLNPLVDDYVASEGAVQRVLVPAYAKQLSPATQLAIQRATPETGPENGTKLPPPRPEDMLNAAAALDSALEESGPGSTGELRHSLGLTVSPCRTRGSGQKNSRRKRDLVLSKLVHNVHNHITNDKRFNGSESIKSSWNISVVKFLLEKLKQELVTSPHNYTDKELKGACVAYFLTKRREYRNSLNPFKGLKEKEEKKLRSRRYRLFANRSSIMRHFGPEDQRLWNDVTEELMSDEEDSLNEPDRLPSAEAQLLPPELYNPNFQEEEDEGGDENAPGSPSFDQPHKTCCPDLNSFIEIKVEKDE

SEQ ID NO: 1702 - protein, 538 aa, Homo Sapiens
MSFSATILFSPPSGSEARCCCCACKSETNGGNTGSQGGNPPPSTPITVTGHGLAVQSSEQLLHVIYQRVDKAVGLAEAALGLARANNELLKRLQEEVGDLRQGKVSIPDEDGESRAHSSPPEEPGPLKESPGEAFKALSAVEEECDSVGSGVQVVIEELRQLGAASVGPGPLGFPATQRDMRLPGCTLAASEAAPLLNPLVDDYVASEGAVQRVLVPAYAKQLSPATQLAIQRATPETGPENGTKLPPPRPEDMLNAAAALDSALEESGPGSTGELRHSLGLTVSPCRTRGSGQKNSRRKRDLVLSKLVHNVHNHITNDKRFNGSESIKSSWNISVVKFLLEKLKQELVTSPHNYTDKELKGACVAYFLTKRREYRNSLNPFKGLKEKEEKKLRSRRYRLFANRSSIMRHFGPEDQRLWNDVTEELMSDEEDSLNEPGVWVARPPRFRAQRLTELCYHLDANSKHGTKANRVYGPPSDRLPSAEAQLLPPELYNPNFQEEEDEGGDENAPGSPSFDQPHKTCCPDLNSFIEIKVEKDE

SEQ ID NO: 1703 - protein, 538 aa, Homo Sapiens; identical to SEQ ID NO: 1702

SEQ ID NO: 1704 - protein, 538 aa, Homo Sapiens; identical to SEQ ID NO: 1702

SEQ ID NO: 1705 - protein, 402 aa, Homo Sapiens
MASLGLLLLLLLTALPPLWSSSLPGLDTAESKATIADLILSALERATVFLEQRLPEINLDGMVGVRVLEEQLKSVREKWAQEPLLQPLSLRVGMLGEKLEAAIQRSLHYLKLSDPKYLREFQLTLQPGFWKLPHAWIHTDASLVYPTFGPQDSFSEERSDVCLVQLLGTGTDSSEPCGLSDLCRSLMTKPGCSGYCLSHQLLFFLWARMRGCTQGPLQQSQDYINLFCANMMDLNRRAEAIGYAYPTRDIFMENIMFCGMGGFSDFYKLRWLEAILSWQKQQEGCFGEPDAEDEELSKAIQYQQHFSRRVKRREKQFPDSRSVAQAGVQWRNLGSLQPLPPGFKQFSCLILPSSWDYRSVPPYLANFYIFLVETGFHHVAHAGLELLISRDPPTSGSQSVGL

SEQ ID NO: 1706 - protein, 361 aa, Homo Sapiens
MASLGLLLLLLLTALPPLWSSSLPGLDTAESKATIADLILSALERATVFLEQRLPEINLDGMVGVRVLEEQLKSVREKWAQEPLLQPLSLRVGMLGEKLEAAIQRSLHYLKLSDPKYLREFQLTLQPGFWKLPHAWIHTDASLVYPTFGPQDSFSEERSDVCLVQLLGTGTDSSEPCGLSDLCRSLMTKPGCSGYCLSHQLLFFLWARMRGCTQGPLQQSQDYINLFCANMMDLNRRAEAIGYAYPTRDIFMENIMFCGMGGFSDFYKLRWLEAILSWQKQQEGCFGEPDAEDEELSKAIQYQQHFSRRVKRREKQFPDGCSSHNTATAVAALGGFLYILAEYPPANREPHPSTPPPPSSR

SEQ ID NO: 1707 - protein, 434 aa, Homo Sapiens
MASLGLLLLLLLTALPPLWSSSLPGLDTAESKATIADLILSALERATVFLEQRLPEINLDGMVGVRVLEEQLKSVREKWAQEPLLQPLSLRVGMLGEKLEAAIQRSLHYLKLSDPKYLREFQLTLQPGFWKLPHAWIHTDASLVYPTFGPQDSFSEERSDVCLVQLLGTGTDSSEPCGLSDLCRSLMTKPGCSGYCLSHQLLFFLWARMRGCTQGPLQQSQDYINLFCANMMDLNRRAEAIGYAYPTRDIFMENNVTGHPVFYLPLCDSFLPPKAAPVTELYTDGPVMFCGMGGFSDFYKLRWLEAILSWQKQQEGCFGEPDAEDEELSKAIQYQQHFSRRVKRREKQFPDSRSVAQAGVQWRNLGSLQPLPPGFKQFSCLILPSSWDYRSVPPYLANFYIFLVETGFHHVAHAGLELLISRDPPTSGSQSVGL

SEQ ID NO: 1708 - protein, 182 aa, Homo Sapiens
MEALVCAFSELHIREDAVSQAQGRPGHPDAPPNIYEGGLGSPQPQCPSAQGSKPKNFRLRHLRGLGLYLESHPPPTGQCESHWLGRLMAGGCLPQPEGTAWALDLPQGTLGPRNSLCSALLEARLPRDSLGSSASSSSMDPDKGALPQPSPSRLRPKRSWGTWEEAMCPLCKRTRSGALERP

SEQ ID NO: 1709 - protein, 191 aa, Homo Sapiens
  misc_feature (1)..(1): Xaa can be any naturally occurring amino acid
XEQGPAAPKSWLLLPTTLALHGSLDAVSQAQGRPGHPDAPPNIYEGGLGSPQPQCPSAQGSKPKNFRLRHLRGLGLYLESHPPPTGQCESHWLGRLMAGGCLPQPEGTAWALDLPQGTLGPRNSLCSALLEARLPRDSLGSSASSSSMDPDKGALPQPSPSRLRPKRSWGTWEEAMCPLCKRTRSGALERP

SEQ ID NO: 1710 - protein, 90 aa, Homo Sapiens
MKTLPVLVLSLTLLTVFSETSPILTEKQAKQLLRSRRQDRPSKPGFPDEPMREYMHHLLALEHRAEEQFLEHWLNPHCKPHCDRNRIHPV

SEQ ID NO: 1711 - protein, 275 aa, Homo Sapiens
MDGDEKELESSEEGGSAEERRLEPPSSSHYCLYSYRGSRLAQQRGDSEDGSPSGTNAETPSGDDFSLSLADTNLPSEVEPELRSFIAKRLSRGAVFEGLGNVASVELKIPGYRVGCYYCLFQNEKLLPETVTIDSERNPSEYVVCFLGGSEKGLELFRLELDKYIQGLKNNMNCEARGLESHIKSYLSSWFEDVVCPIQRVVLLFQEKLTFLLHAALSYTPVEVKESDEKTKRDINRFLSVASLQGLIHEGTMTSLCMAMTEEQHKSVVIDCSSS

SEQ ID NO: 1712 - protein, 75 aa, Homo Sapiens
MLPSLQESMDGDEKELESSEEGGSAEERRLEPPSSSHYCLYSYRGSRLAQQRGDSEDGSPSGTNAETPSGDDFRY

SEQ ID NO: 1713 - protein, 396 aa, Homo Sapiens
MLPSLQESMDGDEKELESSEEGGSAEERRLEPPSSSHYCLYSYRGSRLAQQRGDSEDGSPSGTNAETPSGDDFSLSLADTNLPSEVEPELRSFIAKRLSRGAVFEGLGNVASVELKIPGYRVGCYYCLFQNEKLLPETVTIDSERNPSEYVVCFLGGSEKGLELFRLELDKYIQGLKNNMNCEARGLESHIKSYLSSWFEDVVCPIQRVVLLFQEKLTFLLHAALSYTPVEVKESDEKTKRDINRFLSVASLQGLIHEGTMTSLCMAMTEEQHKSVVIDCSSSQPQFCNAGSNRFCEDWMQAFLNGAKGGNPFLFRQVLENFKLKAIQDTNNLKRFIRQAEMNHYALFKCYMFLKNCGSGDILLKIVKVEHEEMPEAKNVIAVLEEFMKEALDQSF

SEQ ID NO: 1714 - protein, 396 aa, Homo Sapiens [sequence omitted]

SEQ ID NO: 1715 - protein, 38 aa, Homo Sapiens
MNCEARGLESHIKSYLSSWFEDVVCPIQRVVLLFQEKL

SEQ ID NO: 1716 - protein, 88 aa, Homo Sapiens
MNCEARGLESHIKSYLSSWFEDVVCPIQRVVLLFQEKLTFLLHAALSYTPVEVKESDEKTKRDINRFLSVASLQGLIHEGTMTSLCMA

SEQ ID NO: 1717 - protein, 132 aa, Homo Sapiens
MNCEARGLESHIKSYLSSWFEDVVCPIQRVVLLFQEKLTFLLHAALSYTPVEVKESDEKTKRDINRFLSVASLQGLIHEGTMTSLCMAMTEEQHKSVVIDCSSSQPQFCNAGSNRFCEDWMQAFLNGAKGGN

SEQ ID NO: 1718 - protein, 48 aa, Homo Sapiens
  misc_feature (1)..(1): Xaa can be any naturally occurring amino acid
XAMTEEQHKSVVIDCSSSQPQFCNAGHTRHKQFEEIYPTGRNESLCFV

SEQ ID NO: 1719 - protein, 97 aa, Homo Sapiens
  misc_feature (1)..(1): Xaa can be any naturally occurring amino acid
XLLFQEKLTFLLHAALSYTPVEVKESDEKTKRDINRFLSVASLQGLIHEGTMTSLCMAMTEEQHKSVVIDCSSSQPQFCNAEILDPPPLLFTLSHPS

SEQ ID NO: 1720 - protein, 189 aa, Homo Sapiens
LIALTSLTAASSFSKAREEEITPVVSIAYKVLEVFPKGRWVLITCCAPQPPPPITYSLCGTKNIKVAKKVVKTHEPASFNLNVTLKSSPDLLTYFCWASSTSGAHVDSARLQMHWELWSKPVSELRANFTLQDRGAGPRVEMICQASSGSPPITNSLIGKDGQVHLQQRPCHRQPANFSFLPSQTSDWF

SEQ ID NO: 1721 - protein, 265 aa, Homo Sapiens
MGLPGLFCLAVLAASSFSKAREEEITPVVSIAYKVLEVFPKGRWVLITCCAPQPPPPITYSLCGTKNIKVAKKVVKTHEPASFNLNVTLKSSPDLLTYFCWASSTSGAHVDSARLQMHWELWSKPVSELRANFTLQDRGAGPRVEMICQASSGSPPITNSLIGKDGQVHLQQRPCHRQPANFSFLPSQTSDWFWCQAANNANVQHSALTVVPPGGDQKMEDWQGPLESPILALPLYRSTRRLSEEEFGGFRIGNGEVRGRKAAAM

SEQ ID NO: 1722 - protein, 151 aa, Homo Sapiens
  misc_feature (1)..(1): Xaa can be any naturally occurring amino acid
XQPPPPITYSLCGTKNIKVAKKVVKTHEPASFNLNVTLKSSPDLLTYFCWASSTSGAHVDSARLQMHWELWSRQRGRPQGGDDLPGVLGQPTYHQQPDREGWAGPPAAETMPQAACQLLLPAEPDIGLVLVPGCKQRQCPAQRPHSGAPRW

SEQ ID NO: 1723 - protein, 35 aa, Homo Sapiens
ESMIPITRSLQKALHHLSRLRDLVDDTNGERSPKM

SEQ ID NO: 1724 - protein, 372 aa, Homo Sapiens
MAKSKTKHRLCSQESSVSALLASCTLSGSNSSNSDGSFHYKDKLYRSASQALQAYIDDFDLGQIYPGASTGKINIDEDFTNMSQFCNYIYKPNNAFENLDHKKHSNFISCRRHTVNDIDSMSLTTDDLLRLPADGSFSYTYVGPSHRTSKKNKKCRGRLGSLDIEKNPHFQGPYTSMGKDNFVTPVIRSNINGKQCGDKIELLILKAKRNLEQCTEELPKSMKKDDSPCSLDKLEADRSWENIPVTFKSPVPVNSDDSPQQTSRAKSAKGVLEDFLNNDNQSCTLSGGKHHGPVEALKQMLFNLQAVQERFNQNKTTDPKEEIKQVSEDDFSKLQLKESMIPITRSLQKALHHLSRLRDLVDDTNGERSPKM

SEQ ID NO: 1725 - protein, 533 aa, Homo Sapiens
MAKSKTKHRLCSQESSVSALLASCTLSGSNSSNSDGSFHYKDKLYRSASQALQAYIDDFDLGQIYPGASTGKINIDEDFTNMSQFCNYIYKPNNAFENLDHKKHSNFISCRRHTVNDIDSMSLTTDDLLRLPADGSFSYTYVGPSHRTSKKNKKCRGRLGSLDIEKNPHFQGPYTSMGKDNFVTPVIRSNINGKQCGRLKNPKLMNRTNNCISESSLSFPKKSSFKDSSEHSLEKNYPRWLTSQKSDLNVSGITSIPDFKYPVWLHNQDLLPDANSQRVYQIFKDDQCSPRHSHQAQGTSRLINKLDCFEYAFEPSNFSNSLSDDKELVNEYKCDFEHSQCQCENPLLPGQSTKPFSGDKIELLILKAKRNLEQCTEELPKSMKKDDSPCSLDKLEADRSWENIPVTFKSPVPVNSDDSPQQTSRAKSAKGVLEDFLNNDNQSCTLSGGKHHGPVEALKQMLFNLQAVQERFNQNKTTDPKEEIKQVSEDDFSKLQLKESMIPITRSLQKALHHLSRLRDLVDDTNGERSPKM

SEQ ID NO: 1726 - protein, 533 aa, Homo Sapiens; identical to SEQ ID NO: 1725

SEQ ID NO: 1727 - protein, 151 aa, Homo Sapiens
MKKDDSPCSLDKLEADRSWENIPVTFKSPVPVNSDDSPQQTSRAKSAKGVLEDFLNNDNQSCTLSGGKHHGPVEALKQMLFNLQAVQERFNQNKTTDPKEEIKQVSEDDFSKLQLKESMIPITRSLQKALHHLSRLRDLVDDTNGERSPKM

SEQ ID NO: 1728 - protein, 142 aa, Homo Sapiens
MFVDNRIQKSMLLDLNKEIMNELGVTVVGDIIAILKHAKVVHRQDMCKAATESVPCSPSPLAGEIRRGTSAASRMITNSLNHDSPPSTPPRRPDTSTSKISVTVSNKMAAKSAKATAALARREEESLAVPAKRRRVTAEMEG

SEQ ID NO: 1729 - protein, 355 aa, Homo Sapiens
MFVDNRIQKSMLLDLNKEIMNELGVTVVGDIIAILKHAKVVHRQDMCKAATESVPCSPSPLAGEIRRGTSAASRMITNSLNHDSPPSTPPRRPDTSTSKISVTVSNKMAAKSAKATAALARREEESLAVPAKRRRVTAEMEGKYVINMPKGTTPRTRKILEQQQAAKGLHRTSVFDRLGAETKADTTTGSKPTGVFSRLGATPETDEDLAWDSDNDSSSSVLQYAGVLKKLGRGPAKASPQPALTVKAKATSSATTAAAPTLRRLALSSRSGLERKPESLSKVSIIKRLGAAALVPEAQDSQVTSTKSKSSAEVKVTIKRTLVGPRGSSSSEGLGAQMDHAGTVSVFKRLGRRTF

SEQ ID NO: 1730 - protein, 422 aa, Homo Sapiens
MVMAALSLVAACWGRAAADESVQLPAAPGSSVRARETMVSVTMATSEWIQFFKEAGIPPGPAVNYAVMFVDNRIQKSMLLDLNKEIMNELGVTVVGDIIAILKHAKVVHRQDMCKAATESVPCSPSPLAGEIRRGTSAASRMITNSLNHDSPPSTPPRRPDTSTSKISVTVSNKMAAKSAKATAALARREEESLAVPAKRRRVTAEMEGKYVINMPKGTTPRTRKILEQQQAAKGLHRTSVFDRLGAETKADTTTGSKPTGVFSRLGATPETDEDLAWDSDNDSSSSVLQYAGVLKKLGRGPAKASPQPALTVKAKATSSATTAAAPTLRRLALSSRSGLERKPESLSKVSIIKRLGAAALVPEAQDSQVTSTKSKSSAEVKVTIKRTLVGPRGSSSSEGLGAQMDHAGTVSVFKRLGRRTF

SEQ ID NO: 1731 - protein, 141 aa, Homo Sapiens
MVMAALSLVAACWGRAAADESVQLPAAPGSSVRARETMVSVTMATSEWIQFFKEAGIPPGPAVNYAVMFVDNRIQKSMLLDLNKEIMNELGVTVVGDIIAILKHAKVVHRQGLTPSPRLECSSTISAHCNLCLPGHVQSCH

SEQ ID NO: 1732 - protein, 146 aa, Homo Sapiens
MVSVTMATSEWIQFFKEAGIPPGPAVNYAVMFVDNRIQKSMLLDLNKEIMNELGVTVVGDIIAILKHAKVVHRQDMCKAATESVPCSPSPLAGEIRRGTSAASRMITNSLNHDSPPSTPPRRPDTSTSKISVTVSNKMAAKSAKAT

SEQ ID NO: 1733 - protein, 168 aa, Homo Sapiens
  misc_feature (1)..(1): Xaa can be any naturally occurring amino acid
XEMEGKYVINMPKGTTPRTRKILEQQQAAKGLHRTSVFDRLGAETKADTTTGSKPTGVFSRLGATPETDEDLAWDSDNDSSSSVLQYAGVLKKLGRGPAKASPQPALTVKAKATSSATTAAAPTLRRLALSSRSGLERKPESLSKVSIIKRLGAAALVPEAQDSQASA

SEQ ID NO: 1734 - protein, 146 aa, Homo Sapiens
  misc_feature (1)..(1): Xaa can be any naturally occurring amino acid
XGSSVRARETMVSVTMATSEWIQFFKEAGIPPGPAVNYAVMFVDNRIQKSMLLDLNKEIMNELGVTVVGDIIAILKHAKVVHRQDMCKAATESVPCSPSPLAGEIRRGTSDGVSLCCPGWSTVARPWLSATSASRVQAVLLPQPPE

SEQ ID NO: 1735 - protein, 133 aa, Homo Sapiens
  misc_feature (1)..(1): Xaa can be any naturally occurring amino acid
XTDEDLAWDSDNDSSSSVLQYAGVLKKLGRGPAKASPQPALTVKAKATSSATTAAAPTLRRLALSSRSGLERKPESLSKVSIIKRLGAAALVPEAQDSQVTSTKSPTVRCVLPDPPVPPASQRPPRRRWRRAC

SEQ ID NO: 1736 - protein, 110 aa, Homo Sapiens
MRSECVLGAASDSGQEAPRDTWFLQGWKASRRFLIKGSVAGGAVYLVYDQELLGPSDKSQAALQKAGEVVPPAMYQFSQYVCQQTGLQIPQLPAPPKIYFPIRDSWNAGI

SEQ ID NO: 1737 - protein, 140 aa, Homo Sapiens
MRSECVLGAASDSGQEAPRDTWFLQGWKASRRFLIKGSVAGGAVYLVYDQELLGPSDKSQAALQKAGEVVPPAMYQFSQYVCQQTGLQIPQLPAPPKIYFPIRDSWNAGIMTVMSALSVAPSKAREYSKEGWEYVKARTK

SEQ ID NO: 1738 - protein, 88 aa, Homo Sapiens
MVARVWSLMRFLIKGSVAGGAVYLVYDQELLGPSDKSQAALQKAGEVVPPAMYQFSQYVCQQTGLQIPQLPAPPKIYFPIRDSWNAGI

SEQ ID NO: 1739 - protein, 118 aa, Homo Sapiens
MVARVWSLMRFLIKGSVAGGAVYLVYDQELLGPSDKSQAALQKAGEVVPPAMYQFSQYVCQQTGLQIPQLPAPPKIYFPIRDSWNAGIMTVMSALSVAPSKAREYSKEGWEYVKARTK

SEQ ID NO: 1740 - protein, 100 aa, Homo Sapiens
MASKSWLNFLTFLCGSAIGFLLCSQLFSILLGEKVDTQPNVLHNDPHARHSDDNGQNHLEGQMNFNADSSQHKDENTDIAENLYQKVRILCWVMTGPQNL

SEQ ID NO: 1741 - protein, 131 aa, Homo Sapiens
MASKSWLNFLTFLCGSAIGFLLCSQLFSILLGEKVDTQPNVLHNDPHARHSDDNGQNHLEGQMNFNADSSQHKDENTDIAENLYQKVRILCWVMTGPQNLEKKAKHVKATWAQRCNKVLFMSSEENKDFPA

SEQ ID NO: 1742 - protein, 363 aa, Homo Sapiens
MASKSWLNFLTFLCGSAIGFLLCSQLFSILLGEKVDTQPNVLHNDPHARHSDDNGQNHLEGQMNFNADSSQHKDENTDIAENLYQKVRILCWVMTGPQNLEKKAKHVKATWAQRCNKVLFMSSEENKDFPAVGLKTKEGRDQLYWKTIKAFQYVHEHYLEDADWFLKADDDTYVILDNLRWLLSKYDPEEPIYFGRRFKPYVKQGYMSGGAGYVLSKEALKRFVDAFKTDKCTHSSSIEDLALGRCMEIMNVEAGDSRDTIGKETFHPFVPEHHLIKGYLPRTFWYWNYNYYPPVEGPGCCSDLAVSFHYVDSTTMYELEYLVYHLRPYGYLYRYQPTLPERILKEISQANKNEDTKVKLGNP

SEQ ID NO: 1743 - protein, 309 aa, Homo Sapiens
MASKSWLNFLTFLCGSAIGFLLCSQLFSILLGEKVDTQPNVLHNDPHARHSDDNGQNHLEGQMNFNADSSQHKDENTDIAENLYQKVRILCWVMTGPQNLEKKAKHVKATWAQRCNKVLFMSSEENKDFPAVGLKTKEGRDQLYWKTIKAFQYVHEHYLEDADWFLKADDDTYVILDNLRWLLSKYDPEEPIYFGRRFKPYVKQGYMSGGAGYVLSKEALKRFVDAFKTDKCTHSSSIEDLALGRCMEIMNVEAGDSRDTIGKETFHPFVPEHHLIKGYLPRTFWYWNYNYYPPVEVSLEILLLCQYLD

SEQ ID NO: 1744 - protein, 363 aa, Homo Sapiens; identical to SEQ ID NO: 1742

SEQ ID NO: 1745 - protein, 823 aa, Homo Sapiens
MWGSPALAWAVWLACVQPTVFPWSLSFRSDTDKPSSAAEVLTEASSCWTDTVECFSDYMTLWIPRSHVEGLRRWLARTLHLPGTWRSPDHLDSSLAKCGYFLHLASDGDFLFRVQYSACFVQKEKANYRLEIRIFQKGVMGLERSDRYIMKCPMLRSRLGQESVHCGPMFIQVSRPLPLWRDNRQTPWLLSLRGELVASLEDASLMGLYVDMNATTVTVQSPRQGLLQRWEVLNTSAELLPLWLVSGHHAYSLEAACPPVSFQPESEVLVHIPKQRLGLVKRGSYIEETLSLRFLRVHQSNIFMVTENKDFVVVSIPAAGVLQVQRCQEVGGTPGTQAFYRVDLSLEFAEMAAPVLWTVESFFQCVGSGTESPASTAALRTTPSPPSPGPETPPAGVPPAASSQVWAAGPAAQEWLSRDLLHRPSDALAKKGLGPFLQTAKPARRGQTSASILPRVVQAQRGPQPPPGEAGIPGHPTPPATLPSEPVEGVQASPWRPRPVLPTHPALTLPVSSDASSPSPPAPRPERPESLLVSGPSVTLTEGLGTVRPEQDPAKSPGSPLLLRGLSSGDVAAPEPIMGEPGQASEEFQPLARPWRATLAAEELVSHRSPGEPQETCSGTEVERPRQTGPGLPREGARGHMDLSSSEPSQDIEGPGLSILPARDATFSTPSVRQPDPSAWLSSGPELTGMPRVRLAAPLAVLPMEPLPPEPVRPAALLTPEASSVGGPDQARYLESAPGWPVGQEEWGVAHTSSPPSTQTLSLWAPTGVLLPSLVELEYPFQAGRGASLQQELTEPTLALSAESHRPPELQDSVEGLSERPSR

SEQ ID NO: 1746 - protein, 658 aa, Homo Sapiens
  misc_feature (1)..(1): Xaa can be any naturally occurring amino acid
XIMKCPMLRSRLGQESVHCGPMFIQVSRPLPLWRDNRQTPWLLSLRGELVASLEDASLMGLYVDMNATTVTVQSPRQGLLQRWEVSGGQQALPGVSFQPESEVLVHIPKQRLGLVKRGSYIEETLSLRFLRVHQSNIFMVTENKDFVVVSIPAAGVLQVQRCQEVGGTPGTQAFYRVDLSLEFAEMAAPVLWTVESFFQCVGSGTESPASTAALRTTPSPPSPGPETPPAGVPPAASSQVWAAGPAAQEWLSRDLLHRPSDALAKKGLGPFLQTAKPARRGQTSASILPRVVQAQRGPQPPPGEAGIPGHPTPPATLPSEPVEGVQASPWRPRPVLPTHPALTLPVSSDASSPSPPAPRPERPESLLVSGPSVTLTEGLGTVRPEQDPAKSPGSPLLLRGLSSGDVAAPEPIMGEPGQASEEFQPLARPWRATLAAEELVSHRSPGEPQETCSGTEVERPRQTGPGLPREGARGHMDLSSSEPSQDIEGPGLSILPARDATFSTPSVRQPDPSAWLSSGPELTGMPRVRLAAPLAVLPMEPLPPEPVRPAALLTPEASSVGGPDQARYLESAPGWPVGQEEWGVAHTSSPPSTQTLSLWAPTGVLLPSLVELEYPFQAGRGASLQQELTEPTLALSAESHRPPELQDSVEGLSERPSR

SEQ ID NO: 1747 - protein, 69 aa, Homo Sapiens
  misc_feature (1)..(1): Xaa can be any naturally occurring amino acid
XPSTQTLSLWAPTGVLLPSLVELEYPFQAGRGASLQQELTEPTLALSAESHRPPELQDSVEGLSERPSR

SEQ ID NO: 1748 - protein, 775 aa, Homo Sapiens
  misc_feature (1)..(1): Xaa can be any naturally occurring amino acid
XSLSFRSDTDKPSSAAEVLTEASSCWTDTVECFSDYMTLWIPRSHVEGLRRWLARTLHLPGTWRSPDHLDSSLAKCGYFLHLASDGDFLFRVQYSACFVQKEKANYRLEIRIFQKGVMGLERSDRYIMKCPMLRSRLGQESVHCGPMFIQVSRPLPLWRDNRQTPWLLSLRGELVASLEDASLMGLYVDMNATTVTVQSPRQGLLQRWEVLNTSAELLPLWLVSGHHAYSLEAACPPVSFQPESEVLVHIPKQRLGLVKRGSYIEETLSLRFLRVHQSNIFMVTENKDFVVVSIPAAGVLQVQRCQEVGGTPGTQAFYRVDLSLEFAEMAAPVLWTVESFFQCVGSGTESPASTAALRTTPSPPSPGPETPPAGVPPAASSQKGLGPFLQTAKPARRGQTSASILPRVVQAQRGPQPPPGEAGIPGHPTPPATLPSEPVEGVQASPWRPRPVLPTHPALTLPVSSDASSPSPPAPRPERPESLLVSGPSVTLTEGLGTVRPEQDPAKSPGSPLLLRGLSSGDVAAPEPIMGEPGQASEEFQPLARPWRATLAAEELVSHRSPGEPQETCSGTEVERPRQTGPGLPREGARGHMDLSSSEPSQDIEGPGLSILPARDATFSTPSVRQPDPSAWLSSGPELTGMPRVRLAAPLAVLPMEPLPPEPVRPAALLTPEASSVGGPDQARYLESAPGWPVGQEEWGVAHTSSPPSTQTLSLWAPTGVLLPSLVELEYPFQAGRGASLQQELTEPTLALSAESHRPPELQDSVEGLSERPSR

SEQ ID NO: 1749 - protein, 15 aa, Homo Sapiens
MALRHLALLAGLLVG

SEQ ID NO: 1750 - protein, 57 aa, Homo Sapiens
MALRHLALLAGLLVGVASKSMENTAQLPECCVDVVGVNASCPGASLCGPGCYRRWNA

SEQ ID NO: 1751 - protein, 86 aa, Homo Sapiens
MALRHLALLAGLLVGVASKSMENTAQLPECCVDVVGVNASCPGASLCGPGCYRRWNADGSASCVRCGNGTLPAYNGSECRSFAGPG

SEQ ID NO: 1752 - protein, 103 aa, Homo Sapiens
MALRHLALLAGLLVGVASKSMENTAQLPECCVDVVGVNASCPGASLCGPGCYRRWNADGSASCVRCGNGTLPAYNGSECRSFAGPGAPFPMNRSSGTPGRPHP

SEQ ID NO: 1753 - protein, 224 aa, Homo Sapiens [sequence omitted]

SEQ ID NO: 1754 - protein, 189 aa, Homo Sapiens
MALRHLALLAGLLVGVASKSMENTAQLPECCVDVVGVNASCPGASLCGPGCYRRWNADGSASCVRCGNGTLPAYNGSECRSFAGPGAPFPMNRSSGTPGRPHPGAPRVAASLFLGTFFISSGLILSVAGFFYLKRSSKLPRACYRRNKAPALQPGEAAAMIPPPQSSDVGSAGKEDPPRQGRPPIPAPP

SEQ ID NO: 1755 - protein, 344 aa, Homo Sapiens
MALRHLALLAGLLVGVASKSMENTAQLPECCVDVVGVNASCPGASLCGPGCYRRWNADGSASCVRCGNGTLPAYNGSECRSFAGPGAPFPMNRSSGTPGRPHPGAPRVAASLFLGTFFISSGLILSVAGFFYLKRSSKLPRACYRRNKAPALQPGEAAAMIPPPQSSGNSSCRIPLWGFPSLGQSQGALWVCPQTGLPGSGSRPPLPGSPGDPPTRQGQGRIWLVPPALDLSWIWPAPPARPPLIPVTSMLFPVPETWGLQERRTHHDRADPQYLLLLEVQLHPRTDAAGLRQALLSSHRFSGAGSGGPKSQPVRKPRYVRRERPLDRATDPAAFPGEARISNV

SEQ ID NO: 1756 - protein, 198 aa, Homo Sapiens
MALRHLALLAGLLVGVASKSMENTAQLPECCVDVVGVNASCPGASLCGPGCYRRWNADGSASCVRCGNGTLPAYNGSECRSFAGPGAPFPMNRSSGTPGRPHPGAPRVAASLFLGTFFISSGLILSVAGFFYLKRSSKLPRACYRRNKAPALQPGEAAAMIPPPQSSVRKPRYVRRERPLDRATDPAAFPGEARISNV

SEQ ID NO: 1757 - protein, 198 aa, Homo Sapiens; identical to SEQ ID NO: 1756

SEQ ID NO: 1758 - protein, 98 aa, Homo Sapiens
MALRHLALLAGLLVGVASKSMENTDTDVPAPEVLTRSTAGVRGACASQRGALRCLLGERLLRNGWVRRGPHGEASWPAMGAPLPAVTAQRAAHRYRGV

SEQ ID NO: 1759 - protein, 64 aa, Homo Sapiens
MALRHLALLAGLLVGVASKSMENTDTDVPAPEVLTRSTAGVRGACASQRGALRCLLGPAARVLC

SEQ ID NO: 1760 - protein, 111 aa, Homo Sapiens
MALRHLALLAGLLVGVASKSMENTDTDVPAPEVLTRSTAGVRGACASQRGALRCLLGPAARVLCGCGGRQRQLPRRKSVWSRLLQALERGRERQLRPLWERNPPSLQRLRV

SEQ ID NO: 1761 - protein, 380 aa, Homo Sapiens
MALRHLALLAGLLVGVASKSMENTVTRNSTAVINTQAEGTLSPPGLSSLPVVREWALTHTAQLPECCVDVVGVNASCPGASLCGPGCYRRWNADGSASCVRCGNGTLPAYNGSECRSFAGPGAPFPMNRSSGTPGRPHPGAPRVAASLFLGTFFISSGLILSVAGFFYLKRSSKLPRACYRRNKAPALQPGEAAAMIPPPQSSGNSSCRIPLWGFPSLGQSQGALWVCPQTGLPGSGSRPPLPGSPGDPPTRQGQGRIWLVPPALDLSWIWPAPPARPPLIPVTSMLFPVPETWGLQERRTHHDRADPQYLLLLEVQLHPRTDAAGLRQALLSSHRFSGAGSGGPKSQPVRKPRYVRRERPLDRATDPAAFPGEARISNV

SEQ ID NO: 1762 - protein, 289 aa, Homo Sapiens
MARKIMQDKEKIREKYGPEWARLPPAQQDEIIDRCLVGPRAPAPRDPGDSEELTRFPGLRGPTGQKVVRFGDEDLTWQDEHSAPFSWETKSQMEFSISALSIQEPSNGTAASEPRPLSKASQGSQALKSSQGSRSSSLDALGPTRKEEEASFWKINAERSRGEGPEAEFQSLTPSQIKSMEKGEKVLPPCYRQEPAPKDREAKVERPSTLRQEQRPLPNVSTERERPQPVQAFSSALHEAAPSQLEGKLPSPDVRQDDGEDTLFSEPKFAQVSSSNVVLKTGFDFLDNW

SEQ ID NO: 1763 - protein, 327 aa, Homo Sapiens
MASMAAAIAASRSAVMSGNRPLDDRERKRFTYFSSLSPMARKIMQDKEKIREKYGPEWARLPPAQQDEIIDRCLVGPRAPAPRDPGDSEELTRFPGLRGPTGQKVVRFGDEDLTWQDEHSAPFSWETKSQMEFSISALSIQEPSNGTAASEPRPLSKASQGSQALKSSQGSRSSSLDALGPTRKEEEASFWKINAERSRGEGPEAEFQSLTPSQIKSMEKGEKVLPPCYRQEPAPKDREAKVERPSTLRQEQRPLPNVSTERERPQPVQAFSSALHEAAPSQLEGKLPSPDVRQDDGEDTLFSEPKFAQVSSSNVVLKTGFDFLDNW

SEQ ID NO: 1764 - protein, 197 aa, Homo Sapiens
MEFSISALSIQEPSNGTAASEPRPLSKASQGSQALKSSQGSRSSSLDALGPTRKEEEASFWKINAERSRGEGPEAEFQSLTPSQIKSMEKGEKVLPPCYRQEPAPKDREAKVERPSTLRQEQRPLPNVSTERERPQPVQAFSSALHEAAPSQLEGKLPSPDVRQDDGEDTLFSEPKFAQVSSSNVVLKTGFDFLDNW

SEQ ID NO: 1765 - protein, 110 aa, Homo Sapiens
MEKGEKVLPPCYRQEPAPKDREAKVERPSTLRQEQRPLPNVSTERERPQPVQAFSSALHEAAPSQLEGKLPSPDVRQDDGEDTLFSEPKFAQVSSSNVVLKTGFDFLDNW

SEQ ID NO: 1766 - protein, 160 aa, Homo Sapiens
MQDKEKIREKYGPEWARLPPAQQDEIIDRCLVGPRAPAPRDPGDSEELTRFPGLRGPTGQKVVRFGDEDLTWQDEHSAPFSWETKSQMEFSISALSIQEPSNGTAASEPRPLSKASQGSQALKSSQGSRSSSLDALGPTRKEEEASFWKINAERSRGEGP

SEQ ID NO: 1767 - protein, 131 aa, Homo Sapiens
MDVLFVAIFAVPLILGQEYEDEERLGEDEYYQVVYYYTVTPSYDDFSADFTIDYSIFESEDRLNRLDKDITEAIETTISLETARADHPKPVTVKPVTTEPSPDLNDAVSSLRSPIPLLLSCAFVQVGMYFM

SEQ ID NO: 1768 - protein, 131 aa, Homo Sapiens; identical to SEQ ID NO: 1767

SEQ ID NO: 1769 - protein, 121 aa, Homo Sapiens
MDVLFVAIFAVPLILGQEYEDEERLGEDEYYQVVYYYTVTPSYDDFSADFTIDYSIFESEDRLNRLDKDITEAIETTISLETARADHPKPVTVKPVTTEPVEEGCYDSLDGSLARGNWKIK

SEQ ID NO: 1770 - protein, 341 aa, Homo Sapiens
MVPAAGALLWVLLLNLGPRAAGAQGLTQTPTEMQRVSLRFGGPMTRSYRSTARTGLPRKTRIILEDENDAMADADRLAGPAAAELLAATVSTGFSRSSAINEEDGSSEEGVVINAGKDSTSRELPSATPNTAGSSSTRFIANSQEPEIRLTSSLPRSPGRSTEDLPGSQATLSQWSTPGSTPSRWPSPSPTAMPSPEDLRLVLMPWGPWHCHCKSGTMSRSRSGKLHGLSGRLRVGALSQLRTEHKPCTYQQCPCNRLREECPLDTSLCTDTNCASQSTTSTRTTTTPFPTIHLRSSPSLPPASPCPALAFWKRVRIGLEDIWNSLSSVFTEMQPIDRNQR

SEQ ID NO: 1771 - protein, 221 aa, Homo Sapiens
MEGPRGWLVLCVLAISLASMVTEDLCRAPDGKKGEAGRPGRRGRPGLKGEQGEPGAPGIRTGIQGLKGDQGEPGPSGNPGKVGYPGPSGPLGARGIPGIKGTKGSPGNIKDQPRPAFSAIRRNPPMGGNVVIFDTVITNQEEPYQNHSGRFVCTVPGYYYFTFQVLSQWEICLSIVSSSRGQVRRSLGFCDTTNKGLFQVVSGGMVLQLQQGDQVWVEKDP

SEQ ID NO: 1772 - protein, 245 aa, Homo Sapiens
MEGPRGWLVLCVLAISLASMVTEDLCRAPDGKKGEAGRPGRRGRPGLKGEQGEPGAPGIRTGIQGLKGDQGEPGPSGNPGKVGYPGPSGPLGARGIPGIKGTKGSPGNIKDQPRPAFSAIRRNPPMGGNVVIFDTVITNQEEPYQNHSGRFVCTVPGYYYFTFQVLSQWEICLSIVSSSRGQVRRSLGFCDTTNKGLFQVVSGGMVLQLQQGDQVWVEKDPKKGHIYQGSEADSVFSGFLIFPSA

SEQ ID NO: 1773 - protein, 245 aa, Homo Sapiens; identical to SEQ ID NO: 1772

SEQ ID NO: 1774 - protein, 153 aa, Homo Sapiens
MKIPWGSIPVLMLLLLLGLIDISQAQLSCTGPPAIPGIPGIPGTPGPDGQPGTPGIKGEKGLPGLAGDHGEFGEKGDPGIPGNPGKVGPKGPMGPKGGPGAPGAPGPKGESGDYKATQKIAFSATRTINVPLRRDQTIRFDHVITNMNNNYEP

SEQ ID NO: 1775 - protein, 229 aa, Homo Sapiens
MKIPWGSIPVLMLLLLLGLIDISQAQLSCTGPPAIPGIPGIPGTPGPDGQPGTPGIKGEKGLPGLAGDHGEFGEKGDPGIPGNPGKVGPKGPMGPKGGPGAPGAPGPKGESGDYKATQKIAFSATRTINVPLRRDQTIRFDHVITNMNNNYEPRSGKFTCKVPGLYYFTYHASSRGNLCVNLMRGRERAQKVVTFCDYAYNTFQVTTGGMVLKLEQGENVFLQATDKNS

SEQ ID NO: 1776 - protein, 251 aa, Homo Sapiens
MKIPWGSIPVLMLLLLLGLIDISQAQLSCTGPPAIPGIPGIPGTPGPDGQPGTPGIKGEKGLPGLAGDHGEFGEKGDPGIPGNPGKVGPKGPMGPKGGPGAPGAPGPKGESGDYKATQKIAFSATRTINVPLRRDQTIRFDHVITNMNNNYEPRSGKFTCKVPGLYYFTYHASSRGNLCVNLMRGRERAQKVVTFCDYAYNTFQVTTGGMVLKLEQGENVFLQATDKNSLLGMEGANSIFSGFLLFPDMEA

SEQ ID NO: 1777 - protein, 253 aa, Homo Sapiens
MMMKIPWGSIPVLMLLLLLGLIDISQAQLSCTGPPAIPGIPGIPGTPGPDGQPGTPGIKGEKGLPGLAGDHGEFGEKGDPGIPGNPGKVGPKGPMGPKGGPGAPGAPGPKGESGDYKATQKIAFSATRTINVPLRRDQTIRFDHVITNMNNNYEPRSGKFTCKVPGLYYFTYHASSRGNLCVNLMRGRERAQKVVTFCDYAYNTFQVTTGGMVLKLEQGENVFLQATDKNSLLGMEGANSIFSGFLLFPDMEA

SEQ ID NO: 1778 - protein, 245 aa, Homo Sapiens
MDVGPSSLPHLGLKLLLLLLLLPLRGQANTGCYGIPGMPGLPGAPGKDGYDGLPGPKGEPGIPAIPGIRGPKGQKGEPGLPGHPGKNGPMGPPGMPGVPGPMGIPGEPGEEGRYKQKFQSVFTVTRQTHQPPAPNSLIRFNAVLTNPQGDYDTSTGKFTCKVPGLYYFVYHASHTANLCVLLYRSGVKVVTFCGHTSKTNQVNSGGVLLRLQVGEEVWLAVNDYYDMVGIQGSDSVFSGFLLFPD

SEQ ID NO: 1779 - protein, 245 aa, Homo Sapiens; identical to SEQ ID NO: 1778

SEQ ID NO: 1780 - protein, 245 aa, Homo Sapiens; identical to SEQ ID NO: 1778

SEQ ID NO: 1781 - protein, 258 aa, Homo Sapiens
MLLVLVVLIPVLVSSGGPEGHYEMLGTCRMVCDPYPARGPGAGARTDGGDALSEQSGAPPPSTLVQGPQGKPGRTGKPGPPGPPGDPGPPGPVGPPGEKGEPGKPGPPGLPGAGGSGAISTATYTTVPRVAFYAGLKNPHEGYEVLKFDDVVTNLGNNYDAASGKFTCNIPGTYFFTYHVLMRGGDGTSMWADLCKNGQVRASAIAQDADQNYDYASNSVILHLDAGDEVFIKLDGGKAHGGNSNKYSTFSGFIIYSD

SEQ ID NO: 1782 - protein, 287 aa, Homo Sapiens
MALGLLIAVPLLLQAAPRGAAHYEMMGTCRMICDPYTAAPGGEPPGAKAQPPGPSTAALEVMQDLSANPPPPFIQGPKGDPGRPGKPGPRGPPGEPGPPGPRGPPGEKGDSGRPGLPGLQLTAGTASGVGVVGGGAGVGGDSEGEVTSALSATFSGPKIAFYVGLKSPHEGYEVLKFDDVVTNLGNHYDPTTGKFSCQVRGIYFFTYHILMRGGDGTSMWADLCKNGQVRASAIAQDADQNYDYASNSVVLHLDSGDEVYVKLDGGKAHGGNNNKYSTFSGFLLYPD

SEQ ID NO: 1783 - protein, 255 aa, Homo Sapiens
MVLLLVILIPVLVSSAGTSAHYEMLGTCRMVCDPYGGTKAPSTAATPDRGLMQSLPTFIQGPKGEAGRPGKAGPRGPPGEPGPPGPMGPPGEKGEPGRQGLPGPPGAPGLNAAGAISAATYSTVPKIAFYAGLKRQHEGYEVLKFDDVVTNLGNHYDPTTGKFTCSIPGIYFFTYHVLMRGGDGTSMWADLCKNNQVRASAIAQDADQNYDYASNSVVLHLEPGDEVYIKLDGGKAHGGNNNKYSTFSGFIIYAD

SEQ ID NO: 1784 - protein, 213 aa, Homo Sapiens
MVLLLVILIPVLVSSAGTSAHYEMLGTCRMVCDPYGGTKAPSTAATPDRGLMQSLPTFIQGPPGAPGLNAAGAISAATYSTVPKIAFYAGLKRQHEGYEVLKFDDVVTNLGNHYDPTTGKFTCSIPGIYFFTYHVLMRGGDGTSMWADLCKNNQVRASAIAQDADQNYDYASNSVVLHLEPGDEVYIKLDGGKAHGGNNNKYSTFSGFIIYAD

SEQ ID NO: 1785 - protein, 238 aa, Homo Sapiens
MVLLLLVAIPLLVHSSRGPAHYEMLGRCRMVCDPHGPRGPGPDGAPASVPPFPPGAKGEVGRRGKAGLRGPPGPPGPRGPPGEPGRPGPPGPPGPGPGGVAPAAGYVPRIAFYAGLRRPHEGYEVLRFDDVVTNVGNAYEAASGKFTCPMPGVYFFAYHVLMRGGDGTSMWADLMKNGQVRASAIAQDADQNYDYASNSVILHLDVGDEVFIKLDGGKVHGGNTNKYSTFSGFIIYPD

SEQ ID NO: 1786 - protein, 281 aa, Homo Sapiens
MGSRGQGLLLAYCLLLAFASGLVLSRVPHVQGEQQEWEGTEELPSPPDHAERAEEQHEKYRPSQDQGLPASRCLRCCDPGTSMYPATAVPQINITILKGEKGDRGDRGLQGKYGKTGSAGARGHTGPKGQKGSMGAPGERCKSHYAAFSVGRKKPMHSNHYYQTVIFDTEFVNLYDHFNMFTGKFYCYVPGLYFFSLNVHTWNQKETYLHIMKNEEEVVILFAQVGDRSIMQSQSLMLELREQDQVWVRLYKGERENAIFSEELDTYITFSGYLVKHATEP

SEQ ID NO: 1787 - protein, 281 aa, Homo Sapiens; identical to SEQ ID NO: 1786

SEQ ID NO: 1788 - protein, 281 aa, Homo Sapiens; identical to SEQ ID NO: 1786

SEQ ID NO: 1789 - protein, 281 aa, Homo Sapiens; identical to SEQ ID NO: 1786

SEQ ID NO: 1790 - protein, 281 aa, Homo Sapiens; identical to SEQ ID NO: 1786

SEQ ID NO: 1791 - protein, 281 aa, Homo Sapiens; identical to SEQ ID NO: 1786

SEQ ID NO: 1792 - protein, 281 aa, Homo Sapiens; identical to SEQ ID NO: 1786

SEQ ID NO: 1793 - protein, 281 aa, Homo Sapiens; identical to SEQ ID NO: 1786

SEQ ID NO: 1794 - protein, 199 aa, Homo Sapiens
MYPATAVPQINITILKGEKGDRGDRGLQGKYGKTGSAGARGHTGPKGQKGSMGAPGERCKSHYAAFSVGRKKPMHSNHYYQTVIFDTEFVNLYDHFNMFTGKFYCYVPGLYFFSLNVHTWNQKETYLHIMKNEEEVVILFAQVGDRSIMQSQSLMLELREQDQVWVRLYKGERENAIFSEELDTYITFSGYLVKHATEP

SEQ ID NO: 1795 - protein, 199 aa, Homo Sapiens; identical to SEQ ID NO: 1794

SEQ ID NO: 1796 - protein, 302 aa, Homo Sapiens
MRRWAWAAVVVLLGPQLVLLGGVGARREAQRTQQPGQRADPPNATASASSREGLPEAPKPSQASGPEFSDAHMTWLNFVRRPDDGALRKRCGSRDKKPRDLFGPPGPPGAEVTAETLLHEFQELLKEATERRFSGLLDPLLPQGAGLRLVGEAFHCRLQGPRRVDKRTLVELHGFQAPAAQGAFLRGSGLSLASGRFTAPVSGIFQFSASLHVDHSELQGKARLRARDVVCVLICIESLCQRHTCLEAVSGLESNSRVFTLQVQGLLQLQAGQYASVFVDNGSGAVLTIQAGSSFSGLLLGT

SEQ ID NO: 1797 - protein, 330 aa, Homo Sapiens
MGKLCLGPTLCPAAAAEESRDAEPRRELLCSGRPWTWRAAARVTTMIPWVLLACALPCAADPLLGAFARRDFRKGSPQLVCSLPGPQGPPGPPGAPGPSGMMGRMGFPGKDGQDGHDGDRGDSGEEGPPGRTGNRGKPGPKGKAGAIGRAGPRGPKGVNGTPGKHGTPGKKGPKGKKGEPGLPGPCSCGSGHTKSAFSVAVTKSYPRERLPIKFDKILMNEGGHYNASSGKFVCGVPGIYYFTYDITLANKHLAIGLVHNGQYRIRTFDANTGNHDVASGSTILALKQGDEVWLQIFYSEQNGLFYDPYWTDSLFTGFLIYADQDDPNEV

SEQ ID NO: 1798 - protein, 246 aa, Homo Sapiens
MLWRQLIYWQLLALFFLPFCLCQDEYMESPQTGGLPPDCSKCCHGDYSFRGYQGPPGPPGPPGIPGNHGNNGNNGATGHEGAKGEKGDKGDLGPRGERGQHGPKGEKGYPGIPPELQIAFMASLATHFSNQNSGIIFSSVETNIGNFFDVMTGRFGAPVSGVYFFTFSMMKHEDVEEVYVYLMHNGNTVFSMYSYEMKGKSDTSSNHAVLKLAKGDEVWLRMGNGALHGDHQRFSTFAGFLLFETK

SEQ ID NO: 1799 - protein, 319 aa, Homo Sapiens
MLWRQLIYWQLLALFFLPFCLCQDEYMEVSGRTNKVVARIVQSHQQTGRSGSRREKVRERSHPKTGTVDNNTSTDLKSLRPDELPHPEVDDLAQITTFWGQSPQTGGLPPDCSKCCHGDYSFRGYQGPPGPPGPPGIPGNHGNNGNNGATGHEGAKGEKGDKGDLGPRGERGQHGPKGEKGYPGIPPELQIAFMASLATHFSNQNSGIIFSSVETNIGNFFDVMTGRFGAPVSGVYFFTFSMMKHEDVEEVYVYLMHNGNTVFSMYSYEMKGKSDTSSNHAVLKLAKGDEVWLRMGNGALHGDHQRFSTFAGFLLFETK

SEQ ID NO: 1800 - protein, 100 aa, Homo Sapiens
MLPLLLGLLGPAACWALGPTPGPGSSELRSAFSAARTTPLEGTSEMAVTFDKVYVNIGGDFDVATGQFRCRVPGAYFFSFTAGKAPHKSLSVMLVRNRDE

SEQ ID NO: 1801 - protein, 329 aa, Homo Sapiens
MLPLLLGLLGPAACWALGPTPGPGSSELRSAFSAARTTPLEGTSEMAVTFDKVYVNIGGDFDVATGQFRCRVPGAYFFSFTAGKAPHKSLSVMLVRNRDEVQALAFDEQRRPGARRAASQSAMLQLDYGDTVWLRLHGAPQYALGAPGATFSGYLVYADADADAPARGPPAPPEPRSAFSAARTRSLVGSDAGPGPRHQPLAFDTEFVNIGGDFDAAAGVFRCRLPGAYFFSFTLGKLPRKTLSVKLMKNRDEVQAMIYDDGASRRREMQSQSVMLALRRGDAVWLLSHDHDGYGAYSNHGKYITFSGFLVYPDLAPAAPPGLGASELL

SEQ ID NO: 1802 - protein, 60 aa, Homo Sapiens
MRPLLVLLLLGLAAGSPPLDDNKIPSLCPGHPGLPGLPGPRGDPGPRGEAGPAGPTGPAG

SEQ ID NO: 1803 - protein, 243 aa, Homo Sapiens
MRPLLVLLLLGLAAGSPPLDDNKIPSLCPGHPGLPGTPGHHGSQGLPGRDGRDGRDGAPGAPGEKGEGGRPGLPGPRGDPGPRGEAGPAGPTGPAGECSVPPRSAFSAKRSESRVPPPSDAPLPFDRVLVNEQGHYDAVTGKFTCQVPGVYYFAVHATVYRASLQFDLVKNGESIASFFQFFGGWPKPASLSGGAMVRLEPEDQVWVQVGVGDYIGIYASIKTDSTFSGFLVYSDWHSSPVFA

SEQ ID NO: 1804 - protein, 243 aa, Homo Sapiens; identical to SEQ ID NO: 1803

SEQ ID NO: 1805 - protein, 112 aa, Homo Sapiens
MFVLLYVTSFAICASGQPRGNQLKGENYSPRYICSIPGLPGPPGPPGANGSPGPHGRIGLPGRDGRDGRKGEKGEKGTAGLRGKTGPLGLAGEKGDQGETGKKGPIGPEGEK

SEQ ID NO: 1806 - protein, 289 aa, Homo Sapiens
MFVLLYVTSFAICASGQPRGNQLKGENYSPRYICSIPGLPGPPGPPGANGSPGPHGRIGLPGRDGRDGRKGEKGEKGTAGLRGKTGPLGLAGEKGDQGETGKKGPIGPEGEKGEVGPIGPPGPKGDRGEQGDPGLPGVCRCGSIVLKSAFSVGITTSYPEERLPIIFNKVLFNEGEHYNPATGKFICAFPGIYYFSYDITLANKHLAIGLVHNGQYRIKTFDANTGNHDVASGSTVIYLQPEDEVWLEIFFTDQNGLFSDPGWADSLFSGFLLYVDTDYLDSISEDDEL

SEQ ID NO: 1807 - protein, 289 aa, Homo Sapiens; identical to SEQ ID NO: 1806

SEQ ID NO: 1808 - protein, 151 aa, Homo Sapiens
MSRQEPKMFVLLYVTSFAICASGQPRGNQLKGENYSPRYICSIPGLPGPPGPPGANGSPGPHGRIGLPGRDGRDGRKGEKGEKGTAGLRGKTGPLGLAGEKGDQGETGKKGPIGPEGEKGEVGPIGPPGPKGDRGEQGDPGLPGVCRCGSI

SEQ ID NO: 1809 - protein, 296 aa, Homo Sapiens
MSRQEPKMFVLLYVTSFAICASGQPRGNQLKGENYSPRYICSIPGLPGPPGPPGANGSPGPHGRIGLPGRDGRDGRKGEKGEKGTAGLRGKTGPLGLAGEKGDQGETGKKGPIGPEGEKGEVGPIGPPGPKGDRGEQGDPGLPGVCRCGSIVLKSAFSVGITTSYPEERLPIIFNKVLFNEGEHYNPATGKFICAFPGIYYFSYDITLANKHLAIGLVHNGQYRIKTFDANTGNHDVASGSTVIYLQPEDEVWLEIFFTDQNGLFSDPGWADSLFSGFLLYVDTDYLDSISEDDEL

SEQ ID NO: 1810 - protein, 256 aa, Homo Sapiens [sequence omitted]

SEQ ID NO: 1811 - protein, 252 aa, Homo Sapiens
MAAPALLLLALLLPVGAWPGLPRRPCVHCCRPAWPPGPYARVSDRDLWRGDLWRGLPRVRPTIDIEILKGEKGEAGVRGRAGRSGKEGPPGARGLQGRRGQKGQVGPPGAACRRAYAAFSVGRREGLHSSDHFQAVPFDTELVNLDGAFDLAAGRFLCTVPGVYFLSLNVHTWNYKETYLHIMLNRRPAAVLYAQPSERSVMQAQSLMLLLAAGDAVWVRMFQRDRDNAIYGEHGDLYITFSGHLVKPAAEL

SEQ ID NO: 1812 - protein, 333 aa, Homo Sapiens
MRIWWLLLAIEICTGNINSQDTCRQGHPGIPGNPGHNGLPGRDGRDGAKGDKGDAGEPGRPGSPGKDGTSGEKGERGADGKVEAKGIKGDQGSRGSPGKHGPKGLAGPMGEKGLRGETGPQGQKGNKGDVGPTGPEGPRGNIGPLGPTGLPGPMGPIGKPGPKGEAGPTGPQGEPGVRGIRGWKGDRGEKGKIGETLVLPKSAFTVGLTVLSKFPSSDMPIKFDKILYNEFNHYDTAAGKFTCHIAGVYYFTYHITVFSRNVQVSLVKNGVKILHTKDAYMSSEDQASGGIVLQLKLGDEVWLQVTGGERFNGLFADEDDDTTFTGFLLFSSP

SEQ ID NO: 1813 - protein, 333 aa, Homo Sapiens; identical to SEQ ID NO: 1812

SEQ ID NO: 1814 - protein, 333 aa, Homo Sapiens
MRIWWLLLAIEICTGNINSQDTCRQGHPGIPGNPGHNGLPGRDGRDGAKGDKGDAGEPGCPGSPGKDGTSGEKGERGADGKVEAKGIKGDQGSRGSPGKHGPKGLAGPMGEKGLRGETGPQGQKGNKGDVGPTGPEGPRGNIGPLGPTGLPGPMGPIGKPGPKGEAGPTGPQGEPGVRGIRGWKGDRGEKGKIGETLVLPKSAFTVGLTVLSKFPSSDVPIKFDKILYNEFNHYDTAVGKFTCHIAGVYYFTYHITVFSRNVQVSLVKNGVKILHTRDAYVSSEDQASGSIVLQLKLGDEMWLQVTGGERFNGLFADEDDDTTFTGFLLFSSQ

SEQ ID NO: 1815 - protein, 333 aa, Homo Sapiens; identical to SEQ ID NO: 1814

SEQ ID NO: 1816 - protein, 99 aa, Homo Sapiens
MRIWWLLLAIEICTGNINSQDTCRQGHPGIPGNPGHNGLPGRDGRDGAKGDKGDAGEPGCPGSPGKDGTSGEKGERGADGKVEAKGIKGMFRCLWSKTE

SEQ ID NO: 1817 - protein, 49 aa, Homo Sapiens
MSQGNKMLLTFHTDFSNEENGTIMFYKGFLAYYQAVDLDECASRSKSGE

SEQ ID NO: 1818 - protein, 72 aa, Homo Sapiens
MSQGNKMLLTFHTDFSNEENGTIMFYKGFLAYYQAVDLDECASRSKSGEEDPQPQCQHLCHNYVGGYFCSCR

SEQ ID NO: 1819 - protein, 94 aa, Homo Sapiens
MSQGNKMLLTFHTDFSNEENGTIMFYKGFLAYYQAVDLDECASRSKSGEEDPQPQCQHLCHNYVGGYFCSCRPGYELQEDRHSCQAECSSELYT

SEQ ID NO: 1820 - protein, 719 aa, Homo Sapiens
MSVRFRVGREENAQWWLLYLLVPALFCRAGGSIPIPQKLFGEVTSPLFPKPYPNNFETTTVITVPTGYRVKLVFQQFDLEPSEGCFYDYVKISADKKSLGRFCGQLGSPLGNPPGKKEFMSQGNKMLLTFHTDFSNEENGTIMFYKGFLAYYQAVDLDECASRSKSGEEDPQPQCQHLCHNYVGGYFCSCRPGYELQEDRHSCQAECSSELYTEASGYISSLEYPRSYPPDLRCNYSIRVERGLTLHLKFLEPFDIDDHQQVHCPYDQLQIYANGKNIGEFCGKQRPPDLDTSSNAVDLLFFTDESGDSRGWKLRYTTEIIKCPQPKTLDEFTIIQNLQPQYQFRDYFIATCKQGYQLIEGNQVLHSFTAVCQDDGTWHRAMPRCKIKDCGQPRNLPNGDFRYTTTMGVNTYKARIQYYCHEPYYKMQTRAGSRESEQGVYTCTAQGIWKNEQKGEKIPRCLPVCGKPVNPVEQRQRIIGGQKAKMGNFPWQVFTNIHGRGGGALLGDRWILTAAHTLYPKEHEAQSNASLDVFLGHTNVEELMKLGNHPIRRVSVHPDYRQDESYNFEGDIALLELENSVTLGPNLLPICLPDNDTFYDLGLMGYVSGFGVMEEKIAHDLRFVRLPVANPQACENWLRGKNRMDVFSQNMFCAGHPSLKQDACQGDSGGVFAVRDPNTDRWVATGIVSWGIGCSRGYGFYTKVLNYVDWIKKEMEEED

SEQ ID NO: 1821 - protein, 705 aa, Homo Sapiens
MWLLYLLVPALFCRAGGSIPIPQKLFGEVTSPLFPKPYPNNFETTTVITVPTGYRVKLVFQQFDLEPSEGCFYDYVKISADKKSLGRFCGQLGSPLGNPPGKKEFMSQGNKMLLTFHTDFSNEENGTIMFYKGFLAYYQAVDLDECASRSKSGEEDPQPQCQHLCHNYVGGYFCSCRPGYELQEDRHSCQAECSSELYTEASGYISSLEYPRSYPPDLRCNYSIRVERGLTLHLKFLEPFDIDDHQQVHCPYDQLQIYANGKNIGEFCGKQRPPDLDTSSNAVDLLFFTDESGDSRGWKLRYTTEIIKCPQPKTLDEFTIIQNLQPQYQFRDYFIATCKQGYQLIEGNQVLHSFTAVCQDDGTWHRAMPRCKIKDCGQPRNLPNGDFRYTTTMGVNTYKARIQYYCHEPYYKMQTRAGSRESEQGVYTCTAQGIWKNEQKGEKIPRCLPVCGKPVNPVEQRQRIIGGQKAKMGNFPWQVFTNIHGRGGGALLGDRWILTAAHTLYPKEHEAQSNASLDVFLGHTNVEELMKLGNHPIRRVSVHPDYRQDESYNFEGDIALLELENSVTLGPNLLPICLPDNDTFYDLGLMGYVSGFGVMEEKIAHDLRFVRLPVANPQACENWLRGKNRMDVFSQNMFCAGHPSLKQDACQGDSGGVFAVRDPNTDRWVATGIVSWGIGCSRGYGFYTKVLNYVDWIKKEMEEED

SEQ ID NO: 1822 - protein, 156 aa, Homo Sapiens
MWLLYLLVPALFCRAGGSIPIPQKLFGEVTSPLFPKPYPNNFETTTVITVPTGYRVKLVFQQFDLEPSEGCFYDYVKISADKKSLGRFCGQLGSPLGNPPGKKEFMSQGNKMLLTFHTDFSNEENGTIMFYKGFLAYYQAVGEEDPQPQCQHLCHN

SEQ ID NO: 1823 - protein, 144 aa, Homo Sapiens
MWLLYLLVPALFCRAGGSIPIPQKLFGEVTSPLFPKPYPNNFETTTVITVPTGYRVKLVFQQFDLEPSEGCFYDYVKISADKKSLGRFCGQLGSPLGNPPGKKEFMSQGNKMLLTFHTDFSNEENGTIMFYKGFLAYYQAVGLW

SEQ ID NO: 1824 - protein, 156 aa, Homo Sapiens
MWLLYLLVPALFCRAGGSIPIPQKLFGEVTSPLFPKPYPNNFETTTVITVPTGYRVKLVFQQFDLEPSEGCFYDYVKKEFMSQGNKMLLTFHTDFSNEENGTIMFYKGFLAYYQAVDLDECASRSKSGEEDPQPQCQHLCHNYVGGYFCSCRPGYE

SEQ ID NO: 1825 - protein, 671 aa, Homo Sapiens
MWLLYLLVPALFCRAGGSIPIPQKLFGEVTSPLFPKPYPNNFETTTVITVPTGYRVKLVFQQFDLEPSEGCFYDYVKMLLTFHTDFSNEENGTIMFYKGFLAYYQAVDLDECASRSKSGEEDPQPQCQHLCHNYVGGYFCSCRPGYELQEDRHSCQAECSSELYTEASGYISSLEYPRSYPPDLRCNYSIRVERGLTLHLKFLEPFDIDDHQQVHCPYDQLQIYANGKNIGEFCGKQRPPDLDTSSNAVDLLFFTDESGDSRGWKLRYTTEIIKCPQPKTLDEFTIIQNLQPQYQFRDYFIATCKQGYQLIEGNQVLHSFTAVCQDDGTWHRAMPRCKIKDCGQPRNLPNGDFRYTTTMGVNTYKARIQYYCHEPYYKMQTRAGSRESEQGVYTCTAQGIWKNEQKGEKIPRCLPVCGKPVNPVEQRQRIIGGQKAKMGNFPWQVFTNIHGRGGGALLGDRWILTAAHTLYPKEHEAQSNASLDVFLGHTNVEELMKLGNHPIRRVSVHPDYRQDESYNFEGDIALLELENSVTLGPNLLPICLPDNDTFYDLGLMGYVSGFGVMEEKIAHDLRFVRLPVANPQACENWLRGKNRMDVFSQNMFCAGHPSLKQDACQGDSGGVFAVRDPNTDRWVATGIVSWGIGCSRGYGFYTKVLNYVDWIKKEMEEED

SEQ ID NO: 1826 - protein, 83 aa, Homo Sapiens
GLRPGAVPGLCRGLCHNLIRRFGSKPVLWSARLPSGQAPWSEGVCILREEFAADLPHTAFLGEQDCPPPQGLPGPLPNRGCEL

SEQ ID NO: 1827 - protein, 110 aa, Homo Sapiens
MPGPRVWGKYLWRSPHSKGCPGAISHSSVRIQASSVVSKAPLWAGPLVRGSFQPISEASRGSEAINAPGDNPAKVQNHCQEPYYQAAAAGCGSYADPITDQPSVRFSPQL

SEQ ID NO: 1828 - protein, 314 aa, Homo Sapiens
MPGPRVWGKYLWRSPHSKGCPGAMWWLLLWGVLQACPTRGSVLLAQELPQQLTSPGYPEPYGKGQESSTDIKAPEGFAVRLVFQDFDLEPSQDCAGDSVTISFVGSDPSQFCGQQGSPLGRPPGQREFVSSGRSLRLTFRTQPSSENKTAHLHKGFLALYQTVAVNYSQPISEASRGSEAINAPGDNPAKVQNHCQEPYYQAAAAASTPSLFLCLSSFTPQGHSPVQPQGPGKTDRMGRRFFSVCLSADGQSPPLPRIRRPSVLPEPSWATSPGKPSPVSTAVGAGPCWGTDGSSLLPTPSTPRTVFLSGRTRV

SEQ ID NO: 1829 - protein, 487 aa, Homo Sapiens
MPGPRVWGKYLWRSPHSKGCPGAMWWLLLWGVLQACPTRGSVLLAQELPQQLTSPGYPEPYGKGQESSTDIKAPEGFAVRLVFQDFDLEPSQDCAGDSVTISFVGSDPSQFCGQQGSPLGRPPGQREFVSSGRSLRLTFRTQPSSENKTAHLHKGFLALYQTVAVNYSQPISEASRGSEAINAPGDNPAKVQNHCQEPYYQAAAAGALTCATPGTWKDRQDGEEVLQCMPVCGRPVTPIAQNQTTLGSSRAKLGNFPWQAFTSIHGRGGGALLGDRWILTAAHTIYPKDSVSLRKNQSVNVFLGHTAIDEMLKLGNHPVHRVVVHPDYRQNESHNFSGDIALLELQHSIPLGPNVLPVCLPDNETLYRSGLLGYVSGFGMEMGWLTTELKYSRLPVAPREACNAWLQKRQRPEVFSDNMFCVGDETQRHSVCQGDSGSVYVVWDNHAHHWVATGIVSWGIGCGEGYDFYTKVLSYVDWIKGVMNGKN

SEQ ID NO: 1830 - protein, 192 aa, Homo Sapiens
MPGPRVWGKYLWRSPHSKGCPGAMWWLLLWGVLQACPTRGSVLLAQELPQQLTSPGYPEPYGKGQESSTDIKAPEGFAVRLVFQDFDLEPSQDCAGDSVTISFVGSDPSQFCGQQGSPLGRPPGQREFVSSGRSLRLTFRTQPSSENKTAHLHKGFLALYQTVGALTCATPGTWKDRQDGEEVLQCMPVCGR

SEQ ID NO: 1831 - protein, 187 aa, Homo Sapiens
MPGPRVWGKYLWRSPHSKGCPGAMWWLLLWGVLQACPTRGSVLLAQELPQQLTSPGYPEPYGKGQESSTDIKAPEGFAVRLVFQDFDLEPSQDCAGDSVTISFVGSDPSQFCGQQGSPLGRPPGQREFVSSGRSLRLTFRTQPSSENKTAHLHKGFLALYQTVGECPSWGCREGASVPSHDPGIFKP

SEQ ID NO: 1832 - protein, 66 aa, Homo Sapiens
  misc_feature (1)..(1): Xaa can be any naturally occurring amino acid
XNPAKVQNHCQEPYYQAAAAGALTCATPGTWKDRQDGEEVLQCMPGCGSYADPITDQPSVRFSPQL

SEQ ID NO: 1833 - protein, 85 aa, Homo Sapiens
  misc_feature (1)..(1): Xaa can be any naturally occurring amino acid
XPGLRPGAVPGLCRGLCHNLIRRFGSKPVLWSARLPSGQAPWSEGVCILREEFAADLPHTAFLGEQDCPPPQGLPGPLPNRGCEL

SEQ ID NO: 1834 - protein, 194 aa, Homo Sapiens
  misc_feature (1)..(1): Xaa can be any naturally occurring amino acid
XSFVGSDPSQFCGQQGSPLGRPPGQREFVSSGRSLRLTFRTQPSSENKTAHLHKGFLALYQTVVCGRPVTPIAQNQTTLGSSRAKLGNFPWQAFTSIHGRGGGALLGDRWILTAAHTIYPKDSVSLRKNQSVNVFLGHTAIDEMLKLGNHPVHRVVVHPDYRQNESHNFSGDIALLELQHSIPLGPNVLPVCLP

SEQ ID NO: 1835 - protein, 157 aa, Homo Sapiens
MKNCGVNCSGDVFTALIGEIASPNYPKPYPENSRCEYQIRLEKGFQVVVTLRREDFDVEAADSAGNCLDSLVFVAGDRQFGPYCGHGFPGPLNIETKSNALDIIFQTDLTGQKKGWKLRYHGDPMPCPKEDTPNSVWEPAKAKYVFRDVVQITCLDG

SEQ ID NO: 1836 - protein, 521 aa, Homo Sapiens
MKNCGVNCSGDVFTALIGEIASPNYPKPYPENSRCEYQIRLEKGFQVVVTLRREDFDVEAADSAGNCLDSLVFVAGDRQFGPYCGHGFPGPLNIETKSNALDIIFQTDLTGQKKGWKLRYHGDPMPCPKEDTPNSVWEPAKAKYVFRDVVQITCLDGFEVVEGRVGATSFYSTCQSNGKWSNSKLKCQPVDCGIPESIENGKVEDPESTLFGSVIRYTCEEPYYYMENGGGGEYHCAGNGSWVNEVLGPELPKCVPVCGVPREPFEEKQRIIGGSDADIKNFPWQVFFDNPWAGGALINEYWVLTAAHVVEGNREPTMYVGSTSVQTSRLAKSKMLTPEHVFIHPGWKLLEVPEGRTNFDNDIALVRLKDPVKMGPTVSPICLPGTSSDYNLMDGDLGLISGWGRTEKRDRAVRLKAARLPVAPLRKCKEVKVEKPTADAEAYVFTPNMICAGGEKGMDSCKGDSGGAFAVQDPNDKTKFYAAGLVSWGPQCGTYGLYTRVKNYVDWIMKTMQENSTPRED

SEQ ID NO: 1837 - protein, 101 aa, Homo Sapiens
MWCIVLFSLLAWVYAEPTMYGEILSPNYPQAYPSEVEKSWDIEVPEGYGIHLYFTHLDIELSENCAYDSVQIISGDTEEGRLCGQRSSNNPHSPIVEEFQV

SEQ ID NO: 1838 - protein, 103 aa, Homo Sapiens
MWCIVLFSLLAWVYAEPTMYGEILSPNYPQAYPSEVEKSWDIEVPEGYGIHLYFTHLDIELSENCAYDSVQIISGDTEEGRLCGQRSSNNPHSPIVEEFQVPY

SEQ ID NO: 1839 - protein, 168 aa, Homo Sapiens
MWCIVLFSLLAWVYAEPTMYGEILSPNYPQAYPSEVEKSWDIEVPEGYGIHLYFTHLDIELSENCAYDSVQIISGDTEEGRLCGQRSSNNPHSPIVEEFQVPYNKLQVIFKSDFSNEERFTGFAAYYVATDINECTDFVDVPCSHFCNNFIGGYFCSCPPEYFLHDDM

SEQ ID NO: 1840 - protein, 688 aa, Homo Sapiens
MWCIVLFSLLAWVYAEPTMYGEILSPNYPQAYPSEVEKSWDIEVPEGYGIHLYFTHLDIELSENCAYDSVQIISGDTEEGRLCGQRSSNNPHSPIVEEFQVPYNKLQVIFKSDFSNEERFTGFAAYYVATDINECTDFVDVPCSHFCNNFIGGYFCSCPPEYFLHDDMKNCGVNCSGDVFTALIGEIASPNYPKPYPENSRCEYQIRLEKGFQVVVTLRREDFDVEAADSAGNCLDSLVFVAGDRQFGPYCGHGFPGPLNIETKSNALDIIFQTDLTGQKKGWKLRYHGDPMPCPKEDTPNSVWEPAKAKYVFRDVVQITCLDGFEVVEGRVGATSFYSTCQSNGKWSNSKLKCQPVDCGIPESIENGKVEDPESTLFGSVIRYTCEEPYYYMENGGGGEYHCAGNGSWVNEVLGPELPKCVPVCGVPREPFEEKQRIIGGSDADIKNFPWQVFFDNPWAGGALINEYWVLTAAHVVEGNREPTMYVGSTSVQTSRLAKSKMLTPEHVFIHPGWKLLEVPEGRTNFDNDIALVRLKDPVKMGPTVSPICLPGTSSDYNLMDGDLGLISGWGRTEKRDRAVRLKAARLPVAPLRKCKEVKVEKPTADAEAYVFTPNMICAGGEKGMDSCKGDSGGAFAVQDPNDKTKFYAAGLVSWGPQCGTYGLYTRVKNYVDWIMKTMQENSTPRED

SEQ ID NO: 1841 - protein, 688 aa, Homo Sapiens; identical to SEQ ID NO: 1840

SEQ ID NO: 1842 - protein, 688 aa, Homo Sapiens; identical to SEQ ID NO: 1840

SEQ ID NO: 1843 - protein, 682 aa, Homo Sapiens [sequence omitted]

SEQ ID NO: 1844 - protein, 355 aa, Homo Sapiens
  misc_feature (1)..(1): Xaa can be any naturally occurring amino acid
XSKVRRCRKPGPRDRQLTRVDKSPEMWCIVLFSLLAWVYAEPTMYGEILSPNYPQAYPSEVEKSWDIEVPEGYGIHLYFTHLDIELSENCAYDSVQIISGDTEEGRLCGQRSSNNPHSPIVEEFQVPYNKLQVIFKSDFSNEERFTGFAAYYVATDINECTDFVDVPCSHFCNNFIGGYFCSCPPEYFLHDDMKNCGVNCSGDVFTALIGEIASPNYPKPYPENSRCEYQIRLEKGFQVVVTLRREDFDVEAADSAGNCLDSLVFVAGDRQFGPYCGHGFPGPLNIETKSNALDIIFQTDLTGQKKGWKLRYHGDPMPCPKEDTPNSVWEPAKAKYVFRDVVQITCLDGFEVVEK

SEQ ID NO: 1845 - protein, 620 aa, Homo Sapiens
MGPLMVLFCLLFLYPAGHCPNPGISLGAVRTGFRFGHGDKVRYRCSSNLVLTGSSERECQGNGVWSGTEPICRQPYSYDFPEDVAPALGTSFSHMLGATNPTQKTKESLGRKIQIQRSGHLNLYLLLDCSQSVSENDFLIFKESASLMVDRIFSFEINVSVAIITFASEPKVLMSVLNDNSRDMTEVISSLENANYKDHENGTGTNTYAALNSVYLMMNNQMRLLGMETMAWQEIRHAIILLTDGKSNMGGSPKTAVDHIREILNINQKRNDYLDIYAIGVGKLDVDWRELNELGSKKDGERHAFILQDTKALHQVFEHMLDVSKLTDTICGVGNMSANASDQERTPWHVTIKPKSQETCRGALISDQWVLTAAHCFRDGNDHSLWRVNVGDPKSQWGKEFLIEKAVISPGFDVFAKKNQGILEFYGDDIALLKLAQKVKMSTHARPICLPCTMEANLALRRPQGSTCRDHENELLNKQSVPAHFVALNGSKLNINLKMGVEWTSCAEVVSQEKTMFPNLTDVREVVTDQFLCSGTQEDESPCKGESGGAVFLERRFRFFQVGLVSWGLYNPCLGSADKNSRKRAPRSKVPPPRDFHINLFRMQPWLRQHLGDVLNFLPL

SEQ ID NO: 1846 - protein, 203 aa, Homo Sapiens
MGPLMVLFCLLFLYPGLADSAPSCPQNVNISGGTFTLSHGWAPGSLLTYSCPQGLYPSPASRLCKSSGQWQTPGATRSLSKAVCKPGHCPNPGISLGAVRTGFRFGHGDKVRYRCSSNLVLTGSSERECQGNGVWSGTEPICRQPYSYDFPEDVAPALGTSFSHMLGATNPTQKTKESLGRKIQIQRSGHLNLYLLLDCSQSV

SEQ ID NO: 1847 - protein, 139 aa, Homo Sapiens
MGPLMVLFCLLFLYPGLADSAPSCPQNVNISGGTFTLSHGWAPGSLLTYSCPQGLYPSPASRLCKSSGQWQTPGATRSLSKAVCKPVRCPAPVSFENGIYTPRLGSYPVGGNVSFECEDGFILRGSPVRQCRPNGMWDG

SEQ ID NO: 1848 - protein, 752 aa, Homo Sapiens
MGPLMVLFCLLFLYPGLADSAPSCPQNVNISGGTFTLSHGWAPGSLLTYSCPQGLYPSPASRLCKSSGQWQTPGATRSLSKAVCKPVRCPAPVSFENGIYTPRLGSYPVGGNVSFECEDGFILRGSPVRQCRPNGMWDGETAVCDNGAGHCPNPGISLGAVRTGFRFGHGDKVRYRCSSNLVLTGSSERECQGNGVWSGTEPICRQPYSYDFPEDVAPALGTSFSHMLGATNPTQKTKESLGRKIQIQRSGHLNLYLLLDCSQSVSENDFLIFKESASLMVDRIFSFEINVSVAIITFASEPKVLMSVLNDNSRDMTEVISSLENANYKDHENGTGTNTYAALNSVYLMMNNQMRLLGMETMAWQEIRHAIILLTDGKSNMGGSPKTAVDHIREILNINQKRNDYLDIYAIGVGKLDVDWRELNELGSKKDGERHAFILQDTKALHQVFEHMLDVSKLTDTICGVGNMSANASDQERTPWHVTIKPKSQETCRGALISDQWVLTAAHCFRDGNDHSLWRVNVGDPKSQWGKEFLIEKAVISPGFDVFAKKNQGILEFYGDDIALLKLAQKVKMSTHARPICLPCTMEANLALRRPQGSTCRDHENELLNKQSVPAHFVALNGSKLNINLKMGVEWTSCAEVVSQEKTMFPNLTDVREVVTDQFLCSGTQEDESPCKGESGGAVFLERRFRFFQVGLVSWGLYNPCLGSADKNSRKRAPRSKVPPPRDFHINLFRMQPWLRQHLGDVLNFLPL

SEQ ID NO: 1849 - protein, 328 aa, Homo Sapiens
MGPLMVLFCLLFLYPGLADSAPSCPQNVNISGGTFTLSHGWAPGSLLTYSCPQGLYPSPASRLCKSSGQWQTPGATRSLSKAVCKPVRCPAPVSFENGIYTPRLGSYPVGGNVSFECEDGFILRGSPVRQCRPNGMWDGETAVCDNGAGHCPNPGISLGAVRTGFRFGHGDKVRYRCSSNLVLTGSSERECQGNGVWSGTEPICRQPYSYDFPEDVAPALGTSFSHMLGATNPTQKTKESLGRKIQIQRSGHLNLYLLLDCSQSVSENDFLIFKESASLMVDRVRNQESACSRGLPVLTISLCLLPLLRTPLTAHLLQEVFSDYTHAM

SEQ ID NO: 1850 - protein, 104 aa, Homo Sapiens
MGPLMVLFCLLFLYPGLADSAPSCPQNVNISGGTFTLSHGWAPGSLLTYSCPQGLYPSPASRLCKSSGQWQTPGATRSLSKAVCKREAPCGLCSGCALSSPCLL

SEQ ID NO: 1851 - protein, 136 aa, Homo Sapiens
MGRPGRAGHCPNPGISLGAVRTGFRFGHGDKVRYRCSSNLVLTGSSERECQGNGVWSGTEPICRQPYSYDFPEDVAPALGTSFSHMLGATNPTQKTKESLGRKIQIQRSGHLNLYLLLDCSQSVSENDFLIFKESA

SEQ ID NO: 1852 - protein, 506 aa, Homo Sapiens
MGTRSAIAAPRILCSRGLRSGSARATGSGVERSPSAAIFSFEINVSVAIITFASEPKVLMSVLNDNSRDMTEVISSLENANYKDHENGTGTNTYAALNSVYLMMNNQMRLLGMETMAWQEIRHAIILLTDGKSNMGGSPKTAVDHIREILNINQKRNDYLDIYAIGVGKLDVDWRELNELGSKKDGERHAFILQDTKALHQVFEHMLDVSKLTDTICGVGNMSANASDQERTPWHVTIKPKSQETCRGALISDQWVLTAAHCFRDGNDHSLWRVNVGDPKSQWGKEFLIEKAVISPGFDVFAKKNQGILEFYGDDIALLKLAQKVKMSTHARPICLPCTMEANLALRRPQGSTCRDHENELLNKQSVPAHFVALNGSKLNINLKMGVEWTSCAEVVSQEKTMFPNLTDVREVVTDQFLCSGTQEDESPCKGESGGAVFLERRFRFFQVGLVSWGLYNPCLGSADKNSRKRAPRSKVPPPRDFHINLFRMQPWLRQHLGDVLNFLPL

SEQ ID NO: 1853 - protein, 463 aa, Homo Sapiens
MGTRSAIAAPRILCSRGLRSGSARATGSGVERSPSAANPTLMTSLRTWPLPWALPSPTCLGPPIPPRRQRIFSFEINVSVAIITFASEPKVLMSVLNDNSRDMTEVISSLENANYKDHENGTGTNTYAALNSVYLMMNNQMRLLGMETMAWQEIRHAIILLTDGKSNMGGSPKTAVDHIREILNINQKRNDYLDIYAIGVGKLDVDWRELNELGSKKDGERHAFILQDTKALHQVFEHMLDVSKLTDTICGVGNMSANASDQERTPWHVTIKPKSQETCRGALISDQWVLTAAHCFRDGNDHSLWRVNVGDPKSQWGKEFLIEKAVISPGFDVFAKKNQGILEFYGDDIALLKLAQKVKMSTHARPICLPCTMEANLALRRPQGSTCRDHENELLNKQSVPAHFVALNGSKLNINLKMGVEWTSCAEVVSQEKTMFPNLTDVREVVTDQFLCSGTQEDESPCK

SEQ ID NO: 1854 - protein, 84 aa, Homo Sapiens
MGTRSAIAAPRILCSRGLRSGSARATGSGVERSPSAANPTLMTSLRTWPLPWALPSPTCLGPPIPPRRQRKAWAVKSKSSALVI

SEQ ID NO: 1855 - protein, 84 aa, Homo Sapiens; identical to SEQ ID NO: 1854

SEQ ID NO: 1856 - protein, 538 aa, Homo Sapiens
MRALCIRETCSSELGFSRNWSRRKAGHCPNPGISLGAVRTGFRFGHGDKVRYRCSSNLVLTGSSERECQGNGVWSGTEPICRQPYSYDFPEDVAPALGTSFSHMLGATNPTQKTKDHENGTGTNTYAALNSVYLMMNNQMRLLGMETMAWQEIRHAIILLTDGKSNMGGSPKTAVDHIREILNINQKRNDYLDIYAIGVGKLDVDWRELNELGSKKDGERHAFILQDTKALHQVFEHMLDVSKLTDTICGVGNMSANASDQERTPWHVTIKPKSQETCRGALISDQWVLTAAHCFRDGNDHSLWRVNVGDPKSQWGKEFLIEKAVISPGFDVFAKKNQGILEFYGDDIALLKLAQKVKMSTHARPICLPCTMEANLALRRPQGSTCRDHENELLNKQSVPAHFVALNGSKLNINLKMGVEWTSCAEVVSQEKTMFPNLTDVREVVTDQFLCSGTQEDESPCKGESGGAVFLERRFRFFQVGLVSWGLYNPCLGSADKNSRKRAPRSKVPPPRDFHINLFRMQPWLRQHLGDVLNFLPL

SEQ ID NO: 1857 - protein, 158 aa, Homo Sapiens
MRALCIRETCSSELGFSRNWSRRKAGHCPNPGISLGAVRTGFRFGHGDKVRYRCSSNLVLTGSSERECQGNGVWSGTEPICRQPYSYDFPEDVAPALGTSFSHMLGATNPTQKTKESLGRKIQIQRSGHLNLYLLLDCSQSVSENDFLIFKESASLMV

SEQ ID NO: 1858 - protein, 160 aa, Homo Sapiens
  misc_feature (1)..(1): Xaa can be any naturally occurring amino acid
XLMVDRIFSFEINVSVAIITFASEPKVLMSVLNDNSRDMTEVISSLENANYKDHENGTGTNTYAALNSVYLMMNNQMRLLGMETMAWQEIRHAIILLTDGKSNMGGSPKTAVDHIREILNINQKRNDYLAPKPQESGDFPLPHQTSMPSGWASWMWTGEN

SEQ ID NO: 1859 - protein, 526 aa, Homo Sapiens
  misc_feature (1)..(1): Xaa can be any naturally occurring amino acid
XMVLFCLLFLYPAGHCPNPGISLGAVRTGFRFGHGDKVRYRCSSNLVLTGSSERECQGNGVWSGTEPICRQPYSYDFPEDVAPALGTSFSHMLGATNPTQKTKDHENGTGTNTYAALNSVYLMMNNQMRLLGMETMAWQEIRHAIILLTDGKSNMGGSPKTAVDHIREILNINQKRNDYLDIYAIGVGKLDVDWRELNELGSKKDGERHAFILQDTKALHQVFEHMLDVSKLTDTICGVGNMSANASDQERTPWHVTIKPKSQETCRGALISDQWVLTAAHCFRDGNDHSLWRVNVGDPKSQWGKEFLIEKAVISPGFDVFAKKNQGILEFYGDDIALLKLAQKVKMSTHARPICLPCTMEANLALRRPQGSTCRDHENELLNKQSVPAHFVALNGSKLNINLKMGVEWTSCAEVVSQEKTMFPNLTDVREVVTDQFLCSGTQEDESPCKGESGGAVFLERRFRFFQVGLVSWGLYNPCLGSADKNSRKRAPRSKVPPPRDFHINLFRMQPWLRQHLGDVLNFLPL

SEQ ID NO: 1860 - protein, 57 aa, Homo Sapiens
MAAVRVLVASRLAAASAFTSLSPGGRTPSQRAALHLSVPRPAARVALDPGAPEPWRG

SEQ ID NO: 1861 - protein, 163 aa, Homo Sapiens
MAAVRVLVASRLAAASAFTSLSPGGRTPSQRAALHLSVPRPAARVALVLSGCGVYDGTEIHEASAILVHLSRGGAEVQIFAPDVPQMHVIDHTKGQPSEGESRNVLTESARIARGKITDLANLSAANHDAAIFPGGFGAAKNLDSVSLWTSSLWNCERYMSVM

SEQ ID NO: 1862 - protein, 237 aa, Homo Sapiens
MAAVRVLVASRLAAASAFTSLSPGGRTPSQRAALHLSVPRPAARVALVLSGCGVYDGTEIHEASAILVHLSRGGAEVQIFAPDVPQMHVIDHTKGQPSEGESRNVLTESARIARGKITDLANLSAANHDAAIFPGGFGAAKNLLCCIAPVLAAKVLRGVEVTVGHEQEEGGKWPYAGTAEAIKALGAKHCVKEVVEAHVDQKNKVVTTPAFMCETALHYIHDGIGAMVRKVLELTGK

SEQ ID NO: 1863 - protein, 217 aa, Homo Sapiens
MAAVRVLVASRLAAASAFTSLSPGGRTPSQRAALHLSVPRPAARVALVLSGCGVYDGTEIHEASAILVHLSRGGAEVQIFAPDVPQMHVIDHTKGQPSEGESRNVLTESARIARGKITDLANLSAANHDAAIFPGGFGAAKNLSTFAVDGKDCKVNKEVERVLKEFHQAGKPIGCDASTSLPAPAPWWSWNAALCCPGLSCVWCWQGESRTCVGEHQ

SEQ ID NO: 1864 - protein, 268 aa, Homo Sapiens
MAAVRVLVASRLAAASAFTSLSPGGRTPSQRAALHLSVPRPAARVALVLSGCGVYDGTEIHEASAILVHLSRGGAEVQIFAPDVPQMHVIDHTKGQPSEGESRNVLTESARIARGKITDLANLSAANHDAAIFPGGFGAAKNLSTFAVDGKDCKVNKEVERVLKEFHQAGKPIGLCCIAPVLAAKVLRGVEVTVGHEQEEGGKWPYAGTAEAIKALGAKHCVKEVVEAHVDQKNKVVTTPAFMCETALHYIHDGIGAMVRKVLELTGK

SEQ ID NO: 1865 - protein, 224 aa, Homo Sapiens
PSQRAALHLSVPRPAARVALVLSGCGVYDGTEIHEASAILVHLSRGGAEVQIFAPDVPQMHVIDHTKGQPSEGESRNVLTESARIARGKITDLANLSAANHDAAIFPGGFGAAKNLSTFAVDGKDCKVNKEVERVLKEFHQAGKPIGHSLKDLPGHCPGRPLKWSLRKRCRLRAPEGGPCCSRVTAGVKVSPMVSTSGSRPCQRSVPWMSAQREEPMALSSVTD

SEQ ID NO: 1866 - protein, 184 aa, Homo Sapiens
QPSEGESRNVLTESARIARGKITDLANLSAANHDAAIFPGGFGAAKNLSTFAVDGKDCKVNKEVERVLKEFHQAGKPIGLCCIAPVLAAKVLRGVEVTVGHEQEEGGKWPYAGTAEAIKALGAKHCVKEVVEAHVDQKNKVVTTPAFMCETALHYIHDGIGAMASWACWLMPVIPALWEAKARG

SEQ ID NO: 1867 - protein, 191 aa, Homo Sapiens
  misc_feature (1)..(1): Xaa can be any naturally occurring amino acid
XQMHVIDHTKGQPSEGESRNVLTESARIARGKITDLANLSAANHDAAIFPGGFGAAKNLSTFAVDGKDCKVNKEVERVLKEFHQAGKPIGLCCIAPVLAAKVLRGVEVTVGHEQEEGGKWPYAGTAEAIKALGAKHCVKEVVEAHVDQKNKVVTTPAFMCETALHYIHDGIGAMEEREIAAPQPPGLTSGE

SEQ ID NO: 1868 - protein, 190 aa, Homo Sapiens
  misc_feature (1)..(1): Xaa can be any naturally occurring amino acid
XSRGGAEVQIFAPDVPQMHVIDHTKGQPSEGESRNVLTESARIARGKITDLANLSAANHDAAIFPGGFGAAKNLSTFAVDGKDCKVNKEVERVLKEFHQAGKPIGPGDGGDVSMSVSLRSLSLALSLPGGSCSQPSLPPHRHPACPSGPARLLCLEGATKEEDVNVQVLREAGPAASVSVFRPQEEPRPG

SEQ ID NO: 1869 - protein, 266 aa, Homo Sapiens
CRLNQLSSQGEGSVARQRSVEWRGEASRWNSQMTACRHQESGRTYRRQPCTELGTCNNNSTLGVFALNCFTKGQKNSTLIFTRENTIRNCSCSADIRDCDYSLANLMCNCKTVLPLAVERTSYNGHLTIWFTDTSALGHLLNFTLVQDLKLSLCSTNTLPTEYLAICGLKRLRINMEAKHPFPEQSLLIHSGGDSDSREKPMWLHKGWQPCMYISFLDMALFNRDSALKSYSIENVTSIANNFPDFSYFRTFPMPSNKSYVVTFIY

SEQ ID NO: 1870 - protein, 219 aa, Homo Sapiens
MAPPSRHCLLLISTLGVFALNCFTKGQKNSTLIFTRENTIRNCSCSADIRDCDYSLANLMCNCKTVLPLAVERTSYNGHLTIWFTDTSALGHLLNFTLVQDLKLSLCSTNTLPTEYLAICGLKRLRINMEAKHPFPEQSLLIHSGGDSDSREKPMWLHKGWQPCMYISFLDMALFNRDSALKSYSIENVTSIANNFPDFSYFRTFPMPSNKSYVVTFIY

SEQ ID NO: 1871 - protein, 219 aa, Homo Sapiens; identical to SEQ ID NO: 1870

SEQ ID NO: 1872 - protein, 219 aa, Homo Sapiens; identical to SEQ ID NO: 1870

SEQ ID NO: 1873 - protein, 148 aa, Homo Sapiens
MFIKVMFGAGCSVLVNTSCRLVNLTAHLRQKAGLPPDATIALLAEDGNLVSLEEDLKEGASRAQTMGNSLLKERAIYVLVRIIKGEDMASTRYESLLENLDDHYPELAEELRRLSGLSSVGHNWRKRMGTRRGRHEQSPTSRPRKGPD

SEQ ID NO: 1874 - protein, 157 aa, Homo Sapiens
MFIKVMFGAGCSVLVNTSCRLVNLTAHLRQKAGLPPDATIALLAEDGNLVSLEEDLKEGASRAQTMGNSLLKERAIYVLVRIISKRERTWPPPAMSPYWRTWMTITQSWQRNCAGCQASPLWATTGGSVWALGEAAMSKAPLQGPERALIKGMDCTL

SEQ ID NO: 1875 - protein, 142 aa, Homo Sapiens
MFIKVMFGAGCSVLVNTSCRLVNLTAHLRQKAGLPPDATIALLAEDGNLVSLEEDLKEGASRAQTMGNSLLKERAIYVLVRIISKVAQEGEDMASTRYESLLENLDDHYPELAGANRQQPSRTPLAESGIAEKLHQQEGQGP

SEQ ID NO: 1876 - protein, 243 aa, Homo Sapiens
MLLSLLGACAVVGPFHGPEWEPVQGLLSQNHSCRDPQCCGNLLVLCLFLVWQVRHCWHQVTRTRFSTRNVIKVPLQKRAVPSMRCETVFKLTPEFFSPGKSRGLDSQQCAQRQRWGYRRSLQESWAQNLLSPQHPCPGPPSGVHTHSEPIFCTTSISNTCLLPQNSSWKAWQVPWCLHDGQTRPALDMCQEMEQLLLHSQERLVSLEPVISVRSRPTSMTLTTSLPNLLSAERLQFCPQRAPA

SEQ ID NO: 1877 - protein, 696 aa, Homo Sapiens
MAMARLGSWLGEAQWLALVSLFVAALATVGLYLAQWALARARPQPQRRAVEPGEGPRPGSDALLSWILTLGSWRSQWQAAWVTALNEEAERKGGPPFLSFEEDPRQQALELVVQEVSSVLRSAEEKVVVCHVVGQAIQFLVSETPALGAGCRLYDMRLSPFHLQLEFHMKEKREDLQISWSFISVPEMAVNIQPKALGEDQVAETSAMSDVLKDILKHLAGSASPSVVLITKPTTVKEAQNLQCAASTAQESCPPKPPRAHELKLLVRNIHVLLLSEPGASGHINAVCVVQLNDPVQRFSSTLTKNTPDLMWEEEFTFELNAKSKELHLQISEAGRSSEGLLATATVPLDLFKKQPSGPQSFTLTSGSACGSSVLGSVTAEFSYMEPGELKSWPIPPPVPAAKIEKDRTVMPCGTVVTTVTAVKTKPRVDVGRASPLSSDSPVKTPIKVKVIEKDISVQAIACRSAPVSKTLSSSDTELLVLNGSDPVAEVAIRQLSESSKLKLKSPRKKSTIIISGISKTSLSQDHDAALMQGYTASVDSTHQEDAPSHPERAAASAPPEEAESAQASLAPKPQEDELDSWDLEKEPQAAAWSSQVLLDPDGDELSESSMSVLEPGTAKKHKGGILRKGAKLFFRRRHQQKDPGMSQSHNDLVFLEQPEGSRRKGITLTRILNKKLLSRHRNKNTMNGAPVEPCT

SEQ ID NO: 1878 - protein, 541 aa, Homo Sapiens
MRLSPFHLQLEFHMKEKREDLQISWSFISVPEMAVNIQPKALGEDQVAETSAMSDVLKDILKHLAGSASPSVVLITKPTTVKEAQNLQCAASTAQESCPPKPPRAHELKLLVRNIHVLLLSEPGASGHINAVCVVQLNDPVQRFSSTLTKNTPDLMWEEEFTFELNAKSKELHLQISEAGRSSEGLLATATVPLDLFKKQPSGPQSFTLTSGSACGSSVLGSVTAEFSYMEPGELKSWPIPPPVPAAKIEKDRTVMPCGTVVTTVTAVKTKPRVDVGRASPLSSDSPVKTPIKVKVIEKDISVQAIACRSAPVSKTLSSSDTELLVLNGSDPVAEVAIRQLSESSKLKLKSPRKKSTIIISGISKTSLSQDHDAALMQGYTASVDSTHQEDAPSHPERAAASAPPEEAESAQASLAPKPQEDELDSWDLEKEPQAAAWSSQVLLDPDGDELSESSMSVLEPGTAKKHKGGILRKGAKLFFRRRHQQKDPGMSQSHNDLVFLEQPEGSRRKGITLTRILNKKLLSRHRNKNTMNGAPVEPCT

SEQ ID NO: 1879 - protein, 182 aa, Homo Sapiens
  misc_feature (1)..(1): Xaa can be any naturally occurring amino acid
XSTIIISGISKDHDAALMQGYTASVDSTHQEDAPSHPERAAASAPPEEAESAQASLAPKPQEDELDSWDLEKEPQAAAWSSQVLLDPDGDELSESSMSVLEPGTAKKHKGGILRKGAKLFFRRRHQQKDPGMSQSHNDLVFLEQPEGSRRKGITLTRILNKKLLSRHRNKNTMNGAPVEPCT

SEQ ID NO: 1880 - protein, 148 aa, Homo Sapiens
MAASPARPAVLALTGLALLLLLCWGPGGISGNKLKLMLQKREAPVPTKTKVAVDENKAKEFLGSLKRQKRQLWDRTRPEVQQWYQQFLYMGFDEAKFEDDITYWLNRDRNGHEYYGDYYQRHYDEDSAIGPRSPYGFRHGASVNYDDY

SEQ ID NO: 1881 - protein, 112 aa, Homo Sapiens
MLQKREAPVPTKTKVAVDENKAKEFLGSLKRQKRQLWDRTRPEVQQWYQQFLYMGFDEAKFEDDITYWLNRDRNGHEYYGDYYQRHYDEDSAIGPRSPYGFRHGASVNYDDY

SEQ ID NO: 1882 - protein, 142 aa, Homo Sapiens
MQQLRVRGSYRSASQFAGWRRVFYQARQGGISGNKLKLMLQKREAPVPTKTKVAVDENKAKEFLGSLKRQKRQLWDRTRPEVQQWYQQFLYMGFDEAKFEDDITYWLNRDRNGHEYYGDYYQRHYDEDSAIGPRSPYGFRHG

SEQ ID NO: 1883 - protein, 117 aa, Homo Sapiens
MIIDSSRIPSFTQLHSTMTRAPLLLLCVALVLLGHVNGATVRNEDKWKPLNNPRNRDLFFRRLQAYFKGRGLDLGTFPNPFPTNENPRPLSFQSELTASASADYEEQKNSFHNYLKG

SEQ ID NO: 1884 - protein, 385 aa, Homo Sapiens
MWGFRLLRSPPLLLLLPQLGIGNASSCSQARTMNPGGSGGARCSLSAEVRRRQCLQLSTVPGADPQRSNELLLLAAAGEGLERQDLPGDPAKEEPQPPPQHHVLYFPGDVQNYHEIMTRHPENYQWENWSLENVATILAHRFPNSYIWVIKCSRMHLHKFSCYDNFVKSNMFGAPEHNTDFGAFKHLYMLLVNAFNLSQNSLSKKSLNVWNKDSIASNCRSSPSHTTNGCQGEKVRTCEKSDESAMSFYPPSLNDASFTLIGFSKGCVVLNQLLFELKEAKKDKNIDAFIKSIRTMYWLDGGHSGGSNTWVTYPEVLKEFAQTGIIVHTHVTPYQVRDPMRSWIGKEHKKFVQILGDLGMQVTSQIHFTKEAPSIENHFRVHEVF

SEQ ID NO: 1885 - protein, 922 aa, Homo Sapiens
MHWLASATQTSASIVSSSLLSAVDVSSSLTMSEYFQNTSLPGTANSRQFSLPVVSNAAFLTGSISNFSRASAPAISSAWLQPSASGTSFQPLMGSAYLYQHSSTTMLSGVTGQSHICTSAASYPGVFEWDSTASTVKKSSSLRDFTVTVIDQNTAVSSMSMTAQYYKTSDTNTMVPLYPSLSASLVQGTLTQIPNQQGHNLSLPCQIGSQVYYYNQGTLGPQLSCLQSYGSVSYTGYRASAHQPEMVMVLKEVQPTNVLPPVSTSGMYYSVSSQPITETSVQVMETSLGMDTSLGLQSPSQTFCLPQTPEFSKSFSSRNTQTLESNPSPELGDISITPVQSPTNLLTLSPAPSQEKNENENLDEIKTNLSKPLDVHQILIGNQDPPLLPVEIPDIHPLLACIDPLGQEEQPGSENANLRNKSLSLEDQGIFENGIESSSDLADITTWVEDTYLPPIFSSLQDLDQPESPSAKKAKDTSAIKVNQVQEKSCVIKGHSDQVRKNKHKASEPIQGAPKAKIQPKNPECLLEREVVVGSATVSNSASVNKAKHSSNKPHKAASSRISKTKSHGQEKTKGNRKNSSKKSEESKQSGKKVKVEEKQTIPNMKRKKNQPELSQKTLKKPRSSLGMHMLESVQVFHALGKKIDMKTGFSSSRTLGSSSNTQNRQPFPALKPWLDIQHEGKGPEKIQVKAQKLDGSAEKECTSPSHSELPPPGKVKLIPLPFLTLDQPQARHVSRRPNPLASRRPAVAYPARPDSTNSAQSNAVNPSRPAPTNTSLTGPATPAQPISAKATQPSSANPTQPTVPQSAASRPSAYKTSSCSSLQREPVSTAVTSLRSLPKPQNQFLIQDFSLQPRPWRKPTVPEPVMSTPITEEQRPEREAMKRKAQQERENAAKYTSLGKVQFFIERERDMEIAEYYGYTI

SEQ ID NO: 1886 - protein, 192 aa, Homo Sapiens
ITHRIHWESASLLRSEETKENEGFTVTAEGKGQGTLSVVTMYHAKAKDQLTCNKFDLKVTIKPAPETGIPSPIFLSSVFLEKRPQDAKNTMILEICTRYRGDQDATMSILDISMMTGFAPDTDDLKQLANGVDRYISKYELDKAFSDRNTLIIYLDKVSHSEDDCLAFKVHQYFNVELIQPGAVKVYAYYNL

SEQ ID NO: 1887 - protein, 1663 aa, Homo Sapiens
MGPTSGPSLLLLLLTHLPLALGSPMYSIITPNILRLESEETMVLEAHDAQGDVPVTVTVHDFPGKKLVLSSEKTVLTPATNHMGNVTFTIPANREFKSEKGRNKFVTVQATFGTQVVEKVVLVSLQSGYLFIQTDKTIYTPGSTVLYRIFTVNHKLLPVGRTVMVNIENPEGIPVKQDSLSSQNQLGVLPLSWDIPELVNMGQWKIRAYYENSPQQVFSTEFEVKEYVLPSFEVIVEPTEKFYYIYNEKGLEVTITARFLYGKKVEGTAFVIFGIQDGEQRISLPESLKRIPIEDGSGEVVLSRKVLLDGVQNPRAEDLVGKSLYVSATVILHSGSDMVQAERSGIPIVTSPYQIHFTKTPKYFKPGMPFDLMVFVTNPDGSPAYRVPVAVQGEDTVQSLTQGDGVAKLSINTHPSQKPLSITVRTKKQELSEAEQATRTMQALPYSTVGNSNNYLHLSVLRTELRPGETLNVNFLLRMDRAHEAKIRYYTYLIMNKGRLLKAGRQVREPGQDLVVLPLSITTDFIPSFRLVAYYTLIGASGQREVVADSVWVDVKDSCVGSLVVKSGQSEDRQPVPGQQMTLKIEGDHGARVVLVAVDKGVFVLNKKNKLTQSKIWDVVEKADIGCTPGSGKDYAGVFSDAGLTFTSSSGQQTAQRAELQCPQPAARRRRSVQLTEKRMDKVGKYPKELRKCCEDGMRENPMRFSCQRRTRFISLGEACKKVFLDCCNYITELRRQHARASHLGLARSNLDEDIIAEENIVSRSEFPESWLWNVEDLKEPPKNGISTKLMNIFLKDSITTWEILAVSMSDKKGICVADPFEVTVMQDFFIDLRLPYSVVRNEQVEIRAVLYNYRQNQELKVRVELLHNPAFCSLATTKRRHQQTVTIPPKSSLSVPYVIVPLKTGLQEVEVKAAVYHHFISDGVRKSLKVVPEGIRMNKTVAVRTLDPERLGREGVQKEDIPPADLSDQVPDTESETRILLQGTPVAQMTEDAVDAERLKHLIVTPSGCGEQNMIGMTPTVIAVHYLDETEQWEKFGLEKRQGALELIKKGYTQQLAFRQPSSAFAAFVKRAPSTWLTAYVVKVFSLAVNLIAIDSQVLCGAVKWLILEKQKPDGVFQEDAPVIHQEMIGGLRNNNEKDMALTAFVLISLQEAKDICEEQVNSLPGSITKAGDFLEANYMNLQRSYTVAIAGYALAQMGRLKGPLLNKFLTTAKDKNRWEDPGKQLYNVEATSYALLALLQLKDFDFVPPVVRWLNEQRYYGGGYGSTQATFMVFQALAQYQKDAPDHQELNLDVSLQLPSRSSKITHRIHWESASLLRSEETKENEGFTVTAEGKGQGTLSVVTMYHAKAKDQLTCNKFDLKVTIKPAPETEKRPQDAKNTMILEICTRYRGDQDATMSILDISMMTGFAPDTDDLKQLANGVDRYISKYELDKAFSDRNTLIIYLDKVSHSEDDCLAFKVHQYFNVELIQPGAVKVYAYYNLEESCTRFYHPEKEDGKLNKLCRDELCRCAEENCFIQKSDDKVTLEERLDKACEPGVDYVYKTRLVKVQLSNDFDEYIMAIEQTIKSGSDEVQVGQQRTFISPIKCREALKLEEKKHYLMWGLSSDFWGEKPNLSYIIGKDTWVEHWPEEDECQDEENQKQCQDLGAFTESMVVFGCPN

SEQ ID NO: 1888 - protein, 103 aa, Homo Sapiens
MVLEAHDAQGDVPVTVTVHDFPGKKLVLSSEKTVLTPATNHMGNVTFTIPANREFKSEKGRNKFVTVQATFGTQVVEKVVLVSLQSGYLFIQTDKTIYTPGST

SEQ ID NO: 1889 - protein, 101 aa, Homo Sapiens
NNEKDMALTAFVLISLQEAKDICEEQVNSLPGSITKAGDFLEANYMNLQRSYTVAIAGYALAQMGRLKGPLLNKFLTTAKDEENQKQCQDLGAFTESMVVF

SEQ ID NO: 1890 - protein, 100 aa, Homo Sapiens
  misc_feature (1)..(1): Xaa can be any naturally occurring amino acid
XFIQKSDDKVTLEERLDKACEPGVDYVYKTRLVKVQLSNDFDEYIMAIEQTIKSGSDEVQVGQQRTFISPIKCREALKLEEKKHYLMWGLSSDFWGEKPK

SEQ ID NO: 1891 - protein, 119 aa, Homo Sapiens
MAGQPAATGSPSADKDGMEPNVVARISQWADDHLRLVRGHGIPLWPKLECSGTIIAHCCCSTHFGRKDPPTSASRVAGTTEHQHWNGHSWNNVTFEKHSTDIKIYKLFGYSSRIYKKKC

SEQ ID NO: 1892 - protein, 71 aa, Homo Sapiens
MAGQPAATGSPSADKDGMEPNVVARISQWADDHLRLVRNISTGMAIAGIMLLLRSIRLKSHVVLCWLSWLE

SEQ ID NO: 1893 - protein, 294 aa, Homo Sapiens
MAGQPAATGSPSADKDGMEPNVVARISQWADDHLRLVRNISTGMAIAGIMLLLRSIRLTSKFTSSSDIPVEFIRRNVKLRGRLRRITENGLEIEHIPITLPIIASLRKEPRGALLVKLAGVELAETGKAWLQKELKPSQLLWFQLLGKENSALFCYLLVSKGGYFSVNLNEEILRRGLGKTVLVKGLKYDSKIYWTVHRNLLKAELTALKKGEGIWKEDSEKESYLEKFKDSWREIWKKDSFLKTTGSDFSLKKESYYEKLKRTYEIWKDNMNNCSLILKFRELISRINFRRKG

SEQ ID NO: 1894 - protein, 251 aa, Homo Sapiens
MAIAGIMLLLRSIRLTSKFTSSSDIPVEFIRRNVKLRGRLRRITENGLEIEHIPITLPIIASLRKEPRGALLVKLAGVELAETGKAWLQKELKPSQLLWFQLLGKENSALFCYLLVSKGGYFSVNLNEEILRRGLGKTVLVKGLKYDSKIYWTVHRNLLKAELTALKKGEGIWKEDSEKESYLEKFKDSWREIWKKDSFLKTTGSDFSLKKESYYEKLKRTYEIWKDNMNNCSLILKFRELISRINFRRKG

SEQ ID NO: 1895 - protein, 115 aa, Homo Sapiens
  misc_feature (1)..(1): Xaa can be any naturally occurring amino acid
XAGQPAATGSPSADKDGMEPNVVARISQWADDHLRLVRGHGIPLWPKLECSGTIIAHCCCSTHFGRKDPPTSASRVAGTTDQVLHLSPRLECNGVISAHCNLCLPGSSDCPASPS

SEQ ID NO: 1896 - protein, 213 aa, Homo Sapiens
MESLLLLPRFGRISDLTVDLSTPEGSFPSDEGWPFAKYLGACGRMVAVNYVGEELWSYFNAPWEKRVDLAWQLMEIAEQLTNNDFEFALYLLDVSFDNFAVGPRDGKVIIVDAENVLVADKRLIRQNKPENWDVWYESKFDDCDKEACLSFSKEILCARATVDHNYYAVCQNLLSRHATWRGTSGGLLHDPPSEIAKDGRLEALLDECANPKK

SEQ ID NO: 1897 - protein, 221 aa, Homo Sapiens
MKSENGTVVGSFPSDEGWPFAKYLGACGRMVAVNYVGEELWSYFNAPWEKRVDLAWQLMEIAEQLTNNDFEFALYLLDVSFDNFAVGPRDGKVIIVDAENVLVADKRLIRQNKPENWDVWYESKFDDCDKEACLSFSKEILCARATVDHNYYAVCQNLLSRHATWRGTSGGLLHDPPSEIAKDGRLEALLDECANPKKRYGRFQAAKELREYLAQLSNNVR

SEQ ID NO: 1898 - protein, 192 aa, Homo Sapiens
MVAVNYVGEELWSYFNAPWEKRVDLAWQLMEIAEQLTNNDFEFALYLLDVSFDNFAVGPRDGKVIIVDAENVLVADKRLIRQNKPENWDVWYESKFDDCDKEACLSFSKEILCARATVDHNYYAVCQNLLSRHATWRGTSGGLLHDPPSEIAKDGRLEALLDECANPKKRYGRFQAAKELREYLAQLSNNVR

SEQ ID NO: 1899 - protein, 430 aa, Homo Sapiens
MWRLVPPKLGRLSRSLKLAALGSLLVLMVLHSPSLLASWQRNELTDRRFLQLNKCPACFGTSWCRRFLNGQVVFEAWGRLRLLDFLNVKNVYFAQYGEPREGGRRRVVLKRLGSQRELAQLDQSICKRATGRPRCDLLQAMPRTEFARLNGDVRLLTPEAVEGWSDLVHCPSQRLLDRLVRRYAETKDSGSFLLRNLKDSERMQLLLTLAFNPEPLVLQSFPSDEGWPFAKYLGACGRMVAVNYVGEELWSYFNAPWEKRVDLAWQLMEIAEQLTNNDFEFALYLLDVSFDNFAVGPRDGKVIIVDAENVLVADKRLIRQNKPENWDVWYESKFDDCDKEACLSFSKEILCARATVDHNYYAVCQNLLSRHATWRGTSGGLLHDPPSEIAKDGRLEALLDECANPKKRYGRFQAAKELREYLAQLSNNVR

SEQ ID NO: 1900 - protein, 1744 aa, Homo Sapiens
MRLLWGLIWASSFFTLSLQKPRLLLFSPSVVHLGVPLSVGVQLQDVPRGQVVKGSVFLRNPSRNNVPCSPKVDFTLSSERDFALLSLQVPLKDAKSCGLHQLLRGPEVQLVAHSPWLKDSLSRTTNIQGINLLFSSRRGHLFLQTDQPIYNPGQRVRYRVFALDQKMRPSTDTITVMVENSHGLRVRKKEVYMPSSIFQDDFVIPDISEPGTWKISARFSDGLESNSSTQFEVKKYVLPNFEVKITPGKPYILTVPGHLDEMQLDIQARYIYGKPVQGVAYVRFGLLDEDGKKTFFRGLESQTKLVNGQSHISLSKAEFQDALEKLNMGITDLQGLRLYVAAAIIESPGGEMEEAELTSWYFVSSPFSLDLSKTKRHLVPGAPFLLQALVREMSGSPASGIPVKVSATVSSPGSVPEVQDIQQNTDGSGQVSIPIIIPQTISELQLSVSAGSPHPAIARLTVAAPPSGGPGFLSIERPDSRPPRVGDTLNLNLRAVGSGATFSHYYYMILSRGQIVFMNREPKRTLTSVSVFVDHHLAPSFYFVAFYYHGDHPVANSLRVDVQAGACEGKLELSVDGAKQYRNGESVKLHLETDSLALVALGALDTALYAAGSKSHKPLNMGKVFEAMNSYDLGCGPGGGDSALQVFQAAGLAFSDGDQWTLSRKRLSCPKEKTTRKKRNVNFQKAINEKLGQYASPTAKRCCQDGVTRLPMMRSCEQRAARVQQPDCREPFLSCCQFAESLRKKSRDKGQAGLQRALEILQEEDLIDEDDIPVRSFFPENWLWRVETVDRFQILTLWLPDSLTTWEIHGLSLSKTKGLCVATPVQLRVFREFHLHLRLPMSVRRFEQLELRPVLYNYLDKNLTVSVHVSPVEGLCLAGGGGLAQQVLVPAGSARPVAFSVVPTAAAAVSLKVVARGSFEFPVGDAVSKVLQIEKEGAIHREELVYELNPLDHRGRTLEIPGNSDPNMIPDGDFNSYVRVTASDPLDTLGSEGALSPGGVASLLRLPRGCGEQTMIYLAPTLAASRYLDKTEQWSTLPPETKDHAVDLIQKGYMRIQQFRKADGSYAAWLSRDSSTWLTAFVLKVLSLAQEQVGGSPEKLQETSNWLLSQQQADGSFQDPCPVLDRSMQGGLVGNDETVALTAFVTIALHHGLAVFQDEGAEPLKQRVEASISKANSFLGEKASAGLLGAHAAAITAYALTLTKAPVDLLGVAHNNLMAMAQETGDNLYWGSVTGSQSNAVSPTPAPRNPSDPMPQAPALWIETTAYALLHLLLHEGKAEMADQASAWLTRQGSFQGGFRSTQDTVIALDALSAYWIASHTTEERGLNVTLSSTGRNGFKSHALQLNNRQIRGLEEELQFSLGSKINVKVGGNSKGTLKVLRTYNVLDMKNTTCQDLQIEVTVKGHVEYTMEANEDYEDYEYDELPAKDDPDAPLQPVTPLQLFEGRRNRRRREAPKVVEEQESRVHYTVCIWRNGKVGLSGMAIADVTLLSGFHALRADLEKLTSLSDRYVSHFETEGPHVLLYFDSVPTSRECVGFEAVQEVPVGLVQPASATLYDYYNPERRCSVFYGAPSKSRLLATLCSAEVCQCAEGKCPRQRRALERGLQDEDGYRMKFACYYPRVEYGFQVKVLREDSRAAFRLFETKITQVLHFTKDVKAAANQMRNFLVRASCRLRLEPGKEYLIMGLDGATYDLEGHPQYLLDSNSWIEEMPSERLCRSTRQRAACAQLNDFLQEYGTQGCQV

SEQ ID NO: 1901 - protein, 1698 aa, Homo Sapiens
MRLLWGLIWASSFFTLSLQKPRLLLFSPSVVHLGVPLSVGVQLQDVPRGQVVKGSVFLRNPSRNNVPCSPKVDFTLSSERDFALLSLQVPLKDAKSCGLHQLLRGPEVQLVAHSPWLKDSLSRTTNIQGINLLFSSRRGHLFLQTDQPIYNPGQRVRYRVFALDQKMRPSTDTITVMVENSHGLRVRKKEVYMPSSIFQDDFVIPDISEPGTWKISARFSDGLESNSSTQFEVKKYVLPNFEVKITPGKPYILTVPGHLDEMQLDIQARYIYGKPVQGVAYVRFGLLDEDGKKTFFRGLESQTKLVNGQSHISLSKAEFQDALEKLNMGITDLQGLRLYVAAAIIESPGGEMEEAELTSWYFVSSPFSLDLSKTKRHLVPGAPFLLQALVREMSGSPASGIPVKVSATVSSPGSVPEVQDIQQNTDGSGQVSIPIIIPQTISELQLSVSAGSPHPAIARLTVAAPPSGGPGFLSIERPDSRPPRVGDTLNLNLRAVGSGATFSHYYYMILSRGQIVFMNREPKRTLTSVSVFVDHHLAPSFYFVAFYYHGDHPVANSLRVDVQAGACEGKLELSVDGAKQYRNGESVKLHLETDSLALVALGALDTALYAAGSKSHKPLNMGKVFEAMNSYDLGCGPGGGDSALQVFQAAGLAFSDGDQWTLSRKRLSCPKEKTTRKKRNVNFQKAINEKLGQYASPTAKRCCQDGVTRLPMMRSCEQRAARVQQPDCREPFLSCCQFAESLRKKSRDKGQAGLQRALEILQEEDLIDEDDIPVRSFFPENWLWRVETVDRFQILTLWLPDSLTTWEIHGLSLSKTKGLCVATPVQLRVFREFHLHLRLPMSVRRFEQLELRPVLYNYLDKNLTVSVHVSPVEGLCLAGGGGLAQQVLVPAGSARPVAFSVVPTAAAAVSLKVVARGSFEFPVGDAVSKVLQIEKEGAIHREELVYELNPLDHRGRTLEIPGNSDPNMIPDGDFNSYVRVTASDPLDTLGSEGALSPGGVASLLRLPRGCGEQTMIYLAPTLAASRYLDKTEQWSTLPPETKDHAVDLIQKGYMRIQQFRKADGSYAAWLSRDSSTWLTAFVLKVLSLAQEQVGGSPEKLQETSNWLLSQQQADGSFQDPCPVLDRSMQGGLVGNDETVALTAFVTIALHHGLAVFQDEGAEPLKQRVEASISKANSFLGEKASAGLLGAHAAAITAYALTLTKAPVDLLGVAHNNLMAMAQETGDNLYWGSVTGSQSNAVSPTPAPRNPSDPMPQAPALWIETTAYALLHLLLHEGKAEMADQASAWLTRQGSFQGGFRSTQDTVIALDALSAYWIASHTTEERGLNVTLSSTGRNGFKSHALQLNNRQIRGLEEELQFSLGSKINVKVGGNSKGTLKVLRTYNVLDMKNTTCQDLQIEVTVKGHVEYTMEANEDYEDYEYDELPAKDDPDAPLQPVTPLQLFEGRRNRRRREAPKLTSLSDRYVSHFETEGPHVLLYFDSVPTSRECVGFEAVQEVPVGLVQPASATLYDYYNPERRCSVFYGAPSKSRLLATLCSAEVCQCAEGKCPRQRRALERGLQDEDGYRMKFACYYPRVEYGFQVKVLREDSRAAFRLFETKITQVLHFTKDVKAAANQMRNFLVRASCRLRLEPGKEYLIMGLDGATYDLEGHPQYLLDSNSWIEEMPSERLCRSTRQRAACAQLNDFLQEYGTQGCQV

SEQ ID NO: 1902 - protein, 1698 aa, Homo Sapiens
MRLLWGLIWASSFFTLSLQKPRLLLFSPSVVHLGVPLSVGVQLQDVPRGQVVKGSVFLRNPSRNNVPCSPKVDFTLSSERDFALLSLQVPLKDAKSCGLHQLLRGPEVQLVAHSPWLKDSLSRTTNIQGINLLFSSRRGHLFLQTDQPIYNPGQRVRYRVFALDQKMRPSTDTITVMVENSHGLRVRKKEVYMPSSIFQDDFVIPDISEPGTWKISARFSDGLESNSSTQFEVKKYVLPNFEVKITPGKPYILTVPGHLDEMQLDIQARYIYGKPVQGVAYVRFGLLDEDGKKTFFRGLESQTKLVNGQSHISLSKAEFQDALEKLNMGITDLQGLRLYVAAAIIESPGGEMEEAELTSWYFVSSPFSLDLSKTKRHLVPGAPFLLQALVREMSGSPASGIPVKVSATVSSPGSVPEVQDIQQNTDGSGQVSIPIIIPQTISELQLSVSAGSPHPAIARLTVAAPPSGGPGFLSIERPDSRPPRVGDTLNLNLRAVGSGATFSHYYYMILSRGQIVFMNREPKRTLTSVSVFVDHHLAPSFYFVAFYYHGDHPVANSLRVDVQAGACEGKLELSVDGAKQYRNGESVKLHLETDSLALVALGALDTALYAAGSKSHKPLNMGKVFEAMNSYDLGCGPGGGDSALQVFQAAGLAFSDGDQWTLSRKRLSCPKEKTTRKKRNVNFQKAINEKLGQYASPTAKRCCQDGVTRLPMMRSCEQRAARVQQPDCREPFLSCCQFAESLRKKSRDKGQAGLQRALEILQEEDLIDEDDIPVRSFFPENWLWRVETVDRFQILTLWLPDSLTTWEIHGLSLSKTKGLCVATPVQLRVFREFHLHLRLPMSVRRFEQLELRPVLYNYLDKNLTVSVHVSPVEGLCLAGGGGLAQQVLVPAGSARPVAFSVVPTAATAVSLKVVARGSFEFPVGDAVSKVLQIEKEGAIHREELVYELNPLDHRGRTLEIPGNSDPNMIPDGDFNSYVRVTASDPLDTLGSEGALSPGGVASLLRLPRGCGEQTMIYLAPTLAASRYLDKTEQWSTLPPETKDHAVDLIQKGYMRIQQFRKADGSYAAWLSRGSSTWLTAFVLKVLSLAQEQVGGSPEKLQETSNWLLSQQQADGSFQDLSPVIHRSMQGGLVGNDETVALTAFVTIALHHGLAVFQDEGAEPLKQRVEASISKASSFLGEKASAGLLGAHAAAITAYALTLTKAPADLRGVAHNNLMAMAQETGDNLYWGSVTGSQSNAVSPTPAPRNPSDPMPQAPALWIETTAYALLHLLLHEGKAEMADQAAAWLTRQGSFQGGFRSTQDTVIALDALSAYWIASHTTEERGLNVTLSSTGRNGFKSHALQLNNRQIRGLEEELQFSLGSKINVKVGGNSKGTLKVLRTYNVLDMKNTTCQDLQIEVTVKGHVEYTMEANEDYEDYEYDELPAKDDPDAPLQPVTPLQLFEGRRNRRRREAPKLTSLSDRYVSHFETEGPHVLLYFDSVPTSRECVGFEAVQEVPVGLVQPASATLYDYYNPERRCSVFYGAPSKSRLLATLCSAEVCQCAEGKCPRQRRALERGLQDEDGYRMKFACYYPRVEYGFQVKVLREDSRAAFRLFETKITQVLHFTKDVKAAANQMRNFLVRASCRLRLEPGKEYLIMGLDGATYDLEGHPQYLLDSNSWIEEMPSERLCRSTRQRAACAQLNDFLQEYGTQGCQV

SEQ ID NO: 1903 - protein, 1744 aa, Homo Sapiens
MRLLWGLIWASSFFTLSLQKPRLLLFSPSVVHLGVPLSVGVQLQDVPRGQVVKGSVFLRNPSRNNVPCSPKVDFTLSSERDFALLSLQVPLKDAKSCGLHQLLRGPEVQLVAHSPWLKDSLSRTTNIQGINLLFSSRRGHLFLQTDQPIYNPGQRVRYRVFALDQKMRPSTDTITVMVENSHGLRVRKKEVYMPSSIFQDDFVIPDISEPGTWKISARFSDGLESNSSTQFEVKKYVLPNFEVKITPGKPYILTVPGHLDEMQLDIQARYIYGKPVQGVAYVRFGLLDEDGKKTFFRGLESQTKLVNGQSHISLSKAEFQDALEKLNMGITDLQGLRLYVAAAIIESPGGEMEEAELTSWYFVSSPFSLDLSKTKRHLVPGAPFLLQALVREMSGSPASGIPVKVSATVSSPGSVPEVQDIQQNTDGSGQVSIPIIIPQTISELQLSVSAGSPHPAIARLTVAAPPSGGPGFLSIERPDSRPPRVGDTLNLNLRAVGSGATFSHYYYMILSRGQIVFMNREPKRTLTSVSVFVDHHLAPSFYFVAFYYHGDHPVANSLRVDVQAGACEGKLELSVDGAKQYRNGESVKLHLETDSLALVALGALDTALYAAGSKSHKPLNMGKVFEAMNSYDLGCGPGGGDSALQVFQAAGLAFSDGDQWTLSRKRLSCPKEKTTRKKRNVNFQKAINEKLGQYASPTAKRCCQDGVTRLPMMRSCEQRAARVQQPDCREPFLSCCQFAESLRKKSRDKGQAGLQRALEILQEEDLIDEDDIPVRSFFPENWLWRVETVDRFQILTLWLPDSLTTWEIHGLSLSKTKGLCVATPVQLRVFREFHLHLRLPMSVRRFEQLELRPVLYNYLDKNLTVSVHVSPVEGLCLAGGGGLAQQVLVPAGSARPVAFSVVPTAATAVSLKVVARGSFEFPVGDAVSKVLQIEKEGAIHREELVYELNPLDHRGRTLEIPGNSDPNMIPDGDFNSYVRVTASDPLDTLGSEGALSPGGVASLLRLPRGCGEQTMIYLAPTLAASRYLDKTEQWSTLPPETKDHAVDLIQKGYMRIQQFRKADGSYAAWLSRGSSTWLTAFVLKVLSLAQEQVGGSPEKLQETSNWLLSQQQADGSFQDLSPVIHRSMQGGLVGNDETVALTAFVTIALHHGLAVFQDEGAEPLKQRVEASISKASSFLGEKASAGLLGAHAAAITAYALTLTKAPADLRGVAHNNLMAMAQETGDNLYWGSVTGSQSNAVSPTPAPRNPSDPMPQAPALWIETTAYALLHLLLHEGKAEMADQAAAWLTRQGSFQGGFRSTQDTVIALDALSAYWIASHTTEERGLNVTLSSTGRNGFKSHALQLNNRQIRGLEEELQFSLGSKINVKVGGNSKGTLKVLRTYNVLDMKNTTCQDLQIEVTVKGHVEYTMEANEDYEDYEYDELPAKDDPDAPLQPVTPLQLFEGRRNRRRREAPKVVEEQESRVHYTVCIWRNGKVGLSGMAIADVTLLSGFHALRADLEKLTSLSDRYVSHFETEGPHVLLYFDSVPTSRECVGFEAVQEVPVGLVQPASATLYDYYNPERRCSVFYGAPSKSRLLATLCSAEVCQCAEGKCPRQRRALERGLQDEDGYRMKFACYYPRVEYGFQVKVLREDSRAAFRLFETKITQVLHFTKDVKAAANQMRNFLVRASCRLRLEPGKEYLIMGLDGATYDLEGHPQYLLDSNSWIEEMPSERLCRSTRQRAACAQLNDFLQEYGTQGCQV

SEQ ID NO: 1904 - protein, 118 aa, Homo Sapiens
MHPPKTPSGALHRKRKMAAWPFSRLWKVSDPILFQMTLIAALLPAVLGNCGPPPTLSFAAPMDITLTETRFKTGTTLKYTCLPGYVRSHSTQTLTCNSDGEWVYNTFCILDTGFHHIG

SEQ ID NO: 1905 - protein, 152 aa, Homo Sapiens
MHPPKTPSGALHRKRKMAAWPFSRLWKVSDPILFQMTLIAALLPAVLGNCGPPPTLSFAAPMDITLTETRFKTGTTLKYTCLPGYVRSHSTQTLTCNSDGEWVYNTFCIYKRCRHPGELRNGQVEIKTDLSFGSQIEFSCSEGFFLIGSTTS

SEQ ID NO: 1906 - protein, 597 aa, Homo Sapiens
MHPPKTPSGALHRKRKMAAWPFSRLWKVSDPILFQMTLIAALLPAVLGNCGPPPTLSFAAPMDITLTETRFKTGTTLKYTCLPGYVRSHSTQTLTCNSDGEWVYNTFCIYKRCRHPGELRNGQVEIKTDLSFGSQIEFSCSEGFFLIGSTTSRCEVQDRGVGWSHPLPQCEIVKCKPPPDIRNGRHSGEENFYAYGFSVTYSCDPRFSLLGHASISCTVENETIGVWRPSPPTCEKITCRKPDVSHGEMVSGFGPIYNYKDTIVFKCQKGFVLRGSSVIHCDADSKWNPSPPACEPNSCINLPDIPHASWETYPRPTKEDVYVVGTVLRYRCHPGYKPTTDEPTTVICQKNLRWTPYQGCEALCCPEPKLNNGEITQHRKSRPANHCVYFYGDEISFSCHETSRFSAICQGDGTWSPRTPSCGDICNFPPKIAHGHYKQSSSYSFFKEEIIYECDKGYILVGQAKLSCSYSHWSAPAPQCKALCRKPELVNGRLSVDKDQYVEPENVTIQCDSGYGVVGPQSITCSGNRTWYPEVPKCEWETPEGCEQVLTGKRLMQCLPNPEDVKMALEVYKLSLEIEQLELQRDSARQSTLDKEL

SEQ ID NO: 1907 - protein, 181 aa, Homo Sapiens
MFFWCACCLMVAWRVSASDAEHCPELPPVDNSIFVAKEVEGQILGTYVCIKGYHLVGKKTLFCNASKEWDNTTTECRLGHCPDPVLVNGEFSSSGPVNVSDKITFMCNDHYILKGSNRSQCLEDHTWAPPFPICKSRDCDPPGNPVHGYFEGNNFTLGSTISYYCEDRYYLVGVQEQQCVD

SEQ ID NO: 1908 - protein, 252 aa, Homo Sapiens
MFFWCACCLMVAWRVSASDAEHCPELPPVDNSIFVAKEVEGQILGTYVCIKGYHLVGKKTLFCNASKEWDNTTTECRLGHCPDPVLVNGEFSSSGPVNVSDKITFMCNDHYILKGSNRSQCLEDHTWAPPFPICKSRDCDPPGNPVHGYFEGNNFTLGSTISYYCEDRYYLVGVQEQQCVDGEWSSALPVCKLIQEAPKPECEKALLAFQESKNLCEAMENFMQQLKESGMTMEELKYSLELKKAELKAKLL

SEQ ID NO: 1909 - protein, 252 aa, Homo Sapiens; identical to SEQ ID NO: 1908

SEQ ID NO: 1910 - protein, 252 aa, Homo Sapiens; identical to SEQ ID NO: 1908

SEQ ID NO: 1911 - protein, 251 aa, Homo Sapiens
MFFWCACCLMVAWRVSASDEHCPELPPVDNSIFVAKEVEGQILGTYVCIKGYHLVGKKTLFCNASKEWDNTTTECRLGHCPDPVLVNGEFSSSGPVNVSDKITFMCNDHYILKGSNRSQCLEDHTWAPPFPICKSRDCDPPGNPVHGYFEGNNFTLGSTISYYCEDRYYLVGVQEQQCVDGEWSSALPVCKLIQEAPKPECEKALLAFQESKNLCEAMENFMQQLKESGMTMEELKYSLELKKAELKAKLL

SEQ ID NO: 1912 - protein, 95 aa, Homo Sapiens
MAPPPACRSPMSPPPPPLLLLLLSLALLGARARAEPAGSAVPAQSRPCVDCHAFEFMQRALQDLRKTACSLDARTETLLLQAERRALCACWPAGH

SEQ ID NO: 1913 - protein, 128 aa, Homo Sapiens
MRVARRTRNVCRCPRAAGPGVPEPRAAPLPLLAMAPPPACRSPMSPPPPPLLLLLLSLALLGARARAEPAGSAVPAQSRPCVDCHAFEFMQRALQDLRKTACSLDARTETLLLQAERRALCACWPAGH

SEQ ID NO: 1914 - protein, 1676 aa, Homo Sapiens
MGLLGILCFLIFLGKTWGQEQTYVISAPKIFRVGASENIVIQVYGYTEAFDATISIKSYPDKKFSYSSGHVHLSSENKFQNSAILTIQPKQLPGGQNPVSYVYLEVVSKHFSKSKRMPITYDNGFLFIHTDKPVYTPDQSVKVRVYSLNDDLKPAKRETVLTFIDPEGSEVDMVEEIDHIGIISFPDFKIPSNPRYGMWTIKAKYKEDFSTTGTAYFEVKEYVLPHFSVSIEPEYNFIGYKNFKNFEITIKARYFYNKVVTEADVYITFGIREDLKDDQKEMMQTAMQNTMLINGIAQVTFDSETAVKELSYYSLEDLNNKYLYIAVTVIESTGGFSEEAEIPGIKYVLSPYKLNLVATPLFLKPGIPYPIKVQVKDSLDQLVGGVPVTLNAQTIDVNQETSDLDPSKSVTRVDDGVASFVLNLPSGVTVLEFNVKTDAPDLPEENQAREGYRAIAYSSLSQSYLYIDWTDNHKALLVGEHLNIIVTPKSPYIDKITHYNYLILSKGKIIHFGTREKFSDASYQSINIPVTQNMVPSSRLLVYYIVTGEQTAELVSDSVWLNIEEKCGNQLQVHLSPDADAYSPGQTVSLNMATGMDSWVALAAVDSAVYGVQRGAKKPLERVFQFLEKSDLGCGAGGGLNNANVFHLAGLTFLTNANADDSQENDEPCKEILRPRRTLQKKIEEIAAKYKHSVVKKCCYDGACVNNDETCEQRAARISLGPRCIKAFTECCVVASQLRANISHKDMQLGRLHMKTLLPVSKPEIRSYFPESWLWEVHLVPRRKQLQFALPDSLTTWEIQGVGISNTGICVADTVKAKVFKDVFLEMNIPYSVVRGEQIQLKGTVYNYRTSGMQFCVKMSAVEGICTSESPVIDHQGTKSSKCVRQKVEGSSSHLVTFTVLPLEIGLHNINFSLETWFGKEILVKTLRVVPEGVKRESYSGVTLDPRGIYGTISRRKEFPYRIPLDLVPKTEIKRILSVKGLLVGEILSAVLSQEGINILTHLPKGSAEAELMSVVPVFYVFHYLETGNHWNIFHSDPLIEKQKLKKKLKEGMLSIMSYRNADYSYSVWKGGSASTWLTAFALRVLGQVNKYVEQNQNSICNSLLWLVENYQLDNGSFKENSQYQPIKLQGTLPVEARENSLYLTAFTVIGIRKAFDICPLVKIDTALIKADNFLLENTLPAQSTFTLAISAYALSLGDKTHPQFRSIVSALKREALVKGNPPIYRFWKDNLQHKDSSVPNTGTARMVETTAYALLTSLNLKDINYVNPVIKWLSEEQRYGGGFYSTQDTINAIEGLTEYSLLVKQLRLSMDIDVSYKHKGALHNYKMTDKNFLGRPVEVLLNDDLIVSTGFGSGLATVHVTTVVHKTSTSEEVCSFYLKIDTQDIEASHYRGYGNSDYKRIVACASYKPSREESSSGSSHAVMDISLPTGISANEEDLKALVEGVDQLFTDYQIKDGHVILQLNSIPSSDFLCVRFRIFELFEVGFLSPATFTVYEYHRPDKQCTMFYSTSNIKIQKVCEGAACKCVEADCGQMQEELDLTISAETRKQTACKPEIAYAYKVSITSITVENVFVKYKATLLDIYKTGEAVAEKDSEITFIKKVTCTNAELVKGRQYLIMGKEALQIKYNFSFRYIYPLDSLTWIEYWPRDTTCSSCQAFLANLDEFAEDIFLNGC

SEQ ID NO: 1915 - protein, 72 aa, Homo Sapiens
MAVSVLRLTVVLGLLVLFLTCYADDKPDKPDDKPDDSGKDPKPDFPKFLSLLGTEIIENAVEFILRSMSRST

SEQ ID NO: 1916 - protein, 87 aa, Homo Sapiens
MAVSVLRLTVVLGLLVLFLTCYADDKPDKPDDKPDDSGKDPKPDFPKFLSLLGTEIIENAVEFILRSMSRSTGFMEFDDNEGKHSSK

SEQ ID NO: 1917 - protein, 31 aa, Homo Sapiens
MARRSVLYFILLNALINKGQACFCDHYAWTQ

SEQ ID NO: 1918 - protein, 133 aa, Homo Sapiens
MARRSVLYFILLNALINKGQACFCDHYAWTQWTSCSKTCNSGTQSRHRQIVVDKYYQENFCEQICSKQETRECNWQRCPINCLLGDFGPWSDCDPCIEKQSKVRSVLRPSQFGGQPCTAPLVAFQPCIPSKLC

SEQ ID NO: 1919 - protein, 934 aa, Homo Sapiens
MARRSVLYFILLNALINKGQACFCDHYAWTQWTSCSKTCNSGTQSRHRQIVVDKYYQENFCEQICSKQETRECNWQRCPINCLLGDFGPWSDCDPCIEKQSKVRSVLRPSQFGGQPCTAPLVAFQPCIPSKLCKIEEADCKNKFRCDSGRCIARKLECNGENDCGDNSDERDCGRTKAVCTRKYNPIPSVQLMGNGFHFLAGEPRGEVLDNSFTGGICKTVKSSRTSNPYRVPANLENVGFEVQTAEDDLKTDFYKDLTSLGHNENQQGSFSSQGGSSFSVPIFYSSKRSENINHNSAFKQAIQASHKKDSSFIRIHKVMKVLNFTTKAKDLHLSDVFLKALNHLPLEYNSALYSRIFDDFGTHYFTSGSLGGVYDLLYQFSSEELKNSGLTEEEAKHCVRIETKKRVLFAKKTKVEHRCTTNKLSEKHEGSFIQGAEKSISLIRGGRSEYGAALAWEKGSSGLEEKTFSEWLESVKENPAVIDFELAPIVDLVRNIPCAVTKRNNLRKALQEYAAKFDPCQCAPCPNNGRPTLSGTECLCVCQSGTYGENCEKQSPDYKSNAVDGQWGCWSSWSTCDATYKRSRTRECNNPAPQRGGKRCEGEKRQEEDCTFSIMENNGQPCINDDEEMKEVDLPEIEADSGCPQPVPPENGFIRNEKQLYLVGEDVEISCLTGFETVGYQYFRCLPDGTWRQGDVECQRTECIKPVVQEVLTITPFQRLYRIGESIELTCPKGFVVAGPSRYTCQGNSWTPPISNSLTCEKDTLTKLKGHCQLGQKQSGSECICMSPEEDCSHHSEDLCVFDTDSNDYFTSPACKFLAEKCLNNQQLHFLHIGSCQDGRQLEWGLERTRLSSNSTKKESCGYDTCYDWEKCSASTSKCVCLLPPQCFKGGNQLYCVKMGSSTSEKTLNICEVGTIRCANRKMEILHPGKCLA

SEQ ID NO: 1920 - protein, 934 aa, Homo Sapiens; identical to SEQ ID NO: 1919

SEQ ID NO: 1921 - protein, 191 aa, Homo Sapiens
MAAPRGRAAPWTTALLLLLASQVLSPGSCADEEEVPEEWVLLHVVQGQIGAGNYSYLRLNHEGKIVLRMRSLKGDADLYVSASSLHPSFDDYELQSATCGPDAVSIPAHFRRPVGIGVYGHPSHLESEFEMKVYYDGTVEQHPFGEAAYPADGADAGQKHAGAPEDASQEEESVLWTILISILKLVLEILF

SEQ ID NO: 1922 - protein, 325 aa, Homo Sapiens
MQGRVAGSCAPLGLLLVCLHLPGLFARSIGVVEEKVSQNLGTNLPQLGQPSSTGPSNSEHPQPALDPRSNDLARVPLKLSVPASDGFPPAGGSAVQRWPPSWGLPAMDSWPPEDPWQMMAAAAEDRLGEALPEELSYLSSAAALAPGSGPLPGESSPDATGLSPKASLLHQDSESRRLPRSNSLGAGGKILSQRPPWSLIHRVLPDHPWGTLNPSVSWGGGGPGTGWGTRPMPHPEGIWGINNQPPGTSWGNINRYPGGSWGNINRYPGGSWGNINRYPGGSWGNIHLYPGINNPFPPGVLRPPGSSWNIPAGFPNPPSPRLQWG

SEQ ID NO: 1923 - protein, 330 aa, Homo Sapiens
MAFLPSWVCVLVGSFSASLAGTSNLSETEPPLWKESPGQLSDYRVENSMYIINPWVYLERMGMYKIILNQTARYFAKFAPDNEQNILWGLPLQYGWQYRTGRLADPTRRTNCGYESGDHMCISVDSWWADLNYFLSSLPFLAAVDSGVMGISSDQVRLLPPPKNERKFCYDVSSCRSSFPETMNKWNTFYQYLQSPFSKFDDLLKYLWAAHTSTLADNIKSFEDRYDYYSKAEAHFERSWVLAVDHLAAVLFPTTLIRSYKFQKGMPPRILLNTDVAPFISDFTAFQNVVLVLLNMLDNVDKSIGYLCTEKSNVYRDHSESSSRSYGNNS

SEQ ID NO: 1924 - protein, 843 aa, Homo Sapiens
MKVISLFILVGFIGEFQSFSSASSPVNCQWDFYAPWSECNGCTKTQTRRRSVAVYGQYGGQPCVGNAFETQSCEPTRGCPTEEGCGERFRCFSGQCISKSLVCNGDSDCDEDSADEDRCEDSERRPSCDIDKPPPNIELTGNGYNELTGQFRNRVINTKSFGGQCRKVFSGDGKDFYRLSGNVLSYTFQVKINNDFNYEFYNSTWSYVKHTSTEHTSSSRKRSFFRSSSSSSRSYTSHTNEIHKGKSYQLLVVENTVEVAQFINNNPEFLQLAEPFWKELSHLPSLYDYSAYRRLIDQYGTHYLQSGSLGGEYRVLFYVDSEKLKQNDFNSVEEKKCKSSGWHFVVKFSSHGCKELENALKAASGTQNNVLRGEPFIRGGGAGFISGLSYLELDNPAGNKRRYSAWAESVTNLPQVIKQKLTPLYELVKEVPCASVKKLYLKWALEEYLDEFDPCHCRPCQNGGLATVEGTHCLCHCKPYTFGAACEQGVLVGNQAGGVDGGWSCWSSWSPCVQGKKTRSRECNNPPPSGGGRSCVGETTESTQCEDEELEHLRLLEPHCFPLSLVPTEFCPSPPALKDGFVQDEGTMFPVGKNVVYTCNEGYSLIGNPVARCGEDLRWLVGEMHCQKIACVLPVLMDGIQSHPQKPFYTVGEKVTVSCSGGMSLEGPSAFLCGSSLKWSPEMKNARCVQKENPLTQAVPKCQRWEKLQNSRCVCKMPYECGPSLDVCAQDERSKRILPLTVCKMHVLHCQGRNYTLTGRDSCTLPASAEKACGACPLWGKCDAESSKCVCREASECEEEGFSICVEVNGKEQTMSECEAGALRCRGQSISVTSIRPCAAETQ

SEQ ID NO: 1925 - protein, 324 aa, Homo Sapiens
MLWFRGALGVWVWLAAASQPCKNSNAGRRGQHPRRPAGSCVQRLTMRNTSKELQGATHRYAPCDWYYHVPVKRSEKAVDAPPASQIPGLSNLGDSHSENLPGTRRYWIKETDSEYVKLAKQGGRPDLLKHFAPGTRKGSPVAYSLPDWYIHHSKPPTASQQEVRAVSMPDYMVHEEFNPDQANGSYASRRGPFDFDMKTVWQREAEELEKEKKKLRLPAIDSKYLSKAGTPLGPKNPAGSRLSFPPVNGYKDEWLQQQQRADSDKRTPKTSRASVLSQSPRDLEGPQDAARLQDAEASEGPEDTPESSQSPEESVSASTPAELK

SEQ ID NO: 1926 - protein, 340 aa, Homo Sapiens
MLWFRGALGVWVWLAAASQPCKNSNAGRRGQHPRRPAGSCVQRLTMRNTSKELQGATHRYAPCDWYYHVPVKRSEKAVDAPPASQIPGLSNLGDSHSENLPGTRRYWIKETDSEYVKLAKQGGRPDLLKHFAPGTRKGSPVAYSLPDWYIHHSKPPTASQQEVRAVSMPDYMVHEEFNPDQANGSYASRRGPFDFDMKTVWQREAEELEKEKKKLRLPAIDSKYLSKAGTPLGPKNPAGSRLSFPPVPGQKNSSPTNFSKLISNGYKDEWLQQQQRADSDKRTPKTSRASVLSQSPRDLEGPQDAARLQDAEASEGPEDTPESSQSPEESVSASTPAELK

SEQ ID NO: 1927 - protein, 157 aa, Homo Sapiens
MPDYMVHEEFNPDQANGSYASRRGPFDFDMKTVWQREAEELEKEKKKLRLPAIDSKYLSKAGTPLGPKNPAGSRLSFPPVNGYKDEWLQQQQRADSDKRTPKTSRASVLSQSPRDLEGPQDAARLQDAEASEGPEDTPESSQSPEESVSASTPAELK

SEQ ID NO: 1928 - protein, 153 aa, Homo Sapiens
MPDYMVHEEFNPDQANGSYASRRGPFDFDMKTVWQREAEELEKEKKKLRLPAIDSKYLSKAGTPLGPKNPAGSRLSFPPVNGYKDEWLQQQQRADSDKRTPKTSRASVLSQSPRDLEGPQDAARLQDAEASEGPEDTPGPEESVSASTPAELK

SEQ ID NO: 1929 - protein, 295 aa, Homo Sapiens
MRNTSKELQGATHRYAPCDWYYHVPVKRSEKAVDAPPASQIPGLSNLGDSHSENLPGTRRYWIKETDSEYVKLAKQGGRPDLLKHFAPGTRKGSPVAYSLPDWYIHHSKPPTASQQEVRAVSMPDYMVHEEFNPDQANGSYASRRGPFDFDMKTVWQREAEELEKEKKKLRLPAIDSKYLSKAGTPLGPKNPAGSRLSFPPVPGQKNSSPTNFSKLISNGYKDEWLQQQQRADSDKRTPKTSRASVLSQSPRDLEGPQDAARLQDAEASEGPEDTPESSQSPEESVSASTPAELK

SEQ ID NO: 1930 - protein, 584 aa, Homo Sapiens
MFAVVFFILSLMTCQPGVTAQEKVNQRVRRAATPAAVTCQLSNWSEWTDCFPCQDKKYRHRSLLQPNKFGGTICSGDIWDQASCSSSTTCVRQAQCGQDFQCKETGRCLKRHLVCNGDQDCLDGSDEDDCEDVRAIDEDCSQYEPIPGSQKAALGYNILTQEDAQSVYDASYYGGQCETVYNGEWRELRYDSTCERLYYGDDEKYFRKPYNFLKYHFEALADTGISSEFYDNANDLLSKVKKDKSDSFGVTIGIGPAGSPLLVGVGVSHSQDTSFLNELNKYNEKKFIFTRIFTKVQTAHFKMRKDDIMLDEGMLQSLMELPDQYNYGMYAKFINDYGTHYITSGSMGGIYEYILVIDKAKMESLGITSRDITTCFGGSLGIQYEDKINVGGGLSGDHCKKFGGGKTERARKAMAVEDIISRVRGGSSGWSGGLAQNRSTITYRSWGRSLKYNPVVIDFEMQPIHEVLRHTSLGPLEAKRQNLRRALDQYLMEFNACRCGPCFNNGVPILEGTSCRCQCRLGSLGAACEQTQTEGAKADGSWSCWSSWSVCRAGIQERRRECDNPAPQNGGASCPGRKVQTQAC

SEQ ID NO: 1931 - protein, 529 aa, Homo Sapiens
MDTCMTLAFTLSGRFFMLLSQYRYAYLLQPSQFHGEPCNFSDKEVEDCVTNRPCGSQVRCEGFVCAQTGRCVNRRLLCNGDNDCGDQSDEANCRRIYKKCQHEMDQYWGIGSLASGINLFTNSFEGPVLDHRYYAGGCSPHYILNTRFRKPYNVESYTPQTQGKYEFILKEYESYSDFERNVTEKMASKSGFSFGFKIPGIFELGISSQSDRGKHYIRRTKRFSHTKSVFLHARSDLEVAHYKLKPRSLMLHYEFLQRVKRLPLEYSYGEYRDLFRDFGTHYITEAVLGGIYEYTLVMNKEAMERGDYTLNNVHACAKNDFKIGGAIEEVYVSLGVSVGKCRGILNEIKDRNKRDTMVEDLVVLVRGGASEHITTLAYQELPTADLMQEWGDAVQYNPAIIKVKVEPLYELVTATDFAYSSTVRQNMKQALEEFQKEVSSCHCAPCQGNGVPVLKGSRCDCICPVGSQGLACEVSYRKNTPIDGKWNCWSNWSSCSGRRKTRQRQCNNPPPQNGGSPCSGPASETLDCS

SEQ ID NO: 1932 - protein, 591 aa, Homo Sapiens
MKNSRTWAWRAPVELFLLCAALGCLSLPGSRGERPHSFGSNAVNKSFAKSRQMRSVDVTLMPIDCELSSWSSWTTCDPCQKKRYRYAYLLQPSQFHGEPCNFSDKEVEDCVTNRPCGSQVRCEGFVCAQTGRCVNRRLLCNGDNDCGDQSDEANCRRIYKKCQHEMDQYWGIGSLASGINLFTNSFEGPVLDHRYYAGGCSPHYILNTRFRKPYNVESYTPQTQGKYEFILKEYESYSDFERNVTEKMASKSGFSFGFKIPGIFELGISSQSDRGKHYIRRTKRFSHTKSVFLHARSDLEVAHYKLKPRSLMLHYEFLQRVKRLPLEYSYGEYRDLFRDFGTHYITEAVLGGIYEYTLVMNKEAMERGDYTLNNVHACAKNDFKIGGAIEEVYVSLGVSVGKCRGILNEIKDRNKRDTMVEDLVVLVRGGASEHITTLAYQELPTADLMQEWGDAVQYNPAIIKVKVEPLYELVTATDFAYSSTVRQNMKQALEEFQKEVSSCHCAPCQGNGVPVLKGSRCDCICPVGSQGLACEVSYRKNTPIDGKWNCWSNWSSCSGRRKTRQRQCNNPPPQNGGSPCSGPASETLDCS

SEQ ID NO: 1933 - protein, 539 aa, Homo Sapiens
MRSVDVTLMPIDCELSSWSSWTTCDPCQKKRYRYAYLLQPSQFHGEPCNFSDKEVEDCVTNRPCGSQVRCEGFVCAQTGRCVNRRLLCNGDNDCGDQSDEANCRRIYKKCQHEMDQYWGIGSLASGINLFTNSFEGPVLDHRYYAGGCSPHYILNTRFRKPYNVESYTPQTQGKYEFILKEYESYSDFERNVTEKMASKSGFSFGFKIPGIFELGISSQSDRGKHYIRRTKRFSHTKSVFLHARSDLEVAHYKLKPRSLMLHYEFLQRVKRLPLEYSYGEYRDLFRDFGTHYITEAVLGGIYEYTLVMNKEAMERGDYTLNNVHACAKNDFKIGGAIEEVYVSLGVSVGKCRGILNEIKDRNKRDTMVEDLVVLVRGGASEHITTLAYQELPTADLMQEWGDAVQYNPAIIKVKVEPLYELVTATDFAYSSTVRQNMKQALEEFQKEVSSCHCAPCQGNGVPVLKGSRCDCICPVGSQGLACEVSYRKNTPIDGKWNCWSNWSSCSGRRKTRQRQCNNPPPQNGGSPCSGPASETLDCS

SEQ ID NO: 1934 - protein, 202 aa, Homo Sapiens
MLPPGTATLLTLLLAAGSLGQKPQRPRRPASPISTIQPKANFDAQQFAGTWLLVAVGSACRFLQEQGHRAEATTLHVAPQGTAMAVSTFRKLDGICWQVRQLYGDTGVLGRFLLQARDARGAVHVVVAETDYQSFAVLYLERAGQLSVKLYARSLPVSDSVLSGFEQRVQEAHLTEDQIFYFPKYGFCEAADQFHVLDEVRR

SEQ ID NO: 1935 - protein, 164 aa, Homo Sapiens
MLPPGTATLLTLLLAAGSLGQKPQRPRRPASPISTIQPKANFDAQQFAGTWLLVAVGSACRFLQEQGHRAEATTLHVAPQGTAMAVSTFRKLDGICWQVRQLYGDTGVLGRFLLQARDARGAVHVVVAETDYQSFAVLYLERAGQLSVKLYGAQGVVTDRPGVG

SEQ ID NO: 1936 - protein, 559 aa, Homo Sapiens
MSACRSFAVAICILEISILTAQYTTSYDPELTESSGSASHIDCRMSPWSEWSQCDPCLRQMFRSRSIEVFGQFNGKRCTDAVGDRRQCVPTEPCEDAEDDCGNDFQCSTGRCIKMRLRCNGDNDCGDFSDEDDCESEPRPPCRDRVVEESELARTAGYGINILGMDPLSTPFDNEFYNGLCNRDRDGNTLTYYRRPWNVASLIYETKGEKNFRTEHYEEQIEAFKSIIQEKTSNFNAAISLKFTPTETNKAEQCCEETASSISLHGKGSFRFSYSKNETYQLFLSYSSKKEKMFLHVKGEIHLGRFVMRNRDVVLTTTFVDDIKALPTTYEKGEYFAFLETYGTHYSSSGSLGGLYELIYVLDKASMKRKGVELKDIKRCLGYHLDVSLAFSEISVGAEFNKDDCVKRGEGRAVNITSENLIDDVVSLIRGGTRKYAFELKEKLLRGTVIDVTDFVNWASSINDAPVLISQKLSPIYNLVPVKMKNAHLKKQNLERAIEDYINEFSVRKCHTCQNGGTVILMDGKCLCACPFKFEGIACEISKQKISEGLPALEFPNEK

SEQ ID NO: 1937 - protein, 183 aa, Homo Sapiens
MVRIWTTIMIVLILLLRIGPNKPSLSGRQAPAQAQTSDLVPSLFPLGLWAPGFCTWSSPDEDKRPRKPVPGTGNRDSGTRRRLQDATEQDPRPGNDVASAETAGPPSPSGIRAQDRAPRHRRAPPARMPVAPAPSADGEPLQEQGGGLFHRTRSVYNGLELNTWMKVERLFVEKFHQSFSLDN

SEQ ID NO: 1938 - protein, 235 aa, Homo Sapiens
MVRIWTTIMIVLILLLRIGPNKPSLSGRQAPAQAQTSDLVPSLFPLGLWAPGFCTWSSPDEDKRPRKPVPGTGNRDSGTRRRLQDATEQDPRPGNDVASAETAGPPSPSGIRAQDRAPRHRRAPPARMPVAPAPSADGGERRARAGRGTRVGGWGPKDPPFQQNPHRSRARRGLGRATAAGALHISTPPPEPLQEQGGGLFHRTRSVYNGLELNTWMKVERLFVEKFHQSFSLDN

SEQ ID NO: 1939 - protein, 202 aa, Homo Sapiens
MVRIWTTIMIVLILLLRIGPNKPSLSGRQAPAQAQTSDLVPSLFPLGLWAPGFCTWSSPDEDKVWRPAWEQGPKGEPDPRGLRPRKPVPGTGNRDSGTRRRLQDATEQDPRPGNDVASAETAGPPSPSGIRAQDRAPRHRRAPPARMPVAPAPSADGEPLQEQGGGLFHRTRSVYNGLELNTWMKVERLFVEKFHQSFSLDN

SEQ ID NO: 1940 - protein, 56 aa, Homo Sapiens
HVSLRLDKEHLVNISGGPMTYSHRLEEIRLHFGSEDSQGSEHLLNGQAFSGEEKVC

SEQ ID NO: 1941 - protein, 328 aa, Homo Sapiens
MEIVWEVLFLLQANFIVCISAQQNSPKIHEGWWAYKEVVQGSFVPVPSFWGLVNSAWNLCSVGKRQSPVNIETSHMIFDPFLTPLRINTGGRKVSGTMYNTGRHVSLRLDKEHLVNISGGPMTYSHRLEEIRLHFGSEDSQGSEHLLNGQAFSGEVQLIHYNHELYTNVTEAAKSPNGLVVVSIFIKVSDSSNPFLNRMLNRDTITRITYKNDAYLLQGLNIEELYPETSSFITYDGSMTIPPCYETASWIIMNKPVYITRMQMHSLRLLSQNQPSQIFLSMSDNFRPVQPLNNRCIRTNINFSLQGKDCPNNRAQKLQYRVNEWLLK

SEQ ID NO: 1942 - protein, 328 aa, Homo Sapiens; identical to SEQ ID NO: 1941

SEQ ID NO: 1943 - protein, 328 aa, Homo Sapiens; identical to SEQ ID NO: 1941

SEQ ID NO: 1944 - protein, 276 aa, Homo Sapiens
MEIVWEVLFLLQANFIVCISAQQNSPKIHEGWWAYKEVVQGSFVPVPSFWGLVNSAWNLCSVGKRQSPVNIETSHMIFDPFLTPLRINTGGRKVSGTMYNTGRHVSLRLDKEHLVNISGGPMTYSHRLEEIRLHFGSEDSQGSEHLLNGQAFSGEVQLIHYNHELYTNVTEAAKSPNGLVVVSIFIKVSDSSNPFLNRMLNRDTITRITYKNDAYLLQGLNIEELYPETSSFITYDGSMTIPPCYETASWIIMNKPVYITRMQMHSLRLLSQNQPS

SEQ ID NO: 1945 - protein, 42 aa, Homo Sapiens
MEIVWEVLFLLQANFIVCISGDLRRAVRRLWWQSGLEMQVTC

SEQ ID NO: 1946 - protein, 253 aa, Homo Sapiens
MIFDPFLTPLRINTGGRKVSGTMYNTGRHVSLRLDKEHLVNISGGPMTYSHRLEEIRLHFGSEDSQGSEHLLNGQAFSGEVQLIHYNHELYTNVTEAAKSPNGLVVVSIFIKVSDSSNPFLNRMLNRDTITRITYKNDAYLLQGLNIEELYPETSSFITYDGSMTIPPCYETASWIIMNKPVYITRMQMHSLRLLSQNQPSQIFLSMSDNFRPVQPLNNRCIRTNINFSLQGKDCPNNRAQKLQYRVNEWLLK

SEQ ID NO: 1947 - protein, 328 aa, Homo Sapiens
MGAAARLSAPRALVLWAALGAAAHIGPAPDPEDWWSYKDNLQGNFVPGPPFWGLVNAAWSLCAVGKRQSPVDVELKRVLYDPFLPPLRLSTGGEKLRGTLYNTGRHVSFLPAPRPVVNVSGGPLLYSHRLSELRLLFGARDGAGSEHQINHQGFSAEVQLIHFNQELYGNFSAASRGPNGLAILSLFVNVASTSNPFLSRLLNRDTITRISYKNDAYFLQDLSLELLFPESFGFITYQGSLSTPPCSETVTWILIDRALNITSLQMHSLRLLSQNPPSQIFQSLSGNSRPLQPLAHRALRGNRDPRHPERRCRGPNYRLHVDGVPHGR

SEQ ID NO: 1948 - protein, 113 aa, Homo Sapiens
  misc_feature (1)..(1): Xaa can be any naturally occurring amino acid
XDAYFLQDLSLELLFPESFGFITYQGSLSTPPCSETVTWILIDRALNITSLQMHSLRLLSQNPPSQIFQSLSGNSRPLQPLAHRALRGNRDPRHPERRCRGPNYRLHAQCFST

SEQ ID NO: 1949 - protein, 187 aa, Homo Sapiens
MRALVLLLSLFLLGGQAQHVSDWTYSEGALDEAHWPQHYPACGGQRQSPINLQRTKISLPSTMRMTVADGTVYIAQQMHFHWGGASSEISGSEHTVDGIRHVIEIHIVHYNSKYKSYDIAQDAPDGLAVLAAFVEVKNYPENTYYSNFISHLANIKYPGQRTTLTGLDVQDMLPRNLQHYYTYHGSL

SEQ ID NO: 1950 - protein, 179 aa, Homo Sapiens
MRALVLLLSLFLLGGQAQHVSDWTYSEGALDEAHWPQHYPACGGQRQSPINLQRTKVRYNPSLKGLNMTGYETQAGEFPMVNNGHTDWQAELFLPSLSSPCGEGAKHKGQRQWLCSPSLDSWWEAIIDGGSLWATLAECGLRAEGPEEGRHMEEKSPASQGACSGSRLPISRGPCTFFL

SEQ ID NO: 1951 - protein, 313 aa, Homo Sapiens
MRALVLLLSLFLLGGQAQHVSDWTYSEGALDEAHWPQHYPACGGQRQSPINLQRTKVRYNPSLKGLNMTGYETQAGEFPMVNNGHTVQISLPSTMRMTVADGTVYIAQQMHFHWGGASSEISGSEHTVDGIRHVIEIHIVHYNSKYKSYDIAQDAPDGLAVLAAFVEVKNYPENTYYSNFISHLANIKYPGQRTTLTGLDVQDMLPRNLQHYYTYHGSLTTPPCTENVHWFVLADFVKLSRTQVWKLENSLLDHRNKTIHNDYRRTQPLNHRVVESNFPNQGKGHGGHRGRSQNPRVQPTSTRHPLALGSLEA

SEQ ID NO: 1952 - protein, 308 aa, Homo Sapiens
MRALVLLLSLFLLGGQAQHVSDWTYSEGALDEAHWPQHYPACGGQRQSPINLQRTKVRYNPSLKGLNMTGYETQAGEFPMVNNGHTVQISLPSTMRMTVADGTVYIAQQMHFHWGGASSEISGSEHTVDGIRHVIEIHIVHYNSKYKSYDIAQDAPDGLAVLAAFVEVKNYPENTYYSNFISHLANIKYPGQRTTLTGLDVQDMLPRNLQHYYTYHGSLTTPPCTENVHWFVLADFVKLSRTQVWKLENSLLDHRNKTIHNDYRRTQPLNHRVVESNFPNQEYTLGSEFQFYLHKIEEILDYLRRALN

SEQ ID NO: 1953 - protein, 248 aa, Homo Sapiens
MRALVLLLSLFLLGGQAQHVSDWTYSVQISLPSTMRMTVADGTVYIAQQMHFHWGGASSEISGSEHTVDGIRHVIEIHIVHYNSKYKSYDIAQDAPDGLAVLAAFVEVKNYPENTYYSNFISHLANIKYPGQRTTLTGLDVQDMLPRNLQHYYTYHGSLTTPPCTENVHWFVLADFVKLSRTQVWKLENSLLDHRNKTIHNDYRRTQPLNHRVVESNFPNQEYTLGSEFQFYLHKIEEILDYLRRALN

SEQ ID NO: 1954 - protein, 459 aa, Homo Sapiens
MAPLCPSPWLPLLIPAPAPGLTVQLLLSLLLLVPVHPQRLPRMQEDSPLGGGSSGEDDPLGEEDLPSEEDSPREEDPPGEEDLPGEEDLPGEEDLPEVKPKSEEEGSLKLEDLPTVEAPGDPQEPQNNAHRDKEGDDQSHWRYGGDPPWPRVSPACAGRFQSPVDIRPQLAAFCPALRPLELLGFQLPPLPELRLRNNGHSVQLTLPPGLEMALGPGREYRALQLHLHWGAAGRPGSEHTVEGHRFPAEIHVVHLSTAFARVDEALGRPGGLAVLAAFLEEGPEENSAYEQLLSRLEEIAEEGSETQVPGLDISALLPSDFSRYFQYEGSLTTPPCAQGVIWTVFNQTVMLSAKQLHTLSDTLWGPGDSRLQLNFRATQPLNGRVIEASFPAGVDSSPRAAEPVQLNSCLAAGDILALVFGLLFAVTSVAFLVQMRRQHRRGTKGGVSYRPAEVAETGA

SEQ ID NO: 1955 - protein, 356 aa, Homo Sapiens [sequence omitted]

SEQ ID NO: 1956 - protein, 633 aa, Homo Sapiens
MAAAAAAATTAACSSGSAGTDAAGASGLQQPPPQPQPQPAAAAPAQPPPEPPRKPRMDPRRRQAALSFLTNISLDGRLPPQDAEWGGGEEGGAAKPGAGGACGARTRFSLLAAAERGGCIALAAPGTPAAGLAAGSGPCLPQPSSLPPLIPGGHATVSGPGVARGFASPLGAGRASGEQWQPPRPAPLAACAQLQLLDGSGAAGQEELEEDDAFISVQVPAAAFLGSGTPGSGSGSRGRLNSFTQGILPIAFSRPTSQNYCSLEQPGQGGSTSAFEQLQRSRRRLISQRSSLETLEDIEENAPLRRCRTLSGSPRPKNFKKIHFIKNMRQHDTRNGRIVLISGRRSFCSIFSVLPYRDSTQVGDLKLDGGRQSTGAVSLKEIIGLEGVELGADGKTVSYTQFLLPTNAFGARRNTIDSTSSFSQFRNLSHRSLSIGRASGTQGSLDTGSDLGDFMDYDPNLLDDPQWPCGKHKRVLIFPSYMTTVIDYVKPSDLKKDMNETFKEKFPHIKLTLSKIRSLKREMRKLAQEDCGLEEPTVAMAFVYFEKLALKGKLNKQNRKLCAGACVLLAAKIGSDLKKHEVKHLIDKLEEKFRLNRRELIAFEFPVLVALEFALHLPEHEVMPHYRRLVQSS

SEQ ID NO: 1957 - protein, 368 aa, Homo Sapiens
MLSKRGCHARIYADFPIRRLISQRSSLETLEDIEENAPLRRCRTLSGSPRPKNFKKIHFIKNMRQHDTRNGRIVLISGRRSFCSIFSVLPYRDSTQVGDLKLDGGRQSTGAVSLKEIIGLEGVELGADGKTVSYTQFLLPTNAFGARRNTIDSTSSFSQFRNLSHRSLSIGRASGTQGSLDTGSDLGDFMDYDPNLLDDPQWPCGKHKRVLIFPSYMTTVIDYVKPSDLKKDMNETFKEKFPHIKLTLSKIRSLKREMRKLAQEDCGLEEPTVAMAFVYFEKLALKGKLNKQNRKLCAGACVLLAAKIGSDLKKHEVKHLIDKLEEKFRLNRRELIAFEFPVLVALEFALHLPEHEVMPHYRRLVQSS

SEQ ID NO: 1958 - protein, 9 aa, Homo Sapiens
MRQHDTRNG

SEQ ID NO: 1959 - protein, 306 aa, Homo Sapiens
MRQHDTRNGRIVLISGRRSFCSIFSVLPYRDSTQVGDLKLDGGRQSTGAVSLKEIIGLEGVELGADGKTVSYTQFLLPTNAFGARRNTIDSTSSFSQFRNLSHRSLSIGRASGTQGSLDTGSDLGDFMDYDPNLLDDPQWPCGKHKRVLIFPSYMTTVIDYVKPSDLKKDMNETFKEKFPHIKLTLSKIRSLKREMRKLAQEDCGLEEPTVAMAFVYFEKLALKGKLNKQNRKLCAGACVLLAAKIGSDLKKHEVKHLIDKLEEKFRLNRRELIAFEFPVLVALEFALHLPEHEVMPHYRRLVQSS

SEQ ID NO: 1960 - protein, 38 aa, Homo Sapiens
MRQHDTRNGRIVLISGRRSFCSIFSVLPYRDSTQVGQQ

SEQ ID NO: 1961 - protein, 163 aa, Homo Sapiens
  misc_feature (1)..(1): Xaa can be any naturally occurring amino acid
XAAFLGSGTPGSGSGSRGRLNSFTQGILPIAFSRPTSQNYCSLEQPGQGGSTSAFEQLQRSRRRLISQRSSLETLEDIEENAPLRRCRTLSGSPRPKNFKKIHFIKNMRQHDTRNGRIVLISGRRSFCSIFSVLPYRDSTQVGYVYACMLCSSLGEKISHQCT

SEQ ID NO: 1962 - protein, 306 aa, Homo Sapiens
MCQCVRACVCVCVCACATQRASHSALPGTTISVKDWRLCLLDQFDACARSGLSEPRSLTLRVPSCGKPLPGPGARLGREVTPCLSFAFAWCWLKMCQEEQTSYMVVQTSEEGLAADAELPGPLLMLAQNCAVMHNLLGPACIFLRKGFAENRQPDRSLRPEEIEELREAFREFDKDKDGYINCRDLGNCMRTMGYMPTEMELIELSQQINMNLGGHVDFDDFVELMGPKLLAETADMIGVKELRDAFREFDTNGDGEISTSELREAMRKLLGHQVGHRDIEEIIRDVDLNGDGRVDFEEFVRMMSR

SEQ ID NO: 1963 - protein, 370 aa, Homo Sapiens
MGGGDGAAFKRPGDGARLQRVLGLGSRREPRSLPAGGPAPRRTAPPPPGHASAGPAAMSSHIAKSESKTSLLKAAAAAASGGSRAPRHGPARDPGLPSRRLPGSCPATPQSSGDPSSRRPLCRPAPREEGARGSQRVLPQAHCRPREALPAAASRPSPSSPLPPARGRDGEERGLSPALGLRGSLRARGRGDSVPAAASEADPFLHRLRPMLSSAFGQDRSLRPEEIEELREAFREFDKDKDGYINCRDLGNCMRTMGYMPTEMELIELSQQINMNLGGHVDFDDFVELMGPKLLAETADMIGVKELRDAFREFDTNGDGEISTSELREAMRKLLGHQVGHRDIEEIIRDVDLNGDGRVDFEEFVRMMSR

SEQ ID NO: 1964 - protein, 167 aa, Homo Sapiens
MGNCVKYPLRNLSRKDRSLRPEEIEELREAFREFDKDKDGYINCRDLGNCMRTMGYMPTEMELIELSQQINMNLGGHVDFDDFVELMGPKLLAETADMIGVKELRDAFREFDTNGDGEISTSELREAMRKLLGHQVGHRDIEEIIRDVDLNGDGRVDFEEFVRMMSR

SEQ ID NO: 1965 - protein, 227 aa, Homo Sapiens
MGNCVKYPLRNLSRKMCQEEQTSYMVVQTSEEGLAADAELPGPLLMLAQNCAVMHNLLGPACIFLRKGFAENRQPDRSLRPEEIEELREAFREFDKDKDGYINCRDLGNCMRTMGYMPTEMELIELSQQINMNLGGHVDFDDFVELMGPKLLAETADMIGVKELRDAFREFDTNGDGEISTSELREAMRKLLGHQVGHRDIEEIIRDVDLNGDGRVDFEEFVRMMSR

SEQ ID NO: 1966 - protein, 1091 aa, Homo Sapiens
MAAGCLLALTLTLFQSLLIGPSSEEPFPSAVTIKSWVDKMQEDLVTLAKTASGVNQLVDIYEKYQDLYTVEPNNARQLVEIAARDIEKLLSNRSKALVRLALEAEKVQAAHQWREDFASNEVVYYNAKDDLDPEKNDSEPGSQRIKPVFIEDANFGRQISYQHAAVHIPTDIYEGSTIVLNELNWTSALDEVFKKNREEDPSLLWQVFGSATGLARYYPASPWVDNSRTPNKIDLYDVRRRPWYIQGAASPKDMLILVDVSGSVSGLTLKLIRTSVSEMLETLSDDDFVNVASFNSNAQDVSCFQHLVQANVRNKKVLKDAVNNITAKGITDYKKGFSFAFEQLLNYNVSRANCNKIIMLFTDGGEERAQEIFNKYNKDKKVRVFTFSVGQHNYDRGPIQWMACENKGYYYEIPSIGAIRINTQEYLDVLGRPMVLAGDKAKQVQWTNVYLDALELGLVITGTLPVFNITGQFENKTNLKNQLILGVMGVDVSLEDIKRLTPRFTLCPNGYYFAIDPNGYVLLHPNLQPKNPKSQEPVTLDFLDAELENDIKVEIRNKMIDGESGEKTFRTLVKSQDERYIDKGNRTYTWTPVNGTDYSLALVLPTYSFYYIKAKLEETITQARSKKGKMKDSETLKPDNFEESGYTFIAPRDYCNDLKISDNNTEFLLNFNEFIDRKTPNNPSCNADLINRVLLDAGFTNELVQNYWSKQKNIKGVKARFVVTDGGITRVYPKEAGENWQENPETYEDSFYKRSLDNDNYVFTAPYFNKSGPGAYESGIMVSKAVEIYIQGKLLKPAVVGIKIDVNSWIENFTKTSIRDPCAGPVCDCKRNSDVMDCVILDDGGFLLMANHDDYTNQIGRFFGEIDPSLMRHLVNISVYAFNKSYDYQSVCEPGAAPKQGAGHRSAYVPSVADILQIGWWATAAAWSILQQFLLSLTFPRLLEAVEMEDDDFTASLSKQSCITEQTQYFFDNDSKSFSGVLDCGNCSRIFHGEKLMNTNLIFIMVESKGTCPCDTRLLIQAEQTSDGPNPCDMVKQPRYRKGPDVCFDNNVLEDYTDCGGVSGLNPSLWYIIGIQFLLLWLVSGSTHRLL

SEQ ID NO: 1967 - protein, 1103 aa, Homo Sapiens
MAAGCLLALTLTLFQSLLIGPSSEEPFPSAVTIKSWVDKMQEDLVTLAKTASGVNQLVDIYEKYQDLYTVEPNNARQLVEIAARDIEKLLSNRSKALVRLALEAEKVQAAHQWREDFASNEVVYYNAKDDLDPEKNDSEPGSQRIKPVFIEDANFGRQISYQHAAVHIPTDIYEGSTIVLNELNWTSALDEVFKKNREEDPSLLWQVFGSATGLARYYPASPWVDNSRTPNKIDLYDVRRRPWYIQGAASPKDMLILVDVSGSVSGLTLKLIRTSVSEMLETLSDDDFVNVASFNSNAQDVSCFQHLVQANVRNKKVLKDAVNNITAKGITDYKKGFSFAFEQLLNYNVSRANCNKIIMLFTDGGEERAQEIFNKYNKDKKVRVFTFSVGQHNYDRGPIQWMACENKGYYYEIPSIGAIRINTQEYLDVLGRPMVLAGDKAKQVQWTNVYLDALELGLVITGTLPVFNITGQFENKTNLKNQLILGVMGVDVSLEDIKRLTPRFTLCPNGYYFAIDPNGYVLLHPNLQPKPIGVGIPTINLRKRRPNIQNPKSQEPVTLDFLDAELENDIKVEIRNKMIDGESGEKTFRTLVKSQDERYIDKGNRTYTWTPVNGTDYSLALVLPTYSFYYIKAKLEETITQARYSETLKPDNFEESGYTFIAPRDYCNDLKISDNNTEFLLNFNEFIDRKTPNNPSCNADLINRVLLDAGFTNELVQNYWSKQKNIKGVKARFVVTDGGITRVYPKEAGENWQENPETYEDSFYKRSLDNDNYVFTAPYFNKSGPGAYESGIMVSKAVEIYIQGKLLKPAVVGIKIDVNSWIENFTKTSIRDPCAGPVCDCKRNSDVMDCVILDDGGFLLMANHDDYTNQIGRFFGEIDPSLMRHLVNISVYAFNKSYDYQSVCEPGAAPKQGAGHRSAYVPSVADILQIGWWATAAAWSILQQFLLSLTFPRLLEAVEMEDDDFTASLSKQSCITEQTQYFFDNDSKSFSGVLDCGNCSRIFHGEKLMNTNLIFIMVESKGTCPCDTRLLIQAEQTSDGPNPCDMVKQPRYRKGPDVCFDNNVLEDYTDCGGVSGLNPSLWYIIGIQFLLLWLVSGSTHRLL

SEQ ID NO: 1968 - protein, 309 aa, Homo Sapiens
MAAGCLLALTLTLFQSLLIGPSSEEPFPSAVTIKSWVDKMQEDLVTLAKTASGVNQLVDIYEKYQDLYTVEPNNARQLVEIAARDIEKLLSNRSKALVRLALEAEKVQAAHQWREDFASNEVVYYNAKDDLDPEKNDSEPGSQRIKPVFIEDANFGRQISYQHAAVHIPTDIYEGSTIVLNELNWTSALDEVFKKNREEDPSLLWQVFGSATGLARYYPASPWVDNSRTPNKIDLYDVRRRPWYIQGAASPKDMLILVDVSGSVSGLTLKLIRTSVSEMLETLSDDDFVNVASDSKEISPSPEEIFNAE

SEQ ID NO: 1969 - protein, 280 aa, Homo Sapiens
  misc_feature (1)..(1): Xaa can be any naturally occurring amino acid
XKRLTPRFTLCPNGYYFAIDPNGYVLLHPNLQPKPIGVGIPTINLRKRRPNIQEPVTLDFLDAELENDIKVEIRNKMIDGESGEKTFRTLVKSQDERYIDKGNRTYTWTPVNGTDYSLALVLPTYSFYYIKAKLEETITQARYSETLKPDNFEESGYTFIAPRDYCNDLKISDNNTEFLLNFNEFIDRKTPNNPSCNADLINRVLLDAGFTNELVQNYWSKQKNIKGVKARFVVTDGGITRVYPKEAGENWQENPETYEDSFYKRSLDNDNYVFTAPYFN

SEQ ID NO: 1970 - protein, 1073 aa, Homo Sapiens
MAVALGTRRRDRVKLWADTFGGDLYNTVTKYSGSLLLQKKYKDVESSLKIEEVDGLELVRKFSEDMENMLRRKVEAVQNLVEAAEEADLNHEFNESLVFDYYNSVLINERDEKGNFVELGAEFLLESNAHFSNLPVNTSISSVQLPTNVYNKDPDILNGVYMSEALNAVFVENFQRDPTLTWQYFGSATGFFRIYPGIKWTPDENGVITFDCRNRGWYIQAATSPKDIVILVDVSGSMKGLRMTIAKHTITTILDTLGENDFINIIAYNDYVHYIEPCFKGILVQADRDNREHFKLLVEELMVKGVGVVDQALREAFQILKQFQEAKQGSLCNQAIMLISDGAVEDYEPVFEKYNWPDCKVRVFTYLIGREVSFADRMKWIACNNKGYYTQISTLADTQENVMEYLHVLSRPMVINHDHDIIWTEAYMDSKLLSSQAQSLTLLTTVAMPVFSKKNETRSHGILLGVVGSDVALRELMKLAPRYKLGVHGYAFLNTNNGYILSHPDLRPLYREGKKLKPKPNYNSVDLSEVEWEDQAESLRTAMINRETGTLSMDVKVPMDKGKRVLFLTNDYFFTDISDTPFSLGVVLSRGHGEYILLGNTSVEEGLHDLLHPDLALAGDWIYCITDIDPDHRKLSQLEAMIRFLTRKDPDLECDEELVREVLFDAVVTAPMEAYWTALALNMSEESEHVVDMAFLGTRAGLLRSSLFVGSEKVSDRKFLTPEDEASVFTLDRFPLWYRQASEHPAGSFVFNLRWAEGPESAGEPMVVTASTAVAVTVDKRTAIAAAAGVQMKLEFLQRKFWAATRQCSTVDGPCTQSCEDSDLDCFVIDNNGFILISKRSRETGRFLGEVDGAVLTQLLSMGVFSQVTMYDYQAMCKPSSHHHSAAQPLVSPISAFLTATRWLLQELVLFLLEWSVWGSWYDRGAEAKSVFHHSHKHKKQDPLQPCDTEYPVFVYQPAIREANGIVECGPCQKVFVVQQIPNSNLLLLVTDPTCDCSIFPPVLQEATEVKYNASVKCDRMRSQKLRRRPDSCHAFHPEENAQDCGGASDTSASPPLLLLPVCAWGLLPQLLR

SEQ ID NO: 1971 - protein, 1090 aa, Homo Sapiens
MAVALGTRRRDRVKLWADTFGGDLYNTVTKYSGSLLLQKKYKDVESSLKIEEVDGLELVRKFSEDMENMLRRKVEAVQNLVEAAEEADLNHEFNESLVFDYYNSVLINERDEKGNFVELGAEFLLESNAHFSNLPVNTSISSVQLPTNVYNKDPDILNGVYMSEALNAVFVENFQRDPTLTWQYFGSATGFFRIYPGIKWTPDENGVITFDCRNRGWYIQAATSPKDIVILVDVSGSMKGLRMTIAKHTITTILDTLGENDFINIIAYNDYVHYIEPCFKGILVQADRDNREHFKLLVEELMVKGVGVVDQALREAFQILKQFQEAKQGSLCNQAIMLISDGAVEDYEPVFEKYNWPDCKVRVFTYLIGREVSFADRMKWIACNNKGYYTQISTLADTQENVMEYLHVLSRPMVINHDHDIIWTEAYMDSKLLSSQAQSLTLLTTVAMPVFSKKNETRSHGILLGVVGSDVALRELMKLAPRYKLGVHGYAFLNTNNGYILSHPDLRPLYREGKKLKPKPNYNSVDLSEVEWEDQAESLRTAMINRETGTLSMDVKVPMDKGKRVLFLTNDYFFTDISDTPFSLGVVLSRGHGEYILLGNTSVEEGLHDLLHPDLALAGDWIYCITDIDPDHRKLSQLEAMIRFLTRKDPDLECDEELVREVLFDAVVTAPMEAYWTALALNMSEESEHVVDMAFLGTRAGLLRSSLFVGSEKVSDRKFLTPEDEASVFTLDRFPLWYRQASEHPAGSFVFNLRWAEGPESAGEPMVVTASTAVAVTVDKRTAIAAAAGVQMKLEFLQRKFWAATRQCSTVDGPCTQSCEDSDLDCFVIDNNGFILISKRSRETGRFLGEVDGAVLTQLLSMGVFSQVTMYDYQAMCKPSSHHHSAAQPLVSPISAFLTATRWLLQELVLFLLEWSVWGSWYDRGAEAKSVFHHSHKHKKQDPLQPCDTEYPVFVYQPAIREANGIVECGPCQKVFVVQQIPNSNLLLLVTDPTCDCSIFPPVLQEATEVKYNASVKCDRMRSQKLRRRPDSCHAFHPEVRVEADRGWAGFSSPNPLCLGLCPCRQEHIGMPMNTPVPVLLGGNIRVYAL

SEQ ID NO: 1972 - protein, 56 aa, Homo Sapiens
MKLEFLQRKFWAATRQCSTVDGPCTQSCEDSDLDCFVIDNNGFILISKRSRESDYV

SEQ ID NO: 1973 - protein, 56 aa, Homo Sapiens; identical to SEQ ID NO: 1972

SEQ ID NO: 1974 - protein, 282 aa, Homo Sapiens
MKLEFLQRKFWAATRQCSTVDGPCTQSCEDSDLDCFVIDNNGFILISKRSRETGRFLGEVDGAVLTQLLSMGVFSQVTMYDYQAMCKPSSHHHSAAQPLVSPISAFLTATRWLLQELVLFLLEWSVWGSWYDRGAEAKSVFHHSHKHKKQDPLQPCDTEYPVFVYQPAIREANGIVECGPCQKVFVVQQIPNSNLLLLVTDPTCDCSIFPPVLQEATEVKYNASVKCDRMRSQKLRRRPDSCHAFHPEENAQDCGGASDTSASPPLLLLPVCAWGLLPQLLR

SEQ ID NO: 1975 - protein, 41 aa, Homo Sapiens
MKLEFLQRKFWAATRQDLDCFVIDNNGFILISKRSRESDYV

SEQ ID NO: 1976 - protein, 267 aa, Homo Sapiens
MKLEFLQRKFWAATRQDLDCFVIDNNGFILISKRSRETGRFLGEVDGAVLTQLLSMGVFSQVTMYDYQAMCKPSSHHHSAAQPLVSPISAFLTATRWLLQELVLFLLEWSVWGSWYDRGAEAKSVFHHSHKHKKQDPLQPCDTEYPVFVYQPAIREANGIVECGPCQKVFVVQQIPNSNLLLLVTDPTCDCSIFPPVLQEATEVKYNASVKCDRMRSQKLRRRPDSCHAFHPEENAQDCGGASDTSASPPLLLLPVCAWGLLPQLLR

SEQ ID NO: 1977 - protein, 1137 aa, Homo Sapiens
MVCGCSALLPLPNPRPTMPATPNFLANPSSSSRWIPLQPMPVAWAFVQKTSALLWLLLLGTSLSPAWGQAKIPLETVKLWADTFGGDLYNTVTKYSGSLLLQKKYKDVESSLKIEEVDGLELVRKFSEDMENMLRRKVEAVQNLVEAAEEADLNHEFNESLVFDYYNSVLINERDEKGNFVELGAEFLLESNAHFSNLPVNTSISSVQLPTNVYNKDPDILNGVYMSEALNAVFVENFQRDPTLTWQYFGSATGFFRIYPGIKWTPDENGVITFDCRNRGWYIQAATSPKDIVILVDVSGSMKGLRMTIAKHTITTILDTLGENDFINIIAYNDYVHYIEPCFKGILVQADRDNREHFKLLVEELMVKGVGVVDQALREAFQILKQFQEAKQGSLCNQAIMLISDGAVEDYEPVFEKYNWPDCKVRVFTYLIGREVSFADRMKWIACNNKGYYTQISTLADTQENVMEYLHVLSRPMVINHDHDIIWTEAYMDSKLLSSQAQSLTLLTTVAMPVFSKKNETRSHGILLGVVGSDVALRELMKLAPRYKLGVHGYAFLNTNNGYILSHPDLRPLYREGKKLKPKPNYNSVDLSEVEWEDQAESLRTAMINRETGTLSMDVKVPMDKGKRVLFLTNDYFFTDISDTPFSLGVVLSRGHGEYILLGNTSVEEGLHDLLHPDLALAGDWIYCITDIDPDHRKLSQLEAMIRFLTRKDPDLECDEELVREVLFDAVVTAPMEAYWTALALNMSEESEHVVDMAFLGTRAGLLRSSLFVGSEKVSDRKFLTPEDEASVFTLDRFPLWYRQASEHPAGSFVFNLRWAEGPESAGEPMVVTASTAVAVTVDKRTAIAAAAGVQMKLEFLQRKFWAATRQCSTVDGPCTQSCEDSDLDCFVIDNNGFILISKRSRETGRFLGEVDGAVLTQLLSMGVFSQVTMYDYQAMCKPSSHHHSAAQPLVSPISAFLTATRWLLQELVLFLLEWSVWGSWYDRGAEAKSVFHHSHKHKKQDPLQPCDTEYPVFVYQPAIREANGIVECGPCQKVFVVQQIPNSNLLLLVTDPTCDCSIFPPVLQEATEVKYNASVKCDRMRSQKLRRRPDSCHAFHPEENAQDCGGASDTSASPPLLLLPVCAWGLLPQLLR

SEQ ID NO: 1978 - protein, 601 aa, Homo Sapiens
MVCGCSALLPLPNPRPTMPATPNFLANPSSSSRWIPLQPMPVAWAFVQKTSALLWLLLLGTSLSPAWGQAKIPLETVKLWADTFGGDLYNTVTKYSGSLLLQKKYKDVESSLKIEEVDGLELVRKFSEDMENMLRRKVEAVQNLVEAAEEADLNHEFNESLVFDYYNSVLINERDEKGNFVELGAEFLLESNAHFSNLPVNTSISSVQLPTNVYNKDPDILNGVYMSEALNAVFVENFQRDPTLTWQYFGSATGFFRIYPGIKWTPDENGVITFDCRNRGWYIQAATSPKDIVILVDVSGSMKGLRMTIAKHTITTILDTLGENDFINIIAYNDYVHYIEPCFKGILVQADRDNREHFKLLVEELMVKGVGVVDQALREAFQILKQFQEAKQGSLCNQAIMLISDGAVEDYEPVFEKYNWPDCKVRVFTYLIGREVSFADRMKWIACNNKGYYTQISTLADTQENVMEYLHVLSRPMVINHDHDIIWTEAYMDSKLLSSQAQSLTLLTTVAMPVFSKKNETRSHGILLGVVGSDVALRELMKLAPRYKMPSTNSRPNAPPPWTLAAWSARIRLSEHQQWLHPLPSRPPAPVQRGEETKTQT

SEQ ID NO: 1979 - protein, 1154 aa, Homo Sapiens
MVCGCSALLPLPNPRPTMPATPNFLANPSSSSRWIPLQPMPVAWAFVQKTSALLWLLLLGTSLSPAWGQAKIPLETVKLWADTFGGDLYNTVTKYSGSLLLQKKYKDVESSLKIEEVDGLELVRKFSEDMENMLRRKVEAVQNLVEAAEEADLNHEFNESLVFDYYNSVLINERDEKGNFVELGAEFLLESNAHFSNLPVNTSISSVQLPTNVYNKDPDILNGVYMSEALNAVFVENFQRDPTLTWQYFGSATGFFRIYPGIKWTPDENGVITFDCRNRGWYIQAATSPKDIVILVDVSGSMKGLRMTIAKHTITTILDTLGENDFINIIAYNDYVHYIEPCFKGILVQADRDNREHFKLLVEELMVKGVGVVDQALREAFQILKQFQEAKQGSLCNQAIMLISDGAVEDYEPVFEKYNWPDCKVRVFTYLIGREVSFADRMKWIACNNKGYYTQISTLADTQENVMEYLHVLSRPMVINHDHDIIWTEAYMDSKLLSSQAQSLTLLTTVAMPVFSKKNETRSHGILLGVVGSDVALRELMKLAPRYKLGVHGYAFLNTNNGYILSHPDLRPLYREGKKLKPKPNYNSVDLSEVEWEDQAESLRTAMINRETGTLSMDVKVPMDKGKRVLFLTNDYFFTDISDTPFSLGVVLSRGHGEYILLGNTSVEEGLHDLLHPDLALAGDWIYCITDIDPDHRKLSQLEAMIRFLTRKDPDLECDEELVREVLFDAVVTAPMEAYWTALALNMSEESEHVVDMAFLGTRAGLLRSSLFVGSEKVSDRKFLTPEDEASVFTLDRFPLWYRQASEHPAGSFVFNLRWAEGPESAGEPMVVTASTAVAVTVDKRTAIAAAAGVQMKLEFLQRKFWAATRQCSTVDGPCTQSCEDSDLDCFVIDNNGFILISKRSRETGRFLGEVDGAVLTQLLSMGVFSQVTMYDYQAMCKPSSHHHSAAQPLVSPISAFLTATRWLLQELVLFLLEWSVWGSWYDRGAEAKSVFHHSHKHKKQDPLQPCDTEYPVFVYQPAIREANGIVECGPCQKVFVVQQIPNSNLLLLVTDPTCDCSIFPPVLQEATEVKYNASVKCDRMRSQKLRRRPDSCHAFHPEVRVEADRGWAGFSSPNPLCLGLCPCRQEHIGMPMNTPVPVLLGGNIRVYAL

SEQ ID NO: 1980 - protein, 780 aa, Homo Sapiens
MVCGCSALLPLPNPRPTMPATPNFLANPSSSSRWIPLQPMPVAWAFVQKTSALLWLLLLGTSLSPAWGQAKIPLETVKLWADTFGGDLYNTVTKYSGSLLLQKKYKDVESSLKIEEVDGLELVRKFSEDMENMLRRKVEAVQNLVEAAEEADLNHEFNESLVFDYYNSVLINERDEKGNFVELGAEFLLESNAHFSNLPVNTSISSVQLPTNVYNKDPDILNGVYMSEALNAVFVENFQRDPTLTWQYFGSATGFFRIYPGILVQADRDNREHFKLLVEELMVKGVGVVDQALREAFQILKQFQEAKQGSLCNQAIMLISDGAVEDYEPVFEKYNWPDCKISTLADTQENVMEYLHVLSRPMVINHDHDIIWTEAYMDSKLLSSQAQSLTLLTTVAMPVFSKKNETRSHGILLGVVGSDVALRELMKLAPRYKLGVHGYAFLNTNNGYILSHPDLRPLYREGKKLKPKPNYNSVDLSEVEWEDQAESKRVLFLTNDYFFTDISDTPFSLGVVLSRGHGEYILLGNTSVEEGLHDLLHPDLALAGDWIYCITDIDPDHRKLSQLEAMIRFLTRKDPDLECDEELVREVLFDAVVTAPMEAYWTALALNMSEESEHVVDMAFLGTRAGLLRSSLFVGSEKVSDRKFLTPEDEASVFTLDRFPLWYRQASEHPAGSFVFNLRWAEGPESAGEPMVVTASTAVAVTVDKRTAIAAAAGVQMKLEFLQRKFWAATRQCSTVDGPCTQSCEDSDLDCFVIDNNGFILISKRSREPGIKLRKKPIQT

SEQ ID NO: 1981 - protein, 1112 aa, Homo Sapiens
MVCGCSALLPLPNPRPTMPATPNFLANPSSSSRWIPLQPMPVAWAFVQKTSALLWLLLLGTSLSPAWGQAKIPLETVKLWADTFGGDLYNTVTKYSGSLLLQKKYKDVESSLKIEEVDGLELVRKFSEDMENMLRRKVEAVQNLVEAAEEADLNHEFNESLVFDYYNSVLINERDEKGNFVELGAEFLLESNAHFSNLPVNTSISSVQLPTNVYNKDPDILNGVYMSEALNAVFVENFQRDPTLTWQYFGSATGFFRIYPGIKWTPDENGVITFDCRNRGWYIQAATSPKDIVILVDVSGSMKGLRMTIAKHTITTILDTLGENDFINIIAYNDYVHYIEPCFKGILVQADRDNREHFKLLVEELMVKGVGVVDQALREAFQILKQFQEAKQGSLCNQAIMLISDGAVEDYEPVFEKYNWPDCKVRVFTYLIGREVSFADRMKWIACNNKGYYTQISTLADTQENVMEYLHVLSRPMVINHDHDIIWTEAYMDSKLLSSQAQSLTLLTTVAMPVFSKKNETRSHGILLGVVGSDVALRELMKLAPRYKYREGKKLKPKPNYNSVDLSEVEWEDQAESLRTAMINRETGTLSMDVKVPMDKGKRVLFLTNDYFFTDISDTPFSLGVVLSRGHGEYILLGNTSVEEGLHDLLHPDLALAGDWIYCITDIDPDHRKLSQLEAMIRFLTRKDPDLECDEELVREVLFDAVVTAPMEAYWTALALNMSEESEHVVDMAFLGTRAGLLRSSLFVGSEKVSDRKFLTPEDEASVFTLDRFPLWYRQASEHPAGSFVFNLRWAEGPESAGEPMVVTASTAVAVTVDKRTAIAAAAGVQMKLEFLQRKFWAATRQCSTVDGPCTQSCEDSDLDCFVIDNNGFILISKRSRETGRFLGEVDGAVLTQLLSMGVFSQVTMYDYQAMCKPSSHHHSAAQPLVSPISAFLTATRWLLQELVLFLLEWSVWGSWYDRGAEAKSVFHHSHKHKKQDPLQPCDTEYPVFVYQPAIREANGIVECGPCQKVFVVQQIPNSNLLLLVTDPTCDCSIFPPVLQEATEVKYNASVKCDRMRSQKLRRRPDSCHAFHPEENAQDCGGASDTSASPPLLLLPVCAWGLLPQLLR

SEQ ID NO: 1982 - protein, 192 aa, Homo Sapiens
  misc_feature (1)..(1): Xaa can be any naturally occurring amino acid
XELVREVLFDAVVTAPMEAYWTALALNMSEESEHVVDMAFLGTRAGLLRSSLFVGSEKVSDRKFLTPEDEASVFTLDRFPLWYRQASEHPAGSFVFNLRWAEGPESAGEPMVVTASTAVAVTVDKRTAIAAAAGVQMKLEFLQRKFWAATRQCSTVDGPCTQSCEDSDLDCFVIDNNGFILISKRSRESDYV

SEQ ID NO: 1983 - protein, 284 aa, Homo Sapiens
  misc_feature (1)..(1): Xaa can be any naturally occurring amino acid
XGVQMKLEFLQRKFWAATRQCSTVDGPCTQSCEDSDLDCFVIDNNGFILISKRSRETGRFLGEVDGAVLTQLLSMGVFSQVTMYDYQAMCKPSSHHHSAAQPLPISAFLTATRWLLQELVLFLLEWSVWGSWYDRGAEAKSVFHHSHKHKKQDPLQPCDTEYPVFVYQPAIREANGIVECGPCQKVFVVQQIPNSNLLLLVTDPTCDCSIFPPVLQEATEVKYNASVKCDRMRSQKLRRRPDSCHAFHPEENAQDCGGASDTSASPPLLLLPVCAWGLLPQLLR

SEQ ID NO: 1984 - protein, 234 aa, Homo Sapiens
MGAPAASLLLLLLLFACCWAPGGANLSQDDSQPWTSDETVVAGGTVVLKCQVKDHEDSSLQWSNPAQQTLYFGEKRALRDNRIQLVTSTPHELSISISNVALADEGEYTCSIFTMPVRTAKSLVTVLGIPQKPIITGYKSSLREKDTATLNCQSSGSKPAARLTWRKGDQELHGEPTRIQEDPNDTPTAMIRPDPPHPREGQKLLLHCEGRGNPVPQQYLWEKEGSVPPLKMTQ

SEQ ID NO: 1985 - protein, 398 aa, Homo Sapiens
MGAPAASLLLLLLLFACCWAPGGANLSQDDSQPWTSDETVVAGGTVVLKCQVKDHEDSSLQWSNPAQQTLYFGEKRALRDNRIQLVTSTPHELSISISNVALADEGEYTCSIFTMPVRTAKSLVTVLGIPQKPIITGYKSSLREKDTATLNCQSSGSKPAARLTWRKGDQELHGEPTRIQEDPNGKTFTVSSSVTFQVTREDDGASIVCSVNHESLKGADRSTSQRIEVLYTPTAMIRPDPPHPREGQKLLLHCEGRGNPVPQQYLWEKEGSVPPLKMTQESALIFPFLNKSDSGTYGCTATSNMGSYKAYYTLNVNDPSPVPSSSSTYHAIIGGIVAFIVFLLLIMLIFLGHYLIRHKGTYLTHEAKGSDDAPDADTAIINAEGGQSGGDDKKEYFI

SEQ ID NO: 1986 - protein, 432 aa, Homo Sapiens
MGAPAASLLLLLLLFACCWAPGGANLSQDGYWQEQDLELGTLAPLDEAISSTVWSSPDMLASQDSQPWTSDETVVAGGTVVLKCQVKDHEDSSLQWSNPAQQTLYFGEKRALRDNRIQLVTSTPHELSISISNVALADEGEYTCSIFTMPVRTAKSLVTVLGIPQKPIITGYKSSLREKDTATLNCQSSGSKPAARLTWRKGDQELHGEPTRIQEDPNGKTFTVSSSVTFQVTREDDGASIVCSVNHESLKGADRSTSQRIEVLYTPTAMIRPDPPHPREGQKLLLHCEGRGNPVPQQYLWEKEGSVPPLKMTQESALIFPFLNKSDSGTYGCTATSNMGSYKAYYTLNVNDPSPVPSSSSTYHAIIGGIVAFIVFLLLIMLIFLGHYLIRHKGTYLTHEAKGSDDAPDADTAIINAEGGQSGGDDKKEYFI

SEQ ID NO: 1987 - protein, 128 aa, Homo Sapiens
MGFQKFSPFLALSILVLLQAGSLHAAPFRSALESSPADPATLSEDEARLLLAALVQDYVQMKASELEQEQEREGSRIIAQKRACDTATCVTHRLAGLLSRSGGVVKNNFVPTNVGSKAFGRRRRDLQA

SEQ ID NO: 1988 - protein, 128 aa, Homo Sapiens; identical to SEQ ID NO: 1987

SEQ ID NO: 1989 - protein, 141 aa, Homo Sapiens
MGFQKFSPFLALSILVLLQAGSLHAAPFRSALESSPADPATLSEDEARLLLAALVQDYVQMKASELEQEQEREGSSLDSPRSKRCGNLSTCMLGTYTQDFNKFHTFPQTAIGVGAPGKKRDMSSDLERDHRPHNHCPEESL

SEQ ID NO: 1990 - protein, 141 aa, Homo Sapiens
MGFQKFSPFLALSILVLLQAGSLHAAPFRSALESSPADPATLSEDEARLLLAALVQDYVQMKASELEQEQEREGSSLDSPRSKRCGNLSTCMLGTYTQDFNKFHTFPQTAIGVGAPGKKRDMSSDLERDHRPHVSMPQNAN

SEQ ID NO: 1991 - protein, 141 aa, Homo Sapiens; identical to SEQ ID NO: 1990

SEQ ID NO: 1992 - protein, 127 aa, Homo Sapiens
MGFRKFSPFLALSILVLYQAGSLQAAPFRSALESSPDPATLSKEDARLLLAALVQDYVQMKASELKQEQETQGSSSAAQKRACNTATCVTHRLAGLLSRSGGMVKSNFVPTNVGSKAFGRRRRDLQA

SEQ ID NO: 1993 - protein, 127 aa, Homo Sapiens; identical to SEQ ID NO: 1992

SEQ ID NO: 1994 - protein, 138 aa, Homo Sapiens
MKKEANLQRGGMGFRKFSPFLALSILVLYQAGSLQAAPFRSALESSPDPATLSKEDARLLLAALVQDYVQMKASELKQEQETQGSSSAAQKRACNTATCVTHRLAGLLSRSGGMVKSNFVPTNVGSKAFGRRRRDLQA

SEQ ID NO: 1995 - protein, 508 aa, Homo Sapiens
MQFSGEKISGQRDLQKSKMRFTFTSRCLALFLLLNHPTPILPAFSNQTYPTIEPKPFLYVVGRKKMMDAQYKCYDRMQQLPAYQGEGPYCNRTWDGWLCWDDTPAGVLSYQFCPDYFPDFDPSEKVTKYCDEKGVWFKHPENNRTWSNYTMCNAFTPEKLKNAYVLYYLAIVGHSLSIFTLVISLGIFVFFRKLTTIFPLNWKYRKALSLGCQRVTLHKNMFLTYILNSMIIIIHLVEVVPNGELVRRDPVSCKILHFFHQYMMACNYFWMLCEGIYLHTLIVVAVFTEKQRLRWYYLLGWGFPLVPTTIHAITRAVYFNDNCWLSVETHLLYIIHGPVMAALVVNFFFLLNIVRVLVTKMRETHEAESHMYLKAVKATMILVPLLGIQFVVFPWRPSNKMLGKIYDYVMHSLIHFQGFFVATIYCFCNNEVQTTVKRQWAQFKIQWNQRWGRRPSNRSARAAAAAAEAGDIPIYICHQELRNEPANNQGEESAEIIPLNIIEQESSA

SEQ ID NO: 1996 - protein, 162 aa, Homo Sapiens
MRFTFTSRCLALFLLLNHPTPILPAFSNQTYPTIEPKPFLYVVGRKKMMDAQYKCYDRMQQLPAYQGEGPYCNRTWDGWLCWDDTPAGVLSYQFCPDYFPDFDPSEKVTKYCDEKGVWFKHPENNRTWSNYTMCNAFTPEKLKNAYVLYYLAIVGHSCQFSP

SEQ ID NO: 1997 - protein, 290 aa, Homo Sapiens
MRFTFTSRCLALFLLLNHPTPILPAFSNQTYPTIEPKPFLYVVGRKKMMDAQYKCYDRMQQLPAYQGEGPYCNRTWDGWLCWDDTPAGVLSYQFCPDYFPDFDPSEKVTKYCDEKGVWFKHPENNRTWSNYTMCNAFTPEKLKNAYVLYYLAIVGHSLSIFTLVISLGIFVFFRKLTTIFPLNWKYRKALSLGCQRVTLHKNMFLTYILNSMIIIIHLVEVVPNGELVRRDPVSCKILHFFHQYMMACNYFWMLCEGIYLHTLIVVAVFTEKQRLRWYYLLGWAPAFHRD

SEQ ID NO: 1998 - protein, 490 aa, Homo Sapiens
MRFTFTSRCLALFLLLNHPTPILPAFSNQTYPTIEPKPFLYVVGRKKMMDAQYKCYDRMQQLPAYQGEGPYCNRTWDGWLCWDDTPAGVLSYQFCPDYFPDFDPSEKVTKYCDEKGVWFKHPENNRTWSNYTMCNAFTPEKLKNAYVLYYLAIVGHSLSIFTLVISLGIFVFFRKLTTIFPLNWKYRKALSLGCQRVTLHKNMFLTYILNSMIIIIHLVEVVPNGELVRRDPVSCKILHFFHQYMMACNYFWMLCEGIYLHTLIVVAVFTEKQRLRWYYLLGWGFPLVPTTIHAITRAVYFNDNCWLSVETHLLYIIHGPVMAALVVNFFFLLNIVRVLVTKMRETHEAESHMYLKAVKATMILVPLLGIQFVVFPWRPSNKMLGKIYDYVMHSLIHFQGFFVATIYCFCNNEVQTTVKRQWAQFKIQWNQRWGRRPSNRSARAAAAAAEAGDIPIYICHQELRNEPANNQGEESAEIIPLNIIEQESSA

SEQ ID NO: 1999 - protein, 474 aa, Homo Sapiens
MRFTFTSRCLALFLLLNHPTPILPAFSNQTYPTIEPKPFLYVVGRKKMMDAQYKCYDRMQQLPAYQGEGPYCNRTWDGWLCWDDTPAGVLSYQFCPDYFPDFDPSEKVTKYCDEKGVWFKHPENNRTWSNYTMCNAFTPEKLKNAYVLYYLAIVGHSLSIFTLVISLGIFVFFRSLGCQRVTLHKNMFLTYILNSMIIIIHLVEVVPNGELVRRDPVSCKILHFFHQYMMACNYFWMLCEGIYLHTLIVVAVFTEKQRLRWYYLLGWGFPLVPTTIHAITRAVYFNDNCWLSVETHLLYIIHGPVMAALVVNFFFLLNIVRVLVTKMRETHEAESHMYLKAVKATMILVPLLGIQFVVFPWRPSNKMLGKIYDYVMHSLIHFQGFFVATIYCFCNNEVQTTVKRQWAQFKIQWNQRWGRRPSNRSARAAAAAAEAGDIPIYICHQELRNEPANNQGEESAEIIPLNIIEQESSA

SEQ ID NO: 2000 - protein, 474 aa, Homo Sapiens; identical to SEQ ID NO: 1999

SEQ ID NO: 2001 - protein, 274 aa, Homo Sapiens
MRFTFTSRCLALFLLLNHPTPILPAFSNQTYPTIEPKPFLYVVGRKKMMDAQYKCYDRMQQLPAYQGEGPYCNRTWDGWLCWDDTPAGVLSYQFCPDYFPDFDPSEKVTKYCDEKGVWFKHPENNRTWSNYTMCNAFTPEKLKNAYVLYYLAIVGHSLSIFTLVISLGIFVFFRSLGCQRVTLHKNMFLTYILNSMIIIIHLVEVVPNGELVRRDPVSCKILHFFHQYMMACNYFWMLCEGIYLHTLIVVAVFTEKQRLRWYYLLGWAPAFHRD

SEQ ID NO: 2002 - protein, 37 aa, Homo Sapiens
MEKKCTLYFLVLLPFFMILVTAELEESPEDSIQLGVT

SEQ ID NO: 2003 - protein, 78 aa, Homo Sapiens
MEKKCTLYFLVLLPFFMILVTAELEESPEDSIQLGVTRNKIMTAQYECYQKIMQDPIQQAEGVYCNRTWDGWLCWNDV

SEQ ID NO: 2004 - protein, 461 aa, Homo Sapiens [sequence omitted]

SEQ ID NO: 2005 - protein, 461 aa, Homo Sapiens [sequence omitted]

SEQ ID NO: 2006 - protein, 461 aa, Homo Sapiens [sequence omitted]

SEQ ID NO: 2007 - protein, 170 aa, Homo Sapiens
MAPRSAKETFRINPNVAANLSAPSDVILVRDEIALLHRYQSQMLGWILITLATIAALVSCCVAKCCSPLTSLQHCYWTSHLQNERELFEQAAEQHSRLLMMHRIKKLFGFIPGSEDVKHIRIPSCQDWKDISVPTLLCMGDDLQGHYSFLGNRVDEDNEEDRSRGIELKP

SEQ ID NO: 2008 - protein, 314 aa, Homo Sapiens
MCPTLNNIVSSLQRNGIFINSLIAALTIGGQQLFSSSTFSCPCQVGKNFYYGSAFLVIPALILLVAGFALRSQMWTITGEYCCSCAPPYRRISPLECKLACLRFFSITGRAVIAPLTWLAVTLLTGTYYECAASEFASVDHYPMFDNVSASKREEILAGFPCCRSAPSDVILVRDEIALLHRYQSQMLGWILITLATIAALVSCCVAKCCSPLTSLQHCYWTSHLQNERELFEQAAEQHSRLLMMHRIKKLFGFIPGSEDVKHIRIPSCQDWKDISVPTLLCMGDDLQGHYSFLGNRVDEDNEEDRSRGIELKP

SEQ ID NO: 2009 - protein, 171 aa, Homo Sapiens
MFDNVSASKREEILAGFPCCRSAPSDVILVRDEIALLHRYQSQMLGWILITLATIAALVSCCVAKCCSPLTSLQHCYWTSHLQNERELFEQAAEQHSRLLMMHRIKKLFGFIPGSEDVKHIRIPSCQDWKDISVPTLLCMGDDLQGHYSFLGNRVDEDNEEDRSRGIELKP

SEQ ID NO: 2010 - protein, 123 aa, Homo Sapiens
MLGWILITLATIAALVSCCVAKCCSPLTSLQHCYWTSHLQNERELFEQAAEQHSRLLMMHRIKKLFGFIPGSEDVKHIRIPSCQDWKDISVPTLLCMGDDLQGHYSFLGNRVDEDNEEDRSRG

SEQ ID NO: 2011 - protein, 128 aa, Homo Sapiens
MLGWILITLATIAALVSCCVAKCCSPLTSLQHCYWTSHLQNERELFEQAAEQHSRLLMMHRIKKLFGFIPGSEDVKHIRIPSCQDWKDISVPTLLCMGDDLQGHYSFLGNRVDEDNEEDRSRGIELKP

SEQ ID NO: 2012 - protein, 417 aa, Homo Sapiens
MLLSVPLLLGLLGLAVAEPAVYFKEQFLDGDGWTSRWIESKHKSDFGKFVLSSGKFYGDEEKDKGLQTSQDARFYALSASFEPFSNKGQTLVVQFTVKHEQNIDCGGGYVKLFPNSLDQTDMHGDSEYNIMFGPDICGPGTKKVHVIFNYKGKNVLINKDIRCKDDEFTHLYTLIVRPDNTYEVKIDNSQVESGSLEDDWDFLPPKKIKDPDASKPEDWDERAKIDDPTDSKPEDWDKPEHIPDPDAKKPEDWDEEMDGEWEPPVIQNPEYKGEWKPRQIDNPDYKGTWIHPEIDNPEYSPDPSIYAYDNFGVLGLDLWQVKSGTIFDNFLITNDEAYAEEFGNETWGVTKAAEKQMKDKQDEEQRLKEEEEDKKRKEEEEAEDKEDDEDKDEDEEDEEDKEEDEEEDVPGQAKDEL

SEQ ID NO: 2013 - protein, 247 aa, Homo Sapiens
MLLSVPLLLGLLGLAVAEPAVYFKEQFLDGDGWTSRWIESKHKSDFGKFVLSSGKFYGDEEKDKGPDICGPGTKKVHVIFNYKGKNVLINKDIRCKDDEFTHLYTLIVRPDNTYEVKIDNSQVESGSLEDDWDFLPPKKIKDPDASKPEDWDERAKIDDPTDSKPEDWDKPEHIPDPDAKKPEDWDEEMDGEWEPPVIQNPEYKGEWKPRQIDNPDYKGTWIHPEIDNPEYSPDPSIYAYDNFGVLG

SEQ ID NO: 2014 - protein, 163 aa, Homo Sapiens
  misc_feature (1)..(1): Xaa can be any naturally occurring amino acid
XEDWDERAKIDDPTDSKPEDWDKPEHIPDPDAKKPEDWDEEMDGEWEPPVIQNPEYKGEWKPRQIDNPDYKGTWIHPEIDNPEYSPDPSIYAYDNFGVLGLDLWQVKSGTIFDNFLITNDEAYAEEFGNETWGVTKAAEKQMKDKQDEEQRPERSCRRAGRAK

SEQ ID NO: 2015 - protein, 13 aa, Homo Sapiens
  misc_feature (1)..(1): Xaa can be any naturally occurring amino acid
XEEDVPGQAKDEL

SEQ ID NO: 2016 - protein, 384 aa, Homo Sapiens
MARALVQLWAICMLRVALATVYFQEEFLDGEHWRNRWLQSTNDSRFGHFRLSSGKFYGHKEKDKGLQTTQNGRFYAISARFKPFSNKGKTLVIQYTVKHEQKMDCGGGYIKVFPADIDQKNLNGKSQYYIMFGPDICGFDIKKVHVILHFKNKYHENKKLIRCKVDGFTHLYTLILRPDLSYDVKIDGQSIESGSIEYDWNLTSLKKETSPAESKDWEQTKDNKAQDWEKHFLDASTSKQSDWNGDLDGDWPAPMLQKPPYQDGLKPEGIHKDVWLHRKMKNTDYLTQYDLSEFENIGAIGLELWQVRSGTIFDNFLITDDEEYADNFGKATWGETKGPEREMDAIQAKEEMKKAREEEEEELLSGKINRHEHYFNQFHRRNEL

SEQ ID NO: 2017 - protein, 142 aa, Homo Sapiens
  misc_feature (1)..(1): Xaa can be any naturally occurring amino acid
XLVQLWAICMLRVALATVYFQEEFLDGEHWRNRWLQSTNDSRFGHFRLSSGKFYGHKEKDKGPDICGFDIKKVHVILHFKNKYHENKKLIRCKVDGFTHLYTLILRPDLSYDVKIDGQSIESGSIEYDWNLTSLKKETSPAE

SEQ ID NO: 2018 - protein, 315 aa, Homo Sapiens
MDLRQFLMCLSLCTAFALSKPTEKKDRVHHEPQLSDKVHNDAQSFDYDHDAFLGAEEAKTFDQLTPEESKERLGKIVSKIDGDKDGFVTVDELKDWIKFAQKRWIYEDVERQWKGHDLNEDGLVSWEEYKNATYGYVLDDPDPDDGFNYKQMMVRDERRFKMADKDGDLIATKEEFTAFLHPEEYDYMKDIVVQETMEDIDKNADGFIDLEEYIGDMYSHDGNTDEPEWVKTEREQFVEFRDKNRDGKMDKEETKDWILPSDYDHAEAEARHLVYESDQNKDGKLTKEEIVDKYDLFVGSQATDFGEALVRHDEF

SEQ ID NO: 2019 - protein, 224 aa, Homo Sapiens
MDLRQFLMCLSLCTAFALSKPTEKKDRVHHEPQLSDKVHNDAQSFDYDHDAFLGAEEAKTFDQLTPEESKERLGKIVSKIDGDKDGFVTVDELKDWIKFAQKRWIYEDVERQWKGHDLNEDGLVSWEEYKNATYGYVLDDPDPDDGFNYKQMMVRDERRFKMADKDGDLIATKEEFTAFLHPEEYDYMKDIVVQETMEDIDKNADGFIDLEEYIGWQAYQGGDR

SEQ ID NO: 2020 - protein, 315 aa, Homo Sapiens
MDLRQFLMCLSLCTAFALSKPTEKKDRVHHEPQLSDKVHNDAQSFDYDHDAFLGAEEAKTFDQLTPEESKERLGMIVDKIDADKDGFVTEGELKSWIKHAQKKYIYDNVENQWQEFDMNQDGLISWDEYRNVTYGTYLDDPDPDDGFNYKQMMVRDERRFKMADKDGDLIATKEEFTAFLHPEEYDYMKDIVVQETMEDIDKNADGFIDLEEYIGDMYSHDGNTDEPEWVKTEREQFVEFRDKNRDGKMDKEETKDWILPSDYDHAEAEARHLVYESDQNKDGKLTKEEIVDKYDLFVGSQATDFGEALVRHDEF

SEQ ID NO: 2021 - protein, 323 aa, Homo Sapiens
MKETDLIIMDLRQFLMCLSLCTAFALSKPTEKKDRVHHEPQLSDKVHNDAQSFDYDHDAFLGAEEAKTFDQLTPEESKERLGKIVSKIDGDKDGFVTVDELKDWIKFAQKRWIYEDVERQWKGHDLNEDGLVSWEEYKNATYGYVLDDPDPDDGFNYKQMMVRDERRFKMADKDGDLIATKEEFTAFLHPEEYDYMKDIVVQETMEDIDKNADGFIDLEEYIGDMYSHDGNTDEPEWVKTEREQFVEFRDKNRDGKMDKEETKDWILPSDYDHAEAEARHLVYESDQNKDGKLTKEEIVDKYDLFVGSQATDFGEALVRHDEF

SEQ ID NO: 2022 - protein, 323 aa, Homo Sapiens
MKETDLIIMDLRQFLMCLSLCTAFALSKPTEKKDRVHHEPQLSDKVHNDAQSFDYDHDAFLGAEEAKTFDQLTPEESKERLGMIVDKIDADKDGFVTEGELKSWIKHAQKKYIYDNVENQWQEFDMNQDGLISWDEYRNVTYGTYLDDPDPDDGFNYKQMMVRDERRFKMADKDGDLIATKEEFTAFLHPEEYDYMKDIVVQETMEDIDKNADGFIDLEEYIGDMYSHDGNTDEPEWVKTEREQFVEFRDKNRDGKMDKEETKDWILPSDYDHAEAEARHLVYESDQNKDGKLTKEEIVDKYDLFVGSQATDFGEALVRHDEF

SEQ ID NO: 2023 - protein, 147 aa, Homo Sapiens
  misc_feature (1)..(1): Xaa can be any naturally occurring amino acid
XIATKEEFTAFLHPEEYDYMKDIVVQETMEDIDKNADGFIDLEEYIGDMYSHDGNTDEPEWVKTEREQFVEFRDKNRDGKMDKEETKDWILPSDYDHAEAEARHLVYESDQNKDGKLTKEEIVDKYDLFVGSQATDFGEALVRHDEF

SEQ ID NO: 2024 - protein, 194 aa, Homo Sapiens
ILLVGYPPFWDEDQHRLYQQIKAGAYDFPSPEWDTVTPEAKDLINKMLTINPAKRITASEALKHPWICQRSTVASMMHRQETVDCLKKFNARRKLKGAILTTMLATRNFSAKSLLKKPDGVKSTESSNTTIEDEDVKARKQEIIKVTEQLIEAINNGDFEAYTKICDPGLTAFEPEALGNLVEGMDFHRFYFEN

SEQ ID NO: 2025 - protein, 512 aa, Homo Sapiens
MASTTTCTRFTDEYQLFEELGKGAFSVVRRCMKIPTGQEYAAKIINTKKLSARDHQKLEREARICRLLKHPNIVRLHDSISEEGFHYLVFDLVTGGELFEDIVAREYYSEADASHCIQQILEAVLHCHQMGVVHRDLKPENLLLASKSKGAAVKLADFGLAIEVQGDQQAWFGFAGTPGYLSPEVLRKDPYGKPVDMWACGVILYILLVGYPPFWDEDQHRLYQQIKAGAYDFPSPEWDTVTPEAKDLINKMLTINPAKRITASEALKHPWICQRSTVASMMHRQETVDCLKKFNARRKLKGAILTTMLATRNFSAAKSLLKKPDGVKINNKANVVTSPKENIPTPALEPQTTVIHNPDGNKESTESSNTTIEDEDVKARKQEIIKVTEQLIEAINNGDFEAYTKICDPGLTAFEPEALGNLVEGMDFHRFYFENALSKSNKPIHTIILNPHVHLVGDDAACIAYIRLTQYMDGSGMPKTMQSEETRVWHRRDGKWQNVHFHRSGSPTVPIK

SEQ ID NO: 2026 - protein, 533 aa, Homo Sapiens
MASTTTCTRFTDEYQLFEELGKGAFSVVRRCMKIPTGQEYAAKIINTKKLSARDHQKLEREARICRLLKHPNIVRLHDSISEEGFHYLVFDLVTGGELFEDIVAREYYSEADASHCIQQILEAVLHCHQMGVVHRDLKPENLLLASKSKGAAVKLADFGLAIEVQGDQQAWFGFAGTPGYLSPEVLRKDPYGKPVDMWACGVILYILLVGYPPFWDEDQHRLYQQIKAGAYDFPSPEWDTVTPEAKDLINKMLTINPAKRITASEALKHPWICQRSTVASMMHRQETVDCLKKFNARRKLKGAILTTMLATRNFSAAKSLLKKPDGVKINNKANVVTSPKENIPTPALEPQTTVIHNPDGNKESTESSNTTIEDEDVKARKQEIIKVTEQLIEAINNGDFEAYTKICDPGLTAFEPEALGNLVEGMDFHRFYFENALSKSNKPIHTIILNPHVHLVGDDAACIAYIRLTQYMDGSGMPKTMQSEETRVWHRRDGKWQNVHFHRSGSPTVPIKPPCIPNGKENFSGGTSLWQNI

SEQ ID NO: 2027 - protein, 478 aa, Homo Sapiens
MASTTTCTRFTDEYQLFEELGKGAFSVVRRCMKIPTGQEYAAKIINTKKLSARDHQKLEREARICRLLKHPNIVRLHDSISEEGFHYLVFDLVTGGELFEDIVAREYYSEADASHCIQQILESVNHCHLNGIVHRDLKPENLLLASKSKGAAVKLADFGLAIEVQGDQQAWFGFAGTPGYLSPEVLRKDPYGKPVDMWACGVILYILLVGYPPFWDEDQHRLYQQIKAGAYDFPSPEWDTVTPEAKDLINKMLTINPAKRITASEALKHPWICQRSTVASMMHRQETVDCLKKFNARRKLKGAILTTMLATRNFSAAKSLLKKPDGVKESTESSNTTIEDEDVKARKQEIIKVTEQLIEAINNGDFEAYTKICDPGLTAFEPEALGNLVEGMDFHRFYFENALSKSNKPIHTIILNPHVHLVGDDAACIAYIRLTQYMDGSGMPKTMQSEETRVWHRRDGKWQNVHFHRSGSPTVPIK

SEQ ID NO: 2028 - protein, 499 aa, Homo Sapiens
MASTTTCTRFTDEYQLFEELGKGAFSVVRRCMKIPTGQEYAAKIINTKKLSARDHQKLEREARICRLLKHPNIVRLHDSISEEGFHYLVFDLVTGGELFEDIVAREYYSEADASHCIQQILESVNHCHLNGIVHRDLKPENLLLASKSKGAAVKLADFGLAIEVQGDQQAWFGFAGTPGYLSPEVLRKDPYGKPVDMWACGVILYILLVGYPPFWDEDQHRLYQQIKAGAYDFPSPEWDTVTPEAKDLINKMLTINPAKRITASEALKHPWICQRSTVASMMHRQETVDCLKKFNARRKLKGAILTTMLATRNFSAAKSLLKKPDGVKESTESSNTTIEDEDVKARKQEIIKVTEQLIEAINNGDFEAYTKICDPGLTAFEPEALGNLVEGMDFHRFYFENALSKSNKPIHTIILNPHVHLVGDDAACIAYIRLTQYMDGSGMPKTMQSEETRVWHRRDGKWQNVHFHRSGSPTVPIKPPCIPNGKENFSGGTSLWQNI

SEQ ID NO: 2029 - protein, 492 aa, Homo Sapiens
MASTTTCTRFTDEYQLFEELGKGAFSVVRRCMKIPTGQEYAAKIINTKKLSARDHQKLEREARICRLLKHPNIVRLHDSISEEGFHYLVFDLVTGGELFEDIVAREYYSEADASHCIQQILESVNHCHLNGIVHRDLKPENLLLASKSKGAAVKLADFGLAIEVQGDQQAWFGFAGTPGYLSPEVLRKDPYGKPVDMWACGVILYILLVGYPPFWDEDQHRLYQQIKAGAYDFPSPEWDTVTPEAKDLINKMLTINPAKRITASEALKHPWICQRSTVASMMHRQETVDCLKKFNARRKLKGAILTTMLATRNFSAAKSLLKKPDGVKEPQTTVIHNPDGNKESTESSNTTIEDEDVKARKQEIIKVTEQLIEAINNGDFEAYTKICDPGLTAFEPEALGNLVEGMDFHRFYFENALSKSNKPIHTIILNPHVHLVGDDAACIAYIRLTQYMDGSGMPKTMQSEETRVWHRRDGKWQNVHFHRSGSPTVPIK

SEQ ID NO: 2030 - protein, 478 aa, Homo Sapiens
MASTTTCTRFTDEYQLFEELGKGAFSVVRRCMKIPTGQEYAAKIINTKKLSARDHQKLEREARICRLLKHPNIVRLHDSISEEGFHYLVFDLVTGGELFEDIVAREYYSEADASHCIQQILESVNHCHLNGIVHRDLKPENLLLASKSKGAAVKLADFGLAIEVQGDQQAWFGFAGTPGYLSPEVLRKDPYGKPVDMWACGVILYILLVGYPPFWDEDQHRLYQQIKAGAYDFPSPEWDTVTPEAKDLINKMLTINPAKRITASEALKHPWICQRSTVASMMHRQETVDCLKKFNARRKLKGAILTTMLATRNFSAAKSLLKKPDGVKESTESSNTTIEDEDVKARKQEIIKVTEQLIEAINNGDFEAYTKICDPGLTAFEPEALGNLVEGMDFHRFYFENALSKSNKPIHTIILNPHVHLVGDDAACIAYIRLTQYMDGSGMPKTMQSEETRVWHRRDGKWQNVHFHRSGSPTVPIN

SEQ ID NO: 2031 - protein, 478 aa, Homo Sapiens; identical to SEQ ID NO: 2027

SEQ ID NO: 2032 - protein, 510 aa, Homo Sapiens
MASTTTCTRFTDEYQLFEELGKGAFSVVRRCMKIPTGQEYAAKIINTKKLSARDHQKLEREARICRLLKHPNIVRLHDSISEEGFHYLVFDLVTGGELFEDIVAREYYSEADASHCIQQILESVNHCHLNGIVHRDLKPENLLLASKSKGAAVKLADFGLAIEVQGDQQAWFGFAGTPGYLSPEVLRKDPYGKPVDMWACGVILYILLVGYPPFWDEDQHRLYQQIKAGAYDFPSPEWDTVTPEAKDLINKMLTINPAKRITASEALKHPWICQRSTVASMMHRQETVDCLKKFNARRKLKGAILTTMLATRNFSAAKSLLKKPDGVKKRKSSSSVQMMESTESSNTTIEDEDVKARKQEIIKVTEQLIEAINNGDFEAYTKICDPGLTAFEPEALGNLVEGMDFHRFYFENALSKSNKPIHTIILNPHVHLVGDDAACIAYIRLTQYMDGSGMPKTMQSEETRVWHRRDGKWQNVHFHRSGSPTVPIKPPCIPNGKENFSGGTSLWQNI

SEQ ID NO: 2033 - protein, 489 aa, Homo Sapiens
MASTTTCTRFTDEYQLFEELGKGAFSVVRRCMKIPTGQEYAAKIINTKKLSARDHQKLEREARICRLLKHPNIVRLHDSISEEGFHYLVFDLVTGGELFEDIVAREYYSEADASHCIQQILESVNHCHLNGIVHRDLKPENLLLASKSKGAAVKLADFGLAIEVQGDQQAWFGFAGTPGYLSPEVLRKDPYGKPVDMWACGVILYILLVGYPPFWDEDQHRLYQQIKAGAYDFPSPEWDTVTPEAKDLINKMLTINPAKRITASEALKHPWICQRSTVASMMHRQETVDCLKKFNARRKLKGAILTTMLATRNFSAAKSLLKKPDGVKKRKSSSSVQMMESTESSNTTIEDEDVKARKQEIIKVTEQLIEAINNGDFEAYTKICDPGLTAFEPEALGNLVEGMDFHRFYFENALSKSNKPIHTIILNPHVHLVGDDAACIAYIRLTQYMDGSGMPKTMQSEETRVWHRRDGKWQNVHFHRSGSPTVPIK

SEQ ID NO: 2034 - protein, 498 aa, Homo Sapiens
MASTTTCTRFTDEYQLFEELGKGAFSVVRRCMKIPTGQEYAAKIINTKKLSARDHQKLEREARICRLLKHPNIVRLHDSISEEGFHYLVFDLVTGGELFEDIVAREYYSEADASHCIQQILESVNHCHLNGIVHRDLKPENLLLASKSKGAAVKLADFGLAIEVQGDQQAWFGFAGTPGYLSPEVLRKDPYGKPVDMWACGVILYILLVGYPPFWDEDQHRLYQQIKAGAYDFPSPEWDTVTPEAKDLINKMLTINPAKRITASEALKHPWICQRSTVASMMHRQETVDCLKKFNARRKLKGAILTTMLATRNFSAKSLLKKPDGVKESTESSNTTIEDEDVKARKQEIIKVTEQLIEAINNGDFEAYTKICDPGLTAFEPEALGNLVEGMDFHRFYFENALSKSNKPIHTIILNPHVHLVGDDAACIAYIRLTQYMDGSGMPKTMQSEETRVWHRRDGKWQNVHFHRSGSPTVPIKPPCIPNGKENFSGGTSLWQNI

SEQ ID NO: 2035 - protein, 182 aa, Homo Sapiens
  misc_feature (1)..(1): Xaa can be any naturally occurring amino acid
XRKLKGAILTTMLATRNFSAAKSLLKKPDGVKESTESSNTTIEDEDVKARKQEIIKVTEQLIEAINNGDFEAYTKICDPGLTAFEPEALGNLVEGMDFHRFYFENALSKSNKPIHTIILNPHVHLVGDDAACIAYIRLTQYMDGSGMPKTMQSEETRVWHRRDGKWQNVHFHRSGSPTVPIK

SEQ ID NO: 2036 - protein, 173 aa, Homo Sapiens
MGTMKTQRDGHSLGRWSLVLLLLGLVMPLAIIAQVLSYKEAVLRAIDGINQRSSDANLYRLLDLDPRPTMDGDPDTPKPVSFTVKETVCPRTTQQSPEDCDFKKDGLVKRCMGTVTLNQARGSFDISCDKDNKRFALLGDFFRKSKEKIGKEFKRIVQRIKDFLRNLVPRTES

SEQ ID NO: 2037 - protein, 32 aa, Homo Sapiens
MEGKWLLCMLLVLGTAIVEAHDGHDDDVIDIE

SEQ ID NO: 2038 - protein, 61 aa, Homo Sapiens
MEGKWLLCMLLVLGTAIVEAHDGHDDDVIDIEDDLDDVIEEVEDSKPDTTAPPSSPKESGR

SEQ ID NO: 2039 - protein, 79 aa, Homo Sapiens
MEGKWLLCMLLVLGTAIVEAHDGHDDDVIDIEDDLDDVIEEVEDSKPDTTAPPSSPKVTYKAPVPTGEVYFADSFDRGT

SEQ ID NO: 2040 - protein, 96 aa, Homo Sapiens
MEGKWLLCMLLVLGTAIVEAHDGHDDDVIDIEDDLDDVIEEVEDSKPDTTAPPSSPKVTYKAPVPTGEVYFADSFDRGTLSGKVGGRGNEGVKASR

SEQ ID NO: 2041 - protein, 107 aa, Homo Sapiens
MEGKWLLCMLLVLGTAIVEAHDGHDDDVIDIEDDLDDVIEEVEDSKPDTTAPPSSPKVTYKAPVPTGEVYFADSFDRGTLSGWILSKAKKDDTDDEIAKYDGKWEVE

SEQ ID NO: 2042 - protein, 134 aa, Homo Sapiens
MEGKWLLCMLLVLGTAIVEAHDGHDDDVIDIEDDLDDVIEEVEDSKPDTTAPPSSPKVTYKAPVPTGEVYFADSFDRGTLSGWILSKAKKDDTDDEIAKYDGKWEVEEMKESKLPGDKGLVLMSRAKHHAISAK

SEQ ID NO: 2043 - protein, 144 aa, Homo Sapiens
MEGKWLLCMLLVLGTAIVEAHDGHDDDVIDIEDDLDDVIEEVEDSKPDTTAPPSSPKVTYKAPVPTGEVYFADSFDRGTLSGWILSKAKKDDTDDEIAKYDGKWEVEEMKESKLPGDKGLVLMSRAKHHAISAKLNKPFLFDTK

SEQ ID NO: 2044 - protein, 168 aa, Homo Sapiens
MEGKWLLCMLLVLGTAIVEAHDGHDDDVIDIEDDLDDVIEEVEDSKPDTTAPPSSPKVTYKAPVPTGEVYFADSFDRGTLSGWILSKAKKDDTDDEIAKYDGKWEVEEMKESKLPGDKGLVLMSRAKHHAISAKLNKPFLFDTKPLIVQYEVNFQNGIECGGAYVKLL

SEQ ID NO: 2045 - protein, 592 aa, Homo Sapiens
MEGKWLLCMLLVLGTAIVEAHDGHDDDVIDIEDDLDDVIEEVEDSKPDTTAPPSSPKVTYKAPVPTGEVYFADSFDRGTLSGWILSKAKKDDTDDEIAKYDGKWEVEEMKESKLPGDKGLVLMSRAKHHAISAKLNKPFLFDTKPLIVQYEVNFQNGIECGGAYVKLLSKTPELNLDQFHDKTPYTIMFGPDKCGEDYKLHFIFRHKNPKTGIYEEKHAKRPDADLKTYFTDKKTHLYTLILNPDNSFEILVDQSVVNSGNLLNDMTPPVNPSREIEDPEDRKPEDWDERPKIPDPEAVKPDDWDEDAPAKIPDEEATKPEGWLDDEPEYVPDPDAEKPEDWDEDMDGEWEAPQIANPRCESAPGCGVWQRPVIDNPNYKGKWKPPMIDNPSYQGIWKPRKIPNPDFFEDLEPFRMTPFSAIGLELWSMTSDIFFDNFIICADRRIVDDWANDGWGLKKAADGAAEPGVVGQMIEAAEERPWLWVVYILTVALPVFLVILFCCSGKKQTSGMEYKKTDAPQPDVKEEEEEKEEEKDKGDEEEEGEEKLEEKQKSDAEEDGGTVSQEEEDRKPKAEEDEILNRSPRNRKPRRE

SEQ ID NO: 2046 - protein, 592 aa, Homo Sapiens; identical to SEQ ID NO: 2045

SEQ ID NO: 2047 - protein, 592 aa, Homo Sapiens; identical to SEQ ID NO: 2045

SEQ ID NO: 2048 - protein, 308 aa, Homo Sapiens
MEGKWLLCMLLVLGTAIVEAHDGHDDDVIDIEDDLDDVIEEVEEMKESKLPGDKGLVLMSRAKHHAISAKLNKPFLFDTKPLIVQYEVNFQNGIECGGAYVKLLSKTPELNLDQFHDKTPYTIMFGPDKCGEDYKLHFIFRHKNPKTGIYEEKHAKRPDADLKTYFTDKKTHLYTLILNPDNSFEILVDQSVVNSGNLLNDMTPPVNPSREIEDPEDRKPEDWDERPKIPDPEAVKPDDWDEDAPAKIPDEEATKPEGWLDDEPEYVPDPDAEKPEDWDEDMDGEWEAPQIANPRCESAPGCGVWQRP

SEQ ID NO: 2049 - protein, 131 aa, Homo Sapiens
MKESKLPGDKGLVLMSRAKHHAISAKLNKPFLFDTKPLIVQYEVNFQNGIECGGAYVKLLSKTPELNLDQFHDKTPYTIMFGPDKCGEDYKLHFIFRHKNPKTGIYEEKHAKRPDADLKTYFTDKKTHLYT

SEQ ID NO: 2050 - protein, 190 aa, Homo Sapiens
  misc_feature (1)..(1): Xaa can be any naturally occurring amino acid
XGLVLMSRAKHHAISAKLNKPFLFDTKPLIVQYEVNFQNGIECGGAYVKLLSKTPELNLDQFHDKTPYTIMFGPDKCGEDYKLHFIFRHKNPKTGIYEEKHAKRPDADLKTYFTDKKTHLYTLKSRGTNHLCFVHKEMGVSFPKTPGARHCSYPKASVLNPDNSFEILVDQSVVNSGNLLNDMTPPVNPS

SEQ ID NO: 2051 - protein, 170 aa, Homo Sapiens
  misc_feature (1)..(1): Xaa can be any naturally occurring amino acid
XLYCGAGQGVRAGRGTGTPAVPGRLEVTYKAPVPTGEVYFADSFDRGTLSGWILSKAKKDDTDDEIAKYDGKWEVEEMKESKLPGDKGLVLMSRAKHHAISAKLNKPFLFDTKPLIVQYEVNFQNGIECGGAYVKLLSKTPELNLDQFHDKTPYTIMFGPDKCGEDYKLH

SEQ ID NO: 2052 - protein, 111 aa, Homo Sapiens
AEQQALRLEVRAGPDSAGIALYSHEDVCVFKCSVSRETECSRVGKQSFIITLGCNSVLIQFATPNDFCSFYNILKTCRGHTLERSVFSERTEESSAVQYFQMRKLRLREVK

SEQ ID NO: 2053 - protein, 92 aa, Homo Sapiens
ALYSHEDVCVFKCSVSRETECSRVGKQSFIITLGCNSVLIQFATPNDFCSFYNILKTCRGHTLERSVFSERTEESSAVQYFQMRKLRLREVK

SEQ ID NO: 2054 - protein, 176 aa, Homo Sapiens
LAFWFDVAFIGSIQSYDISIVAQVDQTGSKSSNLLDLKNPFFRYTGTTPSPPPGSHYTSPSENMWNTGSTYNLSSGMAVAGMPTAYDLSSVIASGSSVGHNNLIPLANTGIVNHTHSRMGSIMSTGIVQGSSGAQGSGGGSTSAHYAVNSQFTMGGPAISMASPMSIPTNTMHYGS

SEQ ID NO: 2055 - protein, 608 aa, Homo Sapiens
MAAAAAAVGPGAGGAGSAVPGGAGPCATVSVFPGARLLTIGDANGEIQRHAEQQALRLEVRAGPDSAGIALYSHEDVCVFKCSVSRETECSRVGKQSFIITLGCNSVLIQFATPNDFCSFYNILKTCRGHTLERSVFSERTEESSAVQYFQFYGYLSQQQNMMQDYVRTGTYQRAILQNHTDFKDKIVLDVGCGSGILSFFAAQAGARKIYAVEASTMAQHAEVLVKSNNLTDRIVVIPGKVEEVSLPEQVDIIISEPMGYMLFNERMLESYLHAKKYLKPSGNMFPTIGDVHLAPFTDEQLYMEQFTKANFWYQPSFHGVDLSALRGAAVDEYFRQPVVDTFDIRILMAKSVKYTVNFLEAKEGDLHRIEIPFKFHMLHSGLVHGLAFWFDVAFIGSIMTVWLSTAPTEPLTHWYQVRCLFQSPLFAKAGDTLSGTCLLIANKRQSYDISIVAQVDQTGSKSSNLLDLKNPFFRYTGTTPSPPPGSHYTSPSENMWNTGSTYNLSSGMAVAGMPTAYDLSSVIASGSSVGHNNLIPLANTGIVNHTHSRMGSIMSTGIVQGSSGAQGSGGGSTSAHYAVNSQFTMGGPAISMASPMSIPTNTMHYGS

SEQ ID NO: 2056 - protein, 585 aa, Homo Sapiens
MAAAAAAVGPGAGGAGSAVPGGAGPCATVSVFPGARLLTIGDANGEIQRHAEQQALRLEVRAGPDSAGIALYSHEDVCVFKCSVSRETECSRVGKQSFIITLGCNSVLIQFATPNDFCSFYNILKTCRGHTLERSVFSERTEESSAVQYFQFYGYLSQQQNMMQDYVRTGTYQRAILQNHTDFKDKIVLDVGCGSGILSFFAAQAGARKIYAVEASTMAQHAEVLVKSNNLTDRIVVIPGKVEEVSLPEQVDIIISEPMGYMLFNERMLESYLHAKKYLKPSGNMFPTIGDVHLAPFTDEQLYMEQFTKANFWYQPSFHGVDLSALRGAAVDEYFRQPVVDTFDIRILMAKSVKYTVNFLEAKEGDLHRIEIPFKFHMLHSGLVHGLAFWFDVAFIGSIMTVWLSTAPTEPLTHWYQVRCLFQSPLFAKAGDTLSGTCLLIANKRQSYDISIVAQVDQTGSKSSNLLDLKNPFFRYTGTTPSPPPGSHYTSPSENMWNTGSTYNLSSGMAVAGMPTAYDLSSVIASGSSVGHNNLIPLGSSGAQGSGGGSTSAHYAVNSQFTMGGPAISMASPMSIPTNTMHYGS

SEQ ID NO: 2057 - protein, 161 aa, Homo Sapiens
MAAAAAAVGPGAGGAGSAVPGGAGPCATVSVFPGARLLTIGDANGEIQRHAEQQALRLEVRAGPDSAGIALYSHEDVCVFKCSVSRETECSRVGKQSFIITLGCNSVLIQFATPNDFCSFYNILKTCRGHTLERSVFSERTEESSAVQYFQMRKLRLREVK

SEQ ID NO: 2058 - protein, 120 aa, Homo Sapiens
MAAAAAAVGPGAGGAGSAVPGGAGPCATVSVFPGARLLTIGDANGEIQRHAEQQALRLEVRAGPDSAGIALYSHFCSFYNILKTCRGHTLERSVFSERTEESSAVQYFQFYGYLSQQQNM

SEQ ID NO: 2059 - protein, 343 aa, Homo Sapiens
  misc_feature (1)..(1): Xaa can be any naturally occurring amino acid
XANGEIQRHAEQQALRLEVRAGPDSAGIALYSHEDVCVFKCSVSRETECSRVGKQSFIITLGCNSVLIQFATPNDFCSFYNILKTCRGHTLERSVFSERTEESSAVQYFQFYGYLSQQQNMMQDYVRTGTYQRAILQNHTDFKDKIVLDVGCGSGILSFFAAQAGARKIYAVEASTMAQHAEVLVKSNNLTDRIVVIPGKVEEVSLPEQVDIIISEPMGYMLFNERMLESYLHAKKYLKPSGNMFPTIGDVHLAPFTDEQLYMEQFTKANFWYQPSFHGVDLSALRGAAVDEYFRQPVVDTFDIRILMAKSVKYTVNFLEAKEGDLHSACLASPAATALCLPG

SEQ ID NO: 2060 - protein, 827 aa, Homo Sapiens
MLLCLSPAWLMKVPAPGQPGEAALLVSKAVSFHPGGLTFLDDFVPPRRATYFLAGLGLGPGRGREAAELARDLTCPTGASAELARLLEDRLLTRQLLAQQGGVAVPATLAFTYKPPGLLRGGDASLGLRLVELSGKEGQETLVKEEVEAFLRSEALGDILQVAVKLSGWRWRGRQAWRLHPRAELGAVVDTVLALLEKLEEEESVLVEAVYPPAQLPCSDGPSPGPGLAVRICAVVCRTQGDRPLLSKVVCGVGRGDRPLRHHNSLPRTLEVALAQCGLGEEAQVAAVRQRVKAAAEAALAAVLALEAGLSAEQRGGRRAHTDFLGVDFALTAAGGVLTPVALELNGGLCLEACGALEGLWAAPRLGPAADEAVAAPLVETMLRRSARCLMEGKQLLVVGAGGVSKKFVWEAARDYGLQLHLVESDPNHFASQLVQTFIHFDMTEHRRDEENARLLAELVRARGLKLDGCFSYWDDCLVLTALLCQELGLPCSSPAAMRLAKQKSLTQLHLLHHHGPPWPAPSLHAVPCCPLESEADVERAVHQVPLPGVMKLEFGAGAVGVRLVEDAPQCHEHFSRITRDLQGEADHPGIGLGWGNAMLLMEFVEGTEHDVDLVLFGGRLLAAFVSDNGPTRLPGFTETAACMPTGLAPEQEAQMVQAAFRCCLGCGLLDGVFNVELKLTGAGPRLIEINPRMGGFYLRDWILELYGVDLLLAAVMVACGLRPALPTRPRARGHLVGVMCLVSQHLQALSSTASRETLQALHDRGLLRLNLLEEALVPGEYEEPYCSVACAGPSPTEARLRLLGLCQGLGIDGPSYPVAHFLSHFK

SEQ ID NO: 2061 - protein, 950 aa, Homo Sapiens
MLSLDPSGPEWDCPLGSKDLEEEGPWGGGSGLPPTGCFPGSWRQDVGLDCKGSPEGAEARAWTVYYYSLLQSCLQQAGLPETQDRGQVPRTGCPGAEVTLCVLGSPSTFLPVLLEGGVQSPGNMLLCLSPAWLMKVPAPGQPGEAALLVSKAVSFHPGGLTFLDDFVPPRRATYFLAGLGLGPGRGREAAELARDLTCPTGASAELARLLEDRLLTRQLLAQQGGVAVPATLAFTYKPPGLLRGGDASLGLRLVELSGKEGQETLVKEEVEAFLRSEALGDILQVAVKLSGWRWRGRQAWRLHPRAELGAVVDTVLALLEKLEEEESVLVEAVYPPAQLPCSDGPSPGPGLAVRICAVVCRTQGDRPLLSKVVCGVGRGDRPLRHHNSLPRTLEVALAQCGLGEEAQVAAVRQRVKAAAEAALAAVLALEAGLSAEQRGGRRAHTDFLGVDFALTAAGGVLTPVALELNGGLCLEACGALEGLWAAPRLGPAADEAVAAPLVETMLRRSARCLMEGKQLLVVGAGGVSKKFVWEAARDYGLQLHLVESDPNHFASQLVQTFIHFDMTEHRRDEENARLLAELVRARGLKLDGCFSYWDDCLVLTALLCQELGLPCSSPAAMRLAKQKSLTQLHLLHHHGPPWPAPSLHAVPCCPLESEADVERAVHQVPLPGVMKLEFGAGAVGVRLVEDAPQCHEHFSRITRDLQGEADHPGIGLGWGNAMLLMEFVEGTEHDVDLVLFGGRLLAAFVSDNGPTRLPGFTETAACMPTGLAPEQEAQMVQAAFRCCLGCGLLDGVFNVELKLTGAGPRLIEINPRMGGFYLRDWILELYGVDLLLAAVMVACGLRPALPTRPRARGHLVGVMCLVSQHLQALSSTASRETLQALHDRGLLRLNLLEEALVPGEYEEPYCSVACAGPSPTEARLRLLGLCQGLGIDGPSYPVAHFLSHFK

SEQ ID NO: 2062 - protein, 924 aa, Homo Sapiens
MLSLDPSGPEWDCPLGSKDLEEEGPWGGGSGLPPTGCFPGSWRQDVGLDCKGSPEGAEARAWTVYYYSLLQSCLQQAGLPETQDRGQVPRTGCPGAEVTLCVLGSPSTFLPVLLEGGVQSPGNMLLCLSPAWLMKVPAPGQPGEAALLVSKAVSFHPGGLTFLDDFVPPRRATYFLAGLGLGPGRGREAAELARDLTCPTGASAELARLLEDRLLTRQLLAQQGGVAVPATLAFTYKPPGLLRGGDASLGLRLVELSGKEGQETLVKEEVEAFLRSEALGDILQVAVKLSGWRWRGRQAWRLHPRAELGAVVDTVLALLEKLEEEESVLVEAVYPPAQLPCSDGPSPGPGLAVRICAVVCRTQGDRPLLSKVVCGVGRGDRPLRHHNSLPRTLEAALAAVLALEAGLSAEQRGGRRAHTDFLGVDFALTAAGGVLTPVALELNGGLCLEACGALEGLWAAPRLGPAADEAVAAPLVETMLRRSARCLMEGKQLLVVGAGGVSKKFVWEAARDYGLQLHLVESDPNHFASQLVQTFIHFDMTEHRRDEENARLLAELVRARGLKLDGCFSYWDDCLVLTALLCQELGLPCSSPAAMRLAKQKSLTQLHLLHHHGPPWPAPSLHAVPCCPLESEADVERAVHQVPLPGVMKLEFGAGAVGVRLVEDAPQCHEHFSRITRDLQGEADHPGIGLGWGNAMLLMEFVEGTEHDVDLVLFGGRLLAAFVSDNGPTRLPGFTETAACMPTGLAPEQEAQMVQAAFRCCLGCGLLDGVFNVELKLTGAGPRLIEINPRMGGFYLRDWILELYGVDLLLAAVMVACGLRPALPTRPRARGHLVGVMCLVSQHLQALSSTASRETLQALHDRGLLRLNLLEEALVPGEYEEPYCSVACAGPSPTEARLRLLGLCQGLGIDGPSYPVAHFLSHFK

SEQ ID NO: 2063 - protein, 116 aa, Homo Sapiens
MESSRVRLLPLLGAALLLMLPLLGTRAQEDAELQPRALDIYSAVDDASHEKELIEALQEVLKKLKSKRVPIYEKKYGQVPMCDAGEQCAVRKGARIGKLCDCPRGTSCNSFLLKCL

SEQ ID NO: 2064 - protein, 117 aa, Homo Sapiens
MDGIHIVAFAEEADPDGFEFLETLKAVAQDNTENPDLSIIWIDPDDFPLLVPYWEKTFDIDLSAPQIGVVNVTDADSVWMEMDDEEDLPSAEELEDWLEDVLEGEINTEDDDDDDDD

SEQ ID NO: 2065 - protein, 396 aa, Homo Sapiens
MSATDRMGPRAVPGLRLALLLLLVLGTPKSGVQGQEGLDFPEYDGVDRVINVNAKNYKNVFKKYEVLALLYHEPPEDDKASQRQFEMEELILELAAQVLEDKGVGFGLVDSEKDAAVAKKLGLTEVDSMYVFKGDEVIEYDGEFSADTIVEFLLDVLEDPVELIEGERELQAFENIEDEIKLIGYFKSKDSEHYKAFEDAAEEFHPYIPFFATFDSKVAKKLTLKLNEIDFYEAFMEEPVTIPDKPNSEEEIVNFVEEHRRSTLRKLKPESMYETWEDDMDGIHIVAFAEEADPDGFEFLETLKAVAQDNTENPDLSIIWIDPDDFPLLVPYWEKTFDIDLSAPQIGVVNVTDADSVWMEMDDEEDLPSAEELEDWLEDVLEGEINTEDDDDDDDD

SEQ ID NO: 2066 - protein, 399 aa, Homo Sapiens
MKRTHLFIVGIYFLSSCRAEEGLNFPTYDGKDRVVSLSEKNFKQVLKKYDLLCLYYHEPVSSDKVTQKQFQLKEIVLELVAQVLEHKAIGFVMVDAKKEAKLAKKLGFDEEGSLYILKGDRTIEFDGEFAADVLVEFLLDLIEDPVEIISSKLEVQAFERIEDYIKLIGFFKSEDSEYYKAFEEAAEHFQPYIKFFATFDKGVAKKLSLKMNEVDFYEPFMDEPIAIPNKPYTEEELVEFVKEHQRPTLRRLRPEEMFETWEDDLNGIHIVAFAEKSDPDGYEFLEILKQVARDNTDNPDLSILWIDPDDFPLLVAYWEKTFKIDLFRPQIGVVNVTDADSVWMEIPDDDDLPTAEELEDWIEDVLSGKINTEDDDEDDDDDDNSDEEDNDDSDDDDDE

SEQ ID NO: 2067 - protein, 1119 aa, Homo Sapiens
MCGPAMFPAGPPWPRVRVVQVLWALLAVLLASWRLWAIKDFQECTWQVVLNEFKRVGESGVSDSFFEQEPVDTVSSLFHMLVDSPIDPSEKYLGFPYYLKINYSCEEKPSEDLVRMGHLTGLKPLVLVTFQSPVNFYRWKIEQLQIQMEAAPFRSKEPCMAEEVCSMSWYTPMPIKKGSVVMRVDISSNGLGTFIPDKRFQMNINGFLKRDRDNNIQFTVGEELFNLMPQYFVGVSSRPLWHTVDQSPVLILGGIPNEKYVLMTDTSFKDFSLVELSIDSCWVGSFYCPHSGFTATIYDTIATESTLFIRQNQLVYYFTGTYTTLYERNRGSGSWIRVLASECIKKLCPVYFHSNGSEYIMALTTGKHEGYVHFGTIRDGQVSFEMLPRQWSVCEQIGASDDLELLYHIPEFIPEARGLEFLMILGTESYTSTAMAPKGIFCNPYNNLIFIWGNFLLQSSNKENFIYLADFPKELSIKYMARSFRGAVAIVTETEEIWYLLEGSYRVYQLFPSKGWQVHISLKLMQQSSLYASNETMLTLFYEDSKLYQLVYLMNNQKGQLVKRLVPVEQLLMYQQHTSHYDLERKGGYLMLSFIDFCPFSVMRLRSLPSPQRYTRQERYRARPPRVLERSGFHNENSLAIYQGLVYYLLWLHSVYDKPYADPVHDPTWRWWANNKQDQDYYFFLASNWRSAGGVSIEMDSYEKIYNLESAYELPERIFLDKGTEYSFAIFLSAQGHSFRTQSELGTAFQLHSQVDVGVVLADPGCIEASVKQEVLINRNSVLFSITLKDKKLCYDQGISGHHLMETSMTVNVVGSSGLCFQETHLGPHMQGNLMVPVFIGCPPGKRLAFDITYTLEYSRLKNKHYFDCVNVNPEMPCFLFRDIFYPFFLIQDLVTGDSGSFQGSYVLLVVGGGPTLDSLKDYSEDEIYRFNSPLDKTNSLIWTTRTTRTTKDSAFHIMSHESPGIEWLCLENAPCYDNVPQGIFAPEFFFKVLVSNRGVDTSTYCNYQLTFLLHIHGLPLSPKRALFIIMVSASVFVGLVIFYIAFCLLWPLVVKGCTMIRWKINNLIASESYYTYASISGISSMPSLRHSRMGSMFSSRMTEDRAEPKEAVERQLMT

SEQ ID NO: 2068 - protein, 661 aa, Homo Sapiens
MCGPAMFPAGPPWPRVRVVQVLWALLAVLLASWRLWAIKDFQECTWQVVLNEFKRVGESGVSDSFFEQEPVDTVSSLFHMLVDSPIDPSEKYLGFPYYLKINYSCEEKPSEDLVRMGHLTGLKPLVLVTFQSPVNFYRWKIEQLQIQMEAAPFRSKEPCMAEEVCSMSWYTPMPIKKGSVVMRVDISSNGLGTFIPDKRFQMNINGFLKRDRDNNIQFTVGEELFNLMPQYFVGVSSRPLWHTVDQSPVLILGGIPNEKYVLMTDTSFKDFSLVELSIDSCWVGSFYCPHSGFTATIYDTIATESTLFIRQNQLVYYFTGTYTTLYERNRGSGSWIRVLASECIKKLCPVYFHSNGSEYIMALTTGKHEGYVHFGTIRDGQVSFEMLPRQWSVCEQIGVTTCSIIWSEYIAGEYTLLLLVESGYGNASKRFQVVSYNTASDDLELLYHIPEFIPEARGLEFLMILGTESYTSTAMAPKGIFCNPYNNLIFIWGNFLLQSSNKENFIYLADFPKELSIKYMARSFRGAVAIVTETEEIWYLLEGSYRVYQLFPSKGWQVHISLKLMQQSSLYASNETMLTLFYEDSKLYQLVYLMNNQKGQLVKRLVPVEQLLMYQQHTSHYDLERKGGYLMLSFIDFCPFSVMRLRSLPSPQRYTRQERYR

SEQ ID NO: 2069 - protein, 1159 aa, Homo Sapiens
MCGPAMFPAGPPWPRVRVVQVLWALLAVLLASWRLWAIKDFQECTWQVVLNEFKRVGESGVSDSFFEQEPVDTVSSLFHMLVDSPIDPSEKYLGFPYYLKINYSCEEKPSEDLVRMGHLTGLKPLVLVTFQSPVNFYRWKIEQLQIQMEAAPFRSKEPCMAEEVCSMSWYTPMPIKKGSVVMRVDISSNGLGTFIPDKRFQMNINGFLKRDRDNNIQFTVGEELFNLMPQYFVGVSSRPLWHTVDQSPVLILGGIPNEKYVLMTDTSFKDFSLVELSIDSCWVGSFYCPHSGFTATIYDTIATESTLFIRQNQLVYYFTGTYTTLYERNRGSGSWIRVLASECIKKLCPVYFHSNGSEYIMALTTGKHEGYVHFGTIRDGQVSFEMLPRQWSVCEQIGVTTCSIIWSEYIAGEYTLLLLVESGYGNASKRFQVVSYNTASDDLELLYHIPEFIPEARGLEFLMILGTESYTSTAMAPKGIFCNPYNNLIFIWGNFLLQSSNKENFIYLADFPKELSIKYMARSFRGAVAIVTETEEIWYLLEGSYRVYQLFPSKGWQVHISLKLMQQSSLYASNETMLTLFYEDSKLYQLVYLMNNQKGQLVKRLVPVEQLLMYQQHTSHYDLERKGGYLMLSFIDFCPFSVMRLRSLPSPQRYTRQERYRARPPRVLERSGFHNENSLAIYQGLVYYLLWLHSVYDKPYADPVHDPTWRWWANNKQDQDYYFFLASNWRSAGGVSIEMDSYEKIYNLESAYELPERIFLDKGTEYSFAIFLSAQGHSFRTQSELGTAFQLHSQVDVGVVLADPGCIEASVKQEVLINRNSVLFSITLKDKKLCYDQGISGHHLMETSMTVNVVGSSGLCFQETHLGPHMQGNLMVPVFIGCPPGKRLAFDITYTLEYSRLKNKHYFDCVNVNPEMPCFLFRDIFYPFFLIQDLVTGDSGSFQGSYVLLVVGGGPTLDSLKDYSEDEIYRFNSPLDKTNSLIWTTRTTRTTKDSAFHIMSHESPGIEWLCLENAPCYDNVPQGIFAPEFFFKVLVSNRGVDTSTYCNYQLTFLLHIHGLPLSPKRALFIIMVSASVFVGLVIFYIAFCLLWPLVVKGCTMIRWKINNLIASESYYTYASISGISSMPSLRHSRMGSMFSSRMTEDRAEPKEAVERQLMT

SEQ ID NO: 2070 - protein, 292 aa, Homo Sapiens
MCGPAMFPAGPPWPRVRVVQVLWALLAVLLASWRLWAIKDFQECTWQVVLNEFKRVGESGVSDSFFEQEPVDTVSSLFHMLVDSPIDPSEKYLGFPYYLKINYSCEEKSPVNFYRWKIEQLQIQMEAAPFRSKEPCMAEEVCSMSWYTPMPIKKGSVVMRVDISSNGLGTFIPDKRFQMNINGFLKRDRDNNIQFTVGEELFNLMPQYFVGVSSRPLWHTVDQSPVLILGGIPNEKYVLMTDTSFKDFSLVEAPIPHSMRETAAVAVGFVSWPASASRSCALCISIAMALST

SEQ ID NO: 2071 - protein, 136 aa, Homo Sapiens
MCGPAMFPAGPPWPRVRVVQVLWALLAVLLASWRLWAIKDFQECTWQVVLNEFKRVGESGVSDSFFEQEPVDTVSSLFHMLVDSPIDPSEKYLGFPYYLKINYSCEEKSPVNFYRWKIEQLQIQMEAAPFRSKGSR

SEQ ID NO: 2072 - protein, 159 aa, Homo Sapiens
MCGPAMFPAGPPWPRVRVVQVLWALLAVLLASWRLWAIKDFQECTWQVVLNEFKRVGESGVSDSFFEQEPVDTVSSLFHMLVDSPIDPSEKYLGFPYYLKINYSCEEKTESCAVAQTGVQWRDLGSLQPPPPVFKRCSCLGLPSSWNYSPLRTWCAWAT

SEQ ID NO: 2073 - protein, 165 aa, Homo Sapiens
RWKIEQLQIQMEAAPFRSKEPCMAEEVCSMSWYTPMPIKKGSVVMRVDISSNGLGTFIPDKRFQMNINGFLKRDRDNNIQFTVGEELFNLMPQYFVGVSSRPLWHTVDQSPVLILGGIPNEKYVLMTDTSFKDFSLVEAVGFVSWPASASRSCALCISIAMALST

SEQ ID NO: 2074 - protein, 180 aa, Homo Sapiens
  misc_feature (1)..(1): Xaa can be any naturally occurring amino acid
XRNRGSGSWIRVLASECIKKLCPVYFHSNGSEYIMALTTGKHEGYVHFGTIRASDDLELLYHIPEFIPEARGLEFLMILGTESYTSTAMAPKGIFCNPYNNLIFIWGNFLLQSSNKENFIYLADFPKELSIKYMARSFRGAVAIVTETEEIWYLLEGSYRVYQLFPSKGWQVHISLKLMQ

SEQ ID NO: 2075 - protein, 193 aa, Homo Sapiens
MLGVLELLLLGAAWLAGPARGQNETEPIVLEGKCLVVCDSNPTSDPTGTALGISVRSGSAKVAFSAIRSTNHEPSEMSNRTMIIYFDQVLVNIGNNFDSERSTFIAPRKGIYSFNFHVVKVYNRQTIQVSLMLNGWPVISAFAGDQDVTREAASNGVLIQMEKGDRAYLKLERGNLMGGWKYSTFSGFLVFPL

SEQ ID NO: 2076 - protein, 193 aa, Homo Sapiens; identical to SEQ ID NO: 2075

SEQ ID NO: 2077 - protein, 140 aa, Homo Sapiens
MLGVLELLLLGAAWLAGPARGQNETEPIVLEGKCLVVCDSNPTSDPTGTALGISVRSGSAKVAFSAIRSTNHEPSEMSNRTMIIYFDQVSVPSSRGVQIGLVKEGWMEDRCPVLSKGSAEARGRQSGTDSCPLPFVPVSL

SEQ ID NO: 2078 - protein, 110 aa, Homo Sapiens
MDWDKVLVNIGNHFDLASSIFVAPRKGIYSFSFHVVKVYNRQTIQVSLMQNGYPVISAFAGDQDVTREAASNGVLLLMEREDKVHLKLERGNLMGGWKYSTFSGFLVFPL

SEQ ID NO: 2079 - protein, 108 aa, Homo Sapiens
MFQVLVNIGNHFDLASSIFVAPRKGIYSFSFHVVKVYNRQTIQVSLMQNGYPVISAFAGDQDVTREAASNGVLLLMEREDKVHLKLERGNLMGGWKYSTFSGFLVFPL

SEQ ID NO: 2080 - protein, 224 aa, Homo Sapiens
MQAPGRGPLGLRLMMPGRRGALREPGGCGSCLGVALALLLLLLPACCPVRAQNDTEPIVLEGKCLVVCDSSPSADGAVTSSLGISVRSGSAKVAFSATRSTNHEPSEMSNRTMTIYFDQVLVNIGNHFDLASSIFVAPRKGIYSFSFHVVKVYNRQTIQVSLMQNGYPVISAFAGDQDVTREAASNGVLLLMEREDKVHLKLERGNLMGGWKYSTFSGFLVFPL

SEQ ID NO: 2081 - protein, 224 aa, Homo Sapiens; identical to SEQ ID NO: 2080

SEQ ID NO: 2082 - protein, 205 aa, Homo Sapiens
MLGAKPHWLPGPLHSPGLPLVLVLLALGAGWAQEGSEPVLLEGECLVVCEPGRAAAGGPGGAALGEAPPGRVAFAAVRSHHHEPAGETGNGTSGAIYFDQVLVNEGGGFDRASGSFVAPVRGVYSFRFHVVKVYNRQTVQVSLMLNTWPVISAFANDPDVTREAATSSVLLPLDPGDRVSLRLRRGNLLGGWKYSSFSGFLIFPL

SEQ ID NO: 2083 - protein, 154 aa, Homo Sapiens
MWGLSGQSFGRTLTPTLKMRSTWGCCSRTLFSASADTAKRSGDAGRAPQVLVNEGGGFDRASGSFVAPVRGVYSFRFHVVKVYNRQTVQVSLMLNTWPVISAFANDPDVTREAATSSVLLPLDPGDRVSLRLRRGNLLGGWKYSSFSGFLIFPL

SEQ ID NO: 2084 - protein, 201 aa, Homo Sapiens
MGSGRRALSAVPAVLLVLTLPGLPVWAQNDTEPIVLEGKCLVVCDSNPATDSKGSSSSPLGISVRAANSKVAFSAVRSTNHEPSEMSNKTRIIYFDQILVNVGNFFTLESVFVAPRKGIYSFSFHVIKVYQSQTIQVNLMLNGKPVISAFAGDKDVTREAATNGVLLYLDKEDKVYLKLEKGNLVGGWQYSTFSGFLVFPL

SEQ ID NO: 2085 - protein, 46 aa, Homo Sapiens
MVKAGTCCATCKEFYQMKQTVLQLKQKIALLPNNAADLGKYITGDK

SEQ ID NO: 2086 - protein, 406 aa, Homo Sapiens
MVPPPPSRGGAARGQLGRSLGPLLLLLALGHTWTYREEPEDGDREICSESKIATTKYPCLKSSGELTTCYRKKCCKGYKFVLGQCIPEDYDVCAEAPCEQQCTDNFGRVLCTCYPGYRYDRERHRKREKPYCLDIDECASSNGTLCAHICINTLGSYRCECREGYIREDDGKTCTRGDKYPNDTGHEKSENMVKAGTCCATCKEFYQMKQTVLQLKQKIALLPNNAADLGKYITGDKVLASNTYLPGPPGLPGGQGPPGSPGPKGSPGFPGMPGPPGQPGPRGSMGPMGPSPDLSHIKQGRRGPVGPPGAPGRDGSKGERGAPGPRGSPGPPGSFDFLLLMLADIRNDITELQEKVFGHRTHSSAEEFPLPQEFPSYPEAMDLGSGDDHPRRTETRDLRAPRDFYP

SEQ ID NO: 2087 - protein, 336 aa, Homo Sapiens
RKKCCKGYKFVLGQCIPEDYDVCAEAPCEQQCTDNFGRVLCTCYPGYRYDRERHRKREKPYCLDIDECASSNGTLCAHICINTLGSYRCECREGYIREDDGKTCTRGDKYPNDTGHEKSENMVKAGTCCATCKEFYQMKQTVLQLKQKIALLPNNAADLGKYITGDKVLASNTYLPGPPGLPGGQGPPGSPGPKGSPGFPGMPGPPGQPGPRGSMGPMGPSPDLSHIKQGRRGPVGPPGAPGRDGSKGERGAPGPRGSPGPPGSFDFLLLMLADIRNDITELQEKVFGHRTHSSAEEFPLPQEFPSYPEAMDLGSGDDHPRRTETRDLRAPRDFYP

SEQ ID NO: 2088 - protein, 529 aa, Homo Sapiens
MAALTTVVVAAAATAVAGAVAGAGAATGTGVGATPAPQQSDGCFSTSGGIRPFHLQNWKQKVNQTKKAEFVRTAEKFKNQVINMEKDKHSHFYNQKSDFRIEHSMLEELENKLIHSRKTERAKIQQQLAKIHNNVKKLQHQLKDVKPTPDFVEKLREMMEEIENAINTFKEEQRLIYEELIKEEKTTNNELSAISRKIDTWALGNSETEKAFRAISSKVPVDKVTPSTLPEEVLDFEKFLQQTGGRQGAWDDYDHQNFVKVRNKHKGKPTFMEEVLEHLPGKTQDEVQQHEKWYQKFLALEERKKESIQIWKTKKQQKREEIFKLKEKADNTPVLFHNKQEDNQKQKEEQRKKQKLAVEAWKKQKSIEMSMKCASQLKEEEEKEKKHQKERQRQFKLKLLLESYTQQKKEQEEFLRLEKEIREKAEKAEKRKNAADEISRFQERDLHKLELKILDRQAKEDEKSQKQRRLAKLKEKVENNVSRDPSRLYKPTKGWEERTKKIGPTGSGPLLHIPHRAIPTWRQGIQRRV

SEQ ID NO: 2089 - protein, 446 aa, Homo Sapiens
MEKDKHSHFYNQKSDFRIEHSMLEELENKLIHSRKTERAKIQQQLAKIHNNVKKLQHQLKDVKPTPDFVEKLREMMEEIENAINTFKEEQRLIYEELIKEEKTTNNELSAISRKIDTWALGNSETEKAFRAISSKVPVDKVTPSTLPEEVLDFEKFLQQTGGRQGAWDDYDHQNFVKVRNKHKGKPTFMEEVLEHLPGKTQDEVQQHEKWYQKFLALEERKKESIQIWKTKKQQKREEIFKLKEKADNTPVLFHNKQEDNQKQKEEQRKKQKLAVEAWKKQKSIEMSMKCASQLKEEEEKEKKHQKERQRQFKLKLLLESYTQQKKEQEEFLRLEKEIREKAEKAEKRKNAADEISRFQERDLHKLELKILDRQAKEDEKSQKQRRLAKLKEKVENNVSRDPSRLYKPTKGWEERTKKIGPTGSGPLLHIPHRAIPTWRQGIQRRV

SEQ ID NO: 2090 - protein, 414 aa, Homo Sapiens
MEKDKHSHFYNQKSDFRIEHSMLEELENKLIHSRKTERAKIQQQLAKIHNNVKKLQHQLKDVKPTPDFVEKLREMMEEIENAINTFKEEQRLIYEELIKEEKTTNNELSAISRKIDTWALGNSETEKAFRAISSKVPVDKVTPSTLPEEVLDFEKFLQQTGGRQGAWDDYDHQNFVKVRNKHKGKPTFMEEVLEHLPGKTQDEVQQHEKWYQKFLALEERKKESIQIWKTKKQQKREEIFKLKEKADNTPVLFHNKQEDNQKQKEEQRKKQKLAVEAWKKQKSIEMSMKCASQLKEEEEKEKKHQKERQRQFKLKLLLESYTQQKKEQEEFLRLEKEIREKAEKAEKRKNAADEISRFQERVENNVSRDPSRLYKPTKGWEERTKKIGPTGSGPLLHIPHRAIPTWRQGIQRRV

SEQ ID NO: 2091 - protein, 446 aa, Homo Sapiens; identical to SEQ ID NO: 2089

SEQ ID NO: 2092 - protein, 142 aa, Homo Sapiens
MMAQKSQGSDNLQEGQEKSKREILKCTKSAWAPLDEWLPPDPEEESQSLTIPMLEDSKQESIQQWLDSGFFVSANENFQQVIDRTVSLYEQGMVQMTVKDYMRSLHQFSETPILSRGTSFNSCYSTASVPQSIPEWLEFWEI

SEQ ID NO: 2093 - protein, 163 aa, Homo Sapiens
MMAQKSQGSDNLQEGQEKSKREILKCTKSAWAPLDEWLPPDPEEESQSLTIPMLEDSKQESIQQWLDSGFFVSANENFQQVIDRTVSLYEQGMVQMTVKDYMRSLHQFSETPILSRGTSFNSCYSTASVPQSIPEWLEFWEIDPVEILLDLGFGADEPDICMQ

SEQ ID NO: 2094 - protein, 168 aa, Homo Sapiens
MMAQKSQGSDNLQEGQEKSKREILKCTKSAWAPLDEWLPPDPEEESQSLTIPMLEDSKQESIQQWLDSGFFVSANENFQQVIDRTVSLYEQGMVQMTVKDYMRSLHQFSETPILSRGTSFNSCYSTASVPQSIPEWLEFWEIDPVEILLDLGFGADEPDICMQIPARF

SEQ ID NO: 2095 - protein, 896 aa, Homo Sapiens
MMAQKSQGSDNLQEGQEKSKREILKCTKSAWAPLDEWLPPDPEEESQSLTIPMLEDSKQESIQQWLDSGFFVSANENFQQVIDRTVSLYEQGMVQMTVKDYMRSLHQFSETPILSRGTSFNSCYSTASVPQSIPEWLEFWEIDPVEILLDLGFGADEPDICMQIPARFLGCGSAARGINIRVFLEAQKQRMDIENPNLYGRFRQLEILDHVTNAFSSLLSDVSILPNRAEEKAGGESVQRTSVQSFEEETGNPLDMTSGTVGARVDRANSCQSDSSGFLEEPLEPLPLQMPSLPNSQSPAENGGRKPRDQSHSLVSSQDCQLESDGPDSKSRASMSFSSQEANALEQRASVSVMEEEFLLEAMEGPPELYIPDMACAKTTTRGECPRKDSHLWQLLPMPHAEYEVTRPTATSKYDHPLGFMVTHVTEMQDSFVRPEGAGKVQSHHNESQRSPGNDHTQDKFLHVDSEAPREEESSGFCPHTNHSLLVPESSSQCIPKHSEITPYATDLAQTSEKLIPHLHKLPGDPAQVKSRSGTLGQILPGTEAEMENLPLNTGSSRSVMTQMSSSLVSAAQRAVALGTGPRGTSLECTVCDPVTATETRLGTKARQLNDASIQTSALSNKTLTHGPQPLTKSVSLDSGFSSICPMGTCHAIPAHCCICCHHHPHCHGERQSPGPEPSVCRHCLCSLTGHQEAQFMTTLKALQDTTVRELCSCTVHEMEAMKTICQSFREYLEEIEQHLMGQQALFSRDMSEEEREEAEQLQTLREALRQQVAELEFQLGDRAQQIREGILLQLEVLTAEPPEHYSNLHQYNWIEESNGQTSCSKIHPGMAPRTVFPPDDGQEAPCSGGTQLAAFTPPTLENSTRMSPSSSAWAKLGPTPLSNCPVGEKDADVFL

SEQ ID NO: 2096 - protein, 1044 aa, Homo Sapiens
MMAQKSQGSDNLQEGQEKSKREILKCTKSAWAPLDEWLPPDPEEESQSLTIPMLEDSKQESIQQWLDSGFFVSANENFQQVIDRTVSLYEQGMVQMTVKDYMRSLHQFSETPILSRGTSFNSCYSTASVPQSIPEWLEFWEIDPVEILLDLGFGADEPDICMQIPARFLGCGSAARGINIRVFLEAQKQRMDIENPNLYGRFRQLEILDHVTNAFSSLLSDVSILPNRAEEKAGGESVQRTSVSAAKEHRRRMGKLLRRASKQNIRRDCNPEVSESFKVKDEVFVPFTKPWDCGAELAATSINHKQNHLSLSVEHQSLQACDDLLPYPPHGLLSKQWPCSSMPAKQAPPSCVSEGSVKGRTQKENLFQTNKLKSLSHLAGKGPDSFEMEEVQSFEEETGNPLDMTSGTVGARVDRANSCQSDSSGFLEEPLEPLPLQMPSLPNSQSPAENGGRKPRDQSHSLVSSQDCQLESDGPDSKSRASMSFSSQEANALEQRASVSVMEEEFLLEAMEGPPELYIPDMACAKTTTRGECPRKDSHLWQLLPMPHAEYEVTRPTATSKYDHPLGFMVTHVTEMQDSFVRPEGAGKVQSHHNESQRSPGNDHTQDKFLHVDSEAPREEESSGFCPHTNHSLLVPESSSQCIPKHSEITPYATDLAQTSEKLIPHLHKLPGDPAQVKSRSGTLGQILPGTEAEMENLPLNTGSSRSVMTQMSSSLVSAAQRAVALGTGPRGTSLECTVCDPVTATETRLGTKARQLNDASIQTSALSNKTLTHGPQPLTKSVSLDSGFSSICPMGTCHAIPAHCCICCHHHPHCHGERQSPGPEPSVCRHCLCSLTGHQEAQFMTTLKALQDTTVRELCSCTVHEMEAMKTICQSFREYLEEIEQHLMGQQALFSRDMSEEEREEAEQLQTLREALRQQVAELEFQLGDRAQQIREGILLQLEVLTAEPPEHYSNLHQYNWIEESNGQTSCSKIHPGMAPRTVFPPDDGQEAPCSGGTQLAAFTPPTLENSTRMSPSSSAWAKLGPTPLSNCPVGEKDADVFL

SEQ ID NO: 2097 - protein, 1062 aa, Homo Sapiens
MPTTASCKTISLLKLLYSVSLQNYSPMMAQKSQGSDNLQEGQEKSKREILKCTKSAWAPLDEWLPPDPEEESQSLTIPMLEDSKQESIQQWLDSGFFVSANENFQQVIDRTVSLYEQGMVQMTVKDYMRSLHQFSETPILSRGTSFNSCYSTASVPQSIPEWLEFWEIDPVEILLDLGFGADEPDICMQIPARFLGCGSAARGINIRVFLEAQKQRMDIENPNLYGRFRQLEILDHVTNAFSSLLSDVSILPNRAEEKAGGESVQRTSVSAAKEHRRRMGKLLRRASKQNIRRDCNPEVSESFKVKDEVFVPFTKPWDCGAELAATSINHKQNHLSLSVEHQSLQACDDLLPYPPHGLLSKQWPCSSMPAKQAPPSCVSEGSVKGRTQKENLFQTNKLKSLSHLAGKGPDSFEMEEVQSFEEETGNPLDMTSGTVGARVDRANSCQSDSSGFLEEPLEPLPLQMPSLPNSQSPAENGGRKPRDQSHSLVSSQDCQLESDGPDSKSRASMSFSSQEANALEQRASVSVMEEEFLLEAMEGPPELYIPDMACAKTTTRGECPRKDSHLWQLLPMPHAEYEVTRPTATSKYDHPLGFMVTHVTEMQDSFVRPEGAGKVQSHHNESQRSPGNDHTQDKFLHVDSEAPREEESSGFCPHTNHSLLVPESSSQCIPKHSEITPYATDLAQTSEKLIPHLHKLPGDPAQVKSRSGTLGQILPGTEAEMENLPLNTGSSRSVMTQMSSSLVSAAQRAVALGTGPRGTSLECTVCDPVTATETRLGTKARQLNDASIQTSALSNKTLTHGPQPLTKSVSLDSGFSSICPMGTCHAIPAHCCICCHHHPHCHGERQSPGPEPSVCRHCLCSLTGHQEAQFMTTLKALQDTTVRELCSCTVHEMEAMKTICQSFREYLEEIEQHLMGQQALFSRDMSEEEREEAEQLQTLREALRQQVAELEFQLGDRAQQIREGILLQLEVLTAEPPEHYSNLHQYNWIEESNGQTSCSKIHPGMAPRTVFPPDDGQEAPCSGELLSAELDPFFFSSKANNSAKDEKIKSKDFLKTQDSGLL

SEQ ID NO: 2098 - protein, 1054 aa, Homo Sapiens
MSVSLQNYSPMMAQKSQGSDNLQEGQEKSKREILKCTKSAWAPLDEWLPPDPEEESQSLTIPMLEDSKQESIQQWLDSGFFVSANENFQQVIDRTVSLYEQGMVQMTVKDYMRSLHQFSETPILSRGTSFNSCYSTASVPQSIPEWLEFWEIDPVEILLDLGFGADEPDICMQIPARFLGCGSAARGINIRVFLEAQKQRMDIENPNLYGRFRQLEILDHVTNAFSSLLSDVSILPNRAEEKAGGESVQRTSVSAAKEHRRRMGKLLRRASKQNIRRDCNPEVSESFKVKDEVFVPFTKPWDCGAELAATSINHKQNHLSLSVEHQSLQACDDLLPYPPHGLLSKQWPCSSMPAKQAPPSCVSEGSVKGRTQKENLFQTNKLKSLSHLAGKGPDSFEMEEVQSFEEETGNPLDMTSGTVGARVDRANSCQSDSSGFLEEPLEPLPLQMPSLPNSQSPAENGGRKPRDQSHSLVSSQDCQLESDGPDSKSRASMSFSSQEANALEQRASVSVMEEEFLLEAMEGPPELYIPDMACAKTTTRGECPRKDSHLWQLLPMPHAEYEVTRPTATSKYDHPLGFMVTHVTEMQDSFVRPEGAGKVQSHHNESQRSPGNDHTQDKFLHVDSEAPREEESSGFCPHTNHSLLVPESSSQCIPKHSEITPYATDLAQTSEKLIPHLHKLPGDPAQVKSRSGTLGQILPGTEAEMENLPLNTGSSRSVMTQMSSSLVSAAQRAVALGTGPRGTSLECTVCDPVTATETRLGTKARQLNDASIQTSALSNKTLTHGPQPLTKSVSLDSGFSSICPMGTCHAIPAHCCICCHHHPHCHGERQSPGPEPSVCRHCLCSLTGHQEAQFMTTLKALQDTTVRELCSCTVHEMEAMKTICQSFREYLEEIEQHLMGQQALFSRDMSEEEREEAEQLQTLREALRQQVAELEFQLGDRAQQIREGILLQLEVLTAEPPEHYSNLHQYNWIEESNGQTSCSKIHPGMAPRTVFPPDDGQEAPCSGGTQLAAFTPPTLENSTRMSPSSSAWAKLGPTPLSNCPVGEKDADVFL

SEQ ID NO: 2099 - protein, 952 aa, Homo Sapiens
MVQMTVKDYMRSLHQFSETPILSRGTSFNSCYSTASVPQSIPEWLEFWEIDPVEILLDLGFGADEPDICMQIPARFLGCGSAARGINIRVFLEAQKQRMDIENPNLYGRFRQLEILDHVTNAFSSLLSDVSILPNRAEEKAGGESVQRTSVSAAKEHRRRMGKLLRRASKQNIRRDCNPEVSESFKVKDEVFVPFTKPWDCGAELAATSINHKQNHLSLSVEHQSLQACDDLLPYPPHGLLSKQWPCSSMPAKQAPPSCVSEGSVKGRTQKENLFQTNKLKSLSHLAGKGPDSFEMEEVQSFEEETGNPLDMTSGTVGARVDRANSCQSDSSGFLEEPLEPLPLQMPSLPNSQSPAENGGRKPRDQSHSLVSSQDCQLESDGPDSKSRASMSFSSQEANALEQRASVSVMEEEFLLEAMEGPPELYIPDMACAKTTTRGECPRKDSHLWQLLPMPHAEYEVTRPTATSKYDHPLGFMVTHVTEMQDSFVRPEGAGKVQSHHNESQRSPGNDHTQDKFLHVDSEAPREEESSGFCPHTNHSLLVPESSSQCIPKHSEITPYATDLAQTSEKLIPHLHKLPGDPAQVKSRSGTLGQILPGTEAEMENLPLNTGSSRSVMTQMSSSLVSAAQRAVALGTGPRGTSLECTVCDPVTATETRLGTKARQLNDASIQTSALSNKTLTHGPQPLTKSVSLDSGFSSICPMGTCHAIPAHCCICCHHHPHCHGERQSPGPEPSVCRHCLCSLTGHQEAQFMTTLKALQDTTVRELCSCTVHEMEAMKTICQSFREYLEEIEQHLMGQQALFSRDMSEEEREEAEQLQTLREALRQQVAELEFQLGDRAQQIREGILLQLEVLTAEPPEHYSNLHQYNWIEESNGQTSCSKIHPGMAPRTVFPPDDGQEAPCSGGTQLAAFTPPTLENSTRMSPSSSAWAKLGPTPLSNCPVGEKDADVFL

SEQ ID NO: 2100 - protein, 116 aa, Homo Sapiens
MDLLQFLAFLFVLLLSGMGATGTLRTSLDPSLEIYKKMFEVKRREQLLALKNLAQLNDIHQQYKILDVMLKGLFKFIPSTDPFQKALREEEKRRKKEEKRKEIRKGPRISRSQSEL

SEQ ID NO: 2101 - protein, 229 aa, Homo Sapiens
MDLLQFLAFLFVLLLSGMGATGTLRTSLDPSLEIYKKMFEVKRREQLLALKNLAQLNDIHQQYKILDVMLKGLFKVLEDSRTVLTAADVLPDGPFPQDEKLKDAFSHVVENTAFFGDVVLRFPRIVHYYFDHNSNWNLLIRWGISFCNQTGVFNQGPHSPILSLMAQELGISEKDSNFQNPFKIDRTEFIPSTDPFQKALREEEKRRKKEEKRKEIRKGPRISRSQSEL

SEQ ID NO: 2102 - protein, 141 aa, Homo Sapiens
MEEEAMNGDRTESDWQGLVSEYLVCKRKLESKKEALLILSKELDTCQQERDQYKLMANQLRERHQSLKKKYRELIDGDPSLPPEKRKQANLAQLLRDSQDRNKHLGEEIKELQQRLGEVQGDNKGRLRSKKKMKVVPLLRR

SEQ ID NO: 2103 - protein, 529 aa, Homo Sapiens
MEEEAMNGDRTESDWQGLVSEYLVCKRKLESKKEALLILSKELDTCQQERDQYKLMANQLRERHQSLKKKYRELIDGDPSLPPEKRKQANLAQLLRDSQDRNKHLGEEIKELQQRLGEVQGDNKLLRMTIAKQRLGDEAIGVRHFAAHEREDLVQQLERAKEQIESLEHDLQASVDELQDVKEERSSYQDKVERLNQELNHILSGHENRIIDVDALCMENRYLQERLKQLHEEVNLLKSNIAKYKNALERRKNSKGQGKSSSSALTGVLSAKQVQDLLSEDHGCSLPATPQSISDLKSLATALLETIHEKNMVIQHQRQTNKILGNRVAELEKKLRTLEVSGLWSLPGGKDTILFSDPTLPSGQRSRSPLLKFVEQPTENKADPKDGEAQKQEEDESCAAAEALTAPEDAGRPAVNSPANQSRGNQCKLFHPSLPQLPSEEEVNSLGREIIKLTKEQAAAELEEVRRESPIEGQRSETGPAPPGLAIQGELPKSHLDSFEASRPAAKASTPEDGKGIPEGGGMRSTVKT

SEQ ID NO: 2104 - protein, 540 aa, Homo Sapiens
MEEEAMNGDRTESDWQGLVSEYLVCKRKLESKKEALLILSKELDTCQQERDQYKLMANQLRERHQSLKKKYRELIDGDPSLPPEKRKQANLAQLLRDSQDRNKHLGEEIKELQQRLGEVQGDNKLLRMTIAKQRLGDEAIGVRHFAAHEREDLVQQLERAKEQIESLEHDLQASVDELQDVKEERSSYQDKVERLNQELNHILSGHENRIIDVDALCMENRYLQERLKQLHEEVNLLKSNIAKYKNALERRKNSKGQGKSSSSALTGVLSAKQVQDLLSEDHGCSLPATPQSISDLKSLATALLETIHEKNMVIQHQRQTNKILGNRVAELEKKLRTLEVSGLWSLPGLSYNVSVGFGRGKDTILFSDPTLPSGQRSRSPLLKFVEQPTENKADPKDGEAQKQEEDESCAAAEALTAPEDAGRPAVNSPANQSRGNQCKLFHPSLPQLPSEEEVNSLGREIIKLTKEQAAAELEEVRRESPIEGQRSETGPAPPGLAIQGELPKSHLDSFEASRPAAKASTPEDGKGIPEGGGMRSTVKT

SEQ ID NO: 2105 - protein, 529 aa, Homo Sapiens
MVVIVVVIIIIIARAATWDSEYLVCKRKLESKKEALLILSKELDTCQQERDQYKLMANQLRERHQSLKKKYRELIDGDPSLPPEKRKQANLAQLLRDSQDRNKHLGEEIKELQQRLGEVQGDNKLLRMTIAKQRLGDEAIGVRHFAAHEREDLVQQLERAKEQIESLEHDLQASVDELQDVKEERSSYQDKVERLNQELNHILSGHENRIIDVDALCMENRYLQERLKQLHEEVNLLKSNIAKYKNALERRKNSKGQGKSSSSALTGVLSAKQVQDLLSEDHGCSLPATPQSISDLKSLATALLETIHEKNMVIQHQRQTNKILGNRVAELEKKLRTLEVSGLWSLPGGKDTILFSDPTLPSGQRSRSPLLKFVEQPTENKADPKDGEAQKQEEDESCAAAEALTAPEDAGRPAVNSPANQSRGNQCKLFHPSLPQLPSEEEVNSLGREIIKLTKEQAAAELEEVRRESPIEGQRSETGPAPPGLAIQGELPKSHLDSFEASRPAAKASTPEDGKGIPEGGGMRSTVKT

SEQ ID NO: 2106 - protein, 145 aa, Homo Sapiens
MDENYNLLPHGVNFQDAIFPDTQENRRMFSSLFQFSNCSQGQQLATFSSDWEIQEDSRLMCSSVQKALFEEEDHVKKLQQKVATLEKRNRQLRERVKKVKRSLRQARKKGRHLELANQKLSEKLAAGALPHINARGPVRPPYLRG

SEQ ID NO: 2107 - protein, 270 aa, Homo Sapiens
MLRQLLLAALCLAGPPAPARACQLPSEWRPLSEGCRAELAETIVYARVLALHPEAPGLYNHLPWQYHAGQGGLFYSAEVEMLCDQAWGSMLEVPAGSRLNLTGLGYFSCHSHTVVQDYSYFFFLRMDENYNLLPHGVNFQDAIFPDTQENRRMFSSLFQFSNCSQGQQLATFSSDWEIQEDSRLMCSSVQKALFEEEDHVKKLQQKVATLEKRNRQLRERVKKVKRSLRQARKKGRHLELANQKLSEKLAAGALPHINARGPVRPPYLRG

SEQ ID NO: 2108 - protein, 212 aa, Homo Sapiens
MALRSMGQFSVFFFFFFWAQKKIASLSHSGFLHWFLLFEAVSSNGVLLFFSRFRWRRRLLVISAPNDEDWAYSQQLSALSGQACNFGLRHITILKLLGVGEEVGGVLELFPINGSSVVEREDVPAHLVKDIRNYFQVSPEYFSMLLVGKDGNVKSWYPSPMWSMVIVYDLIDSMQLRRQEMAIQQSLGMRCPEDEYAGYGYHSYHQGYQDGY

SEQ ID NO: 2109 - protein, 950 aa, Homo Sapiens
MTWRMGPRFTMLLAMWLVCGSEPHPHATIRGSHGGRKVPLVSPDSSRPARFLRHTGRSRGIERSTLEEPNLQPLQRRRSVPVLRLARPTEPPARSDINGAAVRPEQRPAARGSPREMIRDEGSSARSRMLRFPSGSSSPNILASFAGKNRVWVISAPHASEGYYRLMMSLLKDDVYCELAERHIQQIVLFHQAGEEGGKVRRITSEGQILEQPLDPSLIPKLMSFLKLEKGKFGMVLLKKTLQVEERYPYPVRLEAMYEVIDQGPIRRIEKIRQKGFVQKCKASGVEGQVVAEGNDGGGGAGRPSLGSEKKKEDPRRAQVPPTRESRVKVLRKLAATAPALPQPPSTPRATTLPPAPATTVTRSTSRAVTVAARPMTTTAFPTTQRPWTPSPSHRPPTTTEVITARRPSVSENLYPPSRKDQHRERPQTTRRPSKATSLESFTNAPPTTISEPSTRAAGPGRFRDNRMDRREHGHRDPNVVPGPPKPAKEKPPKKKAQDKILSNEYEEKYDLSRPTASQLEDELQVGNVPLKKAKESKKHEKLEKPEKEKKKKMKNENADKLLKSEKQMKKSEKKSKQEKEKSKKKKGGKTEQDGYQKPTNKHFTQSPKKSVADLLGSFEGKRRLLLITAPKAENNMYVQQRDEYLESFCKMATRKISVITIFGPVNNSTMKIDHFQLDNEKPMRVVDDEDLVDQRLISELRKEYGMTYNDFFMVLTDVDLRVKQYYEVPITMKSVFDLIDTFQSRIKDMEKQKKEGIVCKEDKKQSLENFLSRFRWRRRLLVISAPNDEDWAYSQQLSALSGQACNFGLRHITILKLLGVGEEVGGVLELFPINGSSVVEREDVPAHLVKDIRNYFQVSPEYFSMLLVGKDGNVKSWYPSPMWSMVIVYDLIDSMQLRRQEMAIQQSLGMRCPEDEYAGYGYHSYHQGYQDGYQDDYRHHESYHHGYPY

SEQ ID NO: 2110 - protein, 950 aa, Homo Sapiens; identical to SEQ ID NO: 2109

SEQ ID NO: 2111 - protein, 261 aa, Homo Sapiens
  misc_feature (1)..(1): Xaa can be any naturally occurring amino acid
XFTQSPKKSVADLLGSFEGKRRLLLITAPKAENNMYVQQRDEYLESFCKMATRKISVITIFGPVNNSTMKIDHFQLDNEKPMRVVDDEDLVDQRLISELRKEYGMTYNDFFMVLTDVDLRVKQYYEVPITMKSVFDLIDTFQSRIKDMEKQKKEGIVCKEDKKQSLENFLSRFRWRRRLLVISAPNDEDWAYSQQLSALSGQACNFGSSVVEREDVPAHLVKDIRNYFQVSPEYFSMLLVGKDGNVKSWYPSPMWSMVIVY

SEQ ID NO: 2112 - protein, 553 aa, Homo Sapiens
MSKAAGGAAAAAAAAESCSPAPAGSSAAPPAPVEDLSKVSDEELLQWSKEELIRSLRRAEAEKVSAMLDHSNLIREVNRRLQLHLGEIRGLKDINQKLQEDNQELRDLCCFLDDDRQKGKRVSREWQRLGRYTAGVMHKEVALYLQKLKDLEVKQEEVVKENMELKELCVLLDEEKGAGCAGSRCSIDSQASLCQLTASTAPYVRDVGDGSSTSSTGSTDSPDHHKHHASSGSPEHLQKPRSEGSPEHSKHRSASPEHPQKPRACGTPDRPKALKGPSPEHHKPLCKGSPEQQRHPHPGSSPETLPKHVLSGSPEHFQKHRSGSSPEHARHSGGSPEHLQKHALGGSLEHLPRARGTSPEHLKQHYGGSPDHKHGGGSGGSGGSGGGSREGTLRRQAQEDGSPHHRNVYSGMNESTLSYVRQLEARVRQLEEENRMLPQASQNRRQPPTRNSSNMEKGWGSRARRVLQWWQGCRGIGRCLPTLPGSFRLSSGADGSNSSPNSAASFSGHATPSQQPEPVVHSLKVVWRKLGDAAGSCPGIRQHLSGNQYKGPM

SEQ ID NO: 2113 - protein, 712 aa, Homo Sapiens
MAGVAAHRAHPPFTAHMKNRGLREELEKAVVRGKELGDRLEHLQRELEQAALERQEFLREKESQHQRYQGLEQRLEAELQAAATSKEEALMELKTRALQLEEELFQLRQGPAGLGPKKRAEPQLVETQNVRLIEVERSNAMLVAEKAALQGQLQHLEGQLGSLQGRAQELLLQSQRAQEHSSRLQAEKSVLEIQGQELHRKLEVLEEEVRAARQSQEETRGQQQALLRDHKALAQLQRRQEAELEGLLVRHRDLKANMRALELAHRELQGRHEQLQAQRASVEAQEVALLAERERLMQDGHRQRGLEEELRRLQSEHDRAQMLLAELSRERGELQGERGELRGRLARLELERAQLEMQSQQLRESNQQLDLSACRLTTQCELLTQLRSAQEEENRQLLAEVQALSRENRELLERSLESRDHLHREQREYLDQLNALRREKQKLVEKIMDQYRVLEPVPLPRTKKGSWLADKGPLPRHPCAGPRAPSACGMRPWQAGSGGNSAQGSRWGEALSHSALGTPLGNDSDSAIQAPWGRPSPTAKDLVWDGRTPLRPCRNTKQMPTERALRYRNRRNVPSPHPSASDTVGTAGLGVQPSRHWSVSGGPRQPKSSGSQGPQGESLDKEAWALRSSTVSAGARRWSWDECVDRGDGWPPRAAPGWSSGSSRWLPLRQRSLGDPPAEGGWQELAREPPALSRWEAESQCWGTVAWADLEP

SEQ ID NO: 2114 - protein, 1476 aa, Homo Sapiens
MEGGKGPRLRDFLSGSLATWALGLAGLVGEAEDSEGEEEEEEEEPPLWLEKRFLRLSDGALLLRVLGIIAPSSRGGPRMLRGLDGPAAWRVWNLNHLWGRLRDFYQEELQLLILSPPPDLQTLGFDPLSEEAVEQLEGVLRLLLGASVQCEHRELFIRHIQGLSLEVQSELAAAIQEVTQPGAGVVLALSGPDPGELAPAELEMLSRSLMGTLSKLARERDLGAQRLAELLLEREPLCLRPEAPSRAPAEGPSHHLALQLANAKAQLRRLRQELEEKAELLLDSQAEVQGLEAEIRRLRQEAQALSGQAKRAELYREEAEALRERAGRLPRLQEELRRCRERLQAAEAYKSQLEEERVLSGVLEASKALLEEQLEAARERCARLHETQRENLLLRTRLGEAHAELDSLRHQVDQLAEENVELELELQRSLEPPPGSPGEAPLAGAAPSLQDEVREAEAGRLRTLERENRELRGLLQVLQGQPGGQHPLLEAPREDPVLPVLEEAPQTPVAFDHSPQGLVQKARDGGPQALDLAPPALDSVLEASAECPQAPDSDPQEAESPLQAAAMDPQASDWSPQESGSPVETQESPEKAGRRSSLQSPASVAPPQGPGTKIQAPQLLGGETEGREAPQGELVPEAWGLRQEGPEHKPGPSEPSSVQLEEQEGPNQGLDLATGQAEAREHDQRLEGTVRDPAWQKPQQKSEGALEVQVWEGPIPGESLASGVAEQEALREEVAQLRRKAEALGDELEAQARKLEAQNTEAARLSKELAQARRAEAEAHREAEAQAWEQARLREAVEAAGQELESASQEREALVEALAAAGRERRQWEREGSRLRAQSEAAEERMQVLESEGRQHLEEAERERREKEALQAELEKAVVRGKELGDRLEHLQRELEQAALERQEFLREKESQHQRYQGLEQRLEAELQAAATSKEEALMELKTRALQLEEELFQLRQGPAGLGPKKRAEPQLVETQNVRLIEVERSNAMLVAEKAALQGQLQHLEGQLGSLQGRAQELLLQSQRAQEHSSRLQAEKSVLEIQGQELHRKLEVLEEEVRAARQSQEETRGQQQALLRDHKALAQLQRRQEAELEGLLVRHRDLKANMRALELAHRELQGRHEQLQAQRASVEAQEVALLAERERLMQDGHRQRGLEEELRRLQSEHDRAQMLLAELSRERGELQGERGELRGRLARLELERAQLEMQSQQLRESNQQLDLSACRLTTQCELLTQLRSAQEEENRQLLAEVQALSRENRELLERSLESRDHLHREQREYLDQLNALRREKQKLVEKIMDQYRVLEPVPLPRTKKGSWLADKVKRLMRPRREGGPPGGLRLGADGAGSTESLGGPPETELPEGREADGTGSPSPAPMRRAQSSLCLRDETLAGGQRRKLSSRFPVGRSSESFSPGDTPRQRFRQRHPGPLGAPVSHSKGPGVGWENSAETLQEHETDANREGPEVQEPEKRPLTPSLSQ

SEQ ID NO: 2115 - protein, 139 aa, Homo Sapiens
MPCAARSRSSWRRSWTNTACWSLCPCPGPRSPSPAPMRRAQSSLCLRDETLAGGQRRKLSSRFPVGRSSESFSPGDTPRQRFRQRHPGPLGAPVSHSKGPGVGWENSAETLQEHETDANREGPEVQEPEKRPLTPSLSQ

SEQ ID NO: 2116 - protein, 122 aa, Homo Sapiens
EDEEEEKEERKRGPMETFEDLWQRHLENGGDLQKRVAEKASDKETAQFQAEEKGVRVLGGDRSLWQGAERGGGERREDLPHHHHHHHQPEAEPRQEKEEASEREEKEVEQLEHLRDELKKDC

SEQ ID NO: 2117 - protein, 266 aa, Homo Sapiens
MPPRGPASELLLLRLLLLGAATAAPLAPRPSKEELTRCLAEVVTEVLTVGQVQRGPCTALLHKELCGTEPHGCASTEEKGLLLGDFKKQEAGKMRSSQEVRDEEEEEVAERTHKSEVQEQAIRMQGHRQLHQEEDEEEEKEERKRGPMETFEDLWQRHLENGGDLQKRVAEKASDKETAQFQAEEKGVRVLGGDRSLWQGAERGGGERREDLPHHHHHHHQPEAEPRQEKEEASEREEKEVEQLEHLRDELKKVTETLGEQLRREG

SEQ ID NO: 2118 - protein, 115 aa, Homo Sapiens
MNSGVCLCVLMAVLAAGALTQPVPPADPAGSGLQRAEEAPRRQLRVSQRTDGESRAHLGALLARYIQQARKAPSGRMSIVKNLQNLDPSHRISDRDYMGWMDFGRRSAEEYEYPS

SEQ ID NO: 2119 - protein, 115 aa, Homo Sapiens; identical to SEQ ID NO: 2118

SEQ ID NO: 2120 - protein, 115 aa, Homo Sapiens; identical to SEQ ID NO: 2118

SEQ ID NO: 2121 - protein, 96 aa, Homo Sapiens
MQIITTALVCLLLAGMWPEDVDSKSMQVPFSRCCFSFAEQEIPLRAILCYRNTSSICSNEGLIFKLKRGKEACALDTVGWVQRHRKMLRHCPSKRK

SEQ ID NO: 2122 - protein, 97 aa, Homo Sapiens
MKVSAALLWLLLIAAAFSPQGLAGPASVPTTCCFNLANRKIPLQRLESYRRITSGKCPQKAVIFKTKLAKDICADPKKKWVQDSMKYLDQKSPTPKP

SEQ ID NO: 2123 - protein, 98 aa, Homo Sapiens
MKVSAVLLCLLLMTAAFNPQGLAQPDALNVPSTCCFTFSSKKISLQRLKSYVITTSRCPQKAVIFRTKLGKEICADPKEKWVQNYMKHLGRKAHTLKT

SEQ ID NO: 2124 - protein, 63 aa, Homo Sapiens
  misc_feature (1)..(1): Xaa can be any naturally occurring amino acid
XVPSTCCFTFSSKKISLQRLKSYVITTSSFRTKLGKEICADPKEKWVQNYMKHLGRKAHTLKT

SEQ ID NO: 2125 - protein, 109 aa, Homo Sapiens
MKISVAAIPFFLLITIALGTKTESSSQTGGKPKVVKIQLKLVGGPYHPSECCFTYTTYKIPRQRIMDYYETNSQCSKPGIVFITKRGHSVCTNPSDKWVQDYIKDMKEN

SEQ ID NO: 2126 - protein, 65 aa, Homo Sapiens
MKISVAAIPFFLLITIALGTKTESSSRGPYHPSECCFTYTTYKIPRQRIMDYYETNSQCSKPGIV

SEQ ID NO: 2127 - protein, 93 aa, Homo Sapiens
MKISVAAIPFFLLITIALGTKTESSSRGPYHPSECCFTYTTYKIPRQRIMDYYETNSQCSKPGIVFITKRGHSVCTNPSDKWVQDYIKDMKEN

SEQ ID NO: 2128 - protein, 115 aa, Homo Sapiens
MRKAYSPLQVLRGCLLLPSLLHALSLQEQPMVWPLTRGPSSASDALSSGGPYHPSECCFTYTTYKIPRQRIMDYYETNSQCSKPGIVFITKRGHSVCTNPSDKWVQDYIKDMKEN

SEQ ID NO: 2129 - protein, 113 aa, Homo Sapiens
MKVSVAALSCLMLVAVLGSQAQFTNDAETELMMSKLPLENPVVLNSFHFAADCCTSYISQSIPCSLMKSYFETSSECSKPGVIFLTKKGRQVCAKPSGPGVQDCMKKLKPYSI

SEQ ID NO: 2130 - protein, 61 aa, Homo Sapiens
  misc_feature (1)..(1): Xaa can be any naturally occurring amino acid
XCTSYISQSIPCSLMKSYFETSSECSKPGVIFLTKKGRQVCAKPSGPGVQDCMKKLKPYSI

SEQ ID NO: 2131 - protein, 120 aa, Homo Sapiens
MKVSEAALSLLVLILIITSASRSQPKVPEWVNTPSTCCLKYYEKVLPRRLVVGYRKALNCHLPAIIFVTKRNREVCTNPNDDWVQEYIKDPNLPLLPTRNLSTVKIITAKNGQPQLLNSQ

SEQ ID NO: 2132 - protein, 53 aa, Homo Sapiens
MKVSEAALSLLVLILIITSASRSQPSWSAVSRSRLTTTSASRVQVILLPQPPE

SEQ ID NO: 2133 - protein, 95 aa, Homo Sapiens
  misc_feature (1)..(1): Xaa can be any naturally occurring amino acid
XVPEWVNTPSTCCLKYYEKVLPRRLVVGYRKALNCHLPAIIFVTKRNREVCTNPNDDWVQEYIKDPNLPLLPTRNLSTVKIITAKNGQPQLLNSQ

SEQ ID NO: 2134 - protein, 94 aa, Homo Sapiens
MAPLKMLALVTLLLGASLQHIHAARGTNVGRECCLEYFKGAIPLRKLKTWYQTSEDCSRDAIVFVTVQGRAICSDPNNKRVKNAVKYLQSLERS

SEQ ID NO: 2135 - protein, 94 aa, Homo Sapiens; identical to SEQ ID NO: 2134

SEQ ID NO: 2136 - protein, 89 aa, Homo Sapiens
MKGLAAALLVLVCTMALCSCAQVGTNKELCCLVYTSWQIPQKFIVDYSETSPQCPKPGVILLTKRGRQICADPNKKWVQKYISDLKLNA

SEQ ID NO: 2137 - protein, 104 aa, Homo Sapiens
MALLLALSLLVLWTSPAPTLSGTNDAEDCCLSVTQKPIPGYIVRNFHYLLIKDGCRVPAVVFTTLRGRQLCAPPDQPWVERIIQRLQRTSAKASLALPGPVSSL

SEQ ID NO: 2138 - protein, 98 aa, Homo Sapiens
MALLLALSLLVLWTSPAPTLSGTNDAEDCCLSVTQKPIPGYIVRNFHYLLIKDGCRVPAVVFTTLRGRQLCAPPDQPWVERIIQRLQRTSAKMKRRSS

SEQ ID NO: 2139 - protein, 99 aa, Homo Sapiens
MKVSAALLCLLLIAATFIPQGLAQPDAINAPVTCCYNFTNRKISVQRLASYRRITSSKCPKEAVIFKTIVAKEICADPKQKWVQDSMDHLDKQTQTPKT

SEQ ID NO: 2140 - protein, 65 aa, Homo Sapiens
MKVSAALLCLLLIAATFIPQGLAQPDAINAPVTCCYNFTNRKISVQRLASYRRITSSKCPKEAVM

SEQ ID NO: 2141 - protein, 25 aa, Homo Sapiens
MCCTKSLLLAALMSVLLLHLCGESE

SEQ ID NO: 2142 - protein, 96 aa, Homo Sapiens
MCCTKSLLLAALMSVLLLHLCGESEAASNFDCCLGYTDRILHPKFIVGFTRQLANEGCDINAIIFHTKKKLSVCANPKQTWVKYIVRLLSKKVKNM

SEQ ID NO: 2143 - protein, 95 aa, Homo Sapiens
MCCTKSLLLAALMSVLLLHLCGESEASNFDCCLGYTDRILHPKFIVGFTRQLANEGCDINAIIFHTKKKLSVCANPKQTWVKYIVRLLSKKVKNM

SEQ ID NO: 2144 - protein, 124 aa, Homo Sapiens
MAQSLALSLLILVLAFGIPRTQGSDGGAQDCCLKYSQRKIPAKVVRSYRKQEPSLGCSIPAILFLPRKRSQAELCADPKELWVQQLMQHLDKTPSPQKPAQGCRKDRGASKTGKKGKGSKGCKR

SEQ ID NO: 2145 - protein, 134 aa, Homo Sapiens
MAQSLALSLLILVLAFGIPRTQGSDGGAQDCCLKYSQRKIPAKVVRSYRKQEPSLGCSIPAILFLPRKRSQAELCADPKELWVQQLMQHLDKTPSPQKPAQGCRKDRGASKTGKKGKGSKGCKRTERSQTPKGP

SEQ ID NO: 2146 - protein, 93 aa, Homo Sapiens
MDRLQTALLVVLVLLAVALQATEAGPYGANMEDSVCCRDYVRYRLPLRVVKHFYWTSDSCPRPGVVLLTFRDKEICADPRVPWVKMILNKLSQ

SEQ ID NO: 2147 - protein, 13 aa, Homo Sapiens
FETNSECSKPGVM

SEQ ID NO: 2148 - protein, 137 aa, Homo Sapiens
MKVSVAALSCLMLVTALGSQARVTKDAETEFMMSKLPLENPVLLDMLWRRKIGPQMTLSHAAGFHATSADCCISYTPRSIPCSLLESYFETNSECSKPGVIFLTKKGRRFCANPSDKQVQVCMRMLKLDTRIKTRKN

SEQ ID NO: 2149 - protein, 120 aa, Homo Sapiens
MKVSVAALSCLMLVTALGSQARVTKDAETEFMMSKLPLENPVLLDRFHATSADCCISYTPRSIPCSLLESYFETNSECSKPGVIFLTKKGRRFCANPSDKQVQVCMRMLKLDTRIKTRKN

SEQ ID NO: 2150 - protein, 119 aa, Homo Sapiens
MAGLMTIVTSLLFLGVCAHHIIPTGSVVIPSPCCMFFVSKRIPENRVVSYQLSSRSTCLKAGVIFTTKKGQQFCGDPKQEWVQRYMKNLDAKQKKASPRARAVAVKGPVQRYPGNQTTC

SEQ ID NO: 2151 - protein, 119 aa, Homo Sapiens; identical to SEQ ID NO: 2150

SEQ ID NO: 2152 - protein, 150 aa, Homo Sapiens
MNLWLLACLVAGFLGAWAPAVHTQGVFEDCCLAYHYPIGWAVLRRAWTYRIQEVSGSCNLPAAIFYLPKRHRKVCGNPKSREVQRAMKLLDARNKVFAKLHHNTQTFQAGPHAVKKLSSGNSKLSSSKFSNPISSSKRNVSLLISANSGK

SEQ ID NO: 2153 - protein, 150 aa, Homo Sapiens
MNLWLLACLVAGFLGAWAPAVHTQGVFEDCCLAYHYPIGWAVLRRAWTYRIQEVSGSCNLPAAIFYLPKRHRKVCGNPKSREVQRAMKLLDARNKVFAKLHHNTQTFQAGPHAVKKLSSGNSKLSSSKFSNPISSSKRNVSLLISANSGL

SEQ ID NO: 2154 - protein, 149 aa, Homo Sapiens
MNLWLLACLVAGFLGAWAPAVHTQGVFEDCCLAYHYPIGWAVLRRAWTYRIQEVSGSCNLPAAIFYLPKRHRKVCGNPKSREVQRAMKLLDARNKVFAKLHHNTQTFQGPHAVKKLSSGNSKLSSSKFSNPISSSKRNVSLLISANSGL

SEQ ID NO: 2155 - protein, 84 aa, Homo Sapiens
MNLWLLACLVAGFLGAWAPAVHTQGVFEDCCLAYHYPIGWAVLRRAWTYRIQEVSGSCNLPAAIRPSCCKEVEFWKLQVIIVQV

SEQ ID NO: 2156 - protein, 94 aa, Homo Sapiens
MMGLSLASAVLLASLLSLHLGTATRGSDISKTCCFQYSHKPLPWTWVRSYEFTSNSCSQRAVIFTTKRGKKVCTHPRKKWVQKYISLLKTPKQL

SEQ ID NO: 2157 - protein, 94 aa, Homo Sapiens; identical to SEQ ID NO: 2156

SEQ ID NO: 2158 - protein, 112 aa, Homo Sapiens
MKGPPTFCSLLLLSLLLSPDPTAAFLLPPSTACCTQLYRKPLSDKLLRKVIQVELQEADGDCHLQAFVLHLAQRSICIHPQNPSLSQWFEHQERKLHGTLPKLNFGMLRKMG

SEQ ID NO: 2159 - protein, 80 aa, Homo Sapiens
MCRIQRADGDCDLAAVILHVKRRRICVSPHNHTVKQWMKVQAAKKNGKGNVCHRKKHHGKRNSNRAHQGKHETYGHKTPY

SEQ ID NO: 2160 - protein, 127 aa, Homo Sapiens
MQQRGLAIVALAVCAALHASEAILPIASSCCTEVSHHISRRLLERVNMCRIQRADGDCDLAAVILHVKRRRICVSPHNHTVKQWMKVQAAKKNGKGNVCHRKKHHGKRNSNRAHQGKHETYGHKTPY

SEQ ID NO: 2161 - protein, 127 aa, Homo Sapiens; identical to SEQ ID NO: 2160

SEQ ID NO: 2162 - protein, 92 aa, Homo Sapiens
MQVSTAALAVLLCTMALCNQFSASLAADTPTACCFSYTSRQIPQNFIADYFETSSQCSKPGVIFLTKRSRQVCADPSEEWVQKYVSDLELSA

SEQ ID NO: 2163 - protein, 93 aa, Homo Sapiens
MQVSTAALAVLLCTMALCNQVLSAPLAADTPTACCFSYTSRQIPQNFIADYFETSSQCSKPSVIFLTKRGRQVCADPSEEWVQKYVSDLELSA

SEQ ID NO: 2164 - protein, 92 aa, Homo Sapiens
MKLCVTVLSLLMLVAAFCSPALSAPMGSDPPTACCFSYTARKLPRNFVVDYYETSSLCSQPAVVFQTKRSKQVCADPSESWVQEYVYDLELN

SEQ ID NO: 2165 - protein, 52 aa, Homo Sapiens
MKLCVTVLSLLMLVAAFCSPALSAPNSKPKEASKSVLIPVNPGSRSTCMTWN

SEQ ID NO: 2166 - protein, 47 aa, Homo Sapiens
MKLCVTVLSLLVLVAAFCSLALSAPKASKSALTPVSPGSRSTCMTWN

SEQ ID NO: 2167 - protein, 64 aa, Homo Sapiens
MKLCVTVLSLLVLVAAFCSLALSAPMGSDPPTACCFSYTARKLPRNFVVDYYETSSLCSQPAVV

SEQ ID NO: 2168 - protein, 64 aa, Homo Sapiens; identical to SEQ ID NO: 2167

SEQ ID NO: 2169 - protein, 96 aa, Homo Sapiens
MKLCVTVLSLLVLVAAFCSLALSAPMGSDPPTACCFSYTARKLPRNFVVDYYETSSLCSQPAVVAAPGRIPSTRAAPHGPWSGRGRCLPQARDKAR

SEQ ID NO: 2170 - protein, 86 aa, Homo Sapiens
MKLCVTVLSLLVLVAAFCSLALSAPMGSDPPTACCFSYTARKLPRNFVVDYYETSSLCSQPAVVAAPHGPWSGRGRCLPQARDKAR

SEQ ID NO: 2171 - protein, 103 aa, Homo Sapiens
MKLCVTVLSLLVLVAAFCSLALSAPMGSDPPTACCFSYTARKLPRNFVVDYYETSSLCSQPAVVEWKLQGVCFQCCSGKDPIHQSCPTWTMVRQRKMPTTGKG

SEQ ID NO: 2172 - protein, 92 aa, Homo Sapiens
MKLCVTVLSLLVLVAAFCSLALSAPMGSDPPTACCFSYTARKLPRNFVVDYYETSSLCSQPAVVFQTKRGKQVCADPSESWVQEYVYDLELN

SEQ ID NO: 2173 - protein, 87 aa, Homo Sapiens
MKLCVTVLSLLVLVAAFCSLALSAPMGSDPPTACCFSYTARKLPRNFVVDYYETSSLCSQPAVVGKQVCADPSESWVQEYVYDLELN

SEQ ID NO: 2174 - protein, 103 aa, Homo Sapiens
MKLCVTVLSLLVLVAAFCSLALSAPMGSDPPTACCFSYTARKLPRNFVVDYYETSSLCSQPAVVYRESASSAAPGRIPSTRAAPHGPWSGRGRCLPQARDKAR

SEQ ID NO: 2175 - protein, 68 aa, Homo Sapiens
MKLCVTVLSLLVLVAAFCSLALSAPTKSSEWKLQGVCFQCCSGKDPIHQSCPTWTMVRQRKMPTTGKG

SEQ ID NO: 2176 - protein, 91 aa, Homo Sapiens
MKVSAAALAVILIATALCAPASASPYSSDTTPCCFAYIARPLPRAHIKEYFYTSGKCSNPAVVFVTRKNRQVCANPEKKWVREYINSLEMS

SEQ ID NO: 2177 - protein, 91 aa, Homo Sapiens; identical to SEQ ID NO: 2176

SEQ ID NO: 2178 - protein, 150 aa, Homo Sapiens
  misc_feature (1)..(1): Xaa can be any naturally occurring amino acid
XAALAVILIATALCAPASASPYSSDTTPCCFAYIARPLPRAHIKEYFYTSGKCSNPAVVHRSRMPKREGQQVWQDFLYDSRLNKGKLCHPKEPPSVCQPREEMGSGVHQLFGDELGWRVLEPELTQICLFLLALVLAWEASPHYPTPPAP

SEQ ID NO: 2179 - protein, 47 aa, Homo Sapiens
MKASAALLCLLLTAAAFSPQGLAQPASRPNWTRRSVLTPHRSGSRTL

SEQ ID NO: 2180 - protein, 81 aa, Homo Sapiens
MKASAALLCLLLTAAAFSPQGLAQPERPRTHPQWTFLLVVSLQLGLILQLPAATDLSIRKSLSRGWRATEGPPVATVPGKL

SEQ ID NO: 2181 - protein, 99 aa, Homo Sapiens
MKASAALLCLLLTAAAFSPQGLAQPVGINTSTTCCYRFINKKIPKQRLESYRRTTSSHCPREAVIFKTKLDKEICADPTQKWVQDFMKHLDKKTQTPKL

SEQ ID NO: 2182 - protein, 99 aa, Homo Sapiens
MKVSAALLCLLLMAATFSPQGLAQPDSVSIPITCCFNVINRKIPIQRLESYTRITNIQCPKEAVIFKTKRGKEVCADPKERWVRDSMKHLDQIFQNLKP

SEQ ID NO: 2183 - protein, 68 aa, Homo Sapiens [sequence omitted]

SEQ ID NO: 2184 - protein, 4 aa, Homo Sapiens
MSLC

SEQ ID NO: 2185 - protein, 154 aa, Homo Sapiens
MSLCEDMLLCNYRKCRIKLSGYAWVTACSHIFCDQHGSGEFSRSPAICPACNSTLSGKLDIVRTELSPSEEYKAMVLAGLRPEIVLDISSRALAFWTYQVHQERLYQEYNFSKAEGHLKQMEKIYTQQIQSKDVELTSMKGEVTSMKKVLEEYK

SEQ ID NO: 2186 - protein, 277 aa, Homo Sapiens
MSLCEDMLLCNYRKCRIKLSGYAWVTACSHIFCDQHGSGEFSRSPAICPACNSTLSGKLDIVRTELSPSEEYKAMVLAGLRPEIVLDISSRALAFWTYQVHQERLYQEYNFSKAEGHLKQMEKIYTQQIQSKDVELTSMKGEVTSMKKVLEEYKKKFSDISEKLMERNRQYQKLQGLYDSLRLRNITIANHEGTLEPSMIAQSGVLGFPLGNNSKFPLDNTPVRNRGDGDGDFQFRPFFAGSPTAPEPSNSFFSFVSPSRELEQQQVSSRAFKVKRI

SEQ ID NO: 2187 - protein, 277 aa, Homo Sapiens; identical to SEQ ID NO: 2186

SEQ ID NO: 2188 - protein, 277 aa, Homo Sapiens; identical to SEQ ID NO: 2186

SEQ ID NO: 2189 - protein, 277 aa, Homo Sapiens; identical to SEQ ID NO: 2186

SEQ ID NO: 2190 - protein, 277 aa, Homo Sapiens; identical to SEQ ID NO: 2186

SEQ ID NO: 2191 - protein, 277 aa, Homo Sapiens; identical to SEQ ID NO: 2186

SEQ ID NO: 2192 - protein, 102 aa, Homo Sapiens
MSLCEDMLLCNYRKCRIKLSGYAWVTACSHIFCDQHGSGEFSRSPAICPACNSTLSGKLDIVRTELSPSEEYKAMVLAGLRPEIVLDISSRALAFWTYQYFL

SEQ ID NO: 2193 - protein, 64 aa, Homo Sapiens
  misc_feature (1)..(1): Xaa can be any naturally occurring amino acid
XEFSRSPAICPACNSTLSGKLDIVRTELSPSEEYKAMVLAGLRPEIVLDISSRALAFWTYQYFL

SEQ ID NO: 2194 - protein, 31 aa, Homo Sapiens
  misc_feature (1)..(1): Xaa can be any naturally occurring amino acid
XTLAPERWPSGHIRLVSNSWVQAILPPQPPE

SEQ ID NO: 2195 - protein, 526 aa, Homo Sapiens
MASGPHSTATAAAAASSAAPSAGGSSSGTTTTTTTTTGGILIGDRLYSEVSLTIDHSLIPEERLSPTPSMQDGLDLPSETDLRILGCELIQAAGILLRLPQVAMATGQVLFHRFFYSKSFVKHSFEIVAMACINLASKIEEAPRRIRDVINVFHHLRQLRGKRTPSPLILDQNYINTKNQVIKAERRVLKELGFCVHVKHPHKIIVMYLQVLECERNQTLVQTAWNYMNDSLRTNVFVRFQPETIACACIYLAARALQIPLPTRPHWFLLFGTTEEEIQEICIETLRLYTRKKPNYELLEKEVEKRKVALQEAKLKAKGLNPDGTPALSTLGGFSPASKPSSPREVKAEEKSPISINVKTVKKEPEDRQQASKSPYNGVRKDSKRSRNSRSASRSRSRTRSRSRSHTPRRHYNNRRSRSGTYSSRSRSRSRSHSESPRRHHNHGSPHLKAKHTRDDLKSSNRHGHKRKKSRSRSQSKSRDHSDAAKKHRHERGHHRDRRERSRSFERSHKSKHHGGSRSGHGRHRR

SEQ ID NO: 2196 - protein, 428 aa, Homo Sapiens
MASGPHSTATAAAAASSAAPSAGGSSSGTTTTTTTTTGGILIGDRLYSEVSLTIDHSLIPEERLSPTPSMQDGLDLPSETDLRILGCELIQAAGILLRLPQVAMATGQVLFHRFFYSKSFVKHSFEIVAMACINLASKIEEAPRRIRDVINVFHHLRQLRGKRTPSPLILDQNYINTKNQVIKAERRVLKELGFCVHVKHPHKIIVMYLQVLECERNQTLVQTAWNYMNDSLRTNVFVRFQPETIACACIYLAARALQIPLPTRPHWFLLFGTTEEEIQEICIETLRLYTRKKPNYELLEKEVEKRKVALQEAKLKAKGLNPDGTPALSTLGGFSPASKPSSPREVKAEEKSPISINVKTVKKEPEDRQQASKSPYNGVRKDSKRSRNSRSASRSRSRTRSRSRSHTPRRQDEVLLRCPGRSRTPGLK

SEQ ID NO: 2197 - protein, 232 aa, Homo Sapiens
MASGPHSTATAAAAASSAAPSAGGSSSGTTTTTTTTTGGILIGDRLYSEVSLTIDHSLIPEERLSPTPSMQDGLDLPSETDLRILGCELIQAAGILLRLPQVAMATGQVLFHRFFYSKSFVKHSFEIVAMACINLASKIEEAPRRIRDVINVFHHLRQLRGKRTPSPLILDQNYINTKNQVIKAERRVLKELGFCVHVKHPHKIIVMYLQVLECERNQTLVQTAWVVHDGKS

SEQ ID NO: 2198 - protein, 172 aa, Homo Sapiens
MASGPHSTATAAAAASSAAPSAGGSSSGTTTTTTTTTGGILIGDRLYSEVSLTIDHSLIPEERLSPTPSMQDGLDLPSETDLRILGCELIQAAGILLRLPQVAMATGQVLFHRFFYSKSFVKHSFEIVAMACINLASKIEEAPRRIRDVINVFHHLRQLRGKSDQLHLPKPG

SEQ ID NO: 2199 - protein, 172 aa, Homo Sapiens; identical to SEQ ID NO: 2198

SEQ ID NO: 2200 - protein, 172 aa, Homo Sapiens; identical to SEQ ID NO: 2198

SEQ ID NO: 2201 - protein, 172 aa, Homo Sapiens; identical to SEQ ID NO: 2198

SEQ ID NO: 2202 - protein, 172 aa, Homo Sapiens; identical to SEQ ID NO: 2198

SEQ ID NO: 2203 - protein, 59 aa, Homo Sapiens
  misc_feature (1)..(1): Xaa can be any naturally occurring amino acid
XRKKPNYELLEKEVEKRKVALQEAKLKAKGLNPDGTPALSTLGGFSPASKPCKMYLELK

SEQ ID NO: 2204 - protein, 520 aa, Homo Sapiens
MAAAAAAAGAAGSAAPAAAAGAPGSGGAPSGSQGVLIGDRLYSGVLITLENCLLPDDKLRFTPSMSSGLDTDTETDLRVVGCELIQAAGILLRLPQVAMATGQVLFQRFFYTKSFVKHSMEHVSMACVHLASKIEEAPRRIRDVINVFHRLRQLRDKKKPVPLLLDQDYVNLKNQIIKAERRVLKELGFCVHVKHPHKIIVMYLQVLECERNQHLVQTSWNYMNDSLRTDVFVRFQPESIACACIYLAARTLEIPLPNRPHWFLLFGATEEEIQEICLKILQLYARKKVDLTHLEGEVEKRKHAIEEAKAQARGLLPGGTQVLDGTSGFSPAPKLVESPKEGKGSKPSPLSVKNTKRRLEGAKKAKADSPVNGLPKGRESRSRSRSREQSYSRSPSRSASPKRRKSDSGSTSGGSKSQSRSRSRSDSPPRQAPRSAPYKGSEIRGSRKSKDCKYPQKPHKSRSRSSSRSRSRSRERADNPGKYKKKSHYYRDQRRERSRSYERTGRRYERDHPGHSRHRR

SEQ ID NO: 2205 - protein, 236 aa, Homo Sapiens
MAAAAAAAGAAGSAAPAAAAGAPGSGGAPSGSQGVLIGDRLYSGVLITLENCLLPDDKLRFTPSMSSGLDTDTETDLRVVGCELIQAAGILLRLPQVAMATGQVLFQRFFYTKSFVKHSMEHVSMACVHLASKIEEAPRRIRDVINVFHRLRQLRDKKKPVPLLLDQDYVNLKNQIIKAERRVLKELGFCVHVKHPHKIIVMYLQVLECERNQHLVQTSWVASEDPLLKWDSWQRL

SEQ ID NO: 2206 - protein, 227 aa, Homo Sapiens
MAAAAAAAGAAGSAAPAAAAGAPGSGGAPSGSQGVLIGDRLYSGVLITLENCLLPDDKLRFTPSMSSGLDTDTETDLRVVGCELIQAAGILLRLPQVAMATGQVLFQRFFYTKSFVKHSMEHVSMACVHLASKIEEAPRRIRDVINVFHRLRQLRDKKKPVPLLLDQDYVNLKNQIIKAERRVLKELGFCVHVKHPHKIIVMYLQVLECERNQHLVQTSWVASEGIT

SEQ ID NO: 2207 - protein, 226 aa, Homo Sapiens
MAAAAAAAGAAGSAAPAAAAGAPGSGGAPSGSQGVLIGDRLYSGVLITLENCLLPDDKLRFTPSMSSGLDTDTETDLRVVGCELIQAAGILLRLPQVAMATGQVLFQRFFYTKSFVKHSMEHVSMACVHLASKIEEAPRRIRDVINVFHRLRQLRDKKKPVPLLLDQDYVNLKNQIIKAERRVLKELGFCVHVKHPHKIIVMYLQVLECERNQHLVQTSWVASEGK

SEQ ID NO: 2208 - protein, 180 aa, Homo Sapiens
MAAAAAAAGAAGSAAPAAAAGAPGSGGAPSGSQGVLIGDRLYSGVLITLENCLLPDDKLRFTPSMSSGLDTDTETDLRVVGCELIQAAGILLRLPQVRARPRASGPGGHGYRAGVVPAVLLYQVLREALHGACVNGLCPPGFQDRRGPKTHTGRHQCVSPPSTAERQKEARASTTGSRLC

SEQ ID NO: 2209 - protein, 86 aa, Homo Sapiens
MATGQVLFQRFFYTKSFVKHSMEHVSMACVHLASKIEEAPRRIRDVINVFHRLRQLRDKKKPVPLLLDQDYVNLKNQIIKAERRVL

SEQ ID NO: 2210 - protein, 347 aa, Homo Sapiens [sequence omitted]

SEQ ID NO: 2211 - protein, 46 aa, Homo Sapiens
  misc_feature (1)..(1): Xaa can be any naturally occurring amino acid
XEEAPRRIRDVINVFHRLRQLRDKKPCALSLAGSPCLYYWIKIMLI

SEQ ID NO: 2212 - protein, 55 aa, Homo Sapiens
MERASCLLLLLLPLVHVSATTPEPCELDDEDFRCVCNFSEPQPDWSEAFQCVSAV

SEQ ID NO: 2213 - protein, 81 aa, Homo Sapiens
MERASCLLLLLLPLVHVSATTPEPCELDDEDFRCVCNFSEPQPDWSEAFQCVSAVEVEIHAGGLNLEPFLKRVDADADPRQ

SEQ ID NO: 2214 - protein, 213 aa, Homo Sapiens
MERASCLLLLLLPLVHVSATTPEPCELDDEDFRCVCNFSEPQPDWSEAFQCVSAVEVEIHAGGLNLEPFLKRVDADADPRQYADTVKALRVRRLTVGAAQVPAQLLVGALRVLAYSRLKELTLEDLKITGTMPPLPLEATGLALSSLRLRNVSWATGRSWLAELQQWLKPGLKVLSIAQAHSPAFSCEQVRAFPALTSLDLSDNPGLGERGLM

SEQ ID NO: 2215 - protein, 375 aa, Homo Sapiens
MERASCLLLLLLPLVHVSATTPEPCELDDEDFRCVCNFSEPQPDWSEAFQCVSAVEVEIHAGGLNLEPFLKRVDADADPRQYADTVKALRVRRLTVGAAQVPAQLLVGALRVLAYSRLKELTLEDLKITGTMPPLPLEATGLALSSLRLRNVSWATGRSWLAELQQWLKPGLKVLSIAQAHSPAFSCEQVRAFPALTSLDLSDNPGLGERGLMAALCPHKFPAIQNLALRNTGMETPTGVCAALAAAGVQPHSLDLSHNSLRATVNPSAPRCMWSSALNSLNLSFAGLEQVPKGLPAKLRVLDLSCNRLNRAPQPDELPEVDNLTLDGNPFLVPGTALPHEGSMNSGVVPACARSTLSVGVSGTLVLLQGARGFA

SEQ ID NO: 2216 - protein, 375 aa, Homo Sapiens; identical to SEQ ID NO: 2215

SEQ ID NO: 2217 - protein, 72 aa, Homo Sapiens
MLLEPGRGCCALAILLAIVDIQSGETGNYTVTGLKQRQHLEFSHNEGTLSSGFLQEKVWVMLVTSLVALQAL

SEQ ID NO: 2218 - protein, 125 aa, Homo Sapiens
MLLEPGRGCCALAILLAIVDIQSGETGNYTVTGLKQRQHLEFSHNEGTLSSGFLQEKVWVMLVTSLVALQGMSKRAVSTPSNEGAIIFLPPWLFSRRRRLERMSRGREKCYSSPGYPQESSNQFH

SEQ ID NO: 2219 - protein, 181 aa, Homo Sapiens
MLLEPGRGCCALAILLAIVDIQSGGCINITSSASQEGTRLNLICTVWHKKEEAEGFVVFLCKDRSGDCSPETSLKQLRLKRDPGIDGVGEISSQLMFTISQVTPLHSGTYQCCARSQKSGIRLQGHFFSILFTETGNYTVTGLKQRQHLEFSHNEGTLSSGFLQEKVWVMLVTSLVALQAL

SEQ ID NO: 2220 - protein, 181 aa, Homo Sapiens; identical to SEQ ID NO: 2219

SEQ ID NO: 2221 - protein, 234 aa, Homo Sapiens
MLLEPGRGCCALAILLAIVDIQSGGCINITSSASQEGTRLNLICTVWHKKEEAEGFVVFLCKDRSGDCSPETSLKQLRLKRDPGIDGVGEISSQLMFTISQVTPLHSGTYQCCARSQKSGIRLQGHFFSILFTETGNYTVTGLKQRQHLEFSHNEGTLSSGFLQEKVWVMLVTSLVALQGMSKRAVSTPSNEGAIIFLPPWLFSRRRRLERMSRGREKCYSSPGYPQESSNQFH

SEQ ID NO: 2222 - protein, 163 aa, Homo Sapiens
MRKGRKVPMYVPGVLRTYPKAKLEETCEGRNSCVSCFNVSVVNTTCFWIECKDESYCSHNSTVSDCQVGNTTDFCSVSTATPVPTANSTAKPTVQPSPSTTSKTVTTSGTTNNTVTPTSQPVRKSTFDAASFIGGIVLVLGVQAVIFFLYKFCKSKERNYHTL

SEQ ID NO: 2223 - protein, 184 aa, Homo Sapiens
MSRLSRSLLWAATCLGVLCVLSADKNTTQHPNVTTLAPISNVTSAPVTSLPLVTTPAPETCEGRNSCVSCFNVSVVNTTCFWIECKDESYCSHNSTVSDCQVGNTTDFCSAKPTVQPSPSTTSKTVTTSGTTNNTVTPTSQPVRKSTFDAASFIGGIVLVLGVQAVIFFLYKFCKSKERNYHTL

SEQ ID NO: 2224 - protein, 157 aa, Homo Sapiens
MSRLSRSLLWAATCLGVLCVLSADKNTTQHPNVTTLAPISNVTSAPVTSLPLVTTPAPETCEGRNSCVSCFNVSVVNTTCFWIECKDESYCSHNSTVSDCQVGNTTDFCSVSTATPVPTANSTAKPTVQPSPSTTSKTVTTSEIRCHTRNYIPDLKK

SEQ ID NO: 2225 - protein, 189 aa, Homo Sapiens
MSRLSRSLLWAATCLGVLCVLSADKNTTQHPNVTTLAPISNVTSAPVTSLPLVTTPAPETCEGRNSCVSCFNVSVVNTTCFWIECKDESYCSHNSTVSDCQVGNTTDFCSVSTATPVPTANSTAKPTVQPSPSTTSKTVTTSGTTNNTVTPTSQPVRKSTFDAASFIGGIVLVLEIRCHTRNYIPDLKK

SEQ ID NO: 2226 - protein, 197 aa, Homo Sapiens
MSRLSRSLLWAATCLGVLCVLSADKNTTQHPNVTTLAPISNVTSAPVTSLPLVTTPAPETCEGRNSCVSCFNVSVVNTTCFWIECKDESYCSHNSTVSDCQVGNTTDFCSVSTATPVPTANSTAKPTVQPSPSTTSKTVTTSGTTNNTVTPTSQPVRKSTFDAASFIGGIVLVLGVQAVIFFLYKFCKSKERNYHTL

SEQ ID NO: 2227 - protein, 178 aa, Homo Sapiens
MSRLSRSLLWAATCLGVLCVLSADKNTTQHPNVTTLAPISNVTSAPVTSLPLVTTPAPETCEGRNSCVSCFNVSVVNTTCFWIECKDESYCSHNSTVSDCQVGNTTDFCSVSTATPVPTANSTGTTNNTVTPTSQPVRKSTFDAASFIGGIVLVLGVQAVIFFLYKFCKSKERNYHTL

SEQ ID NO: 2228 - protein, 437 aa, Homo Sapiens
MSAVLLLALLGFILPLPGVQALLCQFGTVQHVWKVSDLPRQWTPKNTSCDSGLGCQDTLMLIESGPQVSLVLSKGCTEAKDQEPRVTEHRMGPGLSLISYTFVCRQEDFCNNLVNSLPLWAPQPPADPGSLRCPVCLSMEGCLEGTTEEICPKGTTHCYDGLLRLRGGGIFSNLRVQGCMPQPVCNLLNGTQEIGPVGMTENCDMKDFLTCHRGTTIMTHGNLAQEPTDWTTSNTEMCEVGQVCQETLLLLDVGLTSTLVGTKGCSTVGAQNSQKTTIHSAPPGVLVASYTHFCSSDLCNSASSSSVLLNSLPPQAAPVPGDRQCPTCVQPLGTCSSGSPRMTCPRGATHCYDGYIHLSGGGLSTKMSIQGCVAQPSSFLLNHTRQIGIFSAREKRDVQPPASQHEGGGAEGLESLTWGVGLALAPALWWGVVCPSC

SEQ ID NO: 2229 - protein, 145 aa, Homo Sapiens
MSAVLLLALLGFILPLPGVQALLCQFGTVQHVWKVSDLPRQWTPKNTSCDSGLGCQDTLMLIESGPQVSLVLSKGCTEAKDQEPRVTEHRMGPGLSLISYTFVCRQEDFCNNLVNSLPLWAPQPPADPMMGAAEGPFGKAEQVDS

SEQ ID NO: 2230 - protein, 139 aa, Homo Sapiens
MSAVLLLALLGFILPLPGVQALLCQFGTVQHVWKVSDLPRQWTPKNTSCDSGLGCQDTLMLIESGPQVSLVLSKGCTEAKDQEPRVTEHRMGPGLSLISYTFVCRQEDFCNNLVNSLPLWAPQPPAGACGRVGRRGRGC

SEQ ID NO: 2231 - protein, 286 aa, Homo Sapiens
MLLLFLLFEGLCCPGENTAAPQALQSYHLAAEEQLSFRMLQTSSFANHSWAHSEGSGWLGDLQTHGWDTVLGTIRFLKPWSHGNFSKQELKNLQSLFQLYFHSFIQIVQASAGQFQLELKPEAWLSCGPSPGPGRLQLVCHVSGFYPKPVWVMWMRGEQEQRGTQRGDVLPNADETWYLRATLDVAAGEAAGLSCRVKHSSLGGHDLIIHWGGYSIFLILICLTVIVTLVILVVVDSRLKKQSPVFLMGANTQDTKNSRHQFCLAQVSWIKNRVLKKWKTRLNQLW

SEQ ID NO: 2232 - protein, 298 aa, Homo Sapiens
MLLLFLLFEGLCCPGENTAAPQALQSYHLAAEEQLSFRMLQTSSFANHSWAHSEGSGWLGDLQTHGWDTVLGTIRFLKPWSHGNFSKQELKNLQSLFQLYFHSFIQIVQASAGQFQLELKPEAWLSCGPSPGPGRLQLVCHVSGFYPKPVWVMWMRGEQEQRGTQRGDVLPNADETWYLRATLDVAAGEAAGLSCRVKHSSLGGHDLIIHWGGYSIFLILICLTVIVTLVILVVVDSRLKKQSSNKNILSPHTPSPVFLMGANTQDTKNSRHQFCLAQVSWIKNRVLKKWKTRLNQLW

SEQ ID NO: 2233 - protein, 231 aa, Homo Sapiens
MLLLFLLFEGLCCPGENTAAPQALQSYHLAAEEQLSFRMLQTSSFANHSWAHSEGSGWLGDLQTHGWDTVLGTIRFLKPWSHGNFSKQELKNLQSLFQLYFHSFIQIVQASAGQFQLELKPEAWLSCGPSPGPGRLQLVCHVSGFYPKPVWVMWMRGGYSIFLILICLTVIVTLVILVVVDSRLKKQSPVFLMGANTQDTKNSRHQFCLAQVSWIKNRVLKKWKTRLNQLW

SEQ ID NO: 2234 - protein, 290 aa, Homo Sapiens
MLLLFLLFEGLCCPGENTAAPQALQSYHLAAEEQLSFRMLQTSSFANHSWAHSEGSGWLGDLQTHGWDTVLGTIRFLKPWSHGNFSKQELKNLQSLFQLYFHSFIQIVQASAGQFQLEYPFEIQILAGCRMNAPQIFLNMAYQGSDFLSFQGISWEPSPGAGIRAQNICKVLNRYLDIKEILQSLLGHTCPRFLAGLMEAGESELKRKVKPEAWLSCGPSPGPGRLQLVCHVSGFYPKPVWVMWMRGEQEQRGTQRGDVLPNADETWWIFHLSHPDLFDCDSYPGHIGCS

SEQ ID NO: 2235 - protein, 388 aa, Homo Sapiens
MLLLFLLFEGLCCPGENTAAPQALQSYHLAAEEQLSFRMLQTSSFANHSWAHSEGSGWLGDLQTHGWDTVLGTIRFLKPWSHGNFSKQELKNLQSLFQLYFHSFIQIVQASAGQFQLEYPFEIQILAGCRMNAPQIFLNMAYQGSDFLSFQGISWEPSPGAGIRAQNICKVLNRYLDIKEILQSLLGHTCPRFLAGLMEAGESELKRKVKPEAWLSCGPSPGPGRLQLVCHVSGFYPKPVWVMWMRGEQEQRGTQRGDVLPNADETWYLRATLDVAAGEAAGLSCRVKHSSLGGHDLIIHWGGYSIFLILICLTVIVTLVILVVVDSRLKKQSSNKNILSPHTPSPVFLMGANTQDTKNSRHQFCLAQVSWIKNRVLKKWKTRLNQLW

SEQ ID NO: 2236 - protein, 376 aa, Homo Sapiens
MLLLFLLFEGLCCPGENTAAPQALQSYHLAAEEQLSFRMLQTSSFANHSWAHSEGSGWLGDLQTHGWDTVLGTIRFLKPWSHGNFSKQELKNLQSLFQLYFHSFIQIVQASAGQFQLEYPFEIQILAGCRMNAPQIFLNMAYQGSDFLSFQGISWEPSPGAGIRAQNICKVLNRYLDIKEILQSLLGHTCPRFLAGLMEAGESELKRKVKPEAWLSCGPSPGPGRLQLVCHVSGFYPKPVWVMWMRGEQEQRGTQRGDVLPNADETWYLRATLDVAAGEAAGLSCRVKHSSLGGHDLIIHWGGYSIFLILICLTVIVTLVILVVVDSRLKKQSPVFLMGANTQDTKNSRHQFCLAQVSWIKNRVLKKWKTRLNQLW

SEQ ID NO: 2237 - protein, 321 aa, Homo Sapiens
MLLLFLLFEGLCCPGENTAAPQALQSYHLAAEEQLSFRMLQTSSFANHSWAHSEGSGWLGDLQTHGWDTVLGTIRFLKPWSHGNFSKQELKNLQSLFQLYFHSFIQIVQASAGQFQLEYPFEIQILAGCRMNAPQIFLNMAYQGSDFLSFQGISWEPSPGAGIRAQNICKVLNRYLDIKEILQSLLGHTCPRFLAGLMEAGESELKRKVKPEAWLSCGPSPGPGRLQLVCHVSGFYPKPVWVMWMRGGYSIFLILICLTVIVTLVILVVVDSRLKKQSPVFLMGANTQDTKNSRHQFCLAQVSWIKNRVLKKWKTRLNQLW

SEQ ID NO: 2238 - protein, 289 aa, Homo Sapiens
MLLLFLLFEGLCCPGENTADPFEIQILAGCRMNAPQIFLNMAYQGSDFLSFQGISWEPSPGAGIRAQNICKVLNRYLDIKEILQSLLGHTCPRFLAGLMEAGESELKRKVKPEAWLSCGPSPGPGRLQLVCHVSGFYPKPVWVMWMRGEQEQRGTQRGDVLPNADETWYLRATLDVAAGEAAGLSCRVKHSSLGGHDLIIHWGGYSIFLILICLTVIVTLVILVVVDSRLKKQSSNKNILSPHTPSPVFLMGANTQDTKNSRHQFCLAQVSWIKNRVLKKWKTRLNQLW

SEQ ID NO: 2239 - protein, 101 aa, Homo Sapiens
MLLLFLLFEGLCCPGENTAVKPEAWLSCGPSPGPGRLQLVCHVSGFYPKPVWVMWMRGEQEQRGTQRGDVLPNADETWWIFHLSHPDLFDCDSYPGHIGCS

SEQ ID NO: 2240 - protein, 187 aa, Homo Sapiens
MLLLFLLFEGLCCPGENTAVKPEAWLSCGPSPGPGRLQLVCHVSGFYPKPVWVMWMRGEQEQRGTQRGDVLPNADETWYLRATLDVAAGEAAGLSCRVKHSSLGGHDLIIHWGGYSIFLILICLTVIVTLVILVVVDSRLKKQSPVFLMGANTQDTKNSRHQFCLAQVSWIKNRVLKKWKTRLNQLW

SEQ ID NO: 2241 - protein, 199 aa, Homo Sapiens
MLLLFLLFEGLCCPGENTAVKPEAWLSCGPSPGPGRLQLVCHVSGFYPKPVWVMWMRGEQEQRGTQRGDVLPNADETWYLRATLDVAAGEAAGLSCRVKHSSLGGHDLIIHWGGYSIFLILICLTVIVTLVILVVVDSRLKKQSSNKNILSPHTPSPVFLMGANTQDTKNSRHQFCLAQVSWIKNRVLKKWKTRLNQLW

SEQ ID NO: 2242 - protein, 132 aa, Homo Sapiens
MLLLFLLFEGLCCPGENTAVKPEAWLSCGPSPGPGRLQLVCHVSGFYPKPVWVMWMRGGYSIFLILICLTVIVTLVILVVVDSRLKKQSPVFLMGANTQDTKNSRHQFCLAQVSWIKNRVLKKWKTRLNQLW

SEQ ID NO: 2243 - protein, 144 aa, Homo Sapiens
MLLLFLLFEGLCCPGENTAVKPEAWLSCGPSPGPGRLQLVCHVSGFYPKPVWVMWMRGGYSIFLILICLTVIVTLVILVVVDSRLKKQSSNKNILSPHTPSPVFLMGANTQDTKNSRHQFCLAQVSWIKNRVLKKWKTRLNQLW

SEQ ID NO: 2244 - protein, 60 aa, Homo Sapiens
  misc_feature (1)..(1): Xaa can be any naturally occurring amino acid
XVSGFYPKPVWVMWMRGEQEQRGTQRGDVLPNADETWWIFHLSHPDLFDCDSYPGHIGCS

SEQ ID NO: 2245 - protein, 351 aa, Homo Sapiens
MSFPCKFVASFLLIFNVSSKGAVSKEITNALETWGALGQDINLDIPSFQMSDDIDDIKWEKTSDKKKIAQFRKEKETFKEKDTYKLFKNGTLKIKHLKTDDQDIYKVSIYDTKGKNVLEKIFDLKIQERVSKPKISWTCINTTLTCEVMNGTDPELNLYQDGKHLKLSQRVITHKWTTSLSAKFKCTAGNKVSKESSVEPVSCPEKGLDIYLIIGICGGGSLLMVFVALLVFYITKRKKQRSRRNDEELETRAHRVATEERGRKPHQIPASTPQNPATSQHPPPPPGHRSQAPSHRPPPPGHRVQHQPQKRPPAPSGTQVHQQKGPPLPRPRVQPKPPHGAAENSLSPSSN

SEQ ID NO: 2246 - protein, 133 aa, Homo Sapiens
MSFPCKFVASFLLIFNVSSKGAVSKEITNALETWGALGQDINLDIPSFQMSDDIDDIKWEKTSDKKKIAQFRKEKETFKEKDTYKLFKNGTLKIKHLKTDDQDIYKVSIYDTKGKNVLEKIFDLKIQGKCSFP

SEQ ID NO: 2247 - protein, 294 aa, Homo Sapiens
MERLTLTRTIGGPLLTATLLGKTTINDYQVIRMPFSHLSTYSLVWVMAAVVLCTAQVQVVTQDEREQLYTPASLKCSLQNAQEALIVTWQKKKAVSPENMVTFSENHGVVIQPAYKDKINITQLGLQNSTITFWNITLEDEGCYMCLFNTFGFGKISGTACLTVYVQPIVSLHYKFSEDHLNITCSATARPAPMVFWKVPRSGIENSTVTLSHPNGTTSVTSILHIKDPKNQVGKEVICQVLHLGTVTDFKQTVNKGYWFSVPLLLSIVSLVILLVLISILLYWKRHRNQDREP

SEQ ID NO: 2248 - protein, 150 aa, Homo Sapiens
MERLVIRMPFSHLSTYSLVWVMAAVVLCTAQVQVVTQDEREQLYTPASLKCSLQNAQEALIVTWQKKKAVSPENMVTFSENHGVVIQPAYKDKINITQLGLQNSTITFWNITLEDEGCYMCLFNTFGFGKISGTACLTVYAHSIPSLQIL

SEQ ID NO: 2249 - protein, 269 aa, Homo Sapiens
MERLVIRMPFSHLSTYSLVWVMAAVVLCTAQVQVVTQDEREQLYTPASLKCSLQNAQEALIVTWQKKKAVSPENMVTFSENHGVVIQPAYKDKINITQLGLQNSTITFWNITLEDEGCYMCLFNTFGFGKISGTACLTVYVQPIVSLHYKFSEDHLNITCSATARPAPMVFWKVPRSGIENSTVTLSHPNGTTSVTSILHIKDPKNQVGKEVICQVLHLGTVTDFKQTVNKGYWFSVPLLLSIVSLVILLVLISILLYWKRHRNQDREP

SEQ ID NO: 2250 - protein, 202 aa, Homo Sapiens
MKVQVVTQDEREQLYTPASLKCSLQNAQEALIVTWQKKKAVSPENMVTFSENHGVVIQPAYKDKINITQLGLQNSTITFWNITLEDEGCYMCLFNTFGFGKISGTACLTVYVQPIVSLHYKFSEDHLNITCSATARPAPMVFWKVPRSGIENSTVTLSHPNGTTSVTSILHIKDPKNQVGKEVICQVLHLGTVTDFKQTVNK

SEQ ID NO: 2251 - protein, 62 aa, Homo Sapiens
MPFSHLSTYSLVWVMAAVVLCTAQVQVVTQDEREQLYTPASLKCSLQNAQEALIVTWQKKKA

SEQ ID NO: 2252 - protein, 76 aa, Homo Sapiens
MVTFSENHGVVIQPAYKDKINITQLGLQNSTITFWNITLEDEGCYMCLFNTFGFGKISGTACLTVYAHSIPSLQIL

SEQ ID NO: 2253 - protein, 195 aa, Homo Sapiens
MVTFSENHGVVIQPAYKDKINITQLGLQNSTITFWNITLEDEGCYMCLFNTFGFGKISGTACLTVYVQPIVSLHYKFSEDHLNITCSATARPAPMVFWKVPRSGIENSTVTLSHPNGTTSVTSILHIKDPKNQVGKEVICQVLHLGTVTDFKQTVNKGYWFSVPLLLSIVSLVILLVLISILLYWKRHRNQDREP

SEQ ID NO: 2254 - protein, 165 aa, Homo Sapiens
MLCPWRTANLGLLLILTIFLVAASSSLCMDEKQITQNYSKVLAEVNTSWPVKMATNAVLCCPPIALRNLIIITWEIILRGQPSCTKAYKKETNETKETNCTDERITWVSRPDQNSDLQIRTVAITHDGYYRCIMVTPDGNFHRGYHLQVLGKEHHILRYFTSPDL

SEQ ID NO: 2255 - protein, 325 aa, Homo Sapiens
MLCPWRTANLGLLLILTIFLVAASSSLCMDEKQITQNYSKVLAEVNTSWPVKMATNAVLCCPPIALRNLIIITWEIILRGQPSCTKAYKKETNETKETNCTDERITWVSRPDQNSDLQIRTVAITHDGYYRCIMVTPDGNFHRGYHLQVLVTPEVTLFQNRNRTAVCKAVAGKPAAHISWIPEGDCATKQEYWSNGTVTVKSTCHWEVHNVSTVTCHVSHLTGNKSLYIELLPVPGAKKSAKLYIPYIILTIIILTIVGFIWLLKVNGCRKYKLNKTESTPVVEEDEMQPYASYTEKNNPLYDTTNKVKASEALQSEVDTDLHTL

SEQ ID NO: 2256 - protein, 188 aa, Homo Sapiens
MLCPWRTANLGLLLILTIFLVAEAEGAAQPNNSLMLQTSKENHALASSSLCMDEKQITQNYSKVLAEVNTSWPVKMATNAVLCCPPIALRNLIIITWEIILRGQPSCTKAYKKETNETKETNCTDERITWVSRPDQNSDLQIRTVAITHDGYYRCIMVTPDGNFHRGYHLQVLGKEHHILRYFTSPDL

SEQ ID NO: 2257 - protein, 348 aa, Homo Sapiens
MLCPWRTANLGLLLILTIFLVAEAEGAAQPNNSLMLQTSKENHALASSSLCMDEKQITQNYSKVLAEVNTSWPVKMATNAVLCCPPIALRNLIIITWEIILRGQPSCTKAYKKETNETKETNCTDERITWVSRPDQNSDLQIRTVAITHDGYYRCIMVTPDGNFHRGYHLQVLVTPEVTLFQNRNRTAVCKAVAGKPAAHISWIPEGDCATKQEYWSNGTVTVKSTCHWEVHNVSTVTCHVSHLTGNKSLYIELLPVPGAKKSAKLYIPYIILTIIILTIVGFIWLLKVNGCRKYKLNKTESTPVVEEDEMQPYASYTEKNNPLYDTTNKVKASEALQSEVDTDLHTL

SEQ ID NO: 2258 - protein, 212 aa, Homo Sapiens
MLCPWRTANLGLLLILTIFLVAVNTSWPVKMATNAVLCCPPIALRNLIIITWEIILRGQPSCTKAYKKETNETKETNCTDERITWVSRPDQNSDLQIRTVAITHDGYYRCIMVTPDGNFHRGYHLQVLVTPEVTLFQNRNRTAVCKAVAGKPAAHISWIPEGDCATKQEYWSNGTVTVKSTCHWEVHNVSTVTCHVSHLTGNKSLYIELLPG

SEQ ID NO: 2259 - protein, 153 aa, Homo Sapiens
HIQLPPEIQESQEVTLTCLLNFSCYGYPIQLQWLLEGVPMRQAAVTSTSLTIKSVFTRSELKFSPQWSHHGKIVTCQLQDADGKFLSNDTVQLNVKRESPRHACGKGKVCVTFSPAPQGACTQGRGKPAQTAASSSPGHAALSALVFREKDLL

SEQ ID NO: 2260 - protein, 159 aa, Homo Sapiens [sequence omitted]

SEQ ID NO: 2261 - protein, 138 aa, Homo Sapiens
MHLLGPWLLLLEYLAFSDSSKWVFEHPETLYAWEGACVWIPCTYRALDGDLESFILFHNPEYNKNTSKFDGTRLYESTKDGKVPSEQKRVQFLGDKNKNCTLSIHPVHLNDSGQLGLRMESKTEKWMERIHLNVSERP

SEQ ID NO: 2262 - protein, 145 aa, Homo Sapiens
MHLLGPWLLLLEYLAFSDSSKWVFEHPETLYAWEGACVWIPCTYRALDGDLESFILFHNPEYNKNTSKFDGTRLYESTKDGKVPSEQKRVQFLGDKNKNCTLSIHPVHLNDSGQLGLRMESKTEKWMERIHLNVSERPFPPHIQL

SEQ ID NO: 2263 - protein, 191 aa, Homo Sapiens
MHLLGPWLLLLEYLAFSDSSKWVFEHPETLYAWEGACVWIPCTYRALDGDLESFILFHNPEYNKNTSKFDGTRLYESTKDGKVPSEQKRVQFLGDKNKNCTLSIHPVHLNDSGQLGLRMESKTEKWMERIHLNVSVAPRGGSNEAGCCHLDLLDHQVCLHPERAQVLPTVESPWEDCDLPASGCRWEVPLQ

SEQ ID NO: 2264 - protein, 106 aa, Homo Sapiens
MHLLGPWLLLLVLEYLAFSDSSKWVFEHPETLYAWEGACVWIPCTYRALDGDLESFILFHNPEYNKNTSKFDGTRLYESTKDGKVPSEQKRVQFLGDKNKNCTLSI

SEQ ID NO: 2265 - protein, 133 aa, Homo Sapiens
MHLLGPWLLLLVLEYLAFSDSSKWVFEHPETLYAWEGACVWIPCTYRALDGDLESFILFHNPEYNKNTSKFDGTRLYESTKDGKVPSEQKRVQFLGDKNKNCTLSIHPVHLNDSGQLGLRMESKTEKWMERIH

SEQ ID NO: 2266 - protein, 164 aa, Homo Sapiens
MHLLGPWLLLLVLEYLAFSDSSKWVFEHPETLYAWEGACVWIPCTYRALDGDLESFILFHNPEYNKNTSKFDGTRLYESTKDGKVPSEQKRVQFLGDKNKNCTLSIHPVHLNDSGQLGLRMESKTEKWMERIHLNVSDPPKKVTTVIQNPMPIREGDTVTLSCN

SEQ ID NO: 2267 - protein, 226 aa, Homo Sapiens
MHLLGPWLLLLVLEYLAFSDSSKWVFEHPETLYAWEGACVWIPCTYRALDGDLESFILFHNPEYNKNTSKFDGTRLYESTKDGKVPSEQKRVQFLGDKNKNCTLSIHPVHLNDSGQLGLRMESKTEKWMERIHLNVSERPFPPHIQLPPEIQESQEVTLTCLLNFSCYGYPIQLQWLLEGVPMRQAAVTSTSLTIKSVFTRSELKFSPQWSHHGKIVTCQLQDADG

SEQ ID NO: 2268 - protein, 670 aa, Homo Sapiens
MHLLGPWLLLLVLEYLAFSDSSKWVFEHPETLYAWEGACVWIPCTYRALDGDLESFILFHNPEYNKNTSKFDGTRLYESTKDGKVPSEQKRVQFLGDKNKNCTLSIHPVHLNDSGQLGLRMESKTEKWMERIHLNVSERPFPPHIQLPPEIQESQEVTLTCLLNFSCYGYPIQLQWLLEGVPMRQAAVTSTSLTIKSVFTRSELKFSPQWSHHGKIVTCQLQDADGKFLSNDTVQLNVKHPPKKVTTVIQNPMPIREGDTVTLSCNYNSSNPSVTRYEWKPHGAWEEPSLGVLKIQNVGWDNTTIACAACNSWCSWASPVALNVQYAPRDVRVRKIKPLSEIHSGNSVSLQCDFSSSHPKEVQFFWEKNGRLLGKESQLNFDSISPEDAGSYSCWVNNSIGQTASKAWTLEVLYAPRRLRVSMSPGDQVMEGKSATLTCESDANPPVSHYTWFDWNNQSLPYHSQKLRLEPVKVQHSGAYWCQGTNSVGKGRSPLSTLTVYYSPETIGRRVAVGLGSCLAILILAICGLKLQRRWKRTQSQQGLQENSSGQSFFVRNKKVRRAPLSEGPHSLGCYNPMMEDGISYTTLRFPEMNIPRTGDAESSEMQRPPPDCDDTVTYSALHKRQVGDYENVIPDFPEDEGIHYSELIQFGVGERPQAQENVDYVILKH

SEQ ID NO: 2269 - protein, 670 aa, Homo Sapiens; identical to SEQ ID NO: 2268

SEQ ID NO: 2270 - protein, 847 aa, Homo Sapiens
MHLLGPWLLLLVLEYLAFSDSSKWVFEHPETLYAWEGACVWIPCTYRALDGDLESFILFHNPEYNKNTSKFDGTRLYESTKDGKVPSEQKRVQFLGDKNKNCTLSIHPVHLNDSGQLGLRMESKTEKWMERIHLNVSERPFPPHIQLPPEIQESQEVTLTCLLNFSCYGYPIQLQWLLEGVPMRQAAVTSTSLTIKSVFTRSELKFSPQWSHHGKIVTCQLQDADGKFLSNDTVQLNVKHTPKLEIKVTPSDAIVREGDSVTMTCEVSSSNPEYTTVSWLKDGTSLKKQNTFTLNLREVTKDQSGKYCCQVSNDVGPGRSEEVFLQVQYAPEPSTVQILHSPAVEGSQVEFLCMSLANPLPTNYTWYHNGKEMQGRTEEKVHIPKILPWHAGTYSCVAENILGTGQRGPGAELDVQYPPKKVTTVIQNPMPIREGDTVTLSCNYNSSNPSVTRYEWKPHGAWEEPSLGVLKIQNVGWDNTTIACAACNSWCSWASPVALNVQYAPRDVRVRKIKPLSEIHSGNSVSLQCDFSSSHPKEVQFFWEKNGRLLGKESQLNFDSISPEDAGSYSCWVNNSIGQTASKAWTLEVLYAPRRLRVSMSPGDQVMEGKSATLTCESDANPPVSHYTWFDWNNQSLPYHSQKLRLEPVKVQHSGAYWCQGTNSVGKGRSPLSTLTVYYSPETIGRRVAVGLGSCLAILILAICGLKLQRRWKRTQSQQGLQENSSGQSFFVRNKKVRRAPLSEGPHSLGCYNPMMEDGISYTTLRFPEMNIPRTGDAESSEMQRPPPDCDDTVTYSALHKRQVGDYENVIPDFPEDEGIHYSELIQFGVGERPQAQENVDYVILKH

SEQ ID NO: 2271 - protein, 759 aa, Homo Sapiens
MHLLGPWLLLLVLEYLAFSDSSKWVFEHPETLYAWEGACVWIPCTYRALDGDLESFILFHNPEYNKNTSKFDGTRLYESTKDGKVPSEQKRVQFLGDKNKNCTLSIHPVHLNDSGQLGLRMESKTEKWMERIHLNVSERPFPPHIQLPPEIQESQEVTLTCLLNFSCYGYPIQLQWLLEGVPMRQAAVTSTSLTIKSVFTRSELKFSPQWSHHGKIVTCQLQDADGKFLSNDTVQLNVKHTPKLEIKVTPSDAIVREGDSVTMTCEVSSSNPEYTTVSWLKDGTSLKKQNTFTLNLREVTKDQSGKYCCQVSNDVGPGRSEEVFLQVQYPPKKVTTVIQNPMPIREGDTVTLSCNYNSSNPSVTRYEWKPHGAWEEPSLGVLKIQNVGWDNTTIACAACNSWCSWASPVALNVQYAPRDVRVRKIKPLSEIHSGNSVSLQCDFSSSHPKEVQFFWEKNGRLLGKESQLNFDSISPEDAGSYSCWVNNSIGQTASKAWTLEVLYAPRRLRVSMSPGDQVMEGKSATLTCESDANPPVSHYTWFDWNNQSLPYHSQKLRLEPVKVQHSGAYWCQGTNSVGKGRSPLSTLTVYYSPETIGRRVAVGLGSCLAILILAICGLKLQRRWKRTQSQQGLQENSSGQSFFVRNKKVRRAPLSEGPHSLGCYNPMMEDGISYTTLRFPEMNIPRTGDAESSEMQRPPPDCDDTVTYSALHKRQVGDYENVIPDFPEDEGIHYSELIQFGVGERPQAQENVDYVILKH

SEQ ID NO: 2272 - protein, 751 aa, Homo Sapiens
MHLLGPWLLLLVLEYLAFSDSSKWVFEHPETLYAWEGACVWIPCTYRALDGDLESFILFHNPEYNKNTSKFDGTRLYESTKDGKVPSEQKRVQFLGDKNKNCTLSIHPVHLNDSGQLGLRMESKTEKWMERIHLNVSERPFPPHIQLPPEIQESQEVTLTCLLNFSCYGYPIQLQWLLEGVPMRQAAVTSTSLTIKSVFTRSELKFSPQWSHHGKIVTCQLQDADGKFLSNDTVQLNVKHTPKLEIKVTPSDAIVREGDSVTMTCEVSSSNPEYTTVSWLKDGTSLKKQNTFTLNLREVTKDQSGKYCCQVSNDVGPGRSEEVFLQVQYAPEPSTVQILHSPAVEGSQVEFLCMSLANPLPTNYTWYHNGKEMQGRTEEKVHIPKILPWHAGTYSCVAENILGTGQRGPGAELDVQYPPKKVTTVIQNPMPIREGDTVTLSCNYNSSNPSVTRYEWKPHGAWEEPSLGVLKIQNVGWDNTTIACAACNSWCSWASPVALNVQYAPRDVRVRKIKPLSEIHSGNSVSLQCDFSSSHPKEVQFFWEKNGRLLGKESQLNFDSISPEDAGSYSCWVNNSIGQTASKAWTLEVLYAPRRLRVSMSPGDQVMEGKSATLTCESDANPPVSHYTWFDWNNQSLPYHSQKLRLEPVKVQHSGAYWCQGTNSVGKGRSPLSTLTVYYSPETIGRRVAVGLGSCLAILILAICGLKLQRRWKRTQSQQGLQENSSGQSFFVRNKKRCRVLRDAETSPGLR

SEQ ID NO: 2273 - protein, 38 aa, Homo Sapiens
MHLLGPWLLLLVNGFLSTLKPSTPGRGPASGSPAPTEP

SEQ ID NO: 2274 - protein, 675 aa, Homo Sapiens
MSLWLLEGVPMRQAAVTSTSLTIKSVFTRSELKFSPQWSHHGKIVTCQLQDADGKFLSNDTVQLNVKHTPKLEIKVTPSDAIVREGDSVTMTCEVSSSNPEYTTVSWLKDGTSLKKQNTFTLNLREVTKDQSGKYCCQVSNDVGPGRSEEVFLQVQYAPEPSTVQILHSPAVEGSQVEFLCMSLANPLPTNYTWYHNGKEMQGRTEEKVHIPKILPWHAGTYSCVAENILGTGQRGPGAELDVQYPPKKVTTVIQNPMPIREGDTVTLSCNYNSSNPSVTRYEWKPHGAWEEPSLGVLKIQNVGWDNTTIACAACNSWCSWASPVALNVQYAPRDVRVRKIKPLSEIHSGNSVSLQCDFSSSHPKEVQFFWEKNGRLLGKESQLNFDSISPEDAGSYSCWVNNSIGQTASKAWTLEVLYAPRRLRVSMSPGDQVMEGKSATLTCESDANPPVSHYTWFDWNNQSLPYHSQKLRLEPVKVQHSGAYWCQGTNSVGKGRSPLSTLTVYYSPETIGRRVAVGLGSCLAILILAICGLKLQRRWKRTQSQQGLQENSSGQSFFVRNKKVRRAPLSEGPHSLGCYNPMMEDGISYTTLRFPEMNIPRTGDAESSEMQRPPPDCDDTVTYSALHKRQVGDYENVIPDFPEDEGIHYSELIQFGVGERPQAQENVDYVILKH

SEQ ID NO: 2275 - protein, 145 aa, Homo Sapiens
NPLPTNYTWYHNGKEMQGRTEEKVHIPKILPWHAGTYSCVAENILGTGQRGPGAELDVQYPPKKVTTVIQNPMPIREGDTVTLSCNYNSSNPSVTRYEWKPHGAWEEPSLGVLKIQNVGWDNTTIACAACNSWCSWASPVALNVQ

SEQ ID NO: 2276 - protein, 148 aa, Homo Sapiens
VLEYLAFSDSSKWVFEHPETLYAWEGACVWIPCTYRALDGDLESFILFHNPEYNKNTSKFDGTRLYESTKDGKVPSEQKRVQFLGDKNKNCTLSIHPVHLNDSGQLGLRMESKTEKWMERIHLNVSVESPWEDCDLPASGCRWEVPLQ

SEQ ID NO: 2277 - protein, 37 aa, Homo Sapiens
IVIPDVTVSDSGLYRCYLQASAGENETFVMRLTVAEG

SEQ ID NO: 2278 - protein, 127 aa, Homo Sapiens
MDYPTLLLALLHVYRALCEEVLWHTSVPFAENMSLECVYPSMGILTQVEWFKIGTQQDSIAIFSPTHGMVIRKPYAERVYFLNSTMASNNMTLFFRNASEDDVGYYSCSLYTYPQGTWQKVIQVVQS

SEQ ID NO: 2279 - protein, 132 aa, Homo Sapiens
MDYPTLLLALLHVYRALCEEVLWHTSVPFAENMSLECVYPSMGILTQVEWFKIGTQQDSIAIFSPTHGMVIRKPYAERVYFLNSTMASNNMTLFFRNASEDDVGYYSCSLYTYPQGTWQKVIQVVQSDSFEA

SEQ ID NO: 2280 - protein, 336 aa, Homo Sapiens
MDYPTLLLALLHVYRALCEEVLWHTSVPFAENMSLECVYPSMGILTQVEWFKIGTQQDSIAIFSPTHGMVIRKPYAERVYFLNSTMASNNMTLFFRNASEDDVGYYSCSLYTYPQGTWQKVIQVVQSDSFEAAVPSNSHIVSEPGKNVTLTCQPQMTWPVQAVRWEKIQPRQIDLLTYCNLVHGRNFTSKFPRQIVSNCSHGRWSVIVIPDVTVSDSGLYRCYLQASAGENETFVMRLTVAEGKTDNQYTLFVAGGTVLLLLFVISITTIIVIFLNRRRRRERRDLFTESWDTQKAPNNYRSPISTSQPTNQSMDDTREDIYVNYPTFSRRPKTRV

SEQ ID NO: 2281 - protein, 276 aa, Homo Sapiens
MDYPTLLLALLHVYRALCEEVLWHTSVPFAENMSLECVYPSMGILTQVEWFKIGTQQDSIAIFSPTHGMVIRKPYAERVYFLNSTMASNNMTLFFRNASEDDVGYYSCSLYTYPQGTWQKVIQVVQSDSFEAAVPSNSHIVSEPGKNVTLTCQPQMTWPVQAVRWEKIQPRQIDLLTYCNLVHGRNFTSKFPRQIVSNCSHGRWSVIVIPDVTVSDSGLYRCYLQASAGENETFVMRLTVAEGKTDNQYTLFVAGGTVLLLLFVISITTIIVIFLN

SEQ ID NO: 2282 - protein, 336 aa, Homo Sapiens; identical to SEQ ID NO: 2280

SEQ ID NO: 2283 - protein, 181 aa, Homo Sapiens
MTWPVQAVRWEKIQPRQIDLLTYCNLVHGRNFTSKFPRQIVSNCSHGRWSVIVIPDVTVSDSGLYRCYLQASAGENETFVMRLTVAEGKTDNQYTLFVAGGTVLLLLFVISITTIIVIFLNRRRRRERRDLFTESWDTQKAPNNYRSPISTSQPTNQSMDDTREDIYVNYPTFSRRPKTRV

SEQ ID NO: 2284 - protein, 181 aa, Homo Sapiens; identical to SEQ ID NO: 2283

SEQ ID NO: 2285 - protein, 80 aa, Homo Sapiens
MGRAMVARLGLGLLLLALLLPTQIYSSETTTGTSSNSSQSTSNSGLAPNPTNATTKAAGGALQSTASLFVVSLSLLHLYS

SEQ ID NO: 2286 - protein, 80 aa, Homo Sapiens; identical to SEQ ID NO: 2285

SEQ ID NO: 2287 - protein, 80 aa, Homo Sapiens; identical to SEQ ID NO: 2285

SEQ ID NO: 2288 - protein, 37 aa, Homo Sapiens
MGRAMVARLGLGLLLLALLLPTQKMLRIPNLIDLKNM

SEQ ID NO: 2289 - protein, 129 aa, Homo Sapiens
MVGRFCPESPPGFVRVAATSAVSLDPPSGEPRPGCGYPGPRSAASRVYGCTAPARETGGWAWETLAGAGAKKIYSSETTTGTSSNSSQSTSNSGLAPNPTNATTKAAGGALQSTASLFVVSLSLLHLYS

SEQ ID NO: 2290 - protein, 88 aa, Homo Sapiens
  misc_feature (1)..(1): Xaa can be any naturally occurring amino acid
XDRSGPGHRLRGAPTSREGFALGGARVPSARIYSSETTTGTSSNSSQSTSNSGLAPNPTNATTKAAGGALQSTASLFVVSLSLLHLYS

SEQ ID NO: 2291 - protein, 122 aa, Homo Sapiens
  misc_feature (1)..(1): Xaa can be any naturally occurring amino acid
XLSSAAGREITLPEGSRRPPPTRSHWNSQPLSGPRGAFCSLSGNALAPGQAATPPQRRRGLFFWGIYSSETTTGTSSNSSQSTSNSGLAPNPTNATTKAAGGALQSTASLFVVSLSLLHLYS

SEQ ID NO: 2292 - protein, 38 aa, Homo Sapiens
MLRRRGSPGMGVHVGAALGALWFCLTADRYQTAGAQLC

SEQ ID NO: 2293 - protein, 38 aa, Homo Sapiens; identical to SEQ ID NO: 2292

SEQ ID NO: 2294 - protein, 51 aa, Homo Sapiens
MLRRRGSPGMGVHVGAALGALWFCLTGALEVQVPEDPVVALVGTDATLCCS

SEQ ID NO: 2295 - protein, 133 aa, Homo Sapiens
MLRRRGSPGMGVHVGAALGALWFCLTGALEVQVPEDPVVALVGTDATLCCSFSPEPGFSLAQLNLIWQLTDTKQLVHSFAEGQDQGSAYANRTALFPDLLAQGNASLRLQRVRVADEGSFTCFVSIRDFGSAA

SEQ ID NO: 2296 - protein, 133 aa, Homo Sapiens; identical to SEQ ID NO: 2295

SEQ ID NO: 2297 - protein, 136 aa, Homo Sapiens
MLRRRGSPGMGVHVGAALGALWFCLTGALEVQVPEDPVVALVGTDATLCCSFSPEPGFSLAQLNLIWQLTDTKQLVHSFAEGQDQGSAYANRTALFPDLLAQGNASLRLQRVRVADEGSFTCFVSIRDFGSAAVSL

SEQ ID NO: 2298 - protein, 156 aa, Homo Sapiens
MLRRRGSPGMGVHVGAALGALWFCLTGALEVQVPEDPVVALVGTDATLCCSFSPEPGFSLAQLNLIWQLTDTKQLVHSFAEGQDQGSAYANRTALFPDLLAQGNASLRLQRVRVADEGSFTCFVSIRDFGSAAVSLQVAAPYSKPSMTLEPNKDLR

SEQ ID NO: 2299 - protein, 165 aa, Homo Sapiens
MLRRRGSPGMGVHVGAALGALWFCLTGALEVQVPEDPVVALVGTDATLCCSFSPEPGFSLAQLNLIWQLTDTKQLVHSFAEGQDQGSAYANRTALFPDLLAQGNASLRLQRVRVADEGSFTCFVSIRDFGSAAVSLQVAAPYSKPSMTLEPNKDLRPGDTVTITC

SEQ ID NO: 2300 - protein, 534 aa, Homo Sapiens
MLRRRGSPGMGVHVGAALGALWFCLTGALEVQVPEDPVVALVGTDATLCCSFSPEPGFSLAQLNLIWQLTDTKQLVHSFAEGQDQGSAYANRTALFPDLLAQGNASLRLQRVRVADEGSFTCFVSIRDFGSAAVSLQVAAPYSKPSMTLEPNKDLRPGDTVTITCSSYQGYPEAEVFWQDGQGVPLTGNVTTSQMANEQGLFDVHSILRVVLGANGTYSCLVRNPVLQQDAHSSVTITPQRSPTGAVEVQVPEDPVVALVGTDATLRCSFSPEPGFSLAQLNLIWQLTDTKQLVHSFTEGRDQGSAYANRTALFPDLLAQGNASLRLQRVRVADEGSFTCFVSIRDFGSAAVSLQVAAPYSKPSMTLEPNKDLRPGDTVTITCSSYRGYPEAEVFWQDGQGVPLTGNVTTSQMANEQGLFDVHSVLRVVLGANGTYSCLVRNPVLQQDAHGSVTITGQPMTFPPEALWVTVGLSVCLIALLVALAFVCWRKIKQSCEEENAGAEDQDGEGEGSKTALQPLKHSDSKEDDGQEIA

SEQ ID NO: 2301 - protein, 533 aa, Homo Sapiens
MLRRRGSPGMGVHVGAALGALWFCLTGALEVQVPEDPVVALVGTDATLCCSFSPEPGFSLAQLNLIWQLTDTKQLVHSFAEGQDQGSAYANRTALFPDLLAQGNASLRLQRVRVADEGSFTCFVSIRDFGSAAVSLQVAAPYSKPSMTLEPNKDLRPGDTVTITCSSYQGYPEAEVFWQDGQGVPLTGNVTTSQMANEQGLFDVHSILRVVLGANGTYSCLVRNPVLQQDAHSSVTITPQRSPTGAVEVQVPEDPVVALVGTDATLRCSFSPEPGFSLAQLNLIWQLTDTKQLVHSFTEGRDQGSAYANRTALFPDLLAQGNASLRLQRVRVADEGSFTCFVSIRDFGSAAVSLQVAAPYSKPSMTLEPNKDLRPGDTVTITCSSYRGYPEAEVFWQDGQGVPLTGNVTTSQMANEQGLFDVHSVLRVVLGANGTYSCLVRNPVLQQDAHGSVTITGQPMTFPPEALWVTVGLSVCLIALLVALAFVCWRKIKQSCEEENAGAEDQDGEGEGSKTALQPLKHSDSKEGKDTWA

SEQ ID NO: 2302 - protein, 316 aa, Homo Sapiens
MLRRRGSPGMGVHVGAALGALWFCLTGALEVQVPEDPVVALVGTDATLCCSFSPEPGFSLAQLNLIWQLTDTKQLVHSFAEGQDQGSAYANRTALFPDLLAQGNASLRLQRVRVADEGSFTCFVSIRDFGSAAVSLQVAAPYSKPSMTLEPNKDLRPGDTVTITCSSYRGYPEAEVFWQDGQGVPLTGNVTTSQMANEQGLFDVHSVLRVVLGANGTYSCLVRNPVLQQDAHGSVTITGQPMTFPPEALWVTVGLSVCLIALLVALAFVCWRKIKQSCEEENAGAEDQDGEGEGSKTALQPLKHSDSKEDDGQEIA

SEQ ID NO: 2303 - protein, 316 aa, Homo Sapiens; identical to SEQ ID NO: 2302

SEQ ID NO: 2304 - protein, 146 aa, Homo Sapiens
MSLKAPMSSRKKKLYLQQHCEAGAAFHHGEPSCQPPHRKMLRRRGSPGMGVHVGAALGALWFCLTGALEVQVPEDPVVALVGTDATLCCSFSPEPGFSLAQLNLIWQLTDTKQLVHSFAEGQDQGSAYANRTALFPDLLAQGNASL

SEQ ID NO: 2305 - protein, 388 aa, Homo Sapiens
MTLEPNKDLRPGDTVTITCSSYQGYPEAEVFWQDGQGVPLTGNVTTSQMANEQGLFDVHSILRVVLGANGTYSCLVRNPVLQQDAHSSVTITPQRSPTGAVEVQVPEDPVVALVGTDATLRCSFSPEPGFSLAQLNLIWQLTDTKQLVHSFTEGRDQGSAYANRTALFPDLLAQGNASLRLQRVRVADEGSFTCFVSIRDFGSAAVSLQVAAPYSKPSMTLEPNKDLRPGDTVTITCSSYRGYPEAEVFWQDGQGVPLTGNVTTSQMANEQGLFDVHSVLRVVLGANGTYSCLVRNPVLQQDAHGSVTITGQPMTFPPEALWVTVGLSVCLIALLVALAFVCWRKIKQSCEEENAGAEDQDGEGEGSKTALQPLKHSDSKEDDGQEIA

SEQ ID NO: 2306 - protein, 199 aa, Homo Sapiens
  misc_feature (1)..(1): Xaa can be any naturally occurring amino acid
XRVRVADEGSFTCFVSIRDFGSAAVSLQVAAPYSKPSMTLEPNKDLRPGDTVTITCSSYRGYPEAEVFWQDGQGVPLTGNVTTSQMANEQGLFDVHSVLRVVLGANGTYSCLVRNPVLQQDAHGSVTITEALWVTVGLSVCLIALLVALAFVCWRKIKQSCEEENAGAEDQDGEGEGSKTALQPLKHSDSKEDDGQEIA

SEQ ID NO: 2307 - protein, 170 aa, Homo Sapiens
  misc_feature (1)..(1): Xaa can be any naturally occurring amino acid
XTLEPNKDLRPGDTVTITCSSYRGYPEAEVFWQDGQGVPLTGNVTTSQMANEQGLFDVHSVLRVVLGANGTYSCLVRNPVLQQDAHGSVTITGQPMTFPPEALWVTVGLSVCLIALLVALAFVCWRKIKQSCEEENAGAEDQDGEGEGSKTALQPLKHSDSKEDDGQEIA

SEQ ID NO: 2308 - protein, 169 aa, Homo Sapiens
MTPASITAAKTSTITTAFPPVSSTTLFAVGATHSASIQEETEEVVNSQLPLLLSLLALLLLLLVGASLLAWRMFQKWIKAGDHSELSQNPKQAATQSELHYANLELLMWPLQEKPAPPREVEVEYSTVASPREELHYASVVFDSNTNRIAAQRPREEEPDSDYSVIRKT

SEQ ID NO: 2309 - protein, 103 aa, Homo Sapiens
MWLPWALLLLWVPAGDHSELSQNPKQAATQSELHYANLELLMWPLQEKPAPPREVEVEYSTVASPREELHYASVVFDSNTNRIAAQRPREEEPDSDYSVIRKT

SEQ ID NO: 2310 - protein, 186 aa, Homo Sapiens
MWLPWALLLLWVPASTSMTPASITAAKTSTITTAFPPVSSTTLFAVGATHSASIQEETEEVVNSQLPLLLSLLALLLLLLVGASLLAWRMFQKWIKAGDHSELSQNPKQAATQSELHYANLELLMWPLQEKPAPPREVEVEYSTVASPREELHYASVVFDSNTNRIAAQRPREEEPDSDYSVIRKT

SEQ ID NO: 2311 - protein, 150 aa, Homo Sapiens
MWLPWALLLLWVPASTSMTPASITAAKTSTITTAFPPVSSTTLFAVGATHSASIQEETEEVVNSQLPLLLSLLALLLLLLVGASLLAWRMFQKWIKAGDHSELSQNPKQASPREELHYASVVFDSNTNRIAAQRPREEEPDSDYSVIRKT

SEQ ID NO: 2312 - protein, 299 aa, Homo Sapiens
MWLPWALLLLWVPGCFALSKCRTVAGPVGGSLSVQCPYEKEHRTLNKYWCRPPQIFLCDKIVETKGSAGKRNGRVSIRDSPANLSFTVTLENLTEEDAGTYWCGVDTPWLRDFHDPVVEVEVSVFPASTSMTPASITAAKTSTITTAFPPVSSTTLFAVGATHSASIQEETEEVVNSQLPLLLSLLALLLLLLVGASLLAWRMFQKWIKAGDHSELSQNPKQAATQSELHYANLELLMWPLQEKPAPPREVEVEYSTVASPREELHYASVVFDSNTNRIAAQRPREEEPDSDYSVIRKT

SEQ ID NO: 2313 - protein, 148 aa, Homo Sapiens
MWLPPALLLLSLSGCFSIQGPESVRAPEQGSLTVQCHYKQGWETYIKWWCRGVRWDTCKILIETRGSEQGEKSDRVSIKDNQKDRTFTVTMEGLRRDDADVYWCGIERRGPDLGTQVKVIVDPEGAASTTASSPTNSNMAVFIGSHKR

SEQ ID NO: 2314 - protein, 201 aa, Homo Sapiens
MWLPPALLLLSLSGCFSIQGPESVRAPEQGSLTVQCHYKQGWETYIKWWCRGVRWDTCKILIETRGSEQGEKSDRVSIKDNQKDRTFTVTMEGLRRDDADVYWCGIERRGPDLGTQVKVIVDPEGAASTTASSPTNSNMAVFIGSHKRNHYMLLVFVKVPILLILVTAILWLKGSQRVPEEPGEQPIYMNFSEPLTKDMAT

SEQ ID NO: 2315 - protein, 290 aa, Homo Sapiens
MPLLTLYLLLFWLSGYSIVTQITGPTTVNGLERGSLTVQCVYRSGWETYLKWWCRGAIWRDCKILVKTSGSEQEVKRDRVSIKDNQKNRTFTVTMEDLMKTDADTYWCGIEKTGNDLGVTVQVTIDPAPVTQEETSSSPTLTGHHLDNRHKLLKLSVLLPLIFTILLLLLVAASLLAWRMMKYQQKAAGMSPEQVLQPLEGDLCYADLTLQLAGTSPQKATTKLSSAQVDQVEVEYVTMASLPKEDISYASLTLGAEDQEPTYCNMGHLSSHLPGRGPEEPTEYSTISRP

SEQ ID NO: 2316 - protein, 244 aa, Homo Sapiens
MPLLTLYLLLFWLSGYSIVTQITGPTTVNGLERGSLTVQCVYRSGWETYLKWWCRGAIWRDCKILVKTSGSEQEVKRDRVSIKDNQKNRTFTVTMEDLMKTDADTYWCGIEKTGNDLGVTVQVTIDPAPVTQEETSSSPTLTGHHLDNRSEGSQAANYRPAAHQAQAPEAQCPPAPHLHHIAAAFGGRLTLGLEDDEVPAESSRDVPRAGTAAPGGRPLLCRPDPAAGRNLPAKGYHEAFLCPG

SEQ ID NO: 2317 - protein, 305 aa, Homo Sapiens
MPLLTLYLLLFWLSGYSIVTQITGPTTVNGLERGSLTVQCVYRSGWETYLKWWCRGAIWRDCKILVKTSGSEQEVKRDRVSIKDNQKNRTFTVTMEDLMKTDADTYWCGIEKTGNDLGVTVQVTIDPASTPAPTTPTSTTFTAPVTQEETSSSPTLTGHHLDNRHKLLKLSVLLPLIFTILLLLLVAASLLAWRMMKYQQKAAGMSPEQVLQPLEGDLCYADLTLQLAGTSPQKATTKLSSAQVDQVEVEYVTMASLPKEDISYASLTLGAEDQEPTYCNMGHLSSHLPGRGPEEPTEYSTISRP

SEQ ID NO: 2318 - protein, 293 aa, Homo Sapiens
MWLPQLDLMRVISAKSQGYSIVTQITGPTTVNGLERGSLTVQCVYRSGWETYLKWWCRGAIWRDCKILVKTSGSEQEVKRDRVSIKDNQKNRTFTVTMEDLMKTDADTYWCGIEKTGNDLGVTVQVTIDPAPVTQEETSSSPTLTGHHLDNRHKLLKLSVLLPLIFTILLLLLVAASLLAWRMMKYQQKAAGMSPEQVLQPLEGDLCYADLTLQLAGTSPQKATTKLSSAQVDQVEVEYVTMASLPKEDISYASLTLGAEDQEPTYCNMGHLSSHLPGRGPEEPTEYSTISRP

SEQ ID NO: 2319 - protein, 165 aa, Homo Sapiens
MWLPQLDLMRVISAKSQGYSIVTQITGPTTVNGLERGSLTVQCVYRSGWETYLKWWCRGAIWRDCKILVKTSGSEQEVKRDRVSIKDNQKNRTFTVTMEDLMKTDADTYWCGIEKTGNDLGVTVQVTIDPAPVTQEETSSSPTLTGHHLDNRYCSPWRATSAMQT

SEQ ID NO: 2320 - protein, 194 aa, Homo Sapiens
MWLPQLDLMRVISAKSQGYSIVTQITGPTTVNGLERGSLTVQCVYRSGWETYLKWWCRGAIWRDCKILVKTSGSEQEVKRDRVSIKDNQKNRTFTVTMEDLMKTDADTYWCGIEKTGNDLGVTVQVTIDPAPVTQEETSSSPTLTGHHLDNSSRDVPRAGTAAPGGRPLLCRPDPAAGRNLPAKGYHEAFLCPG

SEQ ID NO: 2321 - protein, 194 aa, Homo Sapiens; identical to SEQ ID NO: 2320

SEQ ID NO: 2322 - protein, 239 aa, Homo Sapiens
MWLPQLDLMRVISAKSQGYSIVTQITGPTTVNGLERGSLTVQCVYRSGWETYLKWWCRGAIWRDCKILVKTSGSEQEVKRDRVSIKDNQKNRTFTVTMEDLMKTDADTYWCGIEKTGNDLGVTVQVTIDPASTPAPTTPTSTTFTAPVTQEETSSSPTLTGHHLDNRHKLLKLSVLLPLIFTILLLLLVAASLLAWRMMKYQQKGTAAPGGRPLLCRPDPAAGRNLPAKGYHEAFLCPG

SEQ ID NO: 2323 - protein, 239 aa, Homo Sapiens; identical to SEQ ID NO: 2322

SEQ ID NO: 2324 - protein, 273 aa, Homo Sapiens
MRLLVLLWGCLLLPGYEALEGPEEISGFEGDTVSLQCTYREELRDHRKYWCRKGGILFSRCSGTIYAEEEGQETMKGRVSIRDSRQELSLIVTLWNLTLQDAGEYWCGVEKRGPDESLLISLFVFPASPGLYPAATTAKQGKTGAEAPPLPGTSQYGHERTSQYTGTSPHPATSPPAGSSRPPMQLDSTSAEDTSPALSSGSSKPRVSIPMVRILAPVLVLLSLLSAAGLIAFCSHLLLWRKEAQQATETQRNEKFCLSRLNSLMFSLSLPWL

SEQ ID NO: 2325 - protein, 150 aa, Homo Sapiens
MRLLVLLWGCLLLPGYEALEGPEEISGFEGDTVSLQCTYREELRDHRKYWCRKGGILFSRCSGTIYAEEEGQETMKGRVSIRDSRQELSLIVTLWNLTLQDAGEYWCGVEKRGPDESLLISLFVFPGNRYLSFPRLGTGAAEGRGRGGGA

SEQ ID NO: 2326 - protein, 332 aa, Homo Sapiens
MRLLVLLWGCLLLPGYEALEGPEEISGFEGDTVSLQCTYREELRDHRKYWCRKGGILFSRCSGTIYAEEEGQETMKGRVSIRDSRQELSLIVTLWNLTLQDAGEYWCGVEKRGPDESLLISLFVFPGPCCPPSPSPTFQPLATTRLQPKAKAQQTQPPGLTSPGLYPAATTAKQGKTGAEAPPLPGTSQYGHERTSQYTGTSPHPATSPPAGSSRPPMQLDSTSAEDTSPALSSGSSKPRVSIPMVRILAPVLVLLSLLSAAGLIAFCSHLLLWRKEAQQATETQRNEKFCLSRLTAEEKEAPSQAPEGDVISMPPLHTSEEELGFSKFVSA

SEQ ID NO: 2327 - protein, 307 aa, Homo Sapiens
MRLLVLLWGCLLLPGYEALEGPEEISGFEGDTVSLQCTYREELRDHRKYWCRKGGILFSRCSGTIYAEEEGQETMKGRVSIRDSRQELSLIVTLWNLTLQDAGEYWCGVEKRGPDESLLISLFVFPGPCCPPSPSPTFQPLATTRLQPKAKAQQTQPPGLTSPGLYPAATTAKQGKTGAEAPPLPGTSQYGHERTSQYTGTSPHPATSPPAGSSRPPMQLDSTSAEDTSPALSSGSSKPRVSIPMVRILAPVLVLLSLLSAAGLIAFCSHLLLWRKEAQQATETQRNEKFCLSRLNSLMFSLSLPWL

SEQ ID NO: 2328 - protein, 233 aa, Homo Sapiens
MRLLVLLWGCLLLPGYEALEGPEEISGFEGDTVSLQCTYREELRDHRKYWCRKGGILFSRCSGTIYAEEEGQETMKGRVSIRDSRQELSLIVTLWNLTLQDAGEYWCGVEKRGPDESLLISLFVFPGSSRPPMQLDSTSAEDTSPALSSGSSKPRVSIPMVRILAPVLVLLSLLSAAGLIAFCSHLLLWRKEAQQATETQRNEKFCLSRLNHRTSELDPDEAFEISSLTFLSV

SEQ ID NO: 2329 - protein, 222 aa, Homo Sapiens
MRLLVLLWGCLLLPGYEALEGPEEISGFEGDTVSLQCTYREELRDHRKYWCRKGGILFSRCSGTIYAEEEGQETMKGRVSIRDSRQELSLIVTLWNLTLQDAGEYWCGVEKRGPDESLLISLFVFPGSSRPPMQLDSTSAEDTSPALSSGSSKPRVSIPMVRILAPVLVLLSLLSAAGLIAFCSHLLLWRKEAQQATETQRNEKFCLSRLNSLMFSLSLPWL

SEQ ID NO: 2330 - protein, 98 aa, Homo Sapiens
MEHSTFLSGLVLATLLSQVCQSCVELDPATVAGIIVTDVIATLLLALGVFCFAGHETGRLSGAADTQALLRNDQVYQPLRDRDDAQYSHLGGNWARNK

SEQ ID NO: 2331 - protein, 171 aa, Homo Sapiens
MEHSTFLSGLVLATLLSQVSPFKIPIEELEDRVFVNCNTSITWVEGTVGTLLSDITRLDLGKRILDPRGIYRCNGTDIYKDKESTVQVHYRMCQSCVELDPATVAGIIVTDVIATLLLALGVFCFAGHETGRLSGAADTQALLRNDQVYQPLRDRDDAQYSHLGGNWARNK

SEQ ID NO: 2332 - protein, 127 aa, Homo Sapiens
MEHSTFLSGLVLATLLSQVSPFKIPIEELEDRVFVNCNTSITWVEGTVGTLLSDITRLDLGKRILDPRGIYRCNGTDIYKDKESTVQVHYRTADTQALLRNDQVYQPLRDRDDAQYSHLGGNWARNK

SEQ ID NO: 2333 - protein, 132 aa, Homo Sapiens
  misc_feature (1)..(1): Xaa can be any naturally occurring amino acid
XSRCFSGPCSPYSSSVVWIHFQEVSPFKIPIEELEDRVFVNCNTSITWVEGTVGTLLSDITRLDLGKRILDPRGIYRCNGTDIYKDKESTVQVHYRTADTQALLRNDQVYQPLRDRDDAQYSHLGGNWARNK

SEQ ID NO: 2334 - protein, 45 aa, Homo Sapiens
MNRGVPFRHLLLVLQLALLPAATQGKKVVLGKKGDTVELTCTASQ

SEQ ID NO: 2335 - protein, 458 aa, Homo Sapiens
MNRGVPFRHLLLVLQLALLPAATQGKKVVLGKKGDTVELTCTASQKKSIQFHWKNSNQIKILGNQGSFLTKGPSKLNDRADSRRSLWDQGNFPLIIKNLKIEDSDTYICEVEDQKEEVQLLVFGLTANSDTHLLQGQSLTLTLESPPGSSPSVQCRSPRGKNIQGGKTLSVSQLELQDSGTWTCTVLQNQKKVEFKIDIVVLAFQKASSIVYKKEGEQVEFSFPLAFTVEKLTGSGELWWQAERASSSKSWITFDLKNKEVSVKRVTQDPKLQMGKKLPLHLTLPQALPQYAGSGNLTLALEAKTGKLHQEVNLVVMRATQLQKNLTCEVWGPTSPKLMLSLKLENKEAKVSKREKAVWVLNPEAGMWQCLLSDSGQVLLESNIKVLPTWSTPVQPMALIVLGGVAGLLLFIGLGIFFCVRCRHRRRQAERMSQIKRLLSEKKTCQCPHRFQKTCSPI

SEQ ID NO: 2336 - protein, 148 aa, Homo Sapiens
MNRGVPFRHLLLVLQLGPSKLNDRADSRRSLWDQGNFPLIIKNLKIEDSDTYICEVEDQKEEVQLLVFGLTANSDTHLLQGQSLTLTLESPPGSSPSVQCRSPRGKNIQGGKTLSVSQLELQDSGTWTCTVLQNQKKVEFKIDIVVLG

SEQ ID NO: 2337 - protein, 203 aa, Homo Sapiens
MVRLPLQCVLWGCLLTAVHPEPPTACREKQYLINSQCCSLCQPGQKLVSDCTEFTETECLPCGESEFLDTWNRETHCHQHKYCDPNLGLRVQQKGTSETDTICTCEEGWHCTSEACESCVLHRSCSPGFGVKQIATGVSDTICEPCPVGFFSNVSSAFEKCHPWTRSPGSAESPGGDPHHLRDPVCHPLGAGLYQKGGQEANQ

SEQ ID NO: 2338 - protein, 277 aa, Homo Sapiens
MVRLPLQCVLWGCLLTAVHPEPPTACREKQYLINSQCCSLCQPGQKLVSDCTEFTETECLPCGESEFLDTWNRETHCHQHKYCDPNLGLRVQQKGTSETDTICTCEEGWHCTSEACESCVLHRSCSPGFGVKQIATGVSDTICEPCPVGFFSNVSSAFEKCHPWTSCETKDLVVQQAGTNKTDVVCGPQDRLRALVVIPIIFGILFAILLVLVFIKKVAKKPTNKAPHPKQEPQEINFPDDLPGSNTAAPVQETLHGCQPVTQEDGKESRISVQERQ

SEQ ID NO: 2339 - protein, 151 aa, Homo Sapiens
MVRLPLQCVLWGCLLTAVHPEPPTACREKQYLINSQCCSLCQPGQKLVSDCTEFTETECLPCGESEFLDTWNRETHCHQHKYCDPNLGLRVQQKGTSETDTICTCEEGWHCTSEACESCVLHRSCSPGFGVKQIDICQPHFPKDRGLNLLM

SEQ ID NO: 2340 - protein, 159 aa, Homo Sapiens
  misc_feature (1)..(1): Xaa can be any naturally occurring amino acid
XRLPLQCVLWGCLLTAVHPEPPTACREKQYLINSQCCSLCQPGQKLVSDCTEFTETECLPCGESEFLDTWNRETHCHQHKYCDPNLGLRVQQKGTSETDTICTCEEGWHCTSEACESCVLHRSCSPGFGVKQIAVRPKTWLCNRQAQTRLMLSVVPRIG

SEQ ID NO: 2341 - protein, 176 aa, Homo Sapiens
DTYCFNASAPPEEDCTSVTGPLSMTTQQSNSQSFSTSHEGLEEDKDHPTTSTLTSSNRNDVTGGRRDPNHSEGSTTLLEGYTSHYPHTKESRTFIPVTSAKTGSFGVTAVTVGDSNSNVNRSLSGDQDTFHPSGGSHTTHGSESDGHSHGSQEGGANTTSGPIRTPQIPEWLIILA

SEQ ID NO: 2342 - protein, 269 aa, Homo Sapiens
EDCTSVTDLPNAFDGPITITIVNRDGTRYVQKGEYRTNPEDIYPSNPTDDDVSSGSSSERSSTSGGYIFYTFSTVHPIPDEDSPWITDSTDRIPATIQATPSSTTEETATQKEQWFGNRWHEGYRQTPKEDSHSTTGTAAASAHTSHPMQGRTTPSPEDSSWTDFFNPISHPMGRGHQAGRRMDMDSSHSITLQPTANPNTGLVEDLDRTGPLSMTTQQSNSQSFSTSHEGLEEDKDHPTTSTLTSSNRNDVTGGRRDPNHSEGSTTLL

SEQ ID NO: 2343 - protein, 193 aa, Homo Sapiens
IYPSNPTDDDVSSGSSSERSSTSGGYIFYTFSTVHPIPDEDSPWITDSTDRIPATSTSSNTISAGWEPNEENEDERDRHLSFSGSGIDDDEDFISSTNMDSSHSITLQPTANPNTGLVEDLDRTGPLSMTTQQSNSQSFSTSHEGLEEDKDHPTTSTLTSSNRNDVTGGRRDPNHSEGSTTLLEGYTSHYPHT

SEQ ID NO: 2344 - protein, 78 aa, Homo Sapiens
MDKFWWHAAWGLCLVPLSLAQIDLNITCRFAGVFHVEKNGRYSISRTEAADLCKAFNSTLPTMAQMEKALSIGFETCR

SEQ ID NO: 2345 - protein, 493 aa, Homo Sapiens
MDKFWWHAAWGLCLVPLSLAQIDLNITCRFAGVFHVEKNGRYSISRTEAADLCKAFNSTLPTMAQMEKALSIGFETCRYGFIEGHVVIPRIHPNSICAANNTGVYILTSNTSQYDTYCFNASAPPEEDCTSVTDLPNAFDGPITITIVNRDGTRYVQKGEYRTNPEDIYPSNPTDDDVSSGSSSERSSTSGGYIFYTFSTVHPIPDEDSPWITDSTDRIPATNMDSSHSITLQPTANPNTGLVEDLDRTGPLSMTTQQSNSQSFSTSHEGLEEDKDHPTTSTLTSSNRNDVTGGRRDPNHSEGSTTLLEGYTSHYPHTKESRTFIPVTSAKTGSFGVTAVTVGDSNSNVNRSLSGDQDTFHPSGGSHTTHGSESDGHSHGSQEGGANTTSGPIRTPQIPEWLIILASLLALALILAVCIAVNSRRRCGQKKKLVINSGNGAVEDRKPSGLNGEASKSQEMVHLVNKESSETPDQFMTADETRNLQNVDMKIGV

SEQ ID NO: 2346 - protein, 429 aa, Homo Sapiens
MDKFWWHAAWGLCLVPLSLAQIDLNITCRFAGVFHVEKNGRYSISRTEAADLCKAFNSTLPTMAQMEKALSIGFETCRYGFIEGHVVIPRIHPNSICAANNTGVYILTSNTSQYDTYCFNASAPPEEDCTSVTDLPNAFDGPITITIVNRDGTRYVQKGEYRTNPEDIYPSNPTDDDVSSGSSSERSSTSGGYIFYTFSTVHPIPDEDSPWITDSTDRIPATNRNDVTGGRRDPNHSEGSTTLLEGYTSHYPHTKESRTFIPVTSAKTGSFGVTAVTVGDSNSNVNRSLSGDQDTFHPSGGSHTTHGSESDGHSHGSQEGGANTTSGPIRTPQIPEWLIILASLLALALILAVCIAVNSRRRCGQKKKLVINSGNGAVEDRKPSGLNGEASKSQEMVHLVNKESSETPDQFMTADETRNLQNVDMKIGV

SEQ ID NO: 2347 - protein, 361 aa, Homo Sapiens
MDKFWWHAAWGLCLVPLSLAQIDLNITCRFAGVFHVEKNGRYSISRTEAADLCKAFNSTLPTMAQMEKALSIGFETCRYGFIEGHVVIPRIHPNSICAANNTGVYILTSNTSQYDTYCFNASAPPEEDCTSVTDLPNAFDGPITITIVNRDGTRYVQKGEYRTNPEDIYPSNPTDDDVSSGSSSERSSTSGGYIFYTFSTVHPIPDEDSPWITDSTDRIPATRDQDTFHPSGGSHTTHGSESDGHSHGSQEGGANTTSGPIRTPQIPEWLIILASLLALALILAVCIAVNSRRRCGQKKKLVINSGNGAVEDRKPSGLNGEASKSQEMVHLVNKESSETPDQFMTADETRNLQNVDMKIGV

SEQ ID NO: 2348 - protein, 340 aa, Homo Sapiens
MDKFWWHAAWGLCLVPLSLAQIDLNITCRFAGVFHVEKNGRYSISRTEAADLCKAFNSTLPTMAQMEKALSIGFETCRYGFIEGHVVIPRIHPNSICAANNTGVYILTSNTSQYDTYCFNASAPPEEDCTSVTDLPNAFDGPITITIVNRDGTRYVQKGEYRTNPEDIYPSNPTDDDVSSGSSSERSSTSGGYIFYTFSTVHPIPDEDSPWITDSTDRIPATRHSHGSQEGGANTTSGPIRTPQIPEWLIILASLLALALILAVCIAVNSRRRCGQKKKLVINSGNGAVEDRKPSGLNGEASKSQEMVHLVNKESSETPDQFMTADETRNLQNVDMKIGV

SEQ ID NO: 2349 - protein, 699 aa, Homo Sapiens
MDKFWWHAAWGLCLVPLSLAQIDLNITCRFAGVFHVEKNGRYSISRTEAADLCKAFNSTLPTMAQMEKALSIGFETCRYGFIEGHVVIPRIHPNSICAANNTGVYILTSNTSQYDTYCFNASAPPEEDCTSVTDLPNAFDGPITITIVNRDGTRYVQKGEYRTNPEDIYPSNPTDDDVSSGSSSERSSTSGGYIFYTFSTVHPIPDEDSPWITDSTDRIPATSTSSNTISAGWEPNEENEDERDRHLSFSGSGIDDDEDFISSTISTTPRAFDHTKQNQDWTQWNPSHSNPEVLLQTTTRMTDVDRNGTTAYEGNWNPEAHPPLIHHEHHEEEETPHSTSTIQATPSSTTEETATQKEQWFGNRWHEGYRQTPKEDSHSTTGTAAASAHTSHPMQGRTTPSPEDSSWTDFFNPISHPMGRGHQAGRRMDMDSSHSITLQPTANPNTGLVEDLDRTGPLSMTTQQSNSQSFSTSHEGLEEDKDHPTTSTLTSSNRNDVTGGRRDPNHSEGSTTLLEGYTSHYPHTKESRTFIPVTSAKTGSFGVTAVTVGDSNSNVNRSLSGDQDTFHPSGGSHTTHGSESDGHSHGSQEGGANTTSGPIRTPQIPEWLIILASLLALALILAVCIAVNSRRRCGQKKKLVINSGNGAVEDRKPSGLNGEASKSQEMVHLVNKESSETPDQFMTADETRNLQNVDMKIGV

SEQ ID NO: 2350 - protein, 277 aa, Homo Sapiens
MDKFWWHAAWGLCLVPLSLAQIDLNITCRFAGVFHVEKNGRYSISRTEAADLCKAFNSTLPTMAQMEKALSIGFETCRYGFIEGHVVIPRIHPNSICAANNTGVYILTSNTSQYDTYCFNASAPPEEDCTSVTDLPNAFDGPITITIVNRDGTRYVQKGEYRTNPEDIYPSNPTDDDVSSGSSSERSSTSGGYIFYTFSTVHPIPDEDSPWITDSTDRIPATTASAHTSHPMQGRTTPSPEDSSWTDFFNPISHPMGRGHQAGRRMDMDSSHSITLQ

SEQ ID NO: 2351 - protein, 742 aa, Homo Sapiens
MDKFWWHAAWGLCLVPLSLAQIDLNITCRFAGVFHVEKNGRYSISRTEAADLCKAFNSTLPTMAQMEKALSIGFETCRYGFIEGHVVIPRIHPNSICAANNTGVYILTSNTSQYDTYCFNASAPPEEDCTSVTDLPNAFDGPITITIVNRDGTRYVQKGEYRTNPEDIYPSNPTDDDVSSGSSSERSSTSGGYIFYTFSTVHPIPDEDSPWITDSTDRIPATTLMSTSATATETATKRQETWDWFSWLFLPSESKNHLHTTTQMAGTSSNTISAGWEPNEENEDERDRHLSFSGSGIDDDEDFISSTISTTPRAFDHTKQNQDWTQWNPSHSNPEVLLQTTTRMTDVDRNGTTAYEGNWNPEAHPPLIHHEHHEEEETPHSTSTIQATPSSTTEETATQKEQWFGNRWHEGYRQTPKEDSHSTTGTAAASAHTSHPMQGRTTPSPEDSSWTDFFNPISHPMGRGHQAGRRMDMDSSHSITLQPTANPNTGLVEDLDRTGPLSMTTQQSNSQSFSTSHEGLEEDKDHPTTSTLTSSNRNDVTGGRRDPNHSEGSTTLLEGYTSHYPHTKESRTFIPVTSAKTGSFGVTAVTVGDSNSNVNRSLSGDQDTFHPSGGSHTTHGSESDGHSHGSQEGGANTTSGPIRTPQIPEWLIILASLLALALILAVCIAVNSRRRCGQKKKLVINSGNGAVEDRKPSGLNGEASKSQEMVHLVNKESSETPDQFMTADETRNLQNVDMKIGV

SEQ ID NO: 2352 - protein, 206 aa, Homo Sapiens
MDKFWWHAAWGLCLVPLSLAQIDLNITCRFAGVFHVEKNGRYSISRTEAADLCKAFNSTLPTMAQMEKALSIGFETCRYGFIEGHVVIPRIHPNSICGANTTSGPIRTPQIPEWLIILASLLALALILAVCIAVNSRRRCGQKKKLVINSGNGAVEDRKPSGLNGEASKSQEMVHLVNKESSETPDQFMTADETRNLQNVDMKIGV

SEQ ID NO: 2353 - protein, 139 aa, Homo Sapiens
MDKFWWHAAWGLCLVPLSLAQIDLNITCRFAGVFHVEKNGRYSISRTEAADLCKAFNSTLPTMAQMEKALSIGFETCSLHCSQQSKKVWAEEKASDQQWQWSCGGQKAKWTQRRGQQVSGNGAFGEQGVVRNSRPVYDS

SEQ ID NO: 2354 - protein, 80 aa, Homo Sapiens
MDKFWWHAAWGLCLVPLSLAQIDLNITCRFAGVFHVEKNGRYSISRTEAADLCKAFNSTLPTMAQMEKALSIGFETCSST

SEQ ID NO: 2355 - protein, 232 aa, Homo Sapiens
PEDIYPSNPTDDDVSSGSSSERSSTSGGYIFYTFSTVHPIPDEDSPWITDSTDRIPATNMDSSHSITLQPTANPNTGLVEDLDRTGPLSMTTQQSNSQSFSTSHEGLEEDKDHPTTSTLTSSRDQDTFHPSGGSHTTHGSESDGHSHGSQEGGANTTSGPIRTPQIPEWLIILASLLALALILAVCIAVNSRRRCGQKKKLVINSGNGAVEDRKPSGLNGEASKSQEMVHLV

SEQ ID NO: 2356 - protein, 195 aa, Homo Sapiens
RNGTTAYEGNWNPEAHPPLIHHEHHEEEETPHSTSTIQATPSSTTEETATQKEQWFGNRWHEGYRQTPKEDSHSTTGTADMDSSHSITLQPTANPNTGLVEDLDRTGPLSMTTQQSNSQSFSTSHEGLEEDKDHPTTSTLTSSNRNDVTGGRRDPNHSEGSTTLLEGYTSHYPHTKESRTFIPVTSAKTGSFGVT

SEQ ID NO: 2357 - protein, 187 aa, Homo Sapiens [sequence omitted]

SEQ ID NO: 2358 - protein, 287 aa, Homo Sapiens
RYSISRTEAADLCKAFNSTLPTMAQMEKALSIGFETCRYGFIEGHVVIPRIHPNSICAANNTGVYILTSNTSQYDTYCFNASAPPEEDCTSVTDLPNAFDGPITITIVNRDGTRYVQKGEYRTNPEDIYPSNPTDDDVSSGSSSERSSTSGGDQDTFHPSGGSHTTHGSESDGHSHGSQEGGANTTSGPIRTPQIPEWLIILASLLALALILAVCIAVNSRRRCGQKKKLVINSGNGAVEDRKPSGLNGEASKSQEMVHLVNKESSETPDQFMTADETRNLQNVDMK

SEQ ID NO: 2359 - protein, 82 aa, Homo Sapiens
SKHNLWSYKDTPNSRCGQKKKLVINSGNGAVEDRKPSGLNGEASKSQEMVHLVNKESSETPDQFMTADETRNLQNVDMKIGV

SEQ ID NO: 2360 - protein, 294 aa, Homo Sapiens
  misc_feature (1)..(1): Xaa can be any naturally occurring amino acid
XDKFWWHAAWGLCLVPLSLAQIDLNITCRFAGVFHVEKNGRYSISRTEAADLCKAFNSTLPTMAQMEKALSIGFETCRYGFIEGHVVIPRIHPNSICAANNTGVYILTSNTSQYDTYCFNASAPPEEDCTSVTDLPNAFDGPITITIVNRDGTRYVQKGEYRTNPEDIYPSNPTDDDVSSGSSSERSSTSGGYIFYTFSTVHPIPDEDSPWITDSTDRIPATRDQDTFHPSGGSHTTHGSESDGHSHGSQEGGANTTSGPIRTPQIPEWLIILASLLALALILAVCIAVNSRRS

SEQ ID NO: 2361 - protein, 243 aa, Homo Sapiens
  misc_feature (1)..(1): Xaa can be any naturally occurring amino acid
XDLPNAFDGPITITIVNRDGTRYVQKGEYRTNPEDIYPSNPTDDDVSSGSSSERSSTSGGYIFYTFSTVHPIPDEDSPWITDSTDRIPATTLMSTSATATETATKRQETWDWFSWLFLPSESKNHLHTTTQMAGTSSNTISAGWEPNEENEDERDRHLSFSGSGIDDDEDFISSTNMDSSHSITLQPTANPNTGLVEDLDRTGPLSMTTQQSNSQSFSTSHEGLEEDKDHPTTSTLTSSNRND

SEQ ID NO: 2362 - protein, 195 aa, Homo Sapiens
  misc_feature (1)..(1): Xaa can be any naturally occurring amino acid
XFIEGHVVIPRIHPNSICAANNTGVYILTSNTSQYDTYCFNASAPPEEDCTSVTDLPNAFDGPITITIVNRDGTRYVQKGEYRTNPEDIYPSNPTDDDVSSGSSSERSSTSGGYIFYTFSTVHPIPDEDSPWITDSTDRIPATKQSNSQSFSTSHEGLEEDKDHPTTSTLTSSNRNDVTGGRRDPNHSEGSTTLL

SEQ ID NO: 2363 - protein, 240 aa, Homo Sapiens
  misc_feature (1)..(1): Xaa can be any naturally occurring amino acid
XLNITCRFAGVFHVEKNGRYSISRTEAADLCKAFNSTLPTMAQMEKALSIGFETCRYGFIEGHVVIPRIHPNSICAANNTGVYILTSNTSQYDTYCFNASAPPEEDCTSVTDLPNAFDGPITITIVNRDGTRYVQKGEYRTNPEDIYPSNPTDDDVSSGSSSERSSTSGDRNDVTGGRRDPNHSEGSTTLLEGYTSHYPHTKESRTFIPVTSAKTGSFGVTAVTVGDSNSNVNRSLSGDQ

SEQ ID NO: 2364 - protein, 118 aa, Homo Sapiens
  misc_feature (1)..(1): Xaa can be any naturally occurring amino acid
XPDEDSPWITDSTDRIPATSWEPNEENEDERDRHLSFSGSGIDDDEDFISSTISTTPRAFDHTKQNQDWTQWNPSHSNPEVLLQTTTRMTDVDRNGTTAYEGNWNPEAHPPLIHHEHH

SEQ ID NO: 2365 - protein, 230 aa, Homo Sapiens
  misc_feature (1)..(1): Xaa can be any naturally occurring amino acid
XQMEKALSIGFETCRYGFIEGHVVIPRIHPNSICAANNTGVYILTSNTSQYDTYCFNASAPPEEDCTSVTDLPNAFDGPITITIVNRDGTRYVQKGEYRTNPEDIYPSNPTDDDVSSGSSSERSSTSGGYIFYTFSTVHPIPDEDSPWITDSTDRIPATISTTPRAFDHTKQNQDWTQWNPSHSNPEVLLQTTTRMTDVDRNGTTAYEGNWNPEAHPPLIHHEHHEEEET

SEQ ID NO: 2366 - protein, 183 aa, Homo Sapiens
  misc_feature (1)..(1): Xaa can be any naturally occurring amino acid
XRTEAADLCKAFNSTLPTMAQMEKALSIGFETCRYGFIEGHVVIPRIHPNSICAANNTGVYILTSNTSQYDTYCFNASAPPEEDCTSVTDLPNAFDGPITITIVNRDGTRYVQKGEYRTNPEDIYPSNPTDDDVSSGSSSERSSTSGDMDSSHSITLQPTANPNTGLVEDLDRTGPLSMTTQQ

SEQ ID NO: 2367 - protein, 191 aa, Homo Sapiens
  misc_feature (1)..(1): Xaa can be any naturally occurring amino acid
XSTTPRAFDHTKQNQDWTQWNPSHSNPEVLLQTTTRMTVQATPSSTTEETATQKEQWFGNRWHEGYRQTPKEDSHSTTGTAASAHTSHPMQGRTTPSPEDSSWTDFFNPISHPMGRGHQAGRRMDMDSSHSITLQPTANPNTGLVEDLDRTGPLSMTTQQSNSQSFSTSHEGLEEDKDHPTTSTLTSSNRN

SEQ ID NO: 2368 - protein, 243 aa, Homo Sapiens
MCSRGWDSCLALELLLLPLSLLVTSIQGHLVHMTVVSGSNVTLNISESLPENYKQLTWFYTFDQKIVEWDSRKSKYFESKFKGRVRLDPQSGALYISKVQKEDNSTYIMRVLKKTGNEQEWKIKLQVLDPVPKPVIKIEKIEDMDDNCYLKLSCVIPGESVNYTWYGDKRPFPKELQNSVLETTLMPHNYSRCYTCQVSNSVSSKNGTVCLSPPCTLARSFGVEWIASWLVVTVPTILGLLLT

SEQ ID NO: 2369 - protein, 252 aa, Homo Sapiens
MCSRGWDSCLALELLLLPLSLLVTSIQGHLVHMTVVSGSNVTLNISESLPENYKQLTWFYTFDQKIVEWDSRKSKYFESKFKGRVRLDPQSGALYISKVQKEDNSTYIMRVLKKTGNEQEWKIKLQVLDPVPKPVIKIEKIEDMDDNCYLKLSCVIPGESVNYTWYGDKRPFPKELQNSVLETTLMPHNYSRCYTCQVSNSVSSKNGTVCLSPPCTLGKKDPWELRGAQGNWSCFEQRKAGGPIQPPCTVWW

SEQ ID NO: 2370 - protein, 169 aa, Homo Sapiens
MCSRGWDSCLALELLLLPLSLLVTSIQGHLVHMTVVSGSNVTLNISESLPENYKQLTWFYTFDQKIVEWDSRKSKYFESKFKGRVRLDPQSGALYISKVQKEDNSTYIMRVLKKTGNEQEWKIKLQVLGESGEPKSKSPLQWPQMDHCRASWEAWGTLGEEERKTSGQV

SEQ ID NO: 2371 - protein, 165 aa, Homo Sapiens
MPMGSLQPLATLYLLGMLVASCLGRLSWYDPDFQARLTRSNSKCQGQLEVYLKDGWHMVCSQSWGRSSKQWEDPSQASKVCQRLNCGVPLSLGPFLVTYTPQSSIICYGQLGSFSNCSHSRNDMCHSLGLTCLEPQKTTPPTTRPPPTTTPEPTAMRPRTRPRTW

SEQ ID NO: 2372 - protein, 495 aa, Homo Sapiens
MPMGSLQPLATLYLLGMLVASCLGRLSWYDPDFQARLTRSNSKCQGQLEVYLKDGWHMVCSQSWGRSSKQWEDPSQASKVCQRLNCGVPLSLGPFLVTYTPQSSIICYGQLGSFSNCSHSRNDMCHSLGLTCLEPQKTTPPTTRPPPTTTPEPTAPPRLQLVAQSGGQHCAGVVEFYSGSLGGTISYEAQDKTQDLENFLCNNLQCGSFLKHLPETEAGRAQDPGEPREHQPLPIQWKIQNSSCTSLEHCFRKIKPQKSGRVLALLCSGFQPKVQSRLVGGSSICEGTVEVRQGAQWAALCDSSSARSSLRWEEVCREQQCGSVNSYRVLDAGDPTSRGLFCPHQKLSQCHELWERNSYCKKVFVTCQDPNPAGLAAGTVASIILALVLLVVLLVVCGPLAYKKLVKKFRQKKQRQWIGPTGMNQNMSFHRNHTATVRSHAENPTASHVDNEYSQPPRNSHLSAYPALEGALHRSSMQPDNSSDSDYDLHGAQRL

SEQ ID NO: 2373 - protein, 317 aa, Homo Sapiens
MTVARPSVPAALPLLGELPRLLLLVLLCLPAVWGDCGLPPDVPNAQPALEGRTSFPEDTVITYKCEESFVKIPGEKDSVICLKGSQWSDIEEFCNQKSCPNPGEIRNGQIDVPGGILFGATISFSCNTGYKLFGSTSSFCLISGSSVQWSDPLPECREIYCPAPPQIDNGIIQGERDHYGYRQSVTYACNKGFTMIGEHSIYCTVNNDEGEWSGPPPECRGKSLTSKVPPTVQKPTTVNVPTTEVSPTSQKTTTKTTTPNAQATRSTPVSRTTKHFHETTPNKGSGTTSGTTRLLSGHTCFTLTGLLGTLVTMGLLT

SEQ ID NO: 2374 - protein, 440 aa, Homo Sapiens
MTVARPSVPAALPLLGELPRLLLLVLLCLPAVWGDCGLPPDVPNAQPALEGRTSFPEDTVITYKCEESFVKIPGEKDSVICLKGSQWSDIEEFCNRSCEVPTRLNSASLKQPYITQNYFPVGTVVEYECRPGYRREPSLSPKLTCLQNLKWSTAVEFCKKKSCPNPGEIRNGQIDVPGGILFGATISFSCNTGYKLFGSTSSFCLISGSSVQWSDPLPECREIYCPAPPQIDNGIIQGERDHYGYRQSVTYACNKGFTMIGEHSIYCTVNNDEGEWSGPPPECRGKSLTSKVPPTVQKPTTVNVPTTEVSPTSQKTTTKTTTPNAQATRSTPVSRTTKHFHETTPNKGSGTTSGTTRLLSGSRPVTQAGMRWCDRSSLQSRTPGFKRSFHFSLPSSWYYRAHVFHVDRFAWDASNHGLADLAKEELRRKYTQVYRLFLVS

SEQ ID NO: 2375 - protein, 381 aa, Homo Sapiens
MTVARPSVPAALPLLGELPRLLLLVLLCLPAVWGDCGLPPDVPNAQPALEGRTSFPEDTVITYKCEESFVKIPGEKDSVICLKGSQWSDIEEFCNRSCEVPTRLNSASLKQPYITQNYFPVGTVVEYECRPGYRREPSLSPKLTCLQNLKWSTAVEFCKKKSCPNPGEIRNGQIDVPGGILFGATISFSCNTGYKLFGSTSSFCLISGSSVQWSDPLPECREIYCPAPPQIDNGIIQGERDHYGYRQSVTYACNKGFTMIGEHSIYCTVNNDEGEWSGPPPECRGKSLTSKVPPTVQKPTTVNVPTTEVSPTSQKTTTKTTTPNAQATRSTPVSRTTKHFHETTPNKGSGTTSGTTRLLSGHTCFTLTGLLGTLVTMGLLT

SEQ ID NO: 2376 - protein, 444 aa, Homo Sapiens
MTVARPSVPAALPLLGELPRLLLLVLLCLPAVWGDCGLPPDVPNAQPALEGRTSFPEDTVITYKCEESFVKIPGEKDSVICLKGSQWSDIEEFCNRSCEVPTRLNSASLKQPYITQNYFPVGTVVEYECRPGYRREPSLSPKLTCLQNLKWSTAVEFCKKKSCPNPGEIRNGQIDVPGGILFGATISFSCNTGYKLFGSTSSFCLISGSSVQWSDPLPECREIYCPAPPQIDNGIIQGERDHYGYRQSVTYACNKGFTMIGEHSIYCTVNNDEGEWSGPPPECRGKSLTSKVPPTVQKPTTVNVPTTEVSPTSQKTTTKTTTPNAQATRSTPVSRTTKHFHETTPNKGSGTTSGTTRLLSGSRPVTQAGMRWCDRSSLQSRTPGFKRSFHFSLPSSWYYRCVPRHPAKFLKFIFCRDRIFLCCPGWFQTPGRKRFFRPPKTLRL

SEQ ID NO: 2377 - protein, 550 aa, Homo Sapiens
MTVARPSVPAALPLLGELPRLLLLVLLCLPAVWGDCGLPPDVPNAQPALEGRTSFPEDTVITYKCEESFVKIPGEKDSVICLKGSQWSDIEEFCNRSCEVPTRLNSASLKQPYITQNYFPVGTVVEYECRPGYRREPSLSPKLTCLQNLKWSTAVEFCKKKSCPNPGEIRNGQIDVPGGILFGATISFSCNTGYKLFGSTSSFCLISGSSVQWSDPLPECREIYCPAPPQIDNGIIQGERDHYGYRQSVTYACNKGFTMIGEHSIYCTVNNDEGEWSGPPPECRGKSLTSKVPPTVQKPTTVNVPTTEVSPTSQKTTTKTTTPNAQGTETPSVLQKHTTENVSATRTPPTPQKPTTVNVPATIVTPTPKPTTINVPATGVSSTPQRHTIVNVSATGTLPTLQKPTRANDSATKSPAAAQTSFISKTLSTKTPSAAQNPMMTNASATQATLTAQKFTTAKVAFTQSPSAARKSTNVHSPVTNGLKSTQRFPSAHITATRSTPVSRTTKHFHETTPNKGSGTTSGTTRLLSGHTCFTLTGLLGTLVTMGLLT

SEQ ID NO: 2378 - protein, 439 aa, Homo Sapiens
MTVARPSVPAALPLLGELPRLLLLVLLCLPAVWGDCGLPPDVPNAQPALEGRTSFPEDTVITYKCEESFVKIPGEKDSVICLKGSQWSDIEEFCNRSCEVPTRLNSASLKQPYITQNYFPVGTVVEYECRPGYRREPSLSPKLTCLQNLKWSTAVEFCKKKSCPNPGEIRNGQIDVPGGILFGATISFSCNTGYKLFGSTSSFCLISGSSVQWSDPLPECREIYCPAPPQIDNGIIQGERDHYGYRQSVTYACNKGFTMIGEHSIYCTVNNDEGEWSGPPPECRGKSLTSKVPPTVQKPTTVNVPTTEVSPTSQKTTTKTTTPNAQATRSTPVSRTTKHFHETTPNKGSGTTSGTTRLLSETVFHRVIQDGLDLLASRSACLGLPKCWDYRREPPHLARAHVFHVDRFAWDASNHGLADLAKEELRRKYTQVYRLFLVS

SEQ ID NO: 2379 - protein, 384 aa, Homo Sapiens
MTVARPSVPAALPLLGELPRLLLLVLLCLPAVWGDCGLPPDVPNAQPALEGRTSFPEDTVITYKCEESFVKIPGEKDSVICLKGSQWSDIEEFCNRSCEVPTRLNSASLKQPYITQNYFPVGTVVEYECRPGYRREPSLSPKLTCLQNLKWSTAVEFCKKKSCPNPGEIRNGQIDVPGGILFGATISFSCNTGYKLFGSTSSFCLISGSSVQWSDPLPECREIYCPAPPQIDNGIIQGERDHYGYRQSVTYACNKGFTMIGEHSIYCTVNNDEGEWSGPPPECRGKSLTSKVPPTVQKPTTVNVPTTEVSPTSQKTTTKTTTPNAQATRSTPVSRTTKHFHETTPNKGSGTTSGTTRLLSALQVRPFEVSGSSHISSKKMMCIL

SEQ ID NO: 2380 - protein, 326 aa, Homo Sapiens
  misc_feature (1)..(1): Xaa can be any naturally occurring amino acid
XAALPLLGELPRLLLLVLLCLPAVWESSRVEHTMLQTCMSSLSGDCGLPPDVPNAQPALEGRTSFPEDTVITYKCEESFVKIPGEKDSVICLKGSQWSDIEEFCNRSCEVPTRLNSASLKQPYITQNYFPVGTVVEYECRPGYRREPSLSPKLTCLQNLKWSTAVEFCKKKSCPNPGEIRNGQIDVPGGILFGATISFSCNTGYKLFGSTSSFCLISGSSVQWSDPLPECREIYCPAPPQIDNGIIQGERDHYGYRQSVTYACNKGFTMIGEHSIYCTVNNDEGEWSGPPPECRGKSLTSKVPPTVQKPTTVNVPTTEVSPTSQKT

SEQ ID NO: 2381 - protein, 268 aa, Homo Sapiens
  misc_feature (1)..(1): Xaa can be any naturally occurring amino acid
XGEIRNGQIDVPGGILFGATISFSCNTGYKLFGSTSSFCLISGSSVQWSDPLPECREIYCPAPPQIDNGIIQGERDHYGYRQSVTYACNKGFTMIGEHSIYCTVNNDEGEWSGPPPECRGKSLTSKVPPTVQKPTTVNVPTTEVSPTSQKTTTKTTTPNAQATRSTPVSRTTKHFHETTPNKGSGTTSGTTRLLSESYSVTQAGVWWCDLRSLQPLPPEFKQFSCLSLRSSWDYRIITGHLLPGDFSVPSTIVDGIYFPTPLSPFFVG

SEQ ID NO: 2382 - protein, 194 aa, Homo Sapiens
  misc_feature (1)..(1): Xaa can be any naturally occurring amino acid
XREIYCPAPPQIDNGIIQGERDHYGYRQSVTYACNKGFTMIGEHSIYCTVNNDEGEWSGPPPECRGKSLTSKVPPTVQKPTTVNVPTTEVSPTSQKTTTKTTTPNAQATRSTPVSRTTKHFHETTPNKGSGTTSGTTRLLSESYSVTQAGVWWCDLRSLQPLPPEFKQFSCLSLRSSWDYRIEAADLHSECYSS

SEQ ID NO: 2383 - protein, 61 aa, Homo Sapiens
  misc_feature (1)..(1): Xaa can be any naturally occurring amino acid
XTTEVSPTSQKTTTKTTTPNAQATRSTPVSRTTKHFHETTPNKGSGTTSGTTRLLSAIFSC

SEQ ID NO: 2384 - protein, 119 aa, Homo Sapiens
MGIQGGSVLFGLLLVLAVFCHSGHSLQCYNCPNPTADCKTAVNCSSDFDACLITKAELGYHYVAQAGRRQSSHFSLLKCWDYRCEPSHWPHCPYFNWGYKCITSVGSLSIAISTTSQPA

SEQ ID NO: 2385 - protein, 119 aa, Homo Sapiens; identical to SEQ ID NO: 2384

SEQ ID NO: 2386 - protein, 120 aa, Homo Sapiens
MGIQGGSVLFGLLLVLAVFCHSGHSLQCYNCPNPTADCKTAVNCSSDFDACLITKAGLQVYNKCWKFEHCNFNDVTTRLRENELTYYCCKKDLCNFNEQLENGGTSLSEKTVLLLVTPFL

SEQ ID NO: 2387 - protein, 128 aa, Homo Sapiens
MGIQGGSVLFGLLLVLAVFCHSGHSLQCYNCPNPTADCKTAVNCSSDFDACLITKAGLQVYNKCWKFEHCNFNDVTTRLRENELTYYCCKKDLCNFNEQLENGGTSLSEKTVLLLVTPFLAAAWSLHP

SEQ ID NO: 2388 - protein, 128 aa, Homo Sapiens; identical to SEQ ID NO: 2387

SEQ ID NO: 2389 - protein, 128 aa, Homo Sapiens; identical to SEQ ID NO: 2387

SEQ ID NO: 2390 - protein, 128 aa, Homo Sapiens; identical to SEQ ID NO: 2387

SEQ ID NO: 2391 - protein, 128 aa, Homo Sapiens; identical to SEQ ID NO: 2387

SEQ ID NO: 2392 - protein, 128 aa, Homo Sapiens; identical to SEQ ID NO: 2387

SEQ ID NO: 2393 - protein, 128 aa, Homo Sapiens; identical to SEQ ID NO: 2387

SEQ ID NO: 2394 - protein, 128 aa, Homo Sapiens; identical to SEQ ID NO: 2387

SEQ ID NO: 2395 - protein, 347 aa, Homo Sapiens
MALLFSLILAICTRPGFLASPSGVRLVGGLHRCEGRVEVEQKGQWGTVCDDGWDIKDVAVLCRELGCGAASGTPSGILYEPPAEKEQKVLIQSVSCTGTEDTLAQCEQEEVYDCSHDEDAGASCENPESSFSPVPEGVRLADGPGHCKGRVEVKHQNQWYTVCQTGWSLRAAKVVCRQLGCGRAVLTQKRCNKHAYGRKPIWLSQMSCSGREATLQDCPSGPWGKNTCNHDEDTWVECEDPFDLRLVGGDNLCSGRLEVLHKGVWGSVCDDNWGEKEDQVVCKQLGCGKSLSPSFRDRKCYGPGVGRIWLDNVRCSGEEQSLEQCQHRFWGFHDCTHQEDVAVICSG

SEQ ID NO: 2396 - protein, 38 aa, Homo Sapiens
MWLFFGITGLLTAALSGCTVAKWIQLLGEICCFAGMGF

SEQ ID NO: 2397 - protein, 468 aa, Homo Sapiens
MWLFFGITGLLTAALSGHPSPAPPDQLNTSSAESELWEPGERLPVRLTNGSSSCSGTVEVRLEASWEPACGALWDSRAAEAVCRALGCGGAEAASQLAPPTPELPPPPAAGNTSVAANATLAGAPALLCSGAEWRLCEVVEHACRSDGRRARVTCAENRALRLVDGGGACAGRVEMLEHGEWGSVCDDTWDLEDAHVVCRQLGCGWAVQALPGLHFTPGRGPIHRDQVNCSGAEAYLWDCPGLPGQHYCGHKEDAGAVCSEHQSWRLTGGADRCEGQVEVHFRGVWNTVCDSEWYPSEAKVLCQSLGCGTAVERPKGLPHSLSGRMYYSCNGEELTLSNCSWRFNNSNLCSQSLAARVLCSASRSLHNLSTPEVPASVQTVTIESSVTVKIENKESRELMLLIPSIVLGILLLGSLIFIAFILLRIKGKYALPVMVNHQHLPTTIPAGSNSYQPVPITIPKEGPGPAP

SEQ ID NO: 2398 - protein, 668 aa, Homo Sapiens
MWLFFGITGLLTAALSGHPSPAPPDQLNTSSAESELWEPGERLPVRLTNGSSSCSGTVEVRLEASWEPACGALWDSRAAEAVCRALGCGGAEAASQLAPPTPELPPPPAAGNTSVAANATLAGAPALLCSGAEWRLCEVVEHACRSDGRRARVTCAENRALRLVDGGGACAGRVEMLEHGEWGSVCDDTWDLEDAHVVCRQLGCGWAVQALPGLHFTPGRGPIHRDQVNCSGAEAYLWDCPGLPGQHYCGHKEDAGAVCSEHQSWRLTGGADRCEGQVEVHFRGVWNTVCDSEWYPSEAKVLCQSLGCGTAVERPKGLPHSLSGRMYYSCNGEELTLSNCSWRFNNSNLCSQSLAARVLCSASRSLHNLSTPEVPASVQTVTIESSVTVKIENKESRELMLLIPSIVLGILLLGSLIFIAFILLRIKGKYALPVMVNHQHLPTTIPAGSNSYQPVPITIPKEVFMLPIQVQAPPPEDSDSGSDSDYEHYDFSAQPPVALTTFYNSQRHRVTDEEVQQSRFQMPPLEEGLEELHASHIPTANPGHCITDPPSLGPQYHPRSNSESSTSSGEDYCNSPKSKLPPWNPQVFSSERSSFLEQPPNLELAGTQPAFSAGPPADDSSSTSSGEWYQNFQPPPQPPSEEQFGCPGSPSPQPDSTDNDDYDDISAA

SEQ ID NO: 2399 - protein, 601 aa, Homo Sapiens
MWLFFGITGLLTAALSGHPSPAPPDQLNTSSAESELWEPGERLPVRLTNGSSSCSGTVEVRLEASWEPACGALWDSRAAEAVCRALGCGGAEAASQLAPPTPELPPPPAAGNTSVAANATLAGAPALLCSGAEWRLCEVVEHACRSDGRRARVTCAENRALRLVDGGGACAGRVEMLEHGEWGSVCDDTWDLEDAHVVCRQLGCGWAVQALPGLHFTPGRGPIHRDQVNCSGAEAYLWDCPGLPGQHYCGHKEDAGAVCSEHQSWRLTGGADRCEGQVEVHFRGVWNTVCDSEWYPSEAKVLCQSLGCGTAVERPKGLPHSLSGRMYYSCNGEELTLSNCSWRFNNSNLCSQSLAARVLCSASRSLHNLSTPEVPASVQTVTIESSVTVKIENKESRELMLLIPSIVLGILLLGSLIFIAFILLRIKGKYVFMLPIQVQAPPPEDSDSGSDSDYEHYDFSAQPPVALTTFYNSQRHRVTDEEVQQSRFQMPPLEEGLEELHASHIPTANPGHCITDPPSLGPQYHPRSNSESSTSSGEDYCNSPKSKLPPWNPQVFSSERSSFLEQPPNLELAGTQPAFSGSPSPQPDSTDNDDYDDISAA

SEQ ID NO: 2400 - protein, 592 aa, Homo Sapiens
MWLFFGITGLLTAALSGHPSPAPPDQLNTSSAESELWEPGERLPVRLTNGSSSCSGTVEVRLEASWEPACGALWDSRAAEAVCRALGCGGAEAASQLAPPTPELPPPPAAGNTSVAANATLAGAPALLCSGAEWRLCEVVEHACRSDGRRARVTCAENRALRLVDGGGACAGRVEMLEHGEWGSVCDDTWDLEDAHVVCRQLGCGWAVQALPGLHFTPGRGPIHRDQVNCSGAEAYLWDCPGLPGQHYCGHKEDAGAVCSEHQSWRLTGGADRCEGQVEVHFRGVWNTVCDSEWYPSEAKVLCQSLGCGTAVERPKGLPHSLSGRMYYSCNGEELTLSNCSWRFNNSNLCSQSLAARVLCSASRSLHNLSTPEVPASVQTVTIESSVTVKIENKESRELMLLIPSIVLGILLLGSLIFIAFILLRIKGKYALPVMVNHQHLPTTIPAGSNSYQPVPITIPKEDSQRHRVTDEEVQQSRFQMPPLEEGLEELHASHIPTANPGHCITDPPSLGPQYHPRSNSESSTSSGEDYCNSPKSKLPPWNPQVFSSERSSFLEQPPNLELAGTQPAFSGSPSPQPDSTDNDDYDDISAA

SEQ ID NO: 2401 - protein, 422 aa, Homo Sapiens
MWLFFGITGLLTAALSGHPSPAPPDQLNTSSAESELWEPGERLPVRLTNGSSSCSGTVEVRLEASWEPACGALWDSRAAEAVCRALGCGGAEAASQLAPPTPELPPPPAAGNTSVAANATLAGAPALLCSGAEWRLCEVVEHACRSDGRRARVTCAENRALRLVDGGGACAGRVEMLEHGEWGSVCDDTWDLEDAHVVCRQLGCGWAVQALPGLHFTPGRGPIHRDQVNCSGAEAYLWDCPGLPGQHYCGHKEDAGAVCSASRSLHNLSTPEVPASVQTVTIESSVTVKIENKESRELMLLIPSIVLGILLLGSLIFIAFILLRIKGKYVFMLPIQVQAPPPEDSDSGSDSDYEHYDFSAQPPVALTTFYNSQRHRVTDEEVQQSRFQMPPLEEGLEELHASHIPTANPGHCITDPPSLGPQ

SEQ ID NO: 2402 - protein, 278 aa, Homo Sapiens
MWLFFGITGLLTAALSGHPSPAPPDQLNTSSAESELWEPGERLPVRLTNGSSSCSGTVEVRLEASWEPACGALWDSRAAEAVCRALGCGGAEAASQLAPPTPELPPPPAAGNTSVAANATLAGAPALLCSGAEWRLCEVVEHACRSDGRRARVTCAENRALRLVDGGGACAGRVEMLEHGEWGSVCDDTWDLEDAHVVCRQLGCGWAVQALPGLHFTPGRGPIHRDQVNCSGAEAYLWDCPGLPGQHYCGHKEDAGAVCSESSVTVKIENKESRELML

SEQ ID NO: 2403 - protein, 186 aa, Homo Sapiens
  misc_feature (1)..(1): Xaa can be any naturally occurring amino acid
XNRALRLVDGGGACAGRVEMLEHGEWGSVCDDTWDLEDAHVVCRQLGCGWAVQALPGLHFTPGRGPIHRDQVNCSGAEAYLWDCPGLPGQHYCGHKEDAGAVCSASRSLHNLSTPEVPASVQTVTIESSVTVKIENKESRELMLLIPSIVLGILLLGSLIFIAFILLRIKGKYALPVMVNHQHLPT

SEQ ID NO: 2404 - protein, 354 aa, Homo Sapiens
MRLAVLFSGALLGLLAAQGTGNDCPHKKSATLLPSFTVTPTVTESTGTTSHRTTKSHKTTTHRTTTTGTTSHGPTTATHNPTTTSHGNVTVHPTSNSTATSQGPSTATHSPATTSHGNATVHPTSNSTATSPGFTSSAHPEPPPPSPSPSPTSKETIGDYTWTNGSQPCVHLQAQIQIRVMYTTQGGGEAWGISVLNPNKTKVQGSCEGAHPHLLLSFPYGHLSFGFMQDLQQKVVYLSYMAVEYNVSFPHAAQWTFSAQNASLRDLQAPLGQSFSCSNSSIILSPAVHLDLLSLRLQAAQLPHTGVFGQSFSCPSDRSILLPLIIGLILLGLLALVLIAFCIIRRRPSAYQAL

SEQ ID NO: 2405 - protein, 181 aa, Homo Sapiens [sequence omitted]

SEQ ID NO: 2406 - protein, 327 aa, Homo Sapiens
MRLAVLFSGALLGLLAESTGTTSHRTTKSHKTTTHRTTTTGTTSHGPTTATHNPTTTSHGNVTVHPTSNSTATSQGPSTATHSPATTSHGNATVHPTSNSTATSPGFTSSAHPEPPPPSPSPSPTSKETIGDYTWTNGSQPCVHLQAQIQIRVMYTTQGGGEAWGISVLNPNKTKVQGSCEGAHPHLLLSFPYGHLSFGFMQDLQQKVVYLSYMAVEYNVSFPHAAQWTFSAQNASLRDLQAPLGQSFSCSNSSIILSPAVHLDLLSLRLQAAQLPHTGVFGQSFSCPSDRSILLPLIIGLILLGLLALVLIAFCIIRRRPSAYQAL

SEQ ID NO: 2407 - protein, 121 aa, Homo Sapiens
  misc_feature (1)..(1): Xaa can be any naturally occurring amino acid
XKTKVQGSCEGAHPHLLLSFPYGHLSFGFMQDLQQKVVYLSYMAVEYNVSFPHAAQWTFSAQNASLRDLQAPLGQSFSCSNSSIILSPAVHLDLLSLRLQAAQLPHTGVFGQSKTYLLLPS

SEQ ID NO: 2408 - protein, 35 aa, Homo Sapiens
MAGPPRLLLLPLLLALARGLPGALAAQAGACVGST

SEQ ID NO: 2409 - protein, 240 aa, Homo Sapiens
MAGPPRLLLLPLLLALARGLPGALAAQEVQQSPHCTTVPVGASVNITCSTSGGLRGIYLRQLGPQPQDIIYYEDGVVPTTDRRFRGRIDFSGSQDNLTITMHRLQLSDTGTYTCQAITEVNVYGSGTLVLVTEEQSQGWHRCSDAPPRASALPAPPTGSALPDPQTASALPDPPAASALPAALAVISFLLGLGLGVACVLARTQIKKLCSWRDKNSAACVVYEDMSHSRCNTLSSPNQYQ

SEQ ID NO: 2410 - protein, 221 aa, Homo Sapiens
MAGPPRLLLLPLLLALARGLPGALAAQEVQQSPHCTTVPVGASVNITCSTSGGLRGIYLRQLGPQPQDIIYYEDGVVPTTDRRFRGRIDFSGSQDNLTITMHRLQLSDTGTYTCQAITEVNVYGSGTLVLVTEEQSQGWHRCSDAPPRASALPAPPTGSALPDPQTASALPDPPAASALPAALAVISFLLGLGLGVACVLARTQVSVSPSCHLHPKDCSLS

SEQ ID NO: 2411 - protein, 160 aa, Homo Sapiens
MAGPPRLLLLPLLLALARGLPGALAAQGRTFSVLLARLMVTAQVLPRGAAVSPLHDCPRGSLRQHHLLHQRGPAWDLPEAARATAPRHHLLRGRGGAHYGQTVPGPHRLLRVPGQPDYHHAPPAAVGHWHLHLPGHHGGQCLRLRHPGPGDRGTVPRMAQ

SEQ ID NO: 2412 - protein, 140 aa, Homo Sapiens
MHRLQLSDTGTYTCQAITEVNVYGSGTLVLVTEEQSQGWHRCSDAPPRASALPAPPTGSALPDPQTASALPDPPAASALPAALAVISFLLGLGLGVACVLARTQIKKLCSWRDKNSAACVVYEDMSHSRCNTLSSPNQYQ

SEQ ID NO: 2413 - protein, 121 aa, Homo Sapiens
MHRLQLSDTGTYTCQAITEVNVYGSGTLVLVTEEQSQGWHRCSDAPPRASALPAPPTGSALPDPQTASALPDPPAASALPAALAVISFLLGLGLGVACVLARTQVSVSPSCHLHPKDCSLS

SEQ ID NO: 2414 - protein, 188 aa, Homo Sapiens
MPGGPGVLQALPATIFLLFLLSAVYLGPGCQALWMHKVPASLMVSLGEDAHFQCPHNSSNNANVTWWRVLHGNYTWPPEFLGPGEDPNEPPPRPFLDMGEGTKNRIITAEGIILLFCAVVPGTLLLFRKRWQNEKLGLDAGDEYEDENLYEGLNLDDCSMYEDISRGLQGTYQDVGSLNIGDVQLEKP

SEQ ID NO: 2415 - protein, 226 aa, Homo Sapiens
MPGGPGVLQALPATIFLLFLLSAVYLGPGCQALWMHKVPASLMVSLGEDAHFQCPHNSSNNANVTWWRVLHGNYTWPPEFLGPGEDPNGTLIIQNVNKSHGGIYVCRVQEGNESYQQSCGTYLRVRQPPPRPFLDMGEGTKNRIITAEGIILLFCAVVPGTLLLFRKRWQNEKLGLDAGDEYEDENLYEGLNLDDCSMYEDISRGLQGTYQDVGSLNIGDVQLEKP

SEQ ID NO: 2416 - protein, 258 aa, Homo Sapiens
MPGGPGVLQALPATIFLLFLLSAVYLGPGCQALWMHKVPASLMVSLGEDAHFQCPHNSSNNANVTWWRVLHGNYTWPPEFLGPGEDPNGTLIIQNVNKSHGGIYVCRVQEGNESYQQSCGTYLRVRREWPSPGPYSHCPAGDTRFIFEVGIEPVPSMWVSNRLGQRDGHSPLQSGVSGGSGALQEVGGARRLGRARGARALSHTTSLQSRPPGPSWTWGRAPRTESSQPRGSSSCSARWCLGRCCCSGNDGRTRSSGW

SEQ ID NO: 2417 - protein, 256 aa, Homo Sapiens
MGHTRRQGTSPSKCPYLNFFQLLVLAGLSHFCSGVIHVTKEVKEVATLSCGHNVSVEELAQTRIYWQKEKKMVLTMMSGDMNIWPEYKNRTIFDITNNLSIVILALRPSDEGTYECVVLKYEKDAFKREHLAEVTLSVKADFPTPSISDFEIPTSNIRRIICSTSGGFPEPHLSWLENGEELNAINTTVSQDPETELYAVSSKLDFNMTTNHSFMCLIKYGHLRVNQTFNWNTSFAPRCRERRRNERLRRESVRPV

SEQ ID NO: 2418 - protein, 288 aa, Homo Sapiens
MGHTRRQGTSPSKCPYLNFFQLLVLAGLSHFCSGVIHVTKEVKEVATLSCGHNVSVEELAQTRIYWQKEKKMVLTMMSGDMNIWPEYKNRTIFDITNNLSIVILALRPSDEGTYECVVLKYEKDAFKREHLAEVTLSVKADFPTPSISDFEIPTSNIRRIICSTSGGFPEPHLSWLENGEELNAINTTVSQDPETELYAVSSKLDFNMTTNHSFMCLIKYGHLRVNQTFNWNTTKQEHFPDNLLPSWAITLISVNGIFVICCLTYCFAPRCRERRRNERLRRESVRPV

SEQ ID NO: 2419 - protein, 288 aa, Homo Sapiens; identical to SEQ ID NO: 2418

SEQ ID NO: 2420 - protein, 217 aa, Homo Sapiens
MDPQCTMGLSNILFVMAFLLSANFSQPEIVPISNITENVYINLTCSSIHGYPEPKKMSVLLRTKNSTIEYDGVMQKSQDNVTELYDVSISLSVSFPDVTSNMTIFCILETDKTRLLSSPFSIELEDPQPPPDHIPWITAVLPTVIICVMVFCLILWKWKKKKRPRNSYKCGTNTMEREESEQTKKREKIHIPERSDEAQRVFKSSKTSSCDKSDTCF

SEQ ID NO: 2421 - protein, 329 aa, Homo Sapiens
MDPQCTMGLSNILFVMAFLLSGAAPLKIQAYFNETADLPCQFANSQNQSLSELVVFWQDQENLVLNEVYLGKEKFDSVHSKYMGRTSFDSDSWTLRLHNLQIKDKGLYQCIIHHKKPTGMIRIHQMNSELSVLANFSQPEIVPISNITENVYINLTCSSIHGYPEPKKMSVLLRTKNSTIEYDGVMQKSQDNVTELYDVSISLSVSFPDVTSNMTIFCILETDKTRLLSSPFSIELEDPQPPPDHIPWITAVLPTVIICVMVFCLILWKWKKKKRPRNSYKCGTNTMEREESEQTKKREKIHIPERSDEAQRVFKSSKTSSCDKSDTCF

SEQ ID NO: 2422 - protein, 167 aa, Homo Sapiens
MGLSNILFVMAFLLSGAAPLKIQAYFNETADLPCQFANSQNQSLSELVVFWQDQENLVLNEVYLGKEKFDSVHSKYMGRTSFDSDSWTLRLHNLQIKDKGLYQCIIHHKKPTGMIRIHQMNSELSVLANFSQPEIVPISNITENVYINLTCSSIHGYPEPKKMSVLL

SEQ ID NO: 2423 - protein, 323 aa, Homo Sapiens
MGLSNILFVMAFLLSGAAPLKIQAYFNETADLPCQFANSQNQSLSELVVFWQDQENLVLNEVYLGKEKFDSVHSKYMGRTSFDSDSWTLRLHNLQIKDKGLYQCIIHHKKPTGMIRIHQMNSELSVLANFSQPEIVPISNITENVYINLTCSSIHGYPEPKKMSVLLRTKNSTIEYDGVMQKSQDNVTELYDVSISLSVSFPDVTSNMTIFCILETDKTRLLSSPFSIELEDPQPPPDHIPWITAVLPTVIICVMVFCLILWKWKKKKRPRNSYKCGTNTMEREESEQTKKREKIHIPERSDEAQRVFKSSKTSSCDKSDTCF

SEQ ID NO: 2424 - protein, 275 aa, Homo Sapiens
MGLSNILFVMAFLLSGAAPLKIQAYFNETADLPCQFANSQNQSLSELVVFWQDQENLVLNEVYLGKEKFDSVHSKYMGRTSFDSDSWTLRLHNLQIKDKGLYQCIIHHKKPTGMIRIHQMNSELSVLANFSQPEIVPISNITENVYINLTCSSIHGYPEPKKMSVLLRTKNSTIEYDGVMQKSQDNVTELYDVSISLSVSFPDVTSNMTIFCILETDKTRLLSSPFSIGTNTMEREESEQTKKREKIHIPERSDEAQRVFKSSKTSSCDKSDTCF

SEQ ID NO: 2425 - protein, 247 aa, Homo Sapiens
MGRTSFDSDSWTLRLHNLQIKDKGLYQCIIHHKKPTGMIRIHQMNSELSVLANFSQPEIVPISNITENVYINLTCSSIHGYPEPKKMSVLLRTKNSTIEYDGVMQKSQDNVTELYDVSISLSVSFPDVTSNMTIFCILETDKTRLLSSPFSIELEDPQPPPDHIPWITAVLPTVIICVMVFCLILWKWKKKKRPRNSYKCGTNTMEREESEQTKKREKIHIPERSDEAQRVFKSSKTSSCDKSDTCF

SEQ ID NO: 2426 - protein, 277 aa, Homo Sapiens
  misc_feature (1)..(1): Xaa can be any naturally occurring amino acid
XTMGLSNILFVMAFLLSGAAPLKIQAYFNETADLPCQFANSQNQSLSELVVFWQDQENLVLNEVYLGKEKFDSVHSKYMGRTSFDSDSWTLRLHNLQIKDKGLYQCIIHHKKPTGMIRIHQMNSELSVLANFSQPEIVPISNITENVYINLTCSSIHGYPEPKKMSVLLRTKNSTIEYDGVMQKSQDNVTELYDVSISLSVSFPDVTSNMTIFCILETDKTRLLSSPFSIGTNTMEREESEQTKKREKIHIPERSDEAQRVFKSSKTSSCDKSDTCF

SEQ ID NO: 2427 - protein, 198 aa, Homo Sapiens
MALPVTALLLPLALLLHAARPSQFRVSPLDRTWNLGETVELKCQVLLSNPTSGCSWLFQPRGAAASPTFLLYLSQNKPKAAEGLDTQRFSGKRLGDTFVLTLSDFRRENEGYYFCSALSNSIMYFSHFVPVFLPAKPTTTPAPRPPTPAPTIASQPLSLRPEACRPAAGGAGNRRRVCKCPRPVVKSGDKPSLSARYV

SEQ ID NO: 2428 - protein, 235 aa, Homo Sapiens
MALPVTALLLPLALLLHAARPSQFRVSPLDRTWNLGETVELKCQVLLSNPTSGCSWLFQPRGAAASPTFLLYLSQNKPKAAEGLDTQRFSGKRLGDTFVLTLSDFRRENEGYYFCSALSNSIMYFSHFVPVFLPAKPTTTPAPRPPTPAPTIASQPLSLRPEACRPAAGGAVHTRGLDFACDIYIWAPLAGTCGVLLLSLVITLYCNHRNRRRVCKCPRPVVKSGDKPSLSARYV

SEQ ID NO: 2429 - protein, 235 aa, Homo Sapiens; identical to SEQ ID NO: 2428

SEQ ID NO: 2430 - protein, 198 aa, Homo Sapiens
MALPVTALLLPLALLLHAARPSQFRVSPLDRTWNLGETVELKCQVLLSNPTSGCSWLFQPRGAAASPTFLLYLSQNKPKAAEGLDTQRFSGKRLGDTFVLTLSDFRRENEGYYFCSALSNSIMYFSHFVPVFLPVHTRGLDFACDIYIWAPLAGTCGVLLLSLVITLYCNHRNRRRVCKCPRPVVKSGDKPSLSARYV

SEQ ID NO: 2431 - protein, 198 aa, Homo Sapiens
MRPRLWLLLAAQLTVLHGNSVLQQTPAYIKVQTNKMVMLSCEAKISLSNMRIYWLRQRQAPSSDSHHEFLALWDSAKGTIHGEEVEQEKIAVFRDASRFILNLTSVKPEDSGIYFCMIVGSPELTFGKGTQLSVVDFLPTTAQPTKKSTLKKRVCRLPRPETQKGLKGKVYQEPLSPNACMDTTAILQPHRSCLTHGS

SEQ ID NO: 2432 - protein, 210 aa, Homo Sapiens
MRPRLWLLLAAQLTVLHGNSVLQQTPAYIKVQTNKMVMLSCEAKISLSNMRIYWLRQRQAPSSDSHHEFLALWDSAKGTIHGEEVEQEKIAVFRDASRFILNLTSVKPEDSGIYFCMIVGSPELTFGKGTQLSVVDFLPTTAQPTKKSTLKKRVCRLPRPETQKGPLCSPITLGLLVAGVLVLLVSLGVAIHLCCRRRRARLRFMKQFYK

SEQ ID NO: 2433 - protein, 221 aa, Homo Sapiens
MRPRLWLLLAAQLTVLHGNSVLQQTPAYIKVQTNKMVMLSCEAKISLSNMRIYWLRQRQAPSSDSHHEFLALWDSAKGTIHGEEVEQEKIAVFRDASRFILNLTSVKPEDSGIYFCMIVGSPELTFGKGTQLSVVDFLPTTAQPTKKSTLKKRVCRLPRPETQKGPLCSPITLGLLVAGVLVLLVSLGVAIHLCCRRRRARLRFMKQLRLHPLEKCSRMDY

SEQ ID NO: 2434 - protein, 210 aa, Homo Sapiens
MRPRLWLLLAAQLTVLHGNSVLQQTPAYIKVQTNKMVMLSCEAKISLSNMRIYWLRQRQAPSSDSHHEFLALWDSAKGTIHGEEVEQEKIAVFRDASRFILNLTSVKPEDSGIYFCMIVGSPELTFGKGTQLSVVDFLPTTAQPTKKSTLKKRVCRLPRPETQKGPLCSPITLGLLVAGVLVLLVSLGVAIHLCCRRRRARLRFMKQLYK

SEQ ID NO: 2435 - protein, 243 aa, Homo Sapiens
MRPRLWLLLAAQLTVLHGNSVLQQTPAYIKVQTNKMVMLSCEAKISLSNMRIYWLRQRQAPSSDSHHEFLALWDSAKGTIHGEEVEQEKIAVFRDASRFILNLTSVKPEDSGIYFCMIVGSPELTFGKGTQLSVVDFLPTTAQPTKKSTLKKRVCRLPRPETQKGPLCSPITLGLLVAGVLVLLVSLGVAIHLCCRRRRARLRFMKQPQGEGISGTFVPQCLHGYYSNTTTSQKLLNPWILKT

SEQ ID NO: 2436 - protein, 213 aa, Homo Sapiens
MRPRLWLLLAAQLTVLHGNSVLQQTPAYIKVQTNKMVMLSCEAKISLSNMRIYWLRQRQAPSSDSHHEFLALWDSAKGTIHGEEVEQEKIAVFRDASRFILNLTSVKPEDSGIYFCMIVGSPELTFGKGTQLSVVDFLPTTAQPTKKSTLKKRVCRLPRPETQKGRRRRARLRFMKQPQGEGISGTFVPQCLHGYYSNTTTSQKLLNPWILKT

SEQ ID NO: 2437 - protein, 185 aa, Homo Sapiens
MARGAALALLLFGLLGVLVAAPDGGFDLSDALPDNENKKPTAIPKKPSAGDDFDLGDAVVDGENDDPRPPNPPKPMPNPNPNHPSSSGSFSDADLADGVSGGEGKGGSDGGGSHRKEGEEADAPGVIPGIVGAVVVAVAGAISSFIAYQKKKLCFKENAEQGEVDMESHRNANAEPAVQRTLLEK

SEQ ID NO: 2438 - protein, 160 aa, Homo Sapiens
MARGAALALLLFGLLGVLVAAPDGGFDLSDALPDNENKKPTAIPKKPSAGDDFDLGDAVVDGENDDPRPPNPPKPMPNPNPNHPSSSGSFSDADLADGVSGGEGKGGSDGGGSHRKEGEEADAPGVIPGIVGAVVVAVAGAISSFIAYQKKKLCFKENDG

SEQ ID NO: 2439 - protein, 160 aa, Homo Sapiens; identical to SEQ ID NO: 2438

SEQ ID NO: 2440 - protein, 160 aa, Homo Sapiens; identical to SEQ ID NO: 2438

SEQ ID NO: 2441 - protein, 184 aa, Homo Sapiens
MARGAALALLLFGLLGVLVAAPDGGFDLSDALPDNENKKPTAIPKKPSAGDDFDLGDAVVDGENDDPRPPNPPKPMPNPNPNHPSSSGSFSDADLADGVSGGEGKGGSDGGGSHRKEGEEADAPGVIPGIVGAVVVAVAGAISSFIAYQKKKLCFKENEQGEVDMESHRNANAEPAVQRTLLEK

SEQ ID NO: 2442 - protein, 177 aa, Homo Sapiens
MARGAALALLLFGLLGVLVAAPDGGFDLSDALPDNENKKPTAIPKKPSAGDDFDLGDAVVDGENDDPRPPNPPKPMPNPNPNHPSSSGSFSDADLADGVSGGEGKGGSDGGGSHRKEGEEADAPGVIPGIVGAVVVAVAGAISSFIAYQKKKLCFKENGQLAGSLGPCIGIRREADG

SEQ ID NO: 2443 - protein, 169 aa, Homo Sapiens
MARGAALALLLFGLLGVLVAAPDGGFDLSDALPGDDFDLGDAVVDGENDDPRPPNPPKPMPNPNPNHPSSSGSFSDADLADGVSGGEGKGGSDGGGSHRKEGEEADAPGVIPGIVGAVVVAVAGAISSFIAYQKKKLCFKENAEQGEVDMESHRNANAEPAVQRTLLEK

SEQ ID NO: 2444 - protein, 76 aa, Homo Sapiens
MARGAALALLLFGLLGVLVAAPGFGDLRLQAARGGRPGVACHSHALRPGPKFGIARSLRPGWWGEGKEKLEKNFEP

SEQ ID NO: 2445 - protein, 22 aa, Homo Sapiens
  misc_feature (1)..(1): Xaa can be any naturally occurring amino acid
XQKKKLCFKENERASMCVFLSV

SEQ ID NO: 2446 - protein, 109 aa, Homo Sapiens
MAASTSMVPVAVTAAVAPVLSINSDFSDLREIKKQLLLIAGLTRERGLLHSSKWKMPRIWMPIPWPRPTLTLKSMIGQHISCMAAIARKPIFCICIPDIWPPGKRTSEK

SEQ ID NO: 2447 - protein, 597 aa, Homo Sapiens
MAASTSMVPVAVTAAVAPVLSINSDFSDLREIKKQLLLIAGLTRERGLLHSSKWSAELAFSLPALPLAELQPPPPITEEDAQDMDAYTLAKAYFDVKEYDRAAHFLHGCNSKKAYFLYMYSRYLSGEKKKDDETVDSLGPLEKGQVKNEALRELRVELSKKHQARELDGFGLYLYGVVLRKLDLVKEAIDVFVEATHVLPLHWGAWLELCNLITDKEMLKFLSLPDTWMKEFFLAHIYTELQLIEEALQKYQNLIDVGFSKSSYIVSQIAVAYHNIRDIDKALSIFNELRKQDPYRIENMDTFSNLLYVRSMKSELSYLAHNLCEIDKYRVETCCVIGNYYSLRSQHEKAALYFQRALKLNPRYLGAWTLMGHEYMEMKNTSAAIQAYRHAIEVNKRDYRAWYGLGQTYEILKMPFYCLYYYRRAHQLRPNDSRMLVALGECYEKLNQLVEAKKCYWRAYAVGDVEKMALVKLAKLHEQLTESEQAAQCYIKYIQDIYSCGEIVEHLEESTAFRYLAQYYFKCKLWDEASTCAQKCCAFNDTREEGKALLRQILQLRNQGETPTTEVPAPFFLPASLSANNTPTRRVSPLNLSSVTP

SEQ ID NO: 2448 - protein, 151 aa, Homo Sapiens
MAASTSMVPVAVTAAVAPVLSINSDFSDLREIKKQLLLIAGLTRERGLLHSSKWSAELAFSLPALPLAELQPPPPITEEDAQDMDAYTLAKAYFDVKEYDRAAHFLHGCNSKKAYFLYMYSRYLVRAILKCHSAFSETSIFRTNGKVKSFK

SEQ ID NO: 2449 - protein, 123 aa, Homo Sapiens
MAASTSMVPVAVTAAVAPVLSINSDFSDLREIKKQLLLIAGLTRERGLLHSSKWSAELAFSLPALPLAELQPPPPITEMPRIWMPIPWPRPTLTLKSMIGQHISCMAAIARKPIFCICIPDIW

SEQ ID NO: 2450 - protein, 134 aa, Homo Sapiens
  misc_feature (1)..(1): Xaa can be any naturally occurring amino acid
XSTSMVPVAVTAAVAPVLSINSDFSDLREIKKQLLLIAGLTRERGLLHSSKWSAELAFSLPALPLAELQPPPPITEMPRIWMPIPWPRPTLTLKSMIGQHISCMAAIARKPIFCICIPDICLEKKRRTMKQLIA

SEQ ID NO: 2451 - protein, 579 aa, Homo Sapiens
MSAAIAALAASYGSGSGSESDSDSESSRCPLPAADSLMHLTKSPSSKPSLAVAVDSAPEVAVKEDLETGVHLDPAVKEVQYNPTYETMFAPEFGPENPFRTQQMAAPRNMLSGYAEPAHINDFMFEQQRRTFATYGYALDPSLDNHQVSAKYIGSVEEAEKNQGLTVFETGQKKTEKRKKFKENDASNIDGFLGPWAKYVDEKDVAKPSEEEQKELDEITAKRQKKGKQEEEKPGEEKTILHVKEMYDYQGRSYLHIPQDVGVNLRSTMPPEKCYLPKKQIHVWSGHTKGVSAVRLFPLSGHLLLSCSMDCKIKLWEVYGERRCLRTFIGHSKAVRDICFNTAGTQFLSAAYDRYLKLWDTETGQCISRFTNRKVPYCVKFNPDEDKQNLFVAGMSDKKIVQWDIRSGEIVQEYDRHLGAVNTIVFVDENRRFVSTSDDKSLRVWEWDIPVDFKYIAEPSMHSMPAVTLSPNGKWLACQSMDNQILIFGAQNRFRLNKKKIFKGHMVAGYACQVDFSPDMSYVISGDGNGKLNIWDWKTTKLYSRFKAHDKVCIGAVWHPHETSKVITCGWDGLIKLWD

SEQ ID NO: 2452 - protein, 539 aa, Homo Sapiens
MSAAIAALAASYGSGSGSESDSDSESSRCPLPAADSLMHLTKSPSSKPSLAVAVDSAPEVAVKEDLETGVHLDPAVKEVQYNPTYETMFAPEFGPENPFRTQQMAAPRNMLSGYAEPAHINDFMFEQQRRTFATYGYALDPSLDNHQVSAKYIGSVEEAEKNQGLTVFETGQKKTEKRKKFKENDASNIDGFLGPWAKYVDEKDVAKPSEEEQKELDEITAKRQKKGKQEEEKPGEEKTILHVKEMYDYQGRSYLHIPQDVGVNLRSTMPPEKCYLPKKQIHVWSGHTKGVSAVRLFPLSGHLLLSCSMDCKIKLWEVYGERRCLRTFIGHSKAVRDICFNTAGTQFLSAAYDRYLKLWDTETGQCISRFTNRKVPYCVKFNPDEDKQNLFVAGMSDKKIVQWDIRSGEIVQEYDRHLGAVNTIVFVDENRRFVSTSDDKSLRVWEWDIPVDFKYIAEPSMHSMPAVTLSPNGKWLACQSMDNQILIFGAQNRFRLNKKKIFKGHMVAGYACQVDFSPDMRVPQSFQNLKEVTAGPQEG

SEQ ID NO: 2453 - protein, 579 aa, Homo Sapiens; identical to SEQ ID NO: 2451

SEQ ID NO: 2454 - protein, 112 aa, Homo Sapiens
MFVSDFRKEFYEVVQSQRVLLFVASDVDALCACKILQALFQCDHVQYTLVPVSGWQELETAFLEHKEQFHYFILINCGANVDLLDILQPDEDTIFFVCDTHRPVNVVNVYND

SEQ ID NO: 2455 - protein, 566 aa, Homo Sapiens
MFVSDFRKEFYEVVQSQRVLLFVASDVDALCACKILQALFQCDHVQYTLVPVSGWQELETAFLEHKEQFHYFILINCGANVDLLDILQPDEDTIFFVCDTHRPVNVVNVYNDTQIKLLIKQDDDLEVPAYEDIFRDEEEDEEHSGNDSDGSEPSEKRTRLEEEIVEQTMRRRQRREWEARRRDILFDYEQYEYHGTSSAMVMFELAWMLSKDLNDMLWWAIVGLTDQWVQDKITQMKYVTDVGVLQRHVSRHNHRNEDEENTLSVDCTRISFEYDLRLVLYQHWSLHDSLCNTSYTAARFKLWSVHGQKRLQEFLADMGLPLKQVKQKFQAMDISLKENLREMIEESANKFGMKDMRVQTFSIHFGFKHKFLASDVVFATMSLMESPEKDGSGTDHFIQALDSLSRSNLDKLYHGLELAKKQLRATQQTIASCLCTNLVISQGPFLYCSLMEGTPDVMLFSRPASLSLLSKHLLKSFVCSTKNRRCKLLPLVMAAPLSMEHGTVTVVGIPPETDSSDRKNFFGRAFEKAAESTSSRMLHNHFDLSVIELKAEDRSKFLDALISLLS

SEQ ID NO: 2456 - protein, 566 aa, Homo Sapiens; identical to SEQ ID NO: 2455

SEQ ID NO: 2457 - protein, 598 aa, Homo Sapiens
MFVSDFRKEFYEVVQSQRVLLFVASDVDALCACKILQALFQCDHVQYTLVPVSGWQELETAFLEHKEQFHYFILINCGANVDLLDILQPDEDTIFFVCDTHRPVNVVNVYNDTQIKLLIKQDDDLEVPAYEDIFRDEEEDEEHSGNDSDGSEPSEKRTRLEEEIVEQTMRRRQRREWEARSGSGSEPVAAALEKSSRLFAGPMSDRTAPRSPRRDILFDYEQYEYHGTSSAMVMFELAWMLSKDLNDMLWWAIVGLTDQWVQDKITQMKYVTDVGVLQRHVSRHNHRNEDEENTLSVDCTRISFEYDLRLVLYQHWSLHDSLCNTSYTAARFKLWSVHGQKRLQEFLADMGLPLKQVKQKFQAMDISLKENLREMIEESANKFGMKDMRVQTFSIHFGFKHKFLASDVVFATMSLMESPEKDGSGTDHFIQALDSLSRSNLDKLYHGLELAKKQLRATQQTIASCLCTNLVISQGPFLYCSLMEGTPDVMLFSRPASLSLLSKHLLKSFVCSTKNRRCKLLPLVMAAPLSMEHGTVTVVGIPPETDSSDRKNFFGRAFEKAAESTSSRMLHNHFDLSVIELKAEDRSKFLDALISLLS

SEQ ID NO: 2458 - protein, 520 aa, Homo Sapiens
MFVSDFRKEFYEVVQSQRVLLFVASDVDALCACKILQALFQCDHVQYTLVPVSGWQELETAFLEHKEQIKLLIKQDDDLEVPAYEDIFRDEEEDEEHSGNDSDGSEPSEKRTRLEEEIVEQTMRRRQRREWEARRRDILFDYEQYEYHGTSSAMVMFELAWMLSKDLNDMLWWAIVGLTDQWVQDKITQMKYVTDVGVLQRHVSRHNHRNEDEENTLSVDCTRISFEYDLRLVLYQHWSLHDSLCNTSYTAARFKLWSVHGQKRLQEFLADMGLPLKQVKQKFQAMDISLKENLREMIEESANKFGMKDMRVQTFSIHFGFKHKFLASDVVFATMSLMESPEKDGSGTDHFIQALDSLSRSNLDKLYHGLELAKKQLRATQQTIASCLCTNLVISQGPFLYCSLMEGTPDVMLFSRPASLSLLSKHLLKSFVCSTKNRRCKLLPLVMAAPLSMEHGTVTVVGIPPETDSSDRKNFFGRAFEKAAESTSSRMLHNHFDLSVIELKAEDRSKFLDALISLLS

SEQ ID NO: 2459 - protein, 159 aa, Homo Sapiens
MLPHWRVLLFVASDVDALCACKILQALFQCDHVQYTLVPVSGWQELETAFLEHKEQFHYFILINCGANVDLLDILQPDEDTIFFVCDTHRPVNVVNVYNDTQIKLLIKQDDDLEVPAYEDIFRDEEEDEEHSGNDSDGSEPSEKRTRLEEEIVEQTMRR

SEQ ID NO: 2460 - protein, 96 aa, Homo Sapiens
  misc_feature (1)..(1): Xaa can be any naturally occurring amino acid
XDEDTIFFVCDTHRPVNVVNVYNDTQIKLLIKQDDDLEVPAYEDIFRDEEEDEEHSGNDSDGSEPSEKRTRLEEEIVEQTMRRRQRREWEARRIIY

SEQ ID NO: 2461 - protein, 836 aa, Homo Sapiens
MAGLNCGVSIALLGVLLLGAARLPRGAEAFEIALPRESNITVLIKLGTPTLLAKPCYIVISKRHITMLSIKSGERIVFTFSCQSPENHFVIEIQKNIDCMSGPCPFGEVQLQPSTSLLPTLNRTFIWDVKAHKSIGLELQFSIPRLRQIGPGESCPDGVTHSISGRIDATVVRIGTFCSNGTVSRIKMQEGVKMALHLPWFHPRNVSGFSIANRSSIKRLCIIESVFEGEGSATLMSANYPEGFPEDELMTWQFVVPAHLRASVSFLNFNLSNCERKEERVEYYIPGSTTNPEVFKLEDKQPGNMAGNFNLSLQGCDQDAQSPGILRLQFQVLVQHPQNESNKIYVVDLSNERAMSLTIEPRPVKQSRKFVPGCFVCLESRTCSSNLTLTSGSKHKISFLCDDLTRLWMNVEKTISCTDHRYCQRKSYSLQVPSDILHLPVELHDFSWKLLVPKDRLSLVLVPAQKLQQHTHEKPCNTSFSYLVASAIPSQDLYFGSFCPGGSIKQIQVKQNISVTLRTFAPSFQQEASRQGLTVSFIPYFKEEGVFTVTPDTKSKVYLRTPNWDRGLPSLTSVSWNISVPRDQVACLTFFKERSGVVCQTGRAFMIIQEQRTRAEEIFSLDEDVLPKPSFHHHSFWVNISNCSPTSGKQLDLLFSVTLTPRTVDLTVILIAAVGGGVLLLSALGLIICCVKKKKKKTNKGPAVGIYNDNINTEMPRQPKKFQKGRKDNDSHVYAVIEDTMVYGHLLQDSSGSFLQPEVDTYRPFQGTMGVCPPSPPTICSRAPTAKLATEEPPPRSPPESESEPYTFSHPNNGDVSSKDTDIPLLNTQEPMEPAE

SEQ ID NO: 2462 - protein, 343 aa, Homo Sapiens
MAGLNCGVSIALLGVLLLGAARLPRGAEAFEIALPRESNITVLIKLGTPTLLAKPCYIVISKRHITMLSIKSGERIVFTFSCQSPENHFVIEIQKNIDCMSGPCPFGEVQLQPSTSLLPTLNRTFIWDVKAHKSIGLELQFSIPRLRQIGPGESCPDGVTHSISGRIDATVVRIGTFCSNGTVSRIKMQEGVKMALHLPWFHPRNVSGFSIANRSSIKRLCIIESVFEGEGSATLMSANYPEGFPEDELMTWQFVVPAHLRASVSFLNFNLSNCERKEERVEYYIPGSTTNPEVFKLEDKQPGNMAGNFNLSLQGCDQDAQSPGILRLQFQVLVQHPQNESSE

SEQ ID NO: 2463 - protein, 449 aa, Homo Sapiens
MLAEWGACLLLAVALLGPGLQAQAMEGVKCGGVLSAPSGNFSSPNFPRLYPYNTECSWLIVVAEGSSVLLTFHAFDLEYHDTCSFDFLEIYNGASPDKGNLLGRFCGKVPPPPFTSSWHVMSVIFHSDKHVASHGFSAGYQKDVCGGVLTGLSGVLTSPEYPNNYPNSMECHWVIRAAGPAHVKLVFVDFQVEGNEECTYDYVAVLGGPGPTRGHHYCGSTRPPTLVSLGHELQVVFKSDFNIGGRGFKAYYFSGECQEVYMAMRGNFSSPQYPSSYPNNIRCHWTIRLPPGYQVKVFFLDLDLEEPNSLTKTCDFDHLAAFDGASEEAPLLGNWCGHHLPPPVTSSHNQLLLLLHTDRSTTRRGFSVAYIGGQLGCGSGSTEGEGEALQPQSLQSPSSIPPVCPAPPMNGLLQLLLHWLHPCPLSGPLRLDGTAPACFHYCRASFPSF

SEQ ID NO: 2464 - protein, 540 aa, Homo Sapiens
MLAEWGACLLLAVALLGPGLQAQAMEGVKCGGVLSAPSGNFSSPNFPRLYPYNTECSWLIVVAEGSSVLLTFHAFDLEYHDTCSFDFLEIYNGASPDKGNLLGRFCGKVPPPPFTSSWHVMSVIFHSDKHVASHGFSAGYQKDVCGGVLTGLSGVLTSPEYPNNYPNSMECHWVIRAAGPAHVKLVFVDFQVEGNEECTYDYVAVLGGPGPTRGHHYCGSTRPPTLVSLGHELQVVFKSDFNIGGRGFKAYYFSGECQEVYMAMRGNFSSPQYPSSYPNNIRCHWTIRLPPGYQVKVFFLDLDLEEPNSLTKTCDFDHLAAFDGASEEAPLLGNWCGHHLPPPVTSSHNQLLLLLHTDRSTTRRGFSVAYIGVVPMNVSCSRTDFQILISTQALAPLERTKVYLGSRSCAAQEVGGNLRIQARFDTCGTESQRRNNTSVIVSVLYIDFSAAGREDIHEYEVRCEPRRKEASVHLLSGSHWLGPYAATAEHLQEAPPMDEAEALEGPVSMVAQDTSDIVFLGLCILAGILMVIAIVVLMLL

SEQ ID NO: 2465 - protein, 882 aa, Homo Sapiens
MGPWSRSLSALLLLLQVSSWLCQEPEPCHPGFDAESYTFTVPRRHLERGRVLGRVNFEDCTGRQRTAYFSLDTRFKVGTDGVITVKRPLRFHNPQIHFLVYAWDSTYRKFSTKVTLNTVGHHHRPPPHQASVSGIQAELLTFPNSSPGLRRQKRDWVIPPISCPENEKGPFPKNLVQIKSNKDKEGKVFYSITGQGADTPPVGVFIIERETGWLKVTEPLDRERIATYTLFSHAVSSNGNAVEDPMEILITVTDQNDNKPEFTQEVFKGSVMEGALPGTSVMEVTATDADDDVNTYNAAIAYTILSQDPELPDKNMFTINRNTGVISVVTTGLDRESFPTYTLVVQAADLQGEGLSTTATAVITVTDTNDNPPIFNPTTYKGQVPENEANVVITTLKVTDADAPNTPAWEAVYTILNDDGGQFVVTTNPVNNDGILKTAKGLDFEAKQQYILHVAVTNVVPFEVSLTTSTATVTVDVLDVNEAPIFVPPEKRVEVSEDFGVGQEITSYTAQEPDTFMEQKITYRIWRDTANWLEINPDTGAISTRAELDREDFEHVKNSTYTALIIATDNGSPVATGTGTLLLILSDVNDNAPIPEPRTIFFCERNPKPQVINIIDADLPPNTSPFTAELTHGASANWTIQYNDPTQESIILKPKMALEVGDYKINLKLMDNQNKDQVTTLEVSVCDCEGAAGVCRKAQPVEAGLQIPAILGILGGILALLILILLLLLFLRRRAVVKEPLLPPEDDTRDNVYYYDEEGGGEEDQDFDLSQLHRGLDARPEVTRNDVAPTLMSVPRYLPRPANPDEIGNFIDENLKAADTDPTAPPYDSLLVFDYEGSGSEAASLSSLNSSESDKDQDYDYLNEWGNRFKKLADMYGGGEDD

SEQ ID NO: 2466 - protein, 821 aa, Homo Sapiens
MGPWSRSLSALLLLLQVSSWLCQEPEPCHPGFDAESYTFTVPRRHLERGRVLGRVNFEDCTGRQRTAYFSLDTRFKVGTDGVITVKRPLRFHNPQIHFLVYAWDSTYRKFSTKVTLNTVGHHHRPPPHQASVSGIQAELLTFPNSSPGLRRQKRDWVIPPISCPENEKGPFPKNLVQIKSNKDKEGKVFYSITGQGADTPPVGVFIIERETGWLKVTEPLDRERIATYTLFSHAVSSNGNAVEDPMEILITVTDQNDNKPEFTQEVFKGSVMEGALPGTSVMEVTATDADDDVNTYNAAIAYTILSQDPELPDKNMFTINRNTGVISVVTTGLDRESFPTYTLVVQAADLQGEGLSTTATAVITVTDTNDNPPIFNPTTGLDFEAKQQYILHVAVTNVVPFEVSLTTSTATVTVDVLDVNEAPIFVPPEKRVEVSEDFGVGQEITSYTAQEPDTFMEQKITYRIWRDTANWLEINPDTGAISTRAELDREDFEHVKNSTYTALIIATDNGSPVATGTGTLLLILSDVNDNAPIPEPRTIFFCERNPKPQVINIIDADLPPNTSPFTAELTHGASANWTIQYNDPTQESIILKPKMALEVGDYKINLKLMDNQNKDQVTTLEVSVCDCEGAAGVCRKAQPVEAGLQIPAILGILGGILALLILILLLLLFLRRRAVVKEPLLPPEDDTRDNVYYYDEEGGGEEDQDFDLSQLHRGLDARPEVTRNDVAPTLMSVPRYLPRPANPDEIGNFIDENLKAADTDPTAPPYDSLLVFDYEGSGSEAASLSSLNSSESDKDQDYDYLNEWGNRFKKLADMYGGGEDD

SEQ ID NO: 2467 - protein, 537 aa, Homo Sapiens
MGPWSRSLSALLLLLQVSSWLCQEPEPCHPGFDAESYTFTVPRRHLERGRVLGRVNFEDCTGRQRTAYFSLDTRFKVGTDGVITVKRPLRFHNPQIHFLVYAWDSTYRKFSTKVTLNTVGHHHRPPPHQASVSGIQAELLTFPNSSPGLRRQKRDWVIPPISCPENEKGPFPKNLVQIKSNKDKEGKVFYSITGQGADTPPVGVFIIERETGWLKVTEPLDRERIATYTLFSHAVSSNGNAVEDPMEILITVTDQNDNKPEFTQEVFKGSVMEGALPGTSVMEVTATDADDDVNTYNAAIAYTILSQDPELPDKNMFTINRNTGVISVVTTGLDRESFPTYTLVVQAADLQGEGLSTTATAVITVTDTNDNPPIFNPTTYKGQVPENEANVVITTLKVTDADAPNTPAWEAVYTILNDDGGQFVVTTNPVNNDGILKTAKGLDFEAKQQYILHVAVTNVVPFEVSLTTSTATVTVDVLDVNEAPIFVPPEKRVEVSEDFGVGQEITSYTAQEPDTFMEQKITFSSCYWNRDTSADPV

SEQ ID NO: 2468 - protein, 647 aa, Homo Sapiens
MGPWSRSLSALLLLLQVSSWLCQEPEPCHPGFDAESYTFTVPRRHLERGRVLGRVNFEDCTGRQRTAYFSLDTRFKVGTDGVITVKRPLRFHNPQIHFLVYAWDSTYRKFSTKVTLNTVGHHHRPPPHQASVSGIQAELLTFPNSSPGLRRQKRDWVIPPISCPENEKGPFPKNLVQIKSNKDKEGKVFYSITGQGADTPPVGVFIIERETGWLKVTEPLDRERIATYTLFSHAVSSNGNAVEDPMEILITVTDQNDNKPEFTQEVFKGSVMEGALPGTSVMEVTATDADDDVNTYNAAIAYTILSQDPELPDKNMFTINRNTGVISVVTTGLDRESFPTYTLVVQAADLQGEGLSTTATAVITVTDTNDNPPIFNPTTYKGQVPENEANVVITTLKVTDADAPNTPAWEAVYTILNDDGGQFVVTTNPVNNDGILKTAKGLDFEAKQQYILHVAVTNVVPFEVSLTTSTATVTVDVLDVNEAPIFVPPEKRVEVSEDFGVGQEITSYTAQEPDTFMEQKITYRIWRDTANWLEINPDTGAISTRAELDREDFEHVKNSTYTALIIATDNGSPVATGTGTLLLILSDVNDNAPIPEPRTIFFCERNPKPQVINIIDADLPPNLASQSIGITDMSHCTCPAPQLPAIF

SEQ ID NO: 2469 - protein, 903 aa, Homo Sapiens
MGPWSRSLSALLLLLQVSSWLCQEPEPCHPGFDAESYTFTVPRRHLERGRVLGRVNFEDCTGRQRTAYFSLDTRFKVGTDGVITVKRPLRFHNPQIHFLVYAWDSTYRKFSTKVTLNTVGHHHRPPPHQASVSGIQAELLTFPNSSPGLRRQKRDWVIPPISCPENEKGPFPKNLVQIKSNKDKEGKVFYSITGQGADTPPVGVFIIERETGWLKVTEPLDRERIATYTLFSHAVSSNGNAVEDPMEILITVTDQNDNKPEFTQEVFKGSVMEGALPGTSVMEVTATDADDDVNTYNAAIAYTILSQDPELPDKNMFTINRNTGVISVVTTGLDRESFPTYTLVVQAADLQGEGLSTTATAVITVTDTNDNPPIFNPTTYKGQVPENEANVVITTLKVTDADAPNTPAWEAVYTILNDDGGQFVVTTNPVNNDGILKTAKVWYLARCRNWHPHSCSYPCPLGLDFEAKQQYILHVAVTNVVPFEVSLTTSTATVTVDVLDVNEAPIFVPPEKRVEVSEDFGVGQEITSYTAQEPDTFMEQKITYRIWRDTANWLEINPDTGAISTRAELDREDFEHVKNSTYTALIIATDNGSPVATGTGTLLLILSDVNDNAPIPEPRTIFFCERNPKPQVINIIDADLPPNTSPFTAELTHGASANWTIQYNDPTQESIILKPKMALEVGDYKINLKLMDNQNKDQVTTLEVSVCDCEGAAGVCRKAQPVEAGLQIPAILGILGGILALLILILLLLLFLRRRAVVKEPLLPPEDDTRDNVYYYDEEGGGEEDQDFDLSQLHRGLDARPEVTRNDVAPTLMSVPRYLPRPANPDEIGNFIDENLKAADTDPTAPPYDSLLVFDYEGSGSEAASLSSLNSSESDKDQDYDYLNEWGNRFKKLADMYGGGEDD

SEQ ID NO: 2470 - protein, 647 aa, Homo Sapiens [sequence omitted]

SEQ ID NO: 2471 - protein, 414 aa, Homo Sapiens
MGPWSRSLSALLLLLQVSSWLCQEPEPCHPGFDAESYTFTVPRRHLERGRVLGRVNFEDCTGRQRTAYFSLDTRFKVGTDGVITVKRPLRFHNPQIHFLVYAWDSTYRKFSTKVTLNTVGHHHRPPPHQASVSGIQAELLTFPNSSPGLRRQKRDWVIPPISCPENEKGPFPKNLVQLFSHAVSSNGNAVEDPMEILITVTDQNDNKPEFTQEVFKGSVMEGALPGTSVMEVTATDADDDVNTYNAAIAYTILSQDPELPDKNMFTINRNTGVISVVTTGLDRESFPTYTLVVQAADLQGEGLSTTATAVITVTDTNDNPPIFNPTTYKGQVPENEANVVITTLKVTDADAPNTPAWEAVYTILNDDGGQFVVTTNPVNNDGILKTAKVCMVPGKMQKLASSQLFIPLSPGLGF

SEQ ID NO: 2472 - protein, 155 aa, Homo Sapiens
  misc_feature (1)..(1): Xaa can be any naturally occurring amino acid
XTDGVITVKRPLRFHNPQIHFLVYAWDSTYRKFSTKVTLNTVGHHHRPPPHQASVSGIQAELLTFPNSSPGLRRQKRDWVIPPISCPENEKGPFPKNLVQIKSNKDKEGKVFYSITGQGADTPPVGVFIIERETGWLKVTEPLDRERIATYTEPL

SEQ ID NO: 2473 - protein, 670 aa, Homo Sapiens
MAQAVDRDTNRPLEPPSEFIVKVQDINDNPPEFLHETYHANVPERSNVGTSVIQVTASDADDPTYGNSAKLVYSILEGQPYFSVEAQTGIIRTALPNMDREAKEEYHVVIQAKDMGGHMGGLSGTTKVTITLTDVNDNPPKFPQSVYQMSVSEAAVPGEEVGRVKAKDPDIGENGLVTYNIVDGDGMESFEITTDYETQEGVIKLKKPVDFETKRAYSLKVEAANVHIDPKFISNGPFKDTVTVKISVEDADEPPMFLAPSYIHEVQENAAAGTVVGRVHAKDPDAANSPIRYSIDRHTDLDRFFTINPEDGFIKTTKPLDREETAWLNITVFAAEIHNRHQEAKVPVAIRVLDVNDNAPKFAAPYEGFICESDQTKPLSNQPIVTISADDKDDTANGPRFIFSLPPEIIHNPNFTVRDNRDNTAGVYARRGGFSRQKQDLYLLPIVISDGGIPPMSSTNTLTIKVCGCDVNGALLSCNAEAYILNAGLSTGALIAILACIVILLVIVVLFVTLRRQKKEPLIVFEEEDVRENIITYDDEGGGEEDTEAFDIATLQNPDGINGFIPRKDIKPEYQYMPRPGLRPAPNSVDVDDFINTRIQEADNDPTAPPYDSIQIYGYEGRGSVAGSLSSLESATTDSDLDYDYLQNWGPRFKKLADLYGSKDTFDDDS

SEQ ID NO: 2474 - protein, 22 aa, Homo Sapiens
MKENYCLQAALVCLGMLCHSHA

SEQ ID NO: 2475 - protein, 34 aa, Homo Sapiens
MKENYCLQAALVCLGMLCHSHAFAPERRGHLRPS

SEQ ID NO: 2476 - protein, 54 aa, Homo Sapiens
MKENYCLQAALVCLGMLCHSHAFAPERRGHLRPSFHGHHEKGKEGQVLQRSKRG

SEQ ID NO: 2477 - protein, 65 aa, Homo Sapiens
MKENYCLQAALVCLGMLCHSHAFAPERRGHLRPSFHGHHEKGKEGQVLQRSKRGWVWNQFFVIEE

SEQ ID NO: 2478 - protein, 70 aa, Homo Sapiens
MKENYCLQAALVCLGMLCHSHAFAPERRGHLRPSFHGHHEKGKEGQVLQRSKRGWVWNQFFVIEEYTGPD

SEQ ID NO: 2479 - protein, 222 aa, Homo Sapiens
MKENYCLQAALVCLGMLCHSHAFAPERRGHLRPSFHGHHEKGKEGQVLQRSKRGWVWNQFFVIEEYTGPDPVLVGRLHSDIDSGDGNIKYILSGEGAGTIFVIDDKSGNIHATKTLDREERAQYTLMAQAVDRDTNRPLEPPSEFIVKVQDINDNPPEFLHETYHANVPERSNVGTSVIQVTASDADDPTYGNSAKLVYSILEGQPYFSVEAQTGIIRTALP

SEQ ID NO: 2480 - protein, 796 aa, Homo Sapiens
MKENYCLQAALVCLGMLCHSHAFAPERRGHLRPSFHGHHEKGKEGQVLQRSKRGWVWNQFFVIEEYTGPDPVLVGRLHSDIDSGDGNIKYILSGEGAGTIFVIDDKSGNIHATKTLDREERAQYTLMAQAVDRDTNRPLEPPSEFIVKVQDINDNPPEFLHETYHANVPERSNVGTSVIQVTASDADDPTYGNSAKLVYSILEGQPYFSVEAQTGIIRTALPNMDREAKEEYHVVIQAKDMGGHMGGLSGTTKVTITLTDVNDNPPKFPQSVYQMSVSEAAVPGEEVGRVKAKDPDIGENGLVTYNIVDGDGMESFEITTDYETQEGVIKLKKPVDFETKRAYSLKVEAANVHIDPKFISNGPFKDTVTVKISVEDADEPPMFLAPSYIHEVQENAAAGTVVGRVHAKDPDAANSPIRYSIDRHTDLDRFFTINPEDGFIKTTKPLDREETAWLNITVFAAEIHNRHQEAKVPVAIRVLDVNDNAPKFAAPYEGFICESDQTKPLSNQPIVTISADDKDDTANGPRFIFSLPPEIIHNPNFTVRDNRDNTAGVYARRGGFSRQKQDLYLLPIVISDGGIPPMSSTNTLTIKVCGCDVNGALLSCNAEAYILNAGLSTGALIAILACIVILLVIVVLFVTLRRQKKEPLIVFEEEDVRENIITYDDEGGGEEDTEAFDIATLQNPDGINGFIPRKDIKPEYQYMPRPGLRPAPNSVDVDDFINTRIQEADNDPTAPPYDSIQIYGYEGRGSVAGSLSSLESATTDSDLDYDYLQNWGPRFKKLADLYGSKDTFDDDS

SEQ ID NO: 2481 - protein, 693 aa, Homo Sapiens
MKENYCLQAALVCLGMLCHSHAFAPERRGHLRPSFHGHHEKGKEGQVLQRSKRGWVWNQFFVIEEYTGPDPVLVGRLHSDIDSGDGNIKYILSGEGAGTIFVIDDKSGNIHATKTLDREERAQYTLMAQAVDRDTNRPLEPPSEFIVKVQDINDNPPEFLHETYHANVPERSNVGTSVIQVTASDADDPTYGNSAKLVYSILEGQPYFSVEAQTGIIRTALPNMDREAKEEYHVVIQAKDMGGHMGGLSGTTKVTITLTDVNDNPPKFPQSVYQMSVSEAAVPGEEVGRVKAKDPDIGENGLVTYNIVDGDGMESFEITTDYETQEGVIKLKKPVDFETKRAYSLKVEAANVHIDPKFISNGPFKDTVTVKISVEDADEPPMFLAPSYIHEVQENAAAGTVVGRVHAKDPDAANSPIRYSIDRHTDLDRFFTINPEDGFIKTTKPLDREETAWLNITVFAAEIHNRHQEAKVPVAIRVLDVNDNAPKFAAPYEGFICESDQTKPLSNQPIVTISADDKDDTANGPRFIFSLPPEIIHNPNFTVRDNRDNTAGVYARRGGFSRQKQDLYLLPIVISDGGIPPMSSTNTLTIKVCGCDVNGALLSCNAEAYILNAGLSTGALIAILACIVILLGCPSLMEPPSPREDMRLLYLGFQLMLFSYVKVNRRFCLLGVFIKLPFLYVVATESPTTLTSL

SEQ ID NO: 2482 - protein, 62 aa, Homo Sapiens
  misc_feature (1)..(1): Xaa can be any naturally occurring amino acid
XMSVSEAAVPGEEVGRVKAKDPDIGENGLVTYNIVDGDGMESFEITTDYETQEGVIKLKKVS

SEQ ID NO: 2483 - protein, 760 aa, Homo Sapiens
MKTPPGASSRTKCSRELRSFCAFSCPRAKQPTCTAWFPQQEHPSENGPQMPGRDPPAASTMQVLLLTSAEDLDCTPGFQQKVFHINQPAEFIEDQSILNLTFSDCKGNDKLRYEVSSPYFKVNSDGGLVALRNITAVGKTLFVHARTPHAEDMAELVIVGGKDIQGSLQDIFKFARTSPVPRQKRSIVVSPILIPENQRQPFPRDVGKVVDSDRPERSKFRLTGKGVDQEPKGIFRINENTGSVSVTRTLDREVIAVYQLFVETTDVNGKTLEGPVPLEVIVIDQNDNRPIFREGPYIGHVMEGSPTGTTVMRMTAFDADDPATDNALLRYNIRQQTPDKPSPNMFYIDPEKGDIVTVVSPALLDRETLENPKYELIIEAQDMAGLDVGLTGTATATIMIDDKNDHSPKFTKKEFQATVEEGAVGVIVNLTVEDKDDPTTGAWRAAYTIINGNPGQSFEIHTNPQTNEGMLSVVKPLDYEISAFHTLLIKVENEDPLVPDVSYGPSSTATVHITVLDVNEGPVFYPDPMMVTRQEDLSVGSVLLTVNATDPDSLQHQTIRYSVYKDPAGWLNINPINGTVDTTAVLDRESPFVDNSVYTALFLAIDSGNPPATGTGTLLITLEDVNDNAPFIYPTVAEVCDDAKNLSVVILGASDKDLHPNTDPFKFEIHKQAVPDKVWKISKINNTHALVSLLQNLNKANYNLPIMVTDSGKPPMTNITDLRVQVCSCRNSKVDCNAAGALRFSLPSVLLLSLFSLACL

SEQ ID NO: 2484 - protein, 37 aa, Homo Sapiens
MQPRTPLVLCVLLSQSGGPVCKSQFQALPLAVQWLGV

SEQ ID NO: 2485 - protein, 67 aa, Homo Sapiens
MQPRTPLVLCVLLSQTPVRPTIYLCQNLQFIKNKARDSNSLADHKGKRIQVNRLLPGLLFHDELSGI

SEQ ID NO: 2486 - protein, 52 aa, Homo Sapiens
MQPRTPLVLCVLLSQVLLLTSAEDLDCTPGFQQKVFHINQPAEFIEDQSILN

SEQ ID NO: 2487 - protein, 67 aa, Homo Sapiens
MQPRTPLVLCVLLSQVLLLTSAEDLDCTPGFQQKVFHINQPAEFIEDQSILNCKQCHSKMLLDSSHI

SEQ ID NO: 2488 - protein, 175 aa, Homo Sapiens
MQPRTPLVLCVLLSQVLLLTSAEDLDCTPGFQQKVFHINQPAEFIEDQSILNLTFSDCKGNDKLRYEVSSPYFKVNSDGGLVALRNITAVGKTLFVHARTPHAEDMAELVIVGGKDIQGSLQDIFKFARTSPVPRQKRSIVVSPILIPENQRQPFPRDVGKMKIWQVLCLARWLT

SEQ ID NO: 2489 - protein, 190 aa, Homo Sapiens
MQPRTPLVLCVLLSQVLLLTSAEDLDCTPGFQQKVFHINQPAEFIEDQSILNLTFSDCKGNDKLRYEVSSPYFKVNSDGGLVALRNITAVGKTLFVHARTPHAEDMAELVIVGGKDIQGSLQDIFKFARTSPVPRQKRSIVVSPILIPENQRQPFPRDVGKRTHNPINSELLLNEGITADLNPCITILAI

SEQ ID NO: 2490 - protein, 713 aa, Homo Sapiens
MQPRTPLVLCVLLSQVLLLTSAEDLDCTPGFQQKVFHINQPAEFIEDQSILNLTFSDCKGNDKLRYEVSSPYFKVNSDGGLVALRNITAVGKTLFVHARTPHAEDMAELVIVGGKDIQGSLQDIFKFARTSPVPRQKRSIVVSPILIPENQRQPFPRDVGKVVDSDRPERSKFRLTGKGVDQEPKGIFRINENTGSVSVTRTLDREVIAVYQLFVETTDVNGKTLEGPVPLEVIVIDQNDNRPIFREGPYIGHVMEGSPTGTTVMRMTAFDADDPATDNALLRYNIRQQTPDKPSPNMFYIDPEKGDIVTVVSPALLDRETLENPKYELIIEAQDMAGLDVGLTGTATATIMIDDKNDHSPKFTKKEFQATVEEGAVGVIVNLTVEDKDDPTTGAWRAAYTIINGNPGQSFEIHTNPQTNEGMLSVVKPLDYEISAFHTLLIKVENEDPLVPDVSYGPSSTATVHITVLDVNEGPVFYPDPMMVTRQEDLSVGSVLLTVNATDPDSLQHQTIRYSVYKDPAGWLNINPINGTVDTTAVLDRESPFVDNSVYTALFLAIDSGNPPATGTGTLLITLEDVNDNAPFIYPTVAEVCDDAKNLSVVILGASDKDLHPNTDPFKFEIHKQAVPDKVWKISKINNTHALVSLLQNLNKANYNLPIMVTDSGKPPMTNITDLRVQVCSCRNSKVDCNAAGALRFSLPSVLLLSLFSLACL

SEQ ID NO: 2491 - protein, 674 aa, Homo Sapiens
MQPRTPLVLCVLLSQVLLLTSAEDLDCTPGFQQKVFHINQPAEFIEDQSILNLTFSDCKGNDKLRYEVSSPYFKVNSDGGLVALRNITAVGKTLFVHARTPHAEDMAELVIVGGKDIQGSLQVVDSDRPERSKFRLTGKGVDQEPKGIFRINENTGSVSVTRTLDREVIAVYQLFVETTDVNGKTLEGPVPLEVIVIDQNDNRPIFREGPYIGHVMEGSPTGTTVMRMTAFDADDPATDNALLRYNIRQQTPDKPSPNMFYIDPEKGDIVTVVSPALLDRETLENPKYELIIEAQDMAGLDVGLTGTATATIMIDDKNDHSPKFTKKEFQATVEEGAVGVIVNLTVEDKDDPTTGAWRAAYTIINGNPGQSFEIHTNPQTNEGMLSVVKPLDYEISAFHTLLIKVENEDPLVPDVSYGPSSTATVHITVLDVNEGPVFYPDPMMVTRQEDLSVGSVLLTVNATDPDSLQHQTIRYSVYKDPAGWLNINPINGTVDTTAVLDRESPFVDNSVYTALFLAIDSGNPPATGTGTLLITLEDVNDNAPFIYPTVAEVCDDAKNLSVVILGASDKDLHPNTDPFKFEIHKQAVPDKVWKISKINNTHALVSLLQNLNKANYNLPIMVTDSGKPPMTNITDLRVQVCSCRNSKVDCNAAGALRFSLPSVLLLSLFSLACL

SEQ ID NO: 2492 - protein, 56 aa, Homo Sapiens
MQPRTPLVLCVLLSQVLLLTSAEDLDCTPGFQQKVFHINQPAEFIEDQSILNYVFY

SEQ ID NO: 2493 - protein, 147 aa, Homo Sapiens
MILQAHLHSLCLLMLYLATGYGQEGKFSGPLKPMTFSIYEGQEPSQIIFQFKANPPAVTFELTGETDNIFVIEREGLLYYNRALDRETRSTHNLQVAALDANGIIVEGPVPITIKVKDINDNRPTFLQSKYEGSVRQNSRPGKPFLY

SEQ ID NO: 2494 - protein, 832 aa, Homo Sapiens
MILQAHLHSLCLLMLYLATGYGQEGKFSGPLKPMTFSIYEGQEPSQIIFQFKANPPAVTFELTGETDNIFVIEREGLLYYNRALDRETRSTHNLQVAALDANGIIVEGPVPITIKVKDINDNRPTFLQSKYEGSVRQNSRPGKPFLYVNATDLDDPATPNGQLYYQIVIQLPMINNVMYFQINNKTGAISLTREGSQELNPAKNPSYNLVISVKDMGGQSENSFSDTTSVDIIVTENIWKAPKPVEMVENSTDPHPIKITQVRWNDPGAQYSLVDKEKLPRFPFSIDQEGDIYVTQPLDREEKDAYVFYAVAKDEYGKPLSYPLEIHVKVKDINDNPPTCPSPVTVFEVQENERLGNSIGTLTAHDRDEENTANSFLNYRIVEQTPKLPMDGLFLIQTYAGMLQLAKQSLKKQDTPQYNLTIEVSDKDFKTLCFVQINVIDINDQIPIFEKSDYGNLTLAEDTNIGSTILTIQATDADEPFTGSSKILYHIIKGDSEGRLGVDTDPHTNTGYVIIKKPLDFETAAVSNIVFKAENPEPLVFGVKYNASSFAKFTLIVTDVNEAPQFSQHVFQAKVSEDVAIGTKVGNVTAKDPEGLDISYSLRGDTRGWLKIDHVTGEIFSVAPLDREAGSPYRVQVVATEVGGSSLSSVSEFHLILMDVNDNPPRLAKDYTGLFFCHPLSAPGSLIFEATDDDQHLFRGPHFTFSLGSGSLQNDWEVSKINGTHARLSTRHTEFEEREYVVLIRINDGGRPPLEGIVSLPVTFCSCVEGSCFRPAGHQTGIPTVGMAVGILLTTLLVIGIILAVVFIRIKKDKGKDNVESAQASEVKPLRS

SEQ ID NO: 2495 - protein, 832 aa, Homo Sapiens; identical to SEQ ID NO: 2494

SEQ ID NO: 2496 - protein, 580 aa, Homo Sapiens
MILQAHLHSLCLLMLYLATGYGQEGKFSGPLKPMTFSIYEGQEPSQIIFQFKANPPAVTFELTGETDNIFVIEREGLLYYNRALDRETRSTHNLQVAALDANGIIVEGPVPITIKVKDINDNRPTFLQSKYEGSVRQNSRPGNSIGTLTAHDRDEENTANSFLNYRIVEQTPKLPMDGLFLIQTYAGMLQLAKQSLKKQDTPQYNLTIEVSDKDFKTLCFVQINVIDINDQIPIFEKSDYGNLTLAEDTNIGSTILTIQATDADEPFTGSSKILYHIIKGDSEGRLGVDTDPHTNTGYVIIKKPLDFETAAVSNIVFKAENPEPLVFGVKYNASSFAKFTLIVTDVNEAPQFSQHVFQAKVSEDVAIGTKVGNVTAKDPEGLDISYSLRGDTRGWLKIDHVTGEIFSVAPLDREAGSPYRVQVVATEVGGSSLSSVSEFHLILMDVNDNPPRLAKDYTGLFFCHPLSAPGSLIFEATDDDQHLFRGPHFTFSLGSGSLQNDWEVSKINGTHARLSTRHTEFEEREYVVLIRINDGGRPPLEGIVSLPGIILAVVFIRIKKDKGKDNVESAQASEVKPLRS

SEQ ID NO: 2497 - protein, 90 aa, Homo Sapiens
  misc_feature (1)..(1): Xaa can be any naturally occurring amino acid
XIDINDQIPIFEKSDYGNLTLAEDTNIGSTILTIQATDADEPFTGSSKILYHIIKGDSEGRLGVDTDPHTNTGYVIIKKLFTEGRHKRLA

SEQ ID NO: 2498 - protein, 790 aa, Homo Sapiens
MKITSTSCICPVLVCLCFVQRCYGTAHHSSIKVMRNQTKHIEGETEVHHRPKRGWVWNQFFVLEEHMGPDPQYVGKLHSNSDKGDGSVKYILTGEGAGTIFIIDDTTGDIHSTKSLDREQKTHYVLHAQAIDRRTNKPLEPESEFIIKVQDINDNAPKFTDGPYIVTVPEMSDMGTSVLQVTATDADDPTYGNSARVVYSILQGQPYFSVDPKTGVIRTALHNMDREAREHYSVVIQAKDMAGQVGGLSGSTTVNITLTDVNDNPPRFPQKHYQLYVPESAQVGSAVGKIKANDADTGSNADMTYSIINGDGMGIFSISTDKETREGILSLKKPLNYEKKKSYTLNIEGANTHLDFRFSHLGPFKDATMLKIIVGDVDEPPLFSMPSYLMEVYENAKIGTVVGTVLAQDPDSTNSLVRYFINYNVEDDRFFNIDANTGTIRTTKVLDREETPWYNITVTASEIDNPDLLSHVTVGIRVLDVNDNPPELAREYDIIVCENSKPGQVIHTISATDKDDFANGPRFNFFLDERLPVNPNFTLKDNEDNTASILTRRRRFSRTVQDVYYLPIMISDGGIPSLSSSSTLTIRVCACERDGRVRTCHAEAFLSSAGLSTGALIAILLCVLILLAIVVLFITLRRSKKEPLIISEEDVRENVVTYDDEGGGEEDTEAFDITALRNPSAAEELKYRRDIRPEVKLTPRHQTSSTLESIDVQEFIKQRLAEADLDPSVPPYDSLQTYAYEGQRSEAGSISSLDSATTQSDQDYHYLGDWGPEFKKLAELYGEIESERTT

SEQ ID NO: 2499 - protein, 790 aa, Homo Sapiens; identical to SEQ ID NO: 2498

SEQ ID NO: 2500 - protein, 590 aa, Homo Sapiens
MKITSTSCICPVLVCLCFVQRCYGTAHHSSIKVMRNQTKHIEGETEVHHRPKRGWVWNQFFVLEEHMGPDPQYVGKLHSNSDKGDGSVKYILTGEGAGTIFIIDDTTGDIHSTKSLDREQKTHYVLHAQAIDRRTNKPLEPESEFIIKVQDINDNAPKFTDGPYIVTVPEMSDMGTSVLQVTATDADDPTYGNSARVVYSILQGQPYFSVDPKTGVIRTALHNMDREAREHYSVVIQAKDMAGQVGGLSGSTTVNITLTDVNDNPPRFPQKHYQLYVPESAQVGSAVGKIKANDADTGSNADMTYSIINGDGMGIFSISTDKETREGILSLKKPLNYEKKKSYTLNIEGANTHLDFRFSHLGPFKDATMLKIIVGDVDEPPLFSMPSYLMEVYENAKIGTVVGTVLAQDPDSTNSLVRYFINYNVEDDRFFNIDANTGTIRTTKVLDREETPWYNITVTASEIDNPDLLSHVTVGIRVLDVNDNPPELAREYDIIVCENSKPGQVIHTISATDKDDFANGPRFNFFLDERLPVNPNFTLKDNEGEHIYTYLFIYVVSALTLYVIGFILIYTQTSCKSAFKVSLMLLCYDL

SEQ ID NO: 2501 - protein, 575 aa, Homo Sapiens
MKITSTSCICPVLVCLCFVQRCYGTAHHSSIKVMRNQTKHIEGETEVHHRPKRGWVWNQFFVLEEHMGPDPQYVGKLHSNSDKGDGSVKYILTGEGAGTIFIIDDTTGDIHSTKSLDREQKTHYVLHAQAIDRRTNKPLEPESEFIIKVQDINDNAPKFTDGPYIVTVPEMSDMGTSVLQVTATDADDPTYGNSARVVYSILQGQPYFSVDPKTGVIRTALHNMDREAREHYSVVIQAKDMAGQVGGLSGSTTVNITLTDVNDNPPRFPQKHYQLYVPESAQVGSAVGKIKANDADTGSNADMTYSIINGDGMGIFSISTDKETREGILSLKKPLNYEKKKSYTLNIEGANTHLDFRFSHLGPFKDATMLKIIVGDVDEPPLFSMPSYLMEVYENAKIGTVVGTVLAQDPDSTNSLVRYFINYNVEDDRFFNIDANTGTIRTTKVLDREETPWYNITVTASEIDNPDLLSHVTVGIRVLDVNDNPPELAREYDIIVCENSKPGQVIHTISATDKDDFANGPRFNFFLDERLPVNPNFTLKDNEAAAAPSPSGFVHAREMGVCGPAMQKPSCPRLV

SEQ ID NO: 2502 - protein, 790 aa, Homo Sapiens; identical to SEQ ID NO: 2498

SEQ ID NO: 2503 - protein, 574 aa, Homo Sapiens
MKITSTSCICPVLVCLCFVQRCYGTAHHSSIKVMRNQTKHIEGETEVHHRPKRGWVWNQFFVLEEHMGPDPQYVGKLHSNSDKGDGSVKYILTGEGAGTIFIIDDTTGDIHSTKSLDREQKTHYVLHAQAIDRRTNKPLEPESEFIIKVQDINDNAPKFTDGPYIVTVPEMSDMGTSVLQVTATDADDPTYGNSARVVYSILQGQPYFSVDPKTGVIRTALHNMDREAREHYSVVIQAKDMAGQVGGLSGSTTVNITLTDVNDNPPRFPQKHYQLYVPESAQVGSAVGKIKANDADTGSNADMTYSIINGDGMGIFSISTDKETREGILSLKKPLNYEKKKSYTLNIEGANTHLDFRFSHLGPFKDATMLKIIVGDVDEPPLFSMPSYLMEVYENAKIGTVVGTVLAQDPDSTNSLVRYFINYNVEDDRFFNIDANTGTIRTTKVLDREETPWYNITVTASEIDNPDLLSHVTVGIRVLDVNDNPPELAREYDIIVCENSKPGQVIHTISATDKDDFANGPRFNFFLDERLPVNPNFTLKDNEAAAPSPSGFVHAREMGVCGPAMQKPSCPRLV

SEQ ID NO: 2504 - protein, 441 aa, Homo Sapiens
WVWNQFFVLEEHMGPDPQYVGKLHSNSDKGDGSVKYILTGEGAGTIFIIDDTTGDIHSTKSLDREQKTHYVLHAQAIDRRTNKPLEPESEFIIKVQDINDNAPKFTDGPYIVTVPEMSDMGTSVLQVTATDADDPTYGNSARVVYSILQGQPYFSVDPKTGVIRTALHNMDREAREHYSVVIQAKDMAGQVGGLSGSTTVNITLTDVNDNPPRFPQKHYQLYVPESAQVGSAVGKIKANDADTGSNADMTYSIINGDGMGIFSISTDKETREGILSLKKPLNYEKKKSYTLNIEGANTHLDFRFSHLGPFKDATMLKIIVGDVDEPPLFSMPSYLMEVYENAKIGTVVGTVLAQDPDSTNSLVRYFINYNVEDDRFFNIDANTGTIRTTKVLDREETPWYNITVTASEIAAAAPSPSGFVHAREMGVCGPAMQKPSCPRLV

SEQ ID NO: 2505 - protein, 434 aa, Homo Sapiens
GIPLLWPCLGATENSQTKKVKQPVRSHLRVKRGWVWNQFFVPEEMNTTSHHIGQLRSDLDNGNNSFQYKLLGAGAGSTFIIDERTGDIYAIQKLDREERSLYILRAQVIDIATGRAVEPESEFVIKVSDINDNEPKFLDEPYEAIVPEMSPEGTLVIQVTASDADDPSSGNNARLLYSLLQGQPYFSVEPTTGVIRISSKMDRELQDEYWVIIQAKDMIGQPGALSGTTSVLIKLSDVNDNKPIFKESLYRLTVSESAPTGTSIGTIMAYDNDIGENAEMDYSIEEDDSQTFDIITNHETQEGIVILKKKVDFEHQNHYGIRAKVKNHHVPEQLMKYHTEASTTFIKIQVEDVDEPPLFLLPYYVFEVFEETPQGSFVGVVSATDPDNRKSPIRYSITRSKVFNINDNGTITTSNSLDREISAWYNLSITATEK

SEQ ID NO: 2506 - protein, 65 aa, Homo Sapiens
MNCYLLLRFMLGIPLLWPCLGATENSQTKKVKQPVRSHLRVKRGWVWNQFFVPEEMNTTSHHIGQ

SEQ ID NO: 2507 - protein, 772 aa, Homo Sapiens
MNCYLLLRFMLGIPLLWPCLGATENSQTKKVKQPVRSHLRVKRGWVWNQFFVPEEMNTTSHHIGQLRSDLDNGNNSFQYKLLGAGAGSTFIIDERTGDIYAIQKLDREERSLYILRAQVIDIATGRAVEPESEFVIKVSDINDNEPKFLDEPYEAIVPEMSPEGTLVIQVTASDADDPSSGNNARLLYSLLQGQPYFSVEPTTGVIRISSKMDRELQDEYWVIIQAKDMIGQPGALSGTTSVLIKLSDVNDNKPIFKESLYRLTVSESAPTGTSIGTIMAYDNDIGENAEMDYSIEEDDSQTFDIITNHETQEGIVILKKKVDFEHQNHYGIRAKVKNHHVPEQLMKYHTEASTTFIKIQVEDVDEPPLFLLPYYVFEVFEETPQGSFVGVVSATDPDNRKSPIRYSITRSKVFNINDNGTITTSNSLDREISAWYNLSITATEKYNIEQISSIPLYVQVLNINDHAPEFSQYYETYVCENAGSGQVIQTISAVDRDESIEEHHFYFNLSVEDTNNSSFTIIDNQDNTAVILTNRTGFNLQEEPVFYISILIADNGIPSLTSTNTLTIHVCDCGDSGSTQTCQYQELVLSMGFKTEVIIAILICIMIIFGFIFLTLGLKQRRKQILFPEKSEDFRENIFQYDDEGGGEEDTEAFDIAELRSSTIMRERKTRKTTSAEIRSLYRQSLQVGPDSAIFRKFILEKLEEANTDPCAPPFDSLQTYAFEGTGSLAGSLSSLESAVSDQDESYDYLNELGPRFKRLACMFGSAVQSNN

SEQ ID NO: 2508 - protein, 490 aa, Homo Sapiens
MNCYLLLRFMLGIPLLWPCLGATENSQTKKVKQPVRSHLRVKRGWVWNQFFVPEEMNTTSHHIGQLRSDLDNGNNSFQYKLLGAGAGSTFIIDERTGDIYAIQKLDREERSLYILRAQVIDIATGRAVEPESEFVIKVSDINDNEPKFLDEPYEAIVPEMSPEGTLVIQVTASDADDPSSGNNARLLYSLLQGQPYFSVEPTTGVIRISSKMDRELQDEYWVIIQAKDMIGQPGALSGTTSVLIKLSDVNDNKPIFKESLYRLTVSESAPTGTSIGTIMAYDNDIGENAEMDYSIEEDDSQTFDIITNHETQEGIVILKKKVDFEHQNHYGIRAKVKNHHVPEQLMKYHTEASTTFIKIQVEDVDEPPLFLLPYYVFEVFEETPQGSFVGVVSATDPDNRKSPIRYSITRSKVFNINDNGTITTSNSLDREISAWYNLSITATEKYNIEQISSIPLYVQVLNINDHAPEFSQYYETYVCENAGSGQGLFF

SEQ ID NO: 2509 - protein, 541 aa, Homo Sapiens
MNCYLLLRFMLGIPLLWPCLGATENSQTKKVKQPVRSHLRVKRGWVWNQFFVPEEMNTTSHHIGQLRSDLDNGNNSFQYKLLGAGAGSTFIIDERTGDIYAIQKLDREERSLYILRAQVIDIATGRAVEPESEFVIKVSDINDNEPKFLDEPYEAIVPEMSPEGTLVIQVTASDADDPSSGNNARLLYSLLQGQPYFSVEPTTGVIRISSKMDRELQDEYWVIIQAKDMIGQPGALSGTTSVLIKLSDVNDNKPIFKESLYRLTVSESAPTGTSIGTIMAYDNDIGENAEMDYSIEEDDSQTFDIITNHETQEGIVILKKKVDFEHQNHYGIRAKVKNHHVPEQLMKYHTEASTTFIKIQVEDVDEPPLFLLPYYVFEVFEETPQGSFVGVVSATDPDNRKSPIRYSITRSKVFNINDNGTITTSNSLDREISAWYNLSITATEKYNIEQISSIPLYVQVLNINDHAPEFSQYYETYVCENAGSGQVIQTISAVDRDESIEEHHFYFNLSVEDTNNSSFTIIDNQELVLTFKKNLSSTSPS

SEQ ID NO: 2510 - protein, 445 aa, Homo Sapiens
MDNDPLVFGVSGEEASRFFAVEPDTGVVWLRQPLDRETKSEFTVEFSVSDHQGVITRKVNIQVGDVNDNAPTFHNQPYSVRIPENTPVGTPIFIVNATDPDLGAGGSVLYSFQPPSQFFAIDSARGIVTVIRELDYETTQAYQLTVNALAIIITNLPYSTNIYEHSPPGTTVRIITAIDQDKGRPRGIGYTIVSGNTNSIFALDYISGVLTLNGLLDRENPLYSHGFILTVKGTELNDDRTPSDATVTTTFNILVIDINDNAPEFNSSEYSVAITELAQVGFALPLFIQVVDKDEGLNSMFEVYLVGNNSHHFIISPTSVQGKADIRIRVAIPLDYETVDRYDFDLFANESVPDHVGYAKVKITLINENDNRPIFSQPLYNISLYENVTVGTSVLTVLVSPRFTAGPLSSPGPTVVRHPEGFCPRDLSNQGRRHPQIPELCLLVY

SEQ ID NO: 2511 - protein, 3354 aa, Homo Sapiens
MGRHVATSCHVAWLLVLISGCWGQVNRLPFFTNHFFDTYLLISEDTPVGSSVTQLLAQDMDNDPLVFGVSGEEASRFFAVEPDTGVVWLRQPLDRETKSEFTVEFSVSDHQGVITRKVNIQVGDVNDNAPTFHNQPYSVRIPENTPVGTPIFIVNATDPDLGAGGSVLYSFQPPSQFFAIDSARGIVTVIRELDYETTQAYQLTVNATDQDKTRPLSTLANLAIIITDVQDMDPIFINLPYSTNIYEHSPPGTTVRIITAIDQDKGRPRGIGYTIVSGNTNSIFALDYISGVLTLNGLLDRENPLYSHGFILTVKGTELNDDRTPSDATVTTTFNILVIDINDNAPEFNSSEYSVAITELAQVGFALPLFIQVVDKDENLGLNSMFEVYLVGNNSHHFIISPTSVQGKADIRIRVAIPLDYETVDRYDFDLFANESVPDHVGYAKVKITLINENDNRPIFSQPLYNISLYENVTVGTSVLTVLATDNDAGTFGEVSYFFSDDPDRFSLDKDTGLIMLIARLDYELIQRFTLTIIARDGGGEETTGRVRINVLDVNDNVPTFQKDAYVGALRENEPSVTQLVRLRATDEDSPPNNQITYSIVSASAFGSYFDISLYEGYGVISVSRPLDYEQISNGLIYLTVMAMDAGNPPLNSTVPVTIEVFDENDNPPTFSKPAYFVSVVENIMAGATVLFLNATDLDRSREYGQESIIYSLEGSTQFRINARSGEITTTSLLDRETKSEYILIVRAVDGGVGHNQKTGIATVNITLLDINDNHPTWKDAPYYINLVEMTPPDSDVTTVVAVDPDLGENGTLVYSIQPPNKFYSLNSTTGKIRTTHAMLDRENPDPHEAELMRKIVVSVTDCGRPPLKATSSATVFVNLLDLNDNDPTFQNLPFVAEVLEGIPAGVSIYQVVAIDLDEGLNGLVSYRMPVGMPRMDFLINSSSGVVVTTTELDRERIAEYQLRVVASDAGTPTKSSTSTLTIHVLDVNDETPTFFPAVYNVSVSEDVPREFRVVWLNCTDNDVGLNAELSYFITGGNVDGKFSVGYRDAVVRTVVGLDRETTAAYMLILEAIDNGPVGKRHTGTATVFVTVLDVNDNRPIFLQSSYEASVPEDIPEGHSILQLKATDADEGEFGRVWYRILHGNHGNNFRIHVSNGLLMRGPRPLDRERNSSHVLIVEAYNHDLGPMRSSVRVIVYVEDINDEAPVFTQQQYSRLGLRETAGIGTSVIVVQATDRDSGDGGLVNYRILSGAEGKFEIDESTGLIITVNYLDYETKTSYMMNVSATDQAPPFNQGFCSVYITLLNELDEAVQFSNASYEAAILENLALGTEIVRVQAYSIDNLNQITYRFNAYTSTQAKALFKIDAITGVITVQGLVDREKGDFYTLTVVADDGGPKVDSTVKVYITVLDENDNSPRFDFTSDSAVSIPEDCPVGQRVATVKAWDPDAGSNGQVVFSLASGNIAGAFEIVTTNDSIGEVFVARPLDREELDHYILQVVASDRGTPPRKKDHILQVTILDINDNPPVIESPFGYNVSVNENVGGGTAVVQVRATDRDIGINSVLSYYITEGNKDMAFRMDRISGEIATRPAPPDRERQSFYHLVATVEDEGTPTLSATTHVYVTIVDENDNAPMFQQPHYEVLLDEGPDTLNTSLITIQALDLDEGPNGTVTYAIVAGNIVNTFRIDRHMGVITAAKELDYEISHGRYTLIVTATDQCPILSHRLTSTTTVLVNVNDINDNVPTFPRDYEGPFEVTEGQPGPRVWTFLAHDRDSGPNGQVEYSIMDGDPLGEFVISPVEGVLRVRKDVELDRETIAFYNLTICARDRGMPPLSSTMLVGIRVLDINDNDPVLLNLPMNITISENSPVSSFVAHVLASDADSGCNARLTFNITAGNRERAFFINATTGIVTVNRPLDRERIPEYKLTISVKDNPENPRIARRDYDLLLIFLSDENDNHPLFTKSTYQAEVMENSPAGTPLTVLNGPILALDADQDIYAVVTYQLLGAQSGLFDINSSTGVVTVRSGVIIDREAFSPPILELLLLAEDIGLLNSTAHLLITILDDNDNRPTFSPATLTVHLLENCPPGFSVLQVTATDEDSGLNGELVYRIEAGAQDRFLIHLVTGVIRVGNATIDREEQESYRLTVVATDRGTVPLSGTAIVTILIDDINDSRPEFLNPIQTVSVLESAEPGTVIANITAIDHDLNPKLEYHIVGIVAKDDTDRLVPNQEDAFAVNINTGSVMVKSPMNRELVATYEVTLSVIDNASDLPERSVSVPNAKLTVNVLDVNDNTPQFKPFGITYYMERILEGATPGTTLIAVAAVDPDKGLNGLVTYTLLDLVPPGYVQLEDSSAGKVIANRTVDYEEVHWLNFTVRASDNGSPPRAAEIPVYLEIVDINDNNPIFDQPSYQEAVFEDVPVGTIILTVTATDADSGNFALIEYSLGDGESKFAINPTTGDIYVLSSLDREKKDHYILTALAKDNPGDVASNRRENSVQVVIQVLDVNDCRPQFSKPQFSTSVYENEPAGTSVITMMATDQDEGPNGELTYSLEGPGVEAFHVDMDSGLVTTQRPLQSYEKFSLTVVATDGGEPPLWGTTMLLVEVIDVNDNRPVFVRPPNGTILHIREEIPLRSNVYEVYATDKDEGLNGAVRYSFLKTAGNRDWEFFIIDPISGLIQTAQRLDRESQAVYSLILVASDLGQPVPYETMQPLQVALEDIDDNEPLFVRPPKGSPQYQLLTVPEHSPRGTLVGNVTGAVDADEGPNAIVYYFIAAGNEEKNFHLQPDGCLLVLRDLDREREAIFSFIVKASSNRSWTPPRGPSPTLDLVADLTLQEVRVVLEDINDQPPRFTKAEYTAGVATDAKVGSELIQVLALDADIGNNSLVFYSILAIHYFRALANDSEDVGQVFTMGSMDGILRTFDLFMAYSPGYFVVDIVARDLAGHNDTAIIGIYILRDDQRVKIVINEIPDRVRGFEEEFIHLLSNITGAIVNTDNVQFHVDKKGRVNFAQTELLIHVVNRDTNRILDVDRVIQMIDENKEQLRNLFRNYNVLDVQPAISVRLPDDMSALQMAIIVLAILLFLAAMLFVLMNWYYRTVHKRKLKAIVAGSAGNRGFIDIMDMPNTNKYSFDGANPVWLDPFCRNLELAAQAEHEDDLPENLSEIADLWNSPTRTHGTFGREPAAVKPDDDRYLRAAIQEYDNIAKLGQIIREGPIKGSLLKVVLEDYLRLKKLFAQRMVQKASSCHSSISELIQTELDEEPGDHSPGQGSLRFRHKPPVELKGPDGIHVVHGSTGTLLATDLNSLPEEDQKGLGRSLETLTAAEATAFERNARTESAKSTPLHKLRDVIMETPLEITEL

SEQ ID NO: 2512 - protein, 1061 aa, Homo Sapiens
MGRHVATSCHVAWLLVLISGCWGQVNRLPFFTNHFFDTYLLISEDTPVGSSVTQLLAQDMDNDPLVFGVSGEEASRFFAVEPDTGVVWLRQPLDRETKSEFTVEFSVSDHQGVITRKVNIQVGDVNDNAPTFHNQPYSVRIPENTPVGTPIFIVNATDPDLGAGGSVLYSFQPPSQFFAIDSARGIVTVIRELDYETTQAYQLTVNATDQDKTRPLSTLANLAIIITDVQDMDPIFINLPYSTNIYEHSPPGTTVRIITAIDQDKGRPRGIGYTIVSGNTNSIFALDYISGVLTLNGLLDRENPLYSHGFILTVKGTELNDDRTPSDATVTTTFNILVIDINDNAPEFNSSEYSVAITELAQVGFALPLFIQVVDKDENLGLNSMFEVYLVGNNSHHFIISPTSVQGKADIRIRVAIPLDYETVDRYDFDLFANESVPDHVGYAKVKITLINENDNRPIFSQPLYNISLYENVTVGTSVLTVLATDNDAGTFGEVSYFFSDDPDRFSLDKDTGLIMLIARLDYELIQRFTLTIIARDGGGEETTGRVRINVLDVNDNVPTFQKDAYVGALRENEPSVTQLVRLRATDEDSPPNNQITYSIVSASAFGSYFDISLYEGYGVISVSRPLDYEQISNGLIYLTVMAMDAGNPPLNSTVPVTIEVFDENDNPPTFSKPAYFVSVVENIMAGATVLFLNATDLDRSREYGQESIIYSLEGSTQFRINARSGEITTTSLLDRETKSEYILIVRAVDGGVGHNQKTGIATVNITLLDINDNHPTWKDAPYYINLVEMTPPDSDVTTVVAVDPDLGENGTLVYSIQPPNKFYSLNSTTGKIRTTHAMLDRENPDPHEAELMRKIVVSVTDCGRPPLKATSSATVFVNLLDLNDNDPTFQNLPFVAEVLEGIPAGVSIYQVVAIDLDEGLNGLVSYRMPVGMPRMDFLINSSSGVVVTTTELDRERIAEYQLRVVASDAGTPTKSSTSTLTIHVLDVNDETPTFFPAVYNVSVSEDVPREFRVVWLNCTDNDVGLNAELSYFITGAAPASAHLCRPPGALPPPLPDGQPD

SEQ ID NO: 2513 - protein, 1380 aa, Homo Sapiens
MGRHVATSCHVAWLLVLISGCWGQVNRLPFFTNHFFDTYLLISEDTPVGSSVTQLLAQDMDNDPLVFGVSGEEASRFFAVEPDTGVVWLRQPLDRETKSEFTVEFSVSDHQGVITRKVNIQVGDVNDNAPTFHNQPYSVRIPENTPVGTPIFIVNATDPDLGAGGSVLYSFQPPSQFFAIDSARGIVTVIRELDYETTQAYQLTVNATDQDKTRPLSTLANLAIIITDVQDMDPIFINLPYSTNIYEHSPPGTTVRIITAIDQDKGRPRGIGYTIVSGNTNSIFALDYISGVLTLNGLLDRENPLYSHGFILTVKGTELNDDRTPSDATVTTTFNILVIDINDNAPEFNSSEYSVAITELAQVGFALPLFIQVVDKDENLGLNSMFEVYLVGNNSHHFIISPTSVQGKADIRIRVAIPLDYETVDRYDFDLFANESVPDHVGYAKVKITLINENDNRPIFSQPLYNISLYENVTVGTSVLTVLATDNDAGTFGEVSYFFSDDPDRFSLDKDTGLIMLIARLDYELIQRFTLTIIARDGGGEETTGRVRINVLDVNDNVPTFQKDAYVGALRENEPSVTQLVRLRATDEDSPPNNQITYSIVSASAFGSYFDISLYEGYGVISVSRPLDYEQISNGLIYLTVMAMDAGNPPLNSTVPVTIEVFDENDNPPTFSKPAYFVSVVENIMAGATVLFLNATDLDRSREYGQESIIYSLEGSTQFRINARSGEITTTSLLDRETKSEYILIVRAVDGGVGHNQKTGIATVNITLLDINDNHPTWKDAPYYINLVEMTPPDSDVTTVVAVDPDLGENGTLVYSIQPPNKFYSLNSTTGKIRTTHAMLDRENPDPHEAELMRKIVVSVTDCGRPPLKATSSATVFVNLLDLNDNDPTFQNLPFVAEVLEGIPAGVSIYQVVAIDLDEGLNGLVSYRMPVGMPRMDFLINSSSGVVVTTTELDRERIAEYQLRVVASDAGTPTKSSTSTLTIHVLDVNDETPTFFPAVYNVSVSEDVPREFRVVWLNCTDNDVGLNAELSYFITGGNVDGKFSVGYRDAVVRTVVGLDRETTAAYMLILEAIDNGPVGKRHTGTATVFVTVLDVNDNRPIFLQSSYEASVPEDIPEGHSILQAATDADEGEFGRVWYRILHGNHGNNFRIHVSNGLLMRGPRPLDRERNSSHVLIVEAYNHDLGPMRSSVRVIVYVEDINDEAPVFTQQQYSRLGLRETAGIGTSVIVVQATDRDSGDGGLVNYRILSGAEGKFEIDESTGLIITVNYLDYETKTSYMMNVSATDQAPPFNQGFCSVYITLLNELDEAVQFSNASYEAAILENLALGTEIVRVQAYSIDNLNQITYRFNAYTSTQAKALFKIDAITVRGWGQGAPFLPI

SEQ ID NO: 2514 - protein, 1211 aa, Homo Sapiens
MGRHVATSCHVAWLLVLISGCWGQVNRLPFFTNHFFDTYLLISEDTPVGSSVTQLLAQDMDNDPLVFGVSGEEASRFFAVEPDTGVVWLRQPLDRETKSEFTVEFSVSDHQGVITRKVNIQVGDVNDNAPTFHNQPYSVRIPENTPVGTPIFIVNATDPDLGAGGSVLYSFQPPSQFFAIDSARGIVTVIRELDYETTQAYQLTVNATDQDKTRPLSTLANLAIIITDVQDMDPIFINLPYSTNIYEHSPPGTTVRIITAIDQDKGRPRGIGYTIVSGNTNSIFALDYISGVLTLNGLLDRENPLYSHGFILTVKGTELNDDRTPSDATVTTTFNILVIDINDNAPEFNSSEYSVAITELAQVGFALPLFIQVVDKDENLGLNSMFEVYLVGNNSHHFIISPTSVQGKADIRIRVAIPLDYETVDRYDFDLFANESVPDHVGYAKVKITLINENDNRPIFSQPLYNISLYENVTVGTSVLTVLATDNDAGTFGEVSYFFSDDPDRFSLDKDTGLIMLIARLDYELIQRFTLTIIARDGGGEETTGRVRINVLDVNDNVPTFQKDAYVGALRENEPSVTQLVRLRATDEDSPPNNQITYSIVSASAFGSYFDISLYEGYGVISVSRPLDYEQISNGLIYLTVMAMDAGNPPLNSTVPVTIEVFDENDNPPTFSKPAYFVSVVENIMAGATVLFLNATDLDRSREYGQESIIYSLEGSTQFRINARSGEITTTSLLDRETKSEYILIVRAVDGGVGHNQKTGIATVNITLLDINDNHPTWKDAPYYINLVEMTPPDSDVTTVVAVDPDLGENGTLVYSIQPPNKFYSLNSTTGKIRTTHAMLDRENPDPHEAELMRKIVVSVTDCGRPPLKATSSATVFVNLLDLNDNDPTFQNLPFVAEVLEGIPAGVSIYQVVAIDLDEGLNGLVSYRMPVGMPRMDFLINSSSGVVVTTTELDRERIAEYQLRVVASDAGTPTKSSTSTLTIHVLDVNDETPTFFPAVYNVSVSEDVPREFRVVWLNCTDNDVGLNAELSYFITGGNVDGKFSVGYRDAVVRTVVGLDRETTAAYMLILEAIDNGPVGKRHTGTATVFVTVLDVNDNRPIFLQSSYEASVPEDIPEGHSILQEDLASPCISPAPPRRAFQSSGEKETSQFPGKELRREPGPSKAQNRAAFTEPLAEAPLLGSKQAQEERAPLPREQAQQLQGSEGEKGGP

SEQ ID NO: 2515 - protein, 530 aa, Homo Sapiens
MGRHVATSCHVAWLLVLISGCWGQVNRLPFFTNHFFDTYLLISEDTPVGSSVTQLLAQDMDNDPLVFGVSGEEASRFFAVEPDTGVVWLRQPLDRETKSEFTVEFSVSDHQGVITRKVNIQVGDVNDNAPTFHNQPYSVRIPENTPVGTPIFIVNATDPDLGAGGSVLYSFQPPSQFFAIDSARGIVTVIRELDYETTQAYQLTVNATDQDKTRPLSTLANLAIIITDVQDMDPIFINLPYSTNIYEHSPPGTTVRIITAIDQDKGRPRGIGYTIVSGNTNSIFALDYISGVLTLNGLLDRENPLYSHGFILTVKGTELNDDRTPSDATVTTTFNILVIDINDNAPEFNSSEYSVAITELAQVGFALPLFIQVVDKDENLGLNSMFEVYLVGNNSHHFIISPTSVQGKADIRIRVAIPLDYETVDRYDFDLFANESVPDHVGYAKVKITLINENDNRPIFSQPLYNISLYENVTVGTSVLTVLVSPRFTAGPLSSPGPTVVRHPEGFCPRDLSNQGRRHPQIPELCLLVY

SEQ ID NO: 2516 - protein, 3354 aa, Homo Sapiens
MGRHVATSCHVAWLLVLISGCWGQVNRLPFFTNHFFDTYLLISEDTPVGSSVTQLLAQDMDNDPLVFGVSGEEASRFFAVEPDTGVVWLRQPLDRETKSEFTVEFSVSDHQGVITRKVNIQVGDVNDNAPTFHNQPYSVRIPENTPVGTPIFIVNATDPDLGAGGSVLYSFQPPSQFFAIDSARGIVTVIRELDYETTQAYQLTVNATDQDKTRPLSTLANLAIIITDVQDMDPIFINLPYSTNIYEHSPPGTTVRIITAIDQDKGRPRGIGYTIVSGNTNSIFALDYISGVLTLNGLLDRENPLYSHGFILTVKGTELNDDRTPSDATVTTTFNILVIDINDNAPEFNSSEYSVAITELAQVGFALPLFIQVVDKDETQGLNSMFEVYLVGNNSHHFIISPTSVQGKADIRIRVAIPLDYETVDRYDFDLFANESVPDHVGYAKVKITLINENDNRPIFSQPLYNISLYENVTVGTSVLTVLATDNDAGTFGEVSYFFSDDPDRFSLDKDTGLIMLIARLDYELIQRFTLTIIARDGGGEETTGRVRINVLDVNDNVPTFQKDAYVGALRENEPSVTQLVRLRATDEDSPPNNQITYSIVSASAFGSYFDISLYEGYGVISVSRPLDYEQISNGLIYLTVMAMDAGNPPLNSTVPVTIEVFDENDNPPTFSKPAYFVSVVENIMAGATVLFLNATDLDRSREYGQESIIYSLEGSTQFRINARSGEITTTSLLDRETKSEYILIVRAVDGGVGHNQKTGIATVNITLLDINDNHPTWKDAPYYINLVEMTPPDSDVTTVVAVDPDLGENGTLVYSIQPPNKFYSLNSTTGKIRTTHAMLDRENPDPHEAELMRKIVVSVTDCGRPPLKATSSATVFVNLLDLNDNDPTFQNLPFVAEVLEGIPAGVSIYQVVAIDLDEGLNGLVSYRMPVGMPRMDFLINSSSGVVVTTTELDRERIAEYQLRVVASDAGTPTKSSTSTLTIHVLDVNDETPTFFPAVYNVSVSEDVPREFRVVWLNCTDNDVGLNAELSYFITGGNVDGKFSVGYRDAVVRTVVGLDRETTAAYMLILEAIDNGPVGKRHTGTATVFVTVLDVNDNRPIFLQSSYEASVPEDIPEGHSILQLKATDADEGEFGRVWYRILHGNHGNNFRIHVSNGLLMRGPRPLDRERNSSHVLIVEAYNHDLGPMRSSVRVIVYVEDINDEAPVFTQQQYSRLGLRETAGIGTSVIVVQATDRDSGDGGLVNYRILSGAEGKFEIDESTGLIITVNYLDYETKTSYMMNVSATDQAPPFNQGFCSVYITLLNELDEAVQFSNASYEAAILENLALGTEIVRVQAYSIDNLNQITYRFNAYTSTQAKALFKIDAITGVITVQGLVDREKGDFYTLTVVADDGGPKVDSTVQVYITVLDENDNSPRFDFTSDSAVSIPEDCPVGQRVATVKAWDPDAGSNGQVVFSLASGNIAGAFEIVTTNDSIGEVFVARPLDREELDHYILQVVASDRGTPPRKKDHILQVTILDINDNPPVIESPFGYNVSVNENVGGGTAVVQVRATDRDIGINSVLSYYITEGNKDMAFRMDRISGEIATRPAPPDRERQSFYHLVATVEDEGTPTLSATTHVYVTIVDENDNAPMFQQPHYEVLLDEGPDTLNTSLITIQALDLDEGPNGTVTYAIVAGNIVNTFRIDRHMGVITAAKELDYEISHGRYTLIVTATDQCPILSHRLTSTTTVLVNVNDINDNVPTFPRDYEGPFEVTEGQPGPRVWTFLAHDRDSGPNGQVEYSIMDGDPLGEFVISPVEGVLRVRKDVELDRETIAFYNLTICARDRGMPPLSSTMLVGIRVLDINDNDPVLLNLPMNITISENSPVSSFVAHVLASDADSGCNARLTFNITAGNRERAFFINATTGIVTVNRPLDRERIPEYKLTISVKDNPENPRIARRDYDLLLIFLSDENDNHPLFTKSTYQAEVMENSPAGTPLTVLNGPILALDADQDIYAVVTYQLLGAQSGLFDINSSTGVVTVRSGVIIDREAFSPPILELLLLAEDIGLLNSTAHLLITILDDNDNRPTFSPATLTVHLLENCPPGFSVLQVTATDEDSGLNGELVYRIEAGAQDRFLIHLVTGVIRVGNATIDREEQESYRLTVVATDRGTVPLSGTAIVTILIDDINDSRPEFLNPIQTVSVLESAEPGTVIANITAIDHDLNPKLEYHIVGIVAKDDTDRLVPNQEDAFAVNINTGSVMVKSPMNRELVATYEVTLSVIDNASDLPERSVSVPNAKLTVNVLDVNDNTPQFKPFGITYYMERILEGATPGTTLIAVAAVDPDKGLNGLVTYTLLDLVPPGYVQLEDSSAGKVIANRTVDYEEVHWLNFTVRASDNGSPPRAAEIPVYLEIVDINDNNPIFDQPSYQEAVFEDVPVGTIILTVTATDADSGNFALIEYSLGDGESKFAINPTTGDIYVLSSLDREKKDHYILTALAKDNPGDVASNRRENSVQVVIQVLDVNDCRPQFSKPQFSTSVYENEPAGTSVITMMATDQDEGPNGELTYSLEGPGVEAFHVDMDSGLVTTQRPLQSYEKFSLTVVATDGGEPPLWGTTMLLVEVIDVNDNRPVFVRPPNGTILHIREEIPLRSNVYEVYATDKDEGLNGAVRYSFLKTAGNRDWEFFIIDPISGLIQTAQRLDRESQAVYSLILVASDLGQPVPYETMQPLQVALEDIDDNEPLFVRPPKGSPQYQLLTVPEHSPRGTLVGNVTGAVDADEGPNAIVYYFIAAGNEEKNFHLQPDGCLLVLRDLDREREAIFSFIVKASSNRSWTPPRGPSPTLDLVADLTLQEVRVVLEDINDQPPRFTKAEYTAGVATDAKVGSELIQVLALDADIGNNSLVFYSILAIHYFRALANDSEDVGQVFTMGSMDGILRTFDLFMAYSPGYFVVDIVARDLAGHNDTAIIGIYILRDDQRVKIVINEIPDRVRGFEEEFIHLLSNITGAIVNTDNVQFHVDKKGRVNFAQTELLIHVVNRDTNRILDVDRVIQMIDENKEQLRNLFRNYNVLDVQPAISVRLPDDMSALQMAIIVLAILLFLAAMLFVLMNWYYRTVHKRKLKAIVAGSAGNRGFIDIMDMPNTNKYSFDGANPVWLDPFCRNLELAAQAEHEDDLPENLSEIADLWNSPTRTHGTFGREPAAVKPDDDRYLRAAIQEYDNIAKLGQIIREGPIKGSLLKVVLEDYLRLKKLFAQRMVQKASSCHSSISELIQTELDEEPGDHSPGQGSLRFRHKPPVELKGPDGIHVVHGSTGTLLATDLNSLPEEDQKGLGRSLETLTAAEATAFERNARTESAKSTPLHKLRDVIMETPLEITEL

SEQ ID NO: 2517 - protein, 1381 aa, Homo Sapiens
MGRHVATSCHVAWLLVLISGCWGQVNRLPFFTNHFFDTYLLISEDTPVGSSVTQLLAQDMDNDPLVFGVSGEEASRFFAVEPDTGVVWLRQPLDRETKSEFTVEFSVSDHQGVITRKVNIQVGDVNDNAPTFHNQPYSVRIPENTPVGTPIFIVNATDPDLGAGGSVLYSFQPPSQFFAIDSARGIVTVIRELDYETTQAYQLTVNATDQDKTRPLSTLANLAIIITDVQDMDPIFINLPYSTNIYEHSPPGTTVRIITAIDQDKGRPRGIGYTIVSGNTNSIFALDYISGVLTLNGLLDRENPLYSHGFILTVKGTELNDDRTPSDATVTTTFNILVIDINDNAPEFNSSEYSVAITELAQVGFALPLFIQVVDKDENLGLNSMFEVYLVGNNSHHFIISPTSVQGKADIRIRVAIPLDYETVDRYDFDLFANESVPDHVGYAKVKITLINENDNRPIFSQPLYNISLYENVTVGTSVLTVLATDNDAGTFGEVSYFFSDDPDRFSLDKDTGLIMLIARLDYELIQRFTLTIIARDGGGEETTGRVRINVLDVNDNVPTFQKDAYVGALRENEPSVTQLVRLRATDEDSPPNNQITYSIVSASAFGSYFDISLYEGYGVISVSRPLDYEQISNGLIYLTVMAMDAGNPPLNSTVPVTIEVFDENDNPPTFSKPAYFVSVVENIMAGATVLFLNATDLDRSREYGQESIIYSLEGSTQFRINARSGEITTTSLLDRETKSEYILIVRAVDGGVGHNQKTGIATVNITLLDINDNHPTWKDAPYYINLVEMTPPDSDVTTVVAVDPDLGENGTLVYSIQPPNKFYSLNSTTGKIRTTHAMLDRENPDPHEAELMRKIVVSVTDCGRPPLKATSSATVFVNLLDLNDNDPTFQNLPFVAEVLEGIPAGVSIYQVVAIDLDEGLNGLVSYRMPVGMPRMDFLINSSSGVVVTTTELDRERIAEYQLRVVASDAGTPTKSSTSTLTIHVLDVNDETPTFFPAVYNVSVSEDVPREFRVVWLNCTDNDVGLNAELSYFITGGNVDGKFSVGYRDAVVRTVVGLDRETTAAYMLILEAIDNGPVGKRHTGTATVFVTVLDVNDNRPIFLQSSYEASVPEDIPEGHSILQLKATDADEGEFGRVWYRILHGNHGNNFRIHVSNGLLMRGPRPLDRERNSSHVLIVEAYNHDLGPMRSSVRVIVYVEDINDEAPVFTQQQYSRLGLRETAGIGTSVIVVQATDRDSGDGGLVNYRILSGAEGKFEIDESTGLIITVNYLDYETKTSYMMNVSATDQAPPFNQGFCSVYITLLNELDEAVQFSNASYEAAILENLALGTEIVRVQAYSIDNLNQITYRFNAYTSTQAKALFKIDAITVRGWGQGAPFLPI

SEQ ID NO: 2518 - protein, 115 aa, Homo Sapiens
MSLRAGGKTRRWPGPEQAARGGRSGGEQSPRRGEARRRCTHAHGSSVTQLLAQDMDNDPLVFGVSGEEASRFFAVEPDTGVVWLRQPLDRETKSEFTVEFSVSDHQGVITRKVNI

SEQ ID NO: 2519 - protein, 1114 aa, Homo Sapiens
MVKSPMNRELVATYEVTLSVIDNASDLPERSVSVPNAKLTVNVLDVNDNTPQFKPFGITYYMERILEGATPGTTLIAVAAVDPDKGLNGLVTYTLLDLVPPGYVQLEDSSAGKVIANRTVDYEEVHWLNFTVRASDNGSPPRAAEIPVYLEIVDINDNNPIFDQPSYQEAVFEDVPVGTIILTVTATDADSGNFALIEYSLGDGESKFAINPTTGDIYVLSSLDREKKDHYILTALAKDNPGDVASNRRENSVQVVIQVLDVNDCRPQFSKPQFSTSVYENEPAGTSVITMMATDQDEGPNGELTYSLEGPGVEAFHVDMDSGLVTTQRPLQSYEKFSLTVVATDGGEPPLWGTTMLLVEVIDVNDNRPVFVRPPNGTILHIREEIPLRSNVYEVYATDKDEGLNGAVRYSFLKTAGNRDWEFFIIDPISGLIQTAQRLDRESQAVYSLILVASDLGQPVPYETMQPLQVALEDIDDNEPLFVRPPKGSPQYQLLTVPEHSPRGTLVGNVTGAVDADEGPNAIVYYFIAAGNEEKNFHLQPDGCLLVLRDLDREREAIFSFIVKASSNRSWTPPRGPSPTLDLVADLTLQEVRVVLEDINDQPPRFTKAEYTAGVATDAKVGSELIQVLALDADIGNNSLVFYSILAIHYFRALANDSEDVGQVFTMGSMDGILRTFDLFMAYSPGYFVVDIVARDLAGHNDTAIIGIYILRDDQRVKIVINEIPDRVRGFEEEFIHLLSNITGAIVNTDNVQFHVDKKGRVNFAQTELLIHVVNRDTNRILDVDRVIQMIDENKEQLRNLFRNYNVLDVQPAISVRLPDDMSALQMAIIVLAILLFLAAMLFVLMNWYYRTVHKRKLKAIVAGSAGNRGFIDIMDMPNTNKYSFDGANPVWLDPFCRNLELAAQAEHEDDLPENLSEIADLWNSPTRTHGTFGREPAAVKPDDDRYLRAAIQEYDNIAKLGQIIREGPIKGSLLKVVLEDYLRLKKLFAQRMVQKASSCHSSISELIQTELDEEPGDHSPGQGSLRFRHKPPVELKGPDGIHVVHGSTGTLLATDLNSLPEEDQKGLGRSLETLTAAEATAFERNARTESAKSTPLHKLRDVIMETPLEITEL

SEQ ID NO: 2520 - protein, 1079 aa, Homo Sapiens
MVKSPMNRELVATYEVTLSVIDNASDLPERSVSVPNAKLTVNVLDVNDNTPQFKPFGITYYMERILEGATPGTTLIAVAAVDPDKGLNGLVTYTLLDLVPPGYVQLEDSSAGKVIANRTVDYEEVHWLNFTVRASDNGSPPRAAEIPVYLEIVDINDNNPIFDQPSYQEAVFEDVPVGTIILTVTATDADSGNFALIEYSLGDGESKFAINPTTGDIYVLSSLDREKKDHYILTALAKDNPGDVASNRRENSVQVVIQVLDVNDCRPQFSKPQFSTSVYENEPAGTSVITMMATDQDEGPNGELTYSLEGPGVEAFHVDMDSGLVTTQRPLQSYEKFSLTVVATDGGEPPLWGTTMLLVEVIDVNDNRPVFVRPPNGTILHIREEIPLRSNVYEVYATDKDEGLNGAVRYSFLKTAGNRDWEFFIIDPISGLIQTAQRLDRESQAVYSLILVASDLGQPVPYETMQPLQVALEDIDDNEPLFVRPPKGSPQYQLLTVPEHSPRGTLVGNVTGAVDADEGPNAIVYYFIAAGNEEKNFHLQPDGCLLVLRDLDREREAIFSFIVKASSNRSWTPPRGPSPTLDLVADLTLQEVRVVLEDINDQPPRFTKAEYTAGVATDAKVGSELIQVLALDADIGNNSLVFYSILAIHYFRALANDSEDVGQVFTMGSMDGILRTFDLFMAYSPGYFVVDIVARDLAGHNDTAIIGIYILRDDQRVKIVINEIPDRVRGFEEEFIHLLSNITGAIVNTDNVQFHVDKKGRVNFAQTELLIHVVNRDTNRILDVDRVIQMIDENKEQLRNLFRNYNVLDVQPAISVRLPDDMSALQMAIIVLAILLFLAAMLFVLMNWYYRTVHKRKLKAIVAGSAGNRGFIDIMDMPNTNKYSFDGANPVWLDPFCRNLELAAQAEHEDDLPENLSEIADLWNSPTRTHGTFGREPAAVKPDDDRYLRAAIQEYDNIAKLGQIIREGPIKLIQTELDEEPGDHSPGQGSLRFRHKPPVELKGPDGIHVVHGSTGTLLATDLNSLPEEDQKGLGRSLETLTAAEATAFERNARTESAKSTPLHKLRDVIMETPLEITEL

SEQ ID NO: 2521 - protein, 6 aa, Homo Sapiens
PCCTLN

SEQ ID NO: 2522 - protein, 29 aa, Homo Sapiens
TGKGHGADTCTSWKAQRNDRRINMAVTKH

SEQ ID NO: 2523 - protein, 396 aa, Homo Sapiens
VITRKVNIQVGDVNDNAPTFHNQPYSVRIPENTPVGTPIFIVNATDPDLGAGGSVLYSFQPPSQFFAIDSARGIVTVIRELDYETTQAYQLTVNATDQDKTRPLSTLANLAIIITDVQDMDPIFINLPYSTNIYEHSPPGTTVRIITAIDQDKGRPRGIGYTIVSGNTNSIFALDYISGVLTLNGLLDRENPLYSHGFILTVKGTELNDDRTPSDATVTTTFNILVIDINDNAPEFNSSEYSVAITELAQVGFALPLFIQVVDKDENLGLNSMFEVYLVGNNSHHFIISPTSVQGKADIRIRVAIPLDYETVDRYDFDLFANESVPDHVGYAKVKITLINENDNRPIFSQPLYNISLYENVTVGTSVLTVLWEKFFCSNSSRFSSAQLVVSSWNQL

SEQ ID NO: 2524 - protein, 1035 aa, Homo Sapiens
  misc_feature (1)..(1): Xaa can be any naturally occurring amino acid
XDKTRPLSTLANLAIIITDVQDMDPIFINLPYSTNIYEHSPPGTTVRIITAIDQDKGRPRGIGYTIVSGNTNSIFALDYISGVLTLNGLLDRENPLYSHGFILTVKGTELNDDRTPSDATVTTTFNILVIDINDNAPEFNSSEYSVAITELAQVGFALPLFIQVVDKDEENGGWLQGRPEGVGEGLHVQNLGLNSMFEVYLVGNNSHHFIISPTSVQGKADIRIRVAIPLDYETVDRYDFDLFANESVPDHVGYAKVKITLINENDNRPIFSQPLYNISLYENVTVGTSVLTVLATDNDAGTFGEVSYFFSDDPDRFSLDKDTGLIMLIARLDYELIQRFTLTIIARDGGGEETTGRVRINVLDVNDNVPTFQKDAYVGALRENEPSVTQLVRLRATDEDSPPNNQITYSIVSASAFGSYFDISLYEGYGVISVSRPLDYEQISNGLIYLTVMAMDAGNPPLNSTVPVTIEVFDENDNPPTFSKPAYFVSVVENIMAGATVLFLNATDLDRSREYGQESIIYSLEGSTQFRINARSGEITTTSLLDRETKSEYILIVRAVDGGVGHNQKTGIATVNITLLDINDNHPTWKDAPYYINLVEMTPPDSDVTTVVAVDPDLGENGTLVYSIQPPNKFYSLNSTTGKIRTTHAMLDRENPDPHEAELMRKIVVSVTDCGRPPLKATSSATVFVNLLDLNDNDPTFQNLPFVAEVLEGIPAGVSIYQVVAIDLDEGLNGLVSYRMPVGMPRMDFLINSSSGVVVTTTELDRERIAEYQLRVVASDAGTPTKSSTSTLTIHVLDVNDETPTFFPAVYNVSVSEDVPREFRVVWLNCTDNDVGLNAELSYFITGGNVDGKFSVGYRDAVVRTVVGLDRETTAAYMLILEAIDNGPVGKRHTGTATVFVTVLDVNDNRPIFLQSSYEASVPEDIPEGHSILQHPPWPLKGASSIIFNPFLIDPNVGALKRGHQDGCQDHAWRALFAPPPSWHPGICSTRREAAAPTGHQADAGSTRETQGREPRGFAPALGQHRCQDSVLAPV

SEQ ID NO: 2525 - protein, 165 aa, Homo Sapiens
  misc_feature (1)..(1): Xaa can be any naturally occurring amino acid
XDNAPEFNSSEYSVAITELAQVGFALPLFIQVVDKDEGLNSMFEVYLVGNNSHHFIISPTSVQGKADIRIRVAIPLDYETVDRYDFDLFANESVPDHVGYAKVKITLINENDNRPIFSQPLYNISLYENVTVGTSVLTVLWEKFFCSNSSRFSSAQLVVSSWNQL

SEQ ID NO: 2526 - protein, 223 aa, Homo Sapiens
MPSRTGTSTLTVAVCKCNEQGEFTFCEDMAAQVGVSIQAVVAILLCILTITVITLLIFLRRRLRKQARAHGKSVPEIHEQLVTYDEEGGGEMDTTSYDVSVLNSVRRGGAKPPRPALDARPSLYAQVQKPPRHAPGAHGGPGEMAAMIEVKKDEADHDGDGPPYDTLHIYGYEGSESIAESLSSLGTDSSDSDVDYDFLNDWGPRFKMLAELYGSDPREELLY

SEQ ID NO: 2527 - protein, 17 aa, Homo Sapiens
MQRLMMLLATSGACLGL

SEQ ID NO: 2528 - protein, 76 aa, Homo Sapiens
MQRLMMLLATSGACLGLLAVAAVAAAGANPAQRDTHSLLPTHRRQKRDWIWNQMHIDEEKNTSLPHHVGKIKSSVS

SEQ ID NO: 2529 - protein, 131 aa, Homo Sapiens
MQRLMMLLATSGACLGLLAVAAVAAAGANPAQRDTHSLLPTHRRQKRDWIWNQMHIDEEKNTSLPHHVGKIKSSVSRKNAKYLLKGEYVGKVFRVDAETGDVFAIERLDRENISEYHLTAVIVDKDTGENL

SEQ ID NO: 2530 - protein, 784 aa, Homo Sapiens
MQRLMMLLATSGACLGLLAVAAVAAAGANPAQRDTHSLLPTHRRQKRDWIWNQMHIDEEKNTSLPHHVGKIKSSVSRKNAKYLLKGEYVGKVFRVDAETGDVFAIERLDRENISEYHLTAVIVDKDTGENLETPSSFTIKVHDVNDNWPVFTHRLFNASVPESSAVGTSVISVTAVDADDPTVGDHASVMYQILKGKEYFAIDNSGRIITITKSLDREKQARYEIVVEARDAQGLRGDSGTATVLVTLQDINDNFPFFTQTKYTFVVPEDTRVGTSVGSLFVEDPDEPQNRMTKYSILRGDYQDAFTIETNPAHNEGIIKPMKPLDYEYIQQYSFIVEATDPTIDLRYMSPPAGNRAQVIINITDVDEPPIFQQPFYHFQLKENQKKPLIGTVLAMDPDAARHSIGYSIRRTSDKGQFFRVTKKGDIYNEKELDREVYPWYNLTVEAKELDSTGTPTGKESIVQVHIEVLDENDNAPEFAKPYQPKVCENAVHGQLVLQISAIDKDITPRNVKFKFILNTENNFTLTDNHDNTANITVKYGQFDREHTKVHFLPVVISDNGMPSRTGTSTLTVAVCKCNEQGEFTFCEDMAAQVGVSIQAVVAILLCILTITVITLLIFLRRRLRKQARAHGKSVPEIHEQLVTYDEEGGGEMDTTSYDVSVLNSVRRGGAKPPRPALDARPSLYAQVQKPPRHAPGAHGGPGEMAAMIEVKKDEADHDGDGPPYDTLHIYGYEGSESIAESLSSLGTDSSDSDVDYDFLNDWGPRFKMLAELYGSDPREELLY

SEQ ID NO: 2531 - protein, 406 aa, Homo Sapiens
MQRLMMLLATSGACLGLLAVAAVAAAGANPAQRDTHSLLPTHRRQKRDWIWNQMHIDEEKNTSLPHHVGKIKSSVSRKNAKYLLKGEYVGKVFRVDAETGDVFAIERLDRENISEYHLTAVIVDKDTGENLETPSSFTIKVHDVNDNWPVFTHRLFNASVPESSAVGTSVISVTAVDADDPTVGDHASVMYQILKGKEYFAIDNSGRIITITKSLDREKQARYEIVVEARDAQGLRGDSGTATVLVTLQDINDNFPFFTQTKYTFVVPEDTRVGTSVGSLFVEDPDEPQNRMTKYSILRGDYQDAFTIETNPAHNEGIIKPMKPLDYEYIQQYSFIVEATDPTIDLRYMSPPAGNRAQVIINITDVDEPPIFQQPFYHFQLKENQKKPLIGTVLAMDPDAARHSIG

SEQ ID NO: 2532 - protein, 669 aa, Homo Sapiens
MQRLMMLLATSGACLGLLAVAAVAAAGANPAQRDTHSLLPTHRRQKRDWIWNQMHIDEEKNTSLPHHVGKIKSSVSRKNAKYLLKGEYVGKVFRVDAETGDVFAIERLDRENISEYHLTAVIVDKDTGENLETPSSFTIKVHDVNDNWPVFTHRLFNASVPESSAVGTSVISVTAVDADDPTVGDHASVMYQILKGKEYFAIDNSGRIITITKSLDREKQARYEIVVEARDAQGLRGDSGTATVLVTLQDINDNFPFFTQTKYTFVVPEDTRVGTSVGSLFVEDPDEPQNRMTKYSILRGDYQDAFTIETNPAHNEGIIKPMKPLDYEYIQQYSFIVEATDPTIDLRYMSPPAGNRAQVIINITDVDEPPIFQQPFYHFQLVLQISAIDKDITPRNVKFKFILNTENNFTLTDNHDNTANITVKYGQFDREHTKVHFLPVVISDNGMPSRTGTSTLTVAVCKCNEQGEFTFCEDMAAQVGVSIQAVVAILLCILTITVITLLIFLRRRLRKQARAHGKSVPEIHEQLVTYDEEGGGEMDTTSYDVSVLNSVRRGGAKPPRPALDARPSLYAQVQKPPRHAPGAHGGPGEMAAMIEVKKDEADHDGDGPPYDTLHIYGYEGSESIAESLSSLGTDSSDSDVDYDFLNDWGPRFKMLAELYGSDPREELLY

SEQ ID NO: 2533 - protein, 110 aa, Homo Sapiens
MQRLMMLLATSGACLGLLAVAAVAAAGANPAQRDTHSLLPTHRRQKRDWIWNQMHIDEEKNTSLPHHVGKIKSSVSRKNAKYLLKGEYVGKVFRVDAETGDVTQMSPRTG

SEQ ID NO: 2534 - protein, 745 aa, Homo Sapiens
MRRCRWAALALGLLRLCLAQANFAPHFFDNGVGSTNGNMALFSLPEDTPVGSHVYTLNGTDPEGDPISYHISFDPSTRSVFSVDPTFGNITLVEELDREREDEIEAIISISDGLNLVAEKVVILVTDANDEAPRFIQEPYVALVPEDIPAGSIIFKVHAVDRDTGSGGSVTYFLQNLHSPFAVDRHSGVLRLQAGATLDYERSRTHYITVVAKDGGGRLHGADVVFSATTTVTVNVEDVQDMAPVFVGTPYYGYVYEDTLPGSEVLKVVAMDGDRGKPNRILYSLVNGNDGAFEINETSGAISITQSPAQLQREVYELHVQVTEMSPAGSPAAQATVPVTIRIVDLNNHPPTFYGESGPQNRFELSMNEHPPQGEILRGLKITVNDSDQGANAKFNLQLVGPRGIFRVVPQTVLNEAQVTIIVENSAAIDFEKSKVLTFKLLAVEVNTPEKFSSTADVVIQLLDTNDNVPKFDSLYYVARIPENAPGGSSVVAVTAVDPDTGPWGEVKYSTYGTGADLFLIHPSTGLIYTQPWASLDAEATARYNFYVKAEDMEGKYSVAEVFITLLDVNDHPPQFGKSVQKKTMVLGTPVKIEAIDEDAEEPNNLVDYSITHAEPANVFDINSHTGEIWLKNSIRSLDALHNITPGRDCLWSLEVQAKDRGSPSFSTTALLKIDITDAEVRRLRYMKNSNFPGTTKSVRKPKFKPKKPHSSQGLFLHPHCEIALFNLSNVNLYSRVFQGAAQAS

SEQ ID NO: 2535 - protein, 859 aa, Homo Sapiens
MRRCRWAALALGLLRLCLAQANFAPHFFDNGVGSTNGNMALFSLPEDTPVGSHVYTLNGTDPEGDPISYHISFDPSTRSVFSVDPTFGNITLVEELDREREDEIEAIISISDGLNLVAEKVVILVTDANDEAPRFIQEPYVALVPEDIPAGSIIFKVHAVDRDTGSGGSVTYFLQNLHSPFAVDRHSGVLRLQAGATLDYERSRTHYITVVAKDGGGRLHGADVVFSATTTVTVNVEDVQDMAPVFVGTPYYGYVYEDTLPGSEVLKVVAMDGDRGKPNRILYSLVNGNDGAFEINETSGAISITQSPAQLQREVYELHVQVTEMSPAGSPAAQATVPVTIRIVDLNNHPPTFYGESGPQNRFELSMNEHPPQGEILRGLKITVNDSDQGANAKFNLQLVGPRGIFRVVPQTVLNEAQVTIIVENSAAIDFEKSKVLTFKLLAVEVNTPEKFSSTADVVIQLLDTNDNVPKFDSLYYVARIPENAPGGSSVVAVTAVDPDTGPWGEVKYSTYGTGADLFLIHPSTGLIYTQPWASLDAEATARYNFYVKAEDMEGKYSVAEVFITLLDVNDHPPQFGKSVQKKTMVLGTPVKIEAIDEDAEEPNNLVDYSITHAEPANVFDINSHTGEIWLKNSIRSLDALHNITPGRDCLWSLEVQAKDRGSPSFSTTALLKIDITDAETLSRSPMAAFLIQTKDNPMKAVGVLAGTMATVVAITVLISTATFWRNKKSNKVLPMRRVLRKRPSPAPRTIRIEWLKSKSTKAATKFMLKEKPPNENCNNNSPESSLLPRAPALPPPPSVAPSTGAAQWTVPTVSGSLTPQPTQPPPKPKTMGSPVQSTLISELKQKFEKKSVHNKAYF

SEQ ID NO: 2536 - protein, 135 aa, Homo Sapiens
  misc_feature (1)..(1): Xaa can be any naturally occurring amino acid
XENSAAIDFEKSKVLTFKLLAVEVNTPEKFSSTADVVIQLLDTNDNVPKFDSLYYVARIPENAPGGSSVVAVTAVDPDTGPWGEVKYSTYGTGADLFLIHPSTGLIYTQPWASLDAEATARYNFYVKAEDMEGKP

SEQ ID NO: 2537 - protein, 78 aa, Homo Sapiens
  misc_feature (1)..(1): Xaa can be any naturally occurring amino acid
XITHAEPANVFDINSHTGEIWLKNSIRSLDALHNITPGRDCLWSLEVQAKDRGSPSFSTTALLKIDITDAEVRRLRSN

SEQ ID NO: 2538 - protein, 598 aa, Homo Sapiens
  misc_feature (1)..(1): Xaa can be any naturally occurring amino acid
XITVVAKDGGGRLHGADVVFSATTTVTVNVEDVQDMAPVFVGTPYYGYVYEDTLPGSEVLKVVAMDGDRGKPNRILYSLVNGNDGAFEINETSGAISITQSPAQLQREVYELHVQVTEMSPAGSPAAQATVPVTIRIVDLNNHPPTFYGESGPQNRFELSMNEHPPQGEILRGLKITVNDSDQGANAKFNLQLVGPRGIFRVVPQTVLNEAQVTIIVENSAAIDFEKSKVLTFKAVDPDTGPWGEVKYSTYGTGADLFLIHPSTGLIYTQPWASLDAEATARYNFYVKAEDMEGKYSVAEVFITLLDVNDHPPQFGKSVQKKTMVLGTPVKIEAIDEDAEEPNNLVDYSITHAEPANVFDINSHTGEIWLKNSIRSLDALHNITPGRDCLWSLEVQAKDRGSPSFSTTALLKIDITDAETLSRSPMAAFLIQTKDNPMKAVGVLAGTMATVVAITVLISTATFWRNKKSNKVLPMRRVLRKRPSPAPRTIRIEWLKSKSTKAATKFMLKEKPPNENCNNNSPESSLLPRAPALPPPPSVAPSTGAAQWTVPTVSGSLTPQPTQPPPKPKTMGSPVQSTLISELKQKFEKKSVHNKAYF

SEQ ID NO: 2539 - protein, 48 aa, Homo Sapiens
  misc_feature (1)..(1): Xaa can be any naturally occurring amino acid
XMDGDRGKPNRILYSLVNDFPRQCRTILWHDSPAPPCGPVQNFRVHLP

SEQ ID NO: 2540 - protein, 788 aa, Homo Sapiens
MVLLRLLVFLFAPVVSDLCSLPCFINVSESQGPGTVLQFLSFNCSSYTPTPTLELLNVQPPTTFFNPPSLARWQGTYVGKLTLSSSAQLDALMVNHYKVQLKFTCGNHVMEGSLSVDVQRDLSHIQCAGQFASPAGEMIQVPETVTPGARLYTLLLPGLELHGAQMSIISAQDLPHFPGPFSINEQGWLQAPSQGLLGQAQKVFQLQISVSFGQRQSCQGMVIVKVLPVPSSQVSFLEQAQNITIPENLAPGSEVVQVQARGVDLRYEILSPVPSPLFSIGRADGVVRTTTPLELARTSGTAVSRLQVKAFEQGQLWASAKLNLTMNVQLVNLWPPRCLPALLVSQIPETAPVGTVLNTLTCEDPDSVGATLDYKLWFRSSSNPASLCLYDRVLEVNATLDCDTPGACFQHAASILVLDGGQPQMTTEVPVLVMVTPINEFSPACAPRTFRVQEDAAPHTLLGSVVGTDMDYPHDNIEYYTSGGPTTFAVDRLSGEVHLLGPLDYEQQRLYRLTVLVIDHGQDQNPNHHLSGSCTITIEVEDVNDHAPECEPPFQELTIYAPLGRSVEVTKMSCQIPQEPQRLIYSYSIVGGNSQNRFILQGAILVHSDLVLGPFWPEQPRTYELLICVADAGPSTPHLSTTATIIVHLVPRRASTVATSTHRTTVPSTMTPMLVTDTEAFWQPQPWFVVVLTATGALLLLALGWLLGRLLQGLAQLLQAPSKPAQALLLNSIQGTEGSIEGFLEAPKMEMSQAPSSVMSLHFDGRAQDSRTGRDYLFNTHTGARRWL

SEQ ID NO: 2541 - protein, 184 aa, Homo Sapiens
MVLLRLLVFLFAPVVSDLCSLPCFINVSESQGPGTVLQFLSFNCSSYTPTPTLELLNVQPPTTFFNPPSLARWQGTYVGKLTLSSSAQLDALMVNHYKVQLKFTCGNHVMEGSLSVDVQRDLSHIQCAGQFASPAGEMIQVPETVTPGARLYTLLLPGLELHGAQVSPEHGTVGDRMGVGGWRE

SEQ ID NO: 2542 - protein, 199 aa, Homo Sapiens
MVLLRLLVFLFAPVVSDLCSLPCFINVSESQGPGTVLQFLSFNCSSYTPTPTLELLNVQPPTTFFNPPSLARWQGTYVGKLTLSSSAQLDALMVNHYKVQLKFTCGNHVMEGSLSVDVQRDLSHIQCAGQFASPGEARGSRQGGGRHGLSRSSLTSTLASWGNDSGARDSHTWGSAVHSAPPRPRTPRSAGKPRTWDGG

SEQ ID NO: 2543 - protein, 134 aa, Homo Sapiens
QELTIYAPLGRSVEVTKMSCQIPQEPQRLIYSYSIVGGNSQNRFILQGAILVHSDLVLGPFWPEQPRTYELLICVADAGPSTPHLSTTATIIVHLVPRRASTVATSTHRTTVGPAAASTQQTSPGFAAKQHPGN

SEQ ID NO: 2544 - protein, 151 aa, Homo Sapiens
  misc_feature (1)..(1): Xaa can be any naturally occurring amino acid
XSTTATIIVHLVPRRASTVATSTHRTTVPSTMTPMLVTDTEAFWQPQPWFVVVLTATGALLLLALGWLLGRLLQGLAQLLQAPSKPAQALLLNSIQGTEGSIEGFLEAPKMEMSQAPSSVMSLQHFDGRAQDSRTGRDYLFNTHTGARRWL

SEQ ID NO: 2545 - protein, 190 aa, Homo Sapiens
MGSWALLWPPLLFTGLLVRPPGTMAQAQYCSVNKDIFEVEENTNVTEPLVDIHVPEGQEVTLGALSTPFAFRIQGNQLFLNVTPDYEEKSLLEAQLLCQSGGTLDTKVNSTVIPETQLQAEDRDKDDILFYTLQEMTAGASDYFSLVSVNRPALRLDRPLDFYERPNMTFWLLVRPSVAGHSGGECGTQP

SEQ ID NO: 2546 - protein, 166 aa, Homo Sapiens [sequence omitted]

SEQ ID NO: 2547 - protein, 651 aa, Homo Sapiens
MGSWALLWPPLLFTGLLVRPPGTMAQAQYCSVNKDIFEVEENTNVTEPLVDIHVPEGQEVTLGALSTPFAFRIQGNQLFLNVTPDYEEKSLLEAQLLCQSGGTLVTQLRVFVSVLDVNDNAPEFPFKTKEIRVEEDTKVNSTVIPETQLQAEDRDKDDILFYTLQEMTAGASDYFSLVSVNRPALRLDRPLDFYERPNMTFWLLVRDTPGENVEPSHTATATLVLNVVPADLRPPWFLPCTFSDGYVCIQAQYHGAVPTGHILPSPLVLRPGPIYAEDGDRGINQPIIYSIFRGNVNGTFIIHPDSGNLTVARSVPSPMTFLLLVKGQQADLARYSVTQVTVEAVAAAGSPPRFPQRLYRGTVARGAGAGVVVKDAAAPSQPLRIQAQDPEFSDLNSAITYRITNHSHFRMEGEVVLTTTTLAQAGAFYAEVEAHNTVTSGTATTVIEIQVSEQEPPSTGGGPSEDKRFSVVDMAALGGVLGALLLLALLGLAVLVHKHYGPRLKCCCGKAPEPQPQGFDNQAFLPDHKANWAPVPSPTHDPKPAEAPMPAEPAPPGPASPGGAPEPPAAARAGGSPTAVRSILTKERRPEGGYKAVWFGEDIGTEADVVVLNAPTLDVDGASDSGSGDEGEGAGRGGGPYDAPGGDDSYI

SEQ ID NO: 2548 - protein, 845 aa, Homo Sapiens
MGSWALLWPPLLFTGLLVRPPGTMAQAQYCSVNKDIFEVEENTNVTEPLVDIHVPEGQEVTLGALSTPFAFRIQGNQLFLNVTPDYEEKSLLEAQLLCQSGGTLVTQLRVFVSVLDVNDNAPEFPFKTKEIRVEEDTKVNSTVIPETQLQAEDRDKDDILFYTLQEMTAGASDYFSLVSVNRPALRLDRPLDFYERPNMTFWLLVRDTPGENVEPSHTATATLVLNVVPADLRPPWFLPCTFSDGYVCIQAQYHGAVPTGHILPSPLVLRPGPIYAEDGDRGINQPIIYSIFRGNVNGTFIIHPDSGNLTVARSVPSPMTFLLLVKGQQADLARYSVTQVTVEAVAAAGSPPRFPQRLYRGTVARGAGAGVVVKDAAAPSQPLRIQAQDPEFSDLNSAITYRITNHSHFRMEGEVVLTTTTLAQAGAFYAEVEAHNTVTSGTATTVIEIQVSEQEPPSTDVPPSPEAGGTTGPWTSTTSEVPRPPEPSQGPSTTSSGGGTGPHPPSGTTLRPPTSSTPGGPPGAENSTSHQPATPGGDTAQTPKPGTSQPMPPGVGTSTSHQPATPSGGTAQTPEPGTSQPMPPSMGTSTSHQPATPGGGTAQTPEAGTSQPMPPGMGTSTSHQPTTPGGGTAQTPEPGTSQPMPLSKSTPSSGGGPSEDKRFSVVDMAALGGVLGALLLLALLGLAVLVHKHYGPRLKCCCGKAPEPQPQGFDNQAFLPDHKANWAPVPSPTHDPKPAEAPMPAEPAPPGPASPGGAPEPPAAARAGGSPTAVRSILTKERRPEGGYKAVWFGEDIGTEADVVVLNAPTLDVDGASDSGSGDEGEGAGRGGGPYDAPGGDDSYI

SEQ ID NO: 2549 - protein, 845 aa, Homo Sapiens; identical to SEQ ID NO: 2548

SEQ ID NO: 2550 - protein, 106 aa, Homo Sapiens
MGSWALLWPPLLFTGLLVRPPGTMAQAQYCSVNKDIFEVEENTNVTEPLVDIHVPEGQEVTLGALSTPFAFRIQGNQLFLNVTPDYEKAGPFRDEAAWAHTLSTDH

SEQ ID NO: 2551 - protein, 15 aa, Homo Sapiens
MTAGASDYFSLVSVN

SEQ ID NO: 2552 - protein, 116 aa, Homo Sapiens
MEPAAGSSMEPSADWLATAAARGRVEEVRALLEAGALPNAPNSYGRRPIQVGRGSAAGAGDGGRLWRTKFAGELESGSASILRKKGRLPGEFSEGVCNHRPPPGDALGAWEAKEEE

SEQ ID NO: 2553 - protein, 138 aa, Homo Sapiens
MEPAAGSSMEPSADWLATAAARGRVEEVRALLEAGALPNAPNSYGRRPIQVMMMGSARVAELLLLHGAEPNCADPATLTRPVHDAAREGFLDTLVVLHRAGARLDVRDAWGRLPVDLAEELGHRDVARHPRLKEPERL

SEQ ID NO: 2554 - protein, 156 aa, Homo Sapiens
MEPAAGSSMEPSADWLATAAARGRVEEVRALLEAGALPNAPNSYGRRPIQVMMMGSARVAELLLLHGAEPNCADPATLTRPVHDAAREGFLDTLVVLHRAGARLDVRDAWGRLPVDLAEELGHRDVARYLRAAAGGTRGSNHARIDAAEGPSDIPD

SEQ ID NO: 2555 - protein, 167 aa, Homo Sapiens
MEPAAGSSMEPSADWLATAAARGRVEEVRALLEAGALPNAPNSYGRRPIQVMMMGSARVAELLLLHGAEPNCADPATLTRPVHDAAREGFLDTLVVLHRAGARLDVRDAWGRLPVDLAEELGHRDVARYLRAAAGGTRGSNHARIDAAEGPSEMIGNHLWVCRSRHA

SEQ ID NO: 2556 - protein, 105 aa, Homo Sapiens
MMMGSARVAELLLLHGAEPNCADPATLTRPVHDAAREGFLDTLVVLHRAGARLDVRDAWGRLPVDLAEELGHRDVARYLRAAAGGTRGSNHARIDAAEGPSDIPD

SEQ ID NO: 2557 - protein, 105 aa, Homo Sapiens; identical to SEQ ID NO: 2556

SEQ ID NO: 2558 - protein, 105 aa, Homo Sapiens; identical to SEQ ID NO: 2556

SEQ ID NO: 2559 - protein, 104 aa, Homo Sapiens
MMMGSARVAELLLLHGAEPNCADPATLTRPVHDAAREGFLDTLVVLHRAGARLDVRDAWGRLPVDLAEELGHRDVARYLRAAAGGTRGSNHARIDAAEGPSGED

SEQ ID NO: 2560 - protein, 121 aa, Homo Sapiens
MMMGSARVAELLLLHGAEPNCADPATLTRPVHDAAREGFLDTLVVLHRAGARLDVRDAWGRLPVDLAEELGHRDVARYLRAAAGGTRGSNHARIDAAEGPSVTASIQVPGGEEGDFGSSYS

SEQ ID NO: 2561 - protein, 132 aa, Homo Sapiens
MVRRFLVTLRIRRACGPPRVRVFVVHIPRLTGEWAAPGAPAAVALVLMLLRSQRLGQQPLPRRPGHDDGQRPSGGAAAAPRRGAQLRRPRHSHPTRARRCPGGLPGHAGGAAPGRGAAGRARCLGPSARGPG

SEQ ID NO: 2562 - protein, 132 aa, Homo Sapiens; identical to SEQ ID NO: 2561

SEQ ID NO: 2563 - protein, 85 aa, Homo Sapiens
MSVHMPAMKICEKLKKLDSQICELKYEKTLDLASVDLRKMRVAELKQILHSWGEECRACAEKTDYVNLIQELAPKYAATHPKTEL

SEQ ID NO: 2564 - protein, 187 aa, Homo Sapiens
MWCASPVAVVAFCAGLLVSHPVLTQGQEAGGRPGADCEVCKEFLNRFYKSLIDRGVNFSLDTIEKELISFCLDTKGKENRLCYYLGATKDAATKILSEVTRPMSVHMPAMKICEKLKKLDSQICELKYEKTLDLASVDLRKMRVAELKQILHSWGEECRACAEKTDYVNLIQELAPKYAATHPKTEL

SEQ ID NO: 2565 - protein, 111 aa, Homo Sapiens
MHPDLGPLCTLLYVTLTILCSSVSSDLAPYFTSEPLSAVQKLGGPVVLHCSAQPVTTRISWLHNGKTLDGNLEHVKIHQGTLTILSLNSSLLGYYQCLANNSIGAIVSGPA

SEQ ID NO: 2566 - protein, 143 aa, Homo Sapiens
MHPDLGPLCTLLYVTLTILCSSVSSDLAPYFTSEPLSAVQKLGGPVVLHCSAQPVTTRISWLHNGKTLDGNLEHVKIHQGTLTILSLNSSLLGYYQCLANNSIGAIVSGPATVSVAVLGDFGSSTKHVITAEEKSAGFIGCRV

SEQ ID NO: 2567 - protein, 165 aa, Homo Sapiens
MHPDLGPLCTLLYVTLTILCSSVSSDLAPYFTSEPLSAVQKLGGPVVLHCSAQPVTTRISWLHNGKTLDGNLEHVKIHQGTLTILSLNSSLLGYYQCLANNSIGAIVSGPATVSVAVLGDFGSSTKHVITAEEKSAGFIGCRVPESNPKAEVRYKIRGKWLEHST

SEQ ID NO: 2568 - protein, 1264 aa, Homo Sapiens
MHPDLGPLCTLLYVTLTILCSSVSSDLAPYFTSEPLSAVQKLGGPVVLHCSAQPVTTRISWLHNGKTLDGNLEHVKIHQGTLTILSLNSSLLGYYQCLANNSIGAIVSGPATVSVAVLGDFGSSTKHVITAEEKSAGFIGCRVPESNPKAEVRYKIRGKWLEHSTENYLILPSGNLQILNVSLEDKGSYKCAAYNPVTHQLKVEPIGRKLLVSRPSSDDVHILHPTHSQALAVLSRSPVTLECVVSGVPAPQVYWLKDGQDIAPGSNWRRLYSHLATDSVDPADSGNYSCMAGNKSGDVKYVTYMVNVLEHASISKGLQDQIVSLGATVHFTCDVHGNPAPNCTWFHNAQPIHPSARHLTAGNGLKISGVTVEDVGMYQCVADNGIGFMHSTGRLEIENDGGFKPVIITAPVSAKVADGDFVTLSCNASGLPVPVIRWYDSHGLITSHPSQVLRSKSRKSQLSRPEGLNLEPVYFVLSQAGASSLHIQAVTQEHAGKYICEAANEHGTTQAEASLMVVPFETNTKAETVTLPDAAQNDDRSKRDGSETGLLSSFPVKVHPSAVESAPEKNASGISVPDAPIILSPPQTHTPDTYNLVWRAGKDGGLPINAYFVKYRKLDDGVGMLGSWHTVRVPGSENELHLAELEPSSLYEVLMVARSAAGEGQPAMLTFRTSKEKTASSKNTQASSPPVGIPKYPVVSEAANNNFGVVLTDSSRHSGVPEAPDRPTISTASETSVYVTWIPRANGGSPITAFKVEYKRMRTSNWLVAAEDIPPSKLSVEVRSLEPGSTYKFRVIAINHYGESFRSSASRPYQVVGFPNRFSSRPITGPHIAYTEAVSDTQIMLKWTYIPSSNNNTPIQGFYIYYRPTDSDNDSDYKRDVVEGSKQWHMIGHLQPETSYDIKMQCFNEGGESEFSNVMICETKVKRVPGASEYPVKDLSTPPNSLGSGGNVGPATSPARSSDMLYLIVGCVLGVMVLILMVFIAMCLWKNRQQNTIQKYDPPGYLYQGSDMNGQMVDYTTLSGASQINGNVHGGFLTNGGLSSGYSHLHHKVPNAVNGIVNGSLNGGLYSGHSNSLTRTHVDFEHPHHLVNGGGMYTAVPQIDPLECVNCRNCRNNNRCFTKTNSTFSSSPPPVVPVVAPYPQDGLEMKPLSHVKVPVCLTSAVPDCGQLPEESVKDNVEPVPTQRTCCQDIVNDVSSDGSEDPAEFSRGDSCAHSETEINIVSWNALILPPVPEGCAEKTMWSPPGIPLDSPTEVLQQPRET

SEQ ID NO: 2569 - protein, 1287 aa, Homo Sapiens
MHPDLGPLCTLLYVTLTILCSSVSSDLAPYFTSEPLSAVQKLGGPVVLHCSAQPVTTRISWLHNGKTLDGNLEHVKIHQGTLTILSLNSSLLGYYQCLANNSIGAIVSGPATVSVAVLGDFGSSTKHVITAEEKSAGFIGCRVPESNPKAEVRYKIRGKWLEHSTENYLILPSGNLQILNVSLEDKGSYKCAAYNPVTHQLKVEPIGRKLLVSRPSSDDVHILHPTHSQALAVLSRSPVTLECVVSGVPAPQVYWLKDGQDIAPGSNWRRLYSHLATDSVDPADSGNYSCMAGNKSGDVKYVTYMVNVLEHASISKGLQDQIVSLGATVHFTCDVHGNPAPNCTWFHNAQPIHPSARHLTAGNGLKISGVTVEDVGMYQCVADNGIGFMHSTGRLEIENDGGFKPVIITAPVSAKVADGDFVTLSCNASGLPVPVIRWYDSHGLITSHPSQVLRSKSRKSQLSRPEGLNLEPVYFVLSQAGASSLHIQAVTQEHAGKYICEAANEHGTTQAEASLMVVPFETNTKAETVTLPDAAQNDDRSKRDGSETGLLSSFPVKVHPSAVESAPEKNASGISVPDAPIILSPPQTHTPDTYNLVWRAGKDGGLPINAYFVKYRKLDDGVGMLGSWHTVRVPGSENELHLAELEPSSLYEVLMVARSAAGEGQPAMLTFRTSKEKTASSKNTQASSPPVGIPKYPVVSEAANNNFGVVLTDSSRHSGVPEAPDRPTISTASETSVYVTWIPRANGGSPITAFKVEYKRMRTSNWLVAAEDIPPSKLSVEVRSLEPGSTYKFRVIAINHYGESFRSSASRPYQVVGFPNRFSSRPITGPHIAYTEAVSDTQIMLKWTYIPSSNNNTPIQGFYIYYRPTDSDNDSDYKRDVVEGSKQWHMIGHLQPETSYDIKMQCFNEGGESEFSNVMICETKVKRVPGASEYPVKDLSTPPNSLGSGGNVGPATSPARSSDMLYLIVGCVLGVMVLILMVFIAMCLWKNRQQNTIQKYDPPGYLYQGSDMNGQMVDYTTLSGASQINGNVHGGFLTNGGLSSGYSHLHHKVPNAVNGIVNGSLNGGLYSGHSNSLTRTHVDFEHPHHLVNGGGMYTAVPQIDPLECVNCRNCRNNNRCFTKTNSTFSSSPPPVVPVVAPYPQDGLEMKPLSHVKVPVCLTSAVPDCGQLPEESVKDNVEPVPTQRTCCQDIVNDVSSDGSEDPAEFSRGQEGMINLRIPDHLQLAKSCVWEGDSCAHSETEINIVSWNALILPPVPEGCAEKTMWSPPGIPLDSPTEVLQQPRET

SEQ ID NO: 2570 - protein, 641 aa, Homo Sapiens
MLGSWHTVRVPGSENELHLAELEPSSLYEVLMVARSAAGEGQPAMLTFRTSKEKTASSKNTQASSPPVGIPKYPVVSEAANNNFGVVLTDSSRHSGVPEAPDRPTISTASETSVYVTWIPRANGGSPITAFKVEYKRMRTSNWLVAAEDIPPSKLSVEVRSLEPGSTYKFRVIAINHYGESFRSSASRPYQVVGFPNRFSSRPITGPHIAYTEAVSDTQIMLKWTYIPSSNNNTPIQGFYIYYRPTDSDNDSDYKRDVVEGSKQWHMIGHLQPETSYDIKMQCFNEGGESEFSNVMICETKVKRVPGASEYPVKDLSTPPNSLGSGGNVGPATSPARSSDMLYLIVGCVLGVMVLILMVFIAMCLWKNRQQNTIQKYDPPGYLYQGSDMNGQMVDYTTLSGASQINGNVHGGFLTNGGLSSGYSHLHHKVPNAVNGIVNGSLNGGLYSGHSNSLTRTHVDFEHPHHLVNGGGMYTAVPQIDPLECVNCRNCRNNNRCFTKTNSTFSSSPPPVVPVVAPYPQDGLEMKPLSHVKVPVCLTSAVPDCGQLPEESVKDNVEPVPTQRTCCQDIVNDVSSDGSEDPAEFSRGDSCAHSETEINIVSWNALILPPVPEGCAEKTMWSPPGIPLDSPTEVLQQPRET

SEQ ID NO: 2571 - protein, 650 aa, Homo Sapiens
  misc_feature (1)..(1): Xaa can be any naturally occurring amino acid
XDLAPYFTSEPLSAVQKLGGPVVLHCSAQPVTTRISWLHNGKTLDGNLEHVKIHQGTLTILSLNSSLLGYYQCLANNSIGAIVSGPATVSVAVLGDFGSSTKHVITAEEKSAGFIGCRVPESNPKAEVRYKIRGKWLEHSTENYLILPSGNLQILNVSLEDKGSYKCAAYNPVTHQLKVEPIGRKLLVSRPSSDDVHILHPTHSQALAVLSRSPVTLECVVSGVPAPQVYWLKDGQDIAPGSNWRRLYSHLATDSVDPADSGNYSCMAGNKSGDVKYVTYMVNVLEHASISKGLQDQIVSLGATVHFTCDVHGNPAPNCTWFHNAQPIHPSARHLTAGNGLKISGVTVEDVGMYQCVADNGIGFMHSTGRLEIENDGGFKPVIITAPVSAKVADGDFVTLSCNASGLPVPVIRWYDSHGLITSHPSQVLRSKSRKSQLSRPEGLNLEPVYFVLSQAGASSLHIQAVTQEHAGKYICEAANEHGTTQAEASLMVVPFETNTKAETVTLPDAAQNDDRSKRDGSETGLLSSFPVKVHPSAVESAPEKNASGISVPDAPIILSPPQTHTPDTYNLVWRAGKDGGLPINAYFVKYRKLDDGVGMLGSWHTVRVPGSENELHLAELEPSSLYEVLMVARSAAGEGQPAMLTFRTS

SEQ ID NO: 2572 - protein, 243 aa, Homo Sapiens
  misc_feature (1)..(1): Xaa can be any naturally occurring amino acid
XNYLILPSGNLQILNVSLEDKGSYKCAAYNPVTHQLKVEPIGRKLLVSRPSSDDVHILHPTHSQALAVLSRSPVTLECVVSGVPAPQVYWLKDGQDIAPGSNWRRLYSHLATDSVDPADSGNYSCMAGNKSGDVKYVTYMVNVLEHASISKGLQDQIVSLGATVHFTCDVHGNPAPNCTWFHNAQPIHPSARHLTAGNGLKISGVTVEDVGMYQCVADNGIGFMHSTGRLEIENGQEIYVGNV

SEQ ID NO: 2573 - protein, 529 aa, Homo Sapiens
MGSSRAPWMGRVGGHGMMALLLAGLLLPGTLAKSIGTFSDPCKDPTRITSPNDPCLTGKGDSSGFSSYSGSSSSGSSISSARSSGGGSSGSSSGSSIAQGGSAGSFKPGTGYSQVSYSSGSGSSLQGASGSSQLGSSSSHSGNSGSHSGSSSSHSSSSSSFQFSSSSFQVGNGSALPTNDNSYRGILNPSQPGQSSSSSQTFGVSSSGQSVSSNQRPCSSDIPDSPCSGGPIVSHSGPYIPSSHSVSGGQRPVVVVVDQHGSGAPGVVQGPPCSNGGLPGKPCPPITSVDKSYGGYEVVGGSSDSYLVPGMTYSKGKIYPVGYFTKENPVKGSPGVPSFAAGPPISEGKYFSSNPIIPSQSAASSAIAFQPVGTGGVQLCGGGSTGSKGPCSPSSSRVPSSSSISSSSGLPYHPCGSASQSPCSPPGTGSFSSSSSSQSSGKIILQPCGSKSSSSGHPCMSVSSLTLTGGPDGSPHPDPSAGAKPCGSSSAGKIPCRSIRDILAQVKPLGPQLADPEVFLPQGELLNSP

SEQ ID NO: 2574 - protein, 425 aa, Homo Sapiens
MALTGYSWLLLSATFLNVGAEISITLEPAQPSEGDNVTLVVHGLSGELLAYSWYAGPTLSVSYLVASYIVSTGDETPGPAHTGREAVRPDGSLDIQGILPRHSGTYILQTFNRQLQTEVGYGHVQVHEILAQPTVLANSTALVERRDTLRLMCSSPSPTAEVRWFFNGGALPVALRLGLSPDGRVLARHGIRREEAGAYQCEVWNPVSVSRSEPINLTVYFGPERVAILQDSTTRTGCTIKVDFNTSLTLWCVSRSCPEPEYVWTFNGQALKNGQDHLNISSMTAAQEGTYTCIAKNTKTLLSGSASVVVKLSAAAVATMIVPVPTKPTEGQDVTLTVQGYPKDLLVYAWYRGPASEPNRLLSQLPSGTWIAGPAHTGREVGFPNCSLLVQKLNLTDTGRYTLKTVTVQGKTETLEVELQVAPLG

SEQ ID NO: 2575 - protein, 425 aa, Homo Sapiens; identical to SEQ ID NO: 2574

SEQ ID NO: 2576 - protein, 384 aa, Homo Sapiens
MDLSRPRWSLWRRVFLMASLLACGICQASGQIFITQTLGIKGYRTVVALDKVPEDVQEYSWYWGANDSAGNMIISHKPPSAQQPGPMYTGRERVNREGSLLIRPTALNDTGNYTVRVVAGNETQRATGWLEVLELGSNLGISVNASSLVENMDSVAADCLTNVTNITWYVNDVPTSSSDRMTISPDGKTLVILRVSRYDRTIQCMIESFPEIFQRSERISLTVAYGPDYVLLRSNPDDFNGIVTAEIGSQVEMECICYSFLDLKYHWIHNGSLLNFSDAKMNLSSLAWEQMGRYRCTVENPVTQLIMYMDVRIQAPHEDLTCCPQRFLHLRIHGDVPHHADSAGWRLHLWSPDPCSDQPLLNQDKSGSMSVHPRPEDKTRRASR

SEQ ID NO: 2577 - protein, 55 aa, Homo Sapiens
MEIPMGTQGCFSKSLLLSASILVLWMLQGSQAALYIQKIPEQPQKNQDLLLSVQG

SEQ ID NO: 2578 - protein, 56 aa, Homo Sapiens
MEIPMGTQGCFSKSLLLSASILVLWMLQGSQAALYIQKIPEQPQKNQDLLLSVQGV

SEQ ID NO: 2579 - protein, 56 aa, Homo Sapiens; identical to SEQ ID NO: 2578

SEQ ID NO: 2580 - protein, 56 aa, Homo Sapiens; identical to SEQ ID NO: 2578

SEQ ID NO: 2581 - protein, 56 aa, Homo Sapiens; identical to SEQ ID NO: 2578

SEQ ID NO: 2582 - protein, 299 aa, Homo Sapiens
MEIPMGTQGCFSKSLLLSASILVLWMLQGSQAALYIQKIPEQPQKNQDLLLSVQGVPDTFQDFNWYLGEETYGGTRLFTYIPGIQRPQRDGSAMGQRDIVGFPNGSMLLRRAQPTDSGTYQVAITINSEWTMKAKTEVQVAEKNKELPSTHLPTNAGILAATIIGSLAAGALLISCIAYLLVTRNWRGQSHRLPAPRGQGSLSILCSAVSPVPSVTPSTWMATTEKPELGPAHDAGDNNIYEVMPSPVLLVSPISDTRSINPARPLPTPPHLQAEPENHQYQDLLNPDPAPYCQLVPTS

SEQ ID NO: 2583 - protein, 300 aa, Homo Sapiens
MEIPMGTQGCFSKSLLLSASILVLWMLQGSQAALYIQKIPEQPQKNQDLLLSVQGVPDTFQDFNWYLGEETYGGTRLFTYIPGIQRPQRDGSAMGQRDIVGFPNGSMLLRRAQPTDSGTYQVAITINSEWTMKAKTEVQVAEKNKELPSTHLPTNAGILAATIIGSLAAGALLISCIAYLLVTRNWRGQSHRLPAPRGQGSLSILCSAVSPVPSVTPSTWMATTEKPELGPAHDAGDNNIYEVMPSPVLLVSPISDTRSINPARPLPTPPHLQAEPENHQYQQDLLNPDPAPYCQLVPTS

SEQ ID NO: 2584 - protein, 346 aa, Homo Sapiens
MESPSAPPHRWCIPWQRLLLTASLLTFWNPPTTAKLTIESTPFNVAEGKEVLLLVHNLPQHLFGYSWYKGERVDGNRQIIGYVIGTQQATPGPAYSGREIIYPNASLLIQNIIQNDTGFYTLHVIKSDLVNEEATGQFRVYPELPKPSISSNNSKPVEDKDAVAFTCEPETQDATYLWWVNNQSLPVSPRLQLSNGNRTLTLFNVTRNDARAYVCGIQNSVSANRSDPVTLDVLYGPDTPIISPPDSSYLSGANLNLSCHSASNPSPQYSWRINGIPQQHTQVLFIAKITPNNNGTYACFVSNLATGRNNSIVKSITVSASGTSPGLSAGATVGIMIGVLVGVALI

SEQ ID NO: 2585 - protein, 702 aa, Homo Sapiens
MESPSAPPHRWCIPWQRLLLTASLLTFWNPPTTAKLTIESTPFNVAEGKEVLLLVHNLPQHLFGYSWYKGERVDGNRQIIGYVIGTQQATPGPAYSGREIIYPNASLLIQNIIQNDTGFYTLHVIKSDLVNEEATGQFRVYPELPKPSISSNNSKPVEDKDAVAFTCEPETQDATYLWWVNNQSLPVSPRLQLSNGNRTLTLFNVTRNDTASYKCETQNPVSARRSDSVILNVLYGPDAPTISPLNTSYRSGENLNLSCHAASNPPAQYSWFVNGTFQQSTQELFIPNITVNNSGSYTCQAHNSDTGLNRTTVTTITVYAEPPKPFITSNNSNPVEDEDAVALTCEPEIQNTTYLWWVNNQSLPVSPRLQLSNDNRTLTLLSVTRNDVGPYECGIQNELSVDHSDPVILNVLYGPDDPTISPSYTYYRPGVNLSLSCHAASNPPAQYSWLIDGNIQQHTQELFISNITEKNSGLYTCQANNSASGHSRTTVKTITVSAELPKPSISSNNSKPVEDKDAVAFTCEPEAQNTTYLWWVNGQSLPVSPRLQLSNGNRTLTLFNVTRNDARAYVCGIQNSVSANRSDPVTLDVLYGPDTPIISPPDSSYLSGANLNLSCHSASNPSPQYSWRINGIPQQHTQVLFIAKITPNNNGTYACFVSNLATGRNNSIVKSITVSASGTSPGLSAGATVGIMIGVLVGVALI

SEQ ID NO: 2586 - protein, 701 aa, Homo Sapiens
MESPSAPPHRWCIPWQRLLLTASLLTFWNPPTTAKLTIESTPFNVAEGKEVLLLVHNLPQHLFGYSWYKGERVDGNRQIIGYVIGTQQATPGPAYSGREIIYPNASLLIQNIIQNDTGFYTLHVIKSDLVNEEATGQFRVYPELPKPSISSNNSKPVEDKDAVAFTCEPETQDATYLWWVNNQSLPVSPRLQLSNGNRTLTLFNVTRNDTASYKCETQNPVSARRSDSVILNVLYGPDAPTISPLNTSYRSGENLNLSCHAASNPPAQYSWFVNGTFQQSTQELFIPNITVNNSGSYTCQAHNSDTGLNRTTVTTITVYEPPKPFITSNNSNPVEDEDAVALTCEPEIQNTTYLWWVNNQSLPVSPRLQLSNDNRTLTLLSVTRNDVGPYECGIQNELSVDHSDPVILNVLYGPDDPTISPSYTYYRPGVNLSLSCHAASNPPAQYSWLIDGNIQQHTQELFISNITEKNSGLYTCQANNSASGHSRTTVKTITVSAELPKPSISSNNSKPVEDKDAVAFTCEPEAQNTTYLWWVNGQSLPVSPRLQLSNGNRTLTLFNVTRNDARAYVCGIQNSVSANRSDPVTLDVLYGPDTPIISPPDSSYLSGANLNLSCHSASNPSPQYSWRINGIPQQHTQVLFIAKITPNNNGTYACFVSNLATGRNNSIVKSITVSASGTSPGLSAGATVGIMIGVLVGVALI

SEQ ID NO: 2587 - protein, 702 aa, Homo Sapiens; identical to SEQ ID NO: 2585

SEQ ID NO: 2588 - protein, 702 aa, Homo Sapiens; identical to SEQ ID NO: 2585

SEQ ID NO: 2589 - protein, 524 aa, Homo Sapiens
MESPSAPPHRWCIPWQRLLLTASLLTFWNPPTTAKLTIESTPFNVAEGKEVLLLVHNLPQHLFGYSWYKGERVDGNRQIIGYVIGTQQATPGPAYSGREIIYPNASLLIQNIIQNDTGFYTLHVIKSDLVNEEATGQFRVYPEPPKPFITSNNSNPVEDEDAVALTCEPEIQNTTYLWWVNNQSLPVSPRLQLSNDNRTLTLLSVTRNDVGPYECGIQNELSVDHSDPVILNVLYGPDDPTISPSYTYYRPGVNLSLSCHAASNPPAQYSWLIDGNIQQHTQELFISNITEKNSGLYTCQANNSASGHSRTTVKTITVSAELPKPSISSNNSKPVEDKDAVAFTCEPEAQNTTYLWWVNGQSLPVSPRLQLSNGNRTLTLFNVTRNDARAYVCGIQNSVSANRSDPVTLDVLYGPDTPIISPPDSSYLSGANLNLSCHSASNPSPQYSWRINGIPQQHTQVLFIAKITPNNNGTYACFVSNLATGRNNSIVKSITVSASGTSPGLSAGATVGIMIGVLVGVALI

SEQ ID NO: 2590 - protein, 194 aa, Homo Sapiens
  misc_feature (1)..(1): Xaa can be any naturally occurring amino acid
XIYPNASLLIQNIIQNDTGFYTLHVIKSDLVNEEATGQFRVYPELPKPSISSNNSKPVEDKDAVAFTCEPETQDATYLWWVNNQSLPVSPRLQLSNGNRTLTLFNVTRNDTASYKCETQNPVSARRSDSVILNVLSEPPKPFITSNNSNPVEDEDAVALTCEPEIQNTTYLWWVNNQSLPVSPRLQLSNDNRTL

SEQ ID NO: 2591 - protein, 141 aa, Homo Sapiens
  misc_feature (1)..(1): Xaa can be any naturally occurring amino acid
XKLTIESTPFNVAEGKEVLLLVHNLPQHLFGYSWYKGERVDGNRQIIGYVIGTQQATPGPAYSGREIIYPNASLLIQNIIQNDTGFYTLHVIKSDLVNEEATGQFRVYPELPKPSISSNNSKPVEDKDAVAFTCEPEAQNT

SEQ ID NO: 2592 - protein, 265 aa, Homo Sapiens
MGSPSACPYRVCIPWQGLLLTASLLTFWNLPNSAQTNIDVVPFNVAEGKEVLLVVHNESQNLYGYNWYKGERVHANYRIIGYVKNISQENAPGPAHNGRETIYPNGTLLIQNVTHNDAGIYTLHVIKENLVNEEVTRQFYVFSEPPKPSITSNNFNPVENKDIVVLTCQPETQNTTYLWWVNNQSLLVSPRLLLSTDNRTLVLLSATKNDIGPYECEIQNPVGASRSDPVTLNVRYESVQASSPDLSAGTAVSIMIGVLAGMALI

SEQ ID NO: 2593 - protein, 265 aa, Homo Sapiens; identical to SEQ ID NO: 2592

SEQ ID NO: 2594 - protein, 172 aa, Homo Sapiens
MGSPSACPYRVCIPWQGLLLTASLLTFWNLPNSAQTNIDVVPFNVAEGKEVLLVVHNESQNLYGYNWYKGERVHANYRIIGYVKNISQENAPGPAHNGRETIYPNGTLLIQNVTHNDAGIYTLHVIKENLVNEEVTRQFYVFYESVQASSPDLSAGTAVSIMIGVLAGMALI

SEQ ID NO: 2595 - protein, 349 aa, Homo Sapiens
MGPISAPSCRWRIPWQGLLLTASLFTFWNPPTTAQLTIEAVPSNAAEGKEVLLLVHNLPQDPRGYNWYKGETVDANRRIIGYVISNQQITPGPAYSNRETIYPNASLLMRNVTRNDTGSYTLQVIKLNLMSEEVTGQFSVHPETPKPSISSNNSNPVEDKDAVAFTCEPETQNTTYLWWVNGQSLPVSPRLQLSNGNRTLTLLSVTRNDVGPYECEIQNPASANFSDPVTLNVLYGPDAPTISPSDTYYHAGVNLNLSCHAASNPPSQYSWSVNGTFQQYTQKLFIPNITTKNSGSYACHTTNSATGRNRTTVRMITVSDALVQGSSPGLSARATVSIMIGVLARVALI

SEQ ID NO: 2596 - protein, 51 aa, Homo Sapiens
MGPISAPSCRWRIPWQGLLLTDALVQGSSPGLSARATVSIMIGVLARVALI

SEQ ID NO: 2597 - protein, 756 aa, Homo Sapiens
MLTMGRLQLVVLGLTCCWAVASAAKLGAVYTEGGFVEGVNKKLGLLGDSVDIFKGIPFAAPTKALENPQPHPGWQGTLKAKNFKKRCLQATITQDSTYGDEDCLYLNIWVPQGRKQVSRDLPVMIWIYGGAFLMGSGHGANFLNNYLYDGEEIATRGNVIVVTFNYRVGPLGFLSTGDANLPGNYGLRDQHMAIAWVKRNIAAFGGDPNNITLFGESAGGASVSLQTLSPYNKGLIRRAISQSGVALSPWVIQKNPLFWAKKVAEKVGCPVGDAARMAQCLKVTDPRALTLAYKVPLAGLEYPMLHYVGFVPVIDGDFIPADPINLYANAADIDYIAGTNNMDGHIFASIDMPAINKGNKKVTEEDFYKLVSEFTITKGLRGAKTTFDVYTESWAQDPSQENKKKTVVDFETDVLFLVPTEIALAQHRANAKSAKTYAYLFSHPSRMPVYPKWVGADHADDIQYVFGKPFATPTGYRPQDRTVSKAMIAYWTNFAKTGDPNMGDSAVPTHWEPYTTENSGYLEITKKMGSSSMKRSLRTNFLRYWTLTYLALPTVTDQEATPVPPTGDSEATPVPPTGDSETAPVPPTGDSGAPPVPPTGDSGAPPVPPTGDSGAPPVPPTGDSGAPPVPPTGDSGAPPVPPTGDSGAPPVPPTGDSGAPPVPPTGDSGAPPVPPTGDAGPPPVPPTGDSGAPPVPPTGDSGAPPVTPTGDSETAPVPPTGDSGAPPVPPTGDSEAAPVPPTDDSKEAQMPAVIRF

SEQ ID NO: 2598 - protein, 269 aa, Homo Sapiens
MIRTLLLSTLVAGALSCGDPTYPPYVTRVVGGEEARPNSWPWQVSLQYSSNGKWYHTCGGSLIANSWVLTAAHCISSSRTYRVGLGRHNLYVAESGSLAVSVSKIVVHKDWNSNQISKGNDIALLKLANPVSLTDKIQLACLPPAGTILPNNYPCYVTGWGRLQTNGAVPDVLQQGRLLVVDYATCSSSAWWGSSVKTSMICAGGDGVISSCNGDSGGPLNCQASDGRWQVHGIVSFGSRLGCNYYHKPSVFTRVSNYIDWINSVIANN

SEQ ID NO: 2599 - protein, 126 aa, Homo Sapiens [sequence omitted]

SEQ ID NO: 2600 - protein, 269 aa, Homo Sapiens
MIRTLLLSTLVAGALSCGVSTYAPDMSRMLGGEEARPNSWPWQVSLQYSSNGQWYHTCGGSLIANSWVLTAAHCISSSGIYRVMLGQHNLYVAESGSLAVSVSKIVVHKDWNSDQVSKGNDIALLKLANPVSLTDKIQLACLPPAGTILPNNYPCYVTGWGRLQTNGALPDDLKQGQLLVVDYATCSSSGWWGSTVKTNMICAGGDGVICTCNGDSGGPLNCQASDGRWEVHGIGSLTSVLGCNYYYKPSIFTRVSNYNDWINSVIANN

SEQ ID NO: 2601 - protein, 121 aa, Homo Sapiens
MMLRLLSSLLLVAVASGYGPPSSHSSSRVVHGEDAVPYSWPWQVSLQYEKSGSFYHTCGGSLIAPDWVVTAGHCISRDLTYQVVLGEYNLAVKEGPEQVIPINSEELFVHPLWNRSCVACG

SEQ ID NO: 2602 - protein, 270 aa, Homo Sapiens
MMLRLLSSLLLVAVASGYGPPSSHSSSRVVHGEDAVPYSWPWQVSLQYEKSGSFYHTCGGSLIAPDWVVTAGHCISRDLTYQVVLGEYNLAVKEGPEQVIPINSEELFVHPLWNRSCVACGNDIALIKLSRSAQLGDAVQLASLPPAGDILPNKTPCYITGWGRLYTNGPLPDKLQQARLPVVDYKHCSRWNWWGSTVKKTMVCAGGYIRSGCNGDSGGPLNCPTEDGGWQVHGVTSFVSAFGCNFIWKPTVFTRVSAFIDWIEETIASH

SEQ ID NO: 2603 - protein, 75 aa, Homo Sapiens
WWGSTVKKTMVCAGGYIRSGCNGDSGGPLNCPTEDGGWQVHGVTSFVSAFGCNFIWKPTVFTRVSAFIDWIEEGG

SEQ ID NO: 2604 - protein, 270 aa, Homo Sapiens
MMLRLLSSLLLVAVASGYGPPSSRPSSRVVNGEDAVPYSWPWQVSLQYEKSGSFYHTCGGSLIAPDWVVTAGHCISSSRTYQVVLGEYDRAVKEGPEQVIPINSGDLFVHPLWNRSCVACGNDIALIKLSRSAQLGDAVQLASLPPAGDILPNETPCYITGWGRLYTNGPLPDKLQEALLPVVDYEHCSRWNWWGSSVKKTMVCAGGDIRSGCNGDSGGPLNCPTEDGGWQVHGVTSFVSAFGCNTRRKPTVFTRVSAFIDWIEETIASH

SEQ ID NO: 2605 - protein, 164 aa, Homo Sapiens
MRSCYVAQAGLKLPGSSDPPASASQSTRITASGYGPPSSRPSSRVVNGEDAVPYSWPWQVSLQYEKSGSFYHTCGGSLIAPDWVVTAGHCISSSRTYQVVLGEYDRAVKEGPEQVIPINSGDLFVHPLWNRSCVACGNDIALIKLSRSAQLGDAVQLASLPPAG

SEQ ID NO: 2606 - protein, 180 aa, Homo Sapiens
QVIPINSGDLFVHPLWNRSCVACGNDIALIKLSRSAQLGDAVQLASLPPAGDILPNETPCYITGWGRLYTNGPLPDKLQEALLPVVDYEHCSRWNWWGSSVKKTMVCAGGDIRSGCNGDSGGPLNCPTEDGGWQVHGVTSFVSAFGCNTRRKPTVFTRVSAFIDWIEEKLQGNKAPESRT

SEQ ID NO: 2607 - protein, 1361 aa, Homo Sapiens
MGAAGRQDFLFKAMLTISWLTLTCFPGATSTVAAGCPDQSPELQPWNPGHDQDHHVHIGQGKTLLLTSSATVYSIHISEGGKLVIKDHDEPIVLRTRHILIDNGGELHAGSALCPFQGNFTIILYGRADEGIQPDPYYGLKYIGVGKGGALELHGQKKLSWTFLNKTLHPGGMAEGGYFFERSWGHRGVIVHVIDPKSGTVIHSDRFDTYRSKKESERLVQYLNAVPDGRILSVAVNDEGSRNLDDMARKAMTKLGSKHFLHLGFRHPWSFLTVKGNPSSSVEDHIEYHGHRGSAAARVFKLFQTEHGEYFNVSLSSEWVQDVEWTEWFDHDKVSQTKGGEKISDLWKAHPGKICNRPIDIQATTMDGVNLSTEVVYKKGQDYRFACYDRGRACRSYRVRFLCGKPVRPKLTVTIDTNVNSTILNLEDNVQSWKPGDTLVIASTDYSMYQAEEFQVLPCRSCAPNQVKVAGKPMYLHIGEEIDGVDMRAEVGLLSRNIIVMGEMEDKCYPYRNHICNFFDFDTFGGHIKFALGFKAAHLEGTELKHMGQQLVGQYPIHFHLAGDVDERGGYDPPTYIRDLSIHHTFSRCVTVHGSNGLLIKDVVGYNSLGHCFFTEDGPEERNTFDHCLGLLVKSGTLLPSDRDSKMCKMITEDSYPGYIPKPRQDCNAVSTFWMANPNNNLINCAAAGSEETGFWFIFHHVPTGPSVGMYSPGYSEHIPLGKFYNNRAHSNYRAGMIIDNGVKTTEASAKDKRPFLSIISARYSPHQDADPLKPREPAIIRHFIAYKNQDHGAWLRGGDVWLDSCRFADNGIGLTLASGGTFPYDDGSKQEIKNSLFVGESGNVGTEMMDNRIWGPGGLDHSGRTLPIGQNFPIRGIQLYDGPINIQNCTFRKFVALEGRHTSALAFRLNNAWQSCPHNNVTGIAFEDVPITSRVFFGEPGPWFNQLDMDGDKTSVFHDVDGSVSEYPGSYLTKNDNWLVRHPDCINVPDWRGAICSGCYAQMYIQAYKTSNLRMKIIKNDFPSHPLYLEGALTRSTHYQQYQPVVTLQKGYTIHWDQTAPAELAIWLINFNKGDWIRVGLCYPRGTTFSILSDVHNRLLKQTSKTGVFVRTLQMDKVEQSYPGRSHYYWDEDSGLLFLKLKAQNEREKFAFCSMKGCERIKIKALIPKNAGVSDCTATAYPKFTERAVVDVPMPKKLFGSQLKTKDHFLEVKMESSKQHFFHLWNDFAYIEVDGKKYPSSEDGIQVVVIDGNQGRVVSHTSFRNSILQGIPWQLFNYVATIPDNSIVLMASKGRYVSRGPWTRVLEKLGADRGLKLKEQMAFVGFKGSFRPIWVTLDTEDHKAKIFQVVPIPVVKKKKL

SEQ ID NO: 2608 - protein, 1361 aa, Homo Sapiens; identical to SEQ ID NO: 2607

SEQ ID NO: 2609 - protein, 1361 aa, Homo Sapiens; identical to SEQ ID NO: 2607

SEQ ID NO: 2610 - protein, 76 aa, Homo Sapiens
  misc_feature (1)..(1): Xaa can be any naturally occurring amino acid
XINFNKGDWIRVGLCYPRGTTFSILSDVHNRLLKQTSKTGVFVRTLQMDKVEQSYPGRSHYYWDEDSGKQRTISWR

SEQ ID NO: 2611 - protein, 145 aa, Homo Sapiens
  misc_feature (1)..(1): Xaa can be any naturally occurring amino acid
XRGAICSGCYAQMYIQAYKTSNLRMKIIKNDFPSHPLYLEGALTRSTHYQQYQPVVTLQKGYTIHWDQTAPAELAIWLINFNKGDWIRVGLCYPRGTTFSILSDVHNRLLKQTSKTGVFVRTLQMDKVEQSYPGRSHYYWDEDSG

SEQ ID NO: 2612 - protein, 173 aa, Homo Sapiens
EQDSFIEPYATTSQLRPRPNWQSEMGRRSSLPSFETLDYGDEEDIETQLSSSGKELGDVSAREDRGGHSDDLYAVPHRNQVPLLHEVNSEDDENISHQDGFPGSPPAPQRTQQKDGKHPVLNLKDEKPPLCEKPPPSPGPTLLQDLWGVAFLVGNVCGASVPLPEFLSCVQEE

SEQ ID NO: 2613 - protein, 783 aa, Homo Sapiens
MLLGFRRGRRSHFKHIIHGLLPAASVAPKAAVPRTPPPRSPNPSPERPRSALAAAILATTLTGRTVAIPQPRQRSRSESDVSSVEQDSFIEPYATTSQLRPRPNWQSEMGRRSSLPSFETLDYGDEEDIETQLSSSGKELGDVSAREDRGGHSDDLYAVPHRNQVPLLHEVNSEDDENISHQDGFPGSPPAPQRTQQKDGKHPVLNLKDEKPPLCEKPPPSPDITGRARQRYTEITREKFEALKEENMDLNNMNQSLTLELNTMKQAMKELQLKLKGMEKEKRKLKEAEKASSQEVAAPELLYLRKQAQELVDENDGLKMTVHRLNVELSRYQTKFRHLSKEESLNIEGLPSKGPIPPWLLDIKYLSPLLLAYEDMMKEKDELNATLKEEMRMFRMRVQEVVKENEELHQELNKSSAVTSEEWRQLQTQAKLVLEENKLLLEQLEIQQRKAKDSHQERLQEVSKLTKQLMLLEAKTHGQEKELAENREQLEILRAKCQELKTHSDGKIAVEVHKSIVNELKSQLQKEEEKERAEMEELMEKLTVLQAQKKSLLLEKNSLTEQNKALEAELERAQKINRKSQKKIEVLKKQVEKAMGNEMSAHQYLANLVGLAENITQERDSLMCLAKCLESEKDGVLNKVIKSNIRLGKLEEKVKGYKKQAALKLGDISHRLLEQQEDFAGKTAQYRQEMRHLHQVLKDKQEVLDQALQQNREMEGELEVIWESTFRENRRIRELLQDTLTRTGVQDNPRALVAPSLNGVSQADLLDGCDVCSYDLKSHAPTC

SEQ ID NO: 2614 - protein, 428 aa, Homo Sapiens
MLLGFRRGRRSHFKHIIHGLLPAASVAPKAAVPRTPPPRSPNPSPERPRSALAAAILATTLTGRTVAIPQPRQRSRSESDVSSVEQDSFIEPYATTSQLRPRPNWQSEMGRRSSLPSFETLDYGDEEDIETQLSSSGKELGDVSAREDRGGHSDDLYAVPHRNQVPLLHEVNSEDDENISHQDGFPGSPPAPQRTQQKDGKHPVLNLKDEKPPLCEKPPPSPDITGRARQRYTEITREKFEALKEENMDLNNMNQSLTLELNTMKQAMKELQLKLKGMEKEKRKLKEAEKASSQEVAAPELLYLRKQAQELVDENDGLKMTVHRLNVELSRYQTKFRHLSKEESLNIEGLPSKGPIPPWLLDIKYLSPLLLAYEDMMKEKDELNATLKASASDSSKTGFRGKQVVAGAVGDSAKESQGQPPGAPPRSF

SEQ ID NO: 2615 - protein, 356 aa, Homo Sapiens
MLLGFRRGRRSHFKHIIHGLLPAASVAPKAAVPRTPPPRSPNPSPERPRSALAAAILATTLTGRTVAIPQPRQRSRSESDVSSVEQDSFIEPYATTSQLRPRPNWQSEMGRRSSLPSFETLDYGDEEDIETQLSSSGKELGDVSAREDRGGHSDDLYAVPHRNQVPLLHEVNSEDDENISHQDGFPGSPPAPQRTQQKDGKHPVLNLKDEKPPLCEKPPPSPDITGRARQRYTEITREKFEALKEENMDLNNMNQSLTLELNTMKQAMKELQLKLKGMEKEKRKLKEAEKASSQEVAAPELLYLRKQAQELVDENDGLKMTVHRLNVELSRYQTKFRHLSKEEVTFPIVKISFSDF

SEQ ID NO: 2616 - protein, 80 aa, Homo Sapiens
MLLGFRRGRRSHFKQGLALSPRLECSGAIIAHCILELLGSSDLPTPASRGAETTGARHYSRLIVQYFCGNRDLAMFLWWS

SEQ ID NO: 2617 - protein, 217 aa, Homo Sapiens
  misc_feature (1)..(1): Xaa can be any naturally occurring amino acid
XAAVPRTPPPRSPNPSPERPRSALAAAILATTLTGRTVAIPQPRQRSRSESDVSSVEQDSFIEPYATTSQLRPRPNWQSEMGRRSSLPSFETLDYGDEEDIETQLSSSGKELGDVSAREDRGGHSDDLYAVPHRNQVPLLHEVNSEDDENISHQDGFPGSPPAPQRTQQKDGKHPVLNLKDEKPPLCEKPPPSPGICLLNYIMIEKLVLENIQINFI

SEQ ID NO: 2618 - protein, 267 aa, Homo Sapiens
MHLLLFQLLVLLPLGKTTRHQDGRQNQSSLSPVLLPRNQRELPTGNHEEAEEKPDLFVAVPHLVATSPAGEGQRQREKMLSRFGRFWKKPEREMHPSRDSDSEPFPPGTQSLIQPIDGMKMEKSPLREEAKKFWHHFMFRKTPASQGVILPIKSHEVHWETCRTVPFSQTITHEGCEKVVVQNNLCFGKCGSVHFPGAAQHSHTSCSHCLPAKFTTMHLPLNCTELSSVIKVVMLVEECQCKVKTEHEDGHILHAGSQDSFIPGVSA

SEQ ID NO: 2619 - protein, 64 aa, Homo Sapiens
MLQEWLAAVGDDYAAVVWRPEGEPRFYPDEEGPKHWTKERHQFLMELKQEALTFARNWGADYIL

SEQ ID NO: 2620 - protein, 79 aa, Homo Sapiens
MLQEWLAAVGDDYAAVVWRPEGEPRFYPDEEGPKHWTKERHQFLMELKQEALTFARNWGADYILFADTDNILTNNQTLR

SEQ ID NO: 2621 - protein, 109 aa, Homo Sapiens
MLQEWLAAVGDDYAAVVWRPEGEPRFYPDEEGPKHWTKERHQFLMELKQEALTFARNWGADYILFADTDNILTNNQTLRLLMGQGLPVVAPMLDSQTYYSNFWCGITPQ

SEQ ID NO: 2622 - protein, 218 aa, Homo Sapiens
MLQEWLAAVGDDYAAVVWRPEGEPRFYPDEEGPKHWTKERHQFLMELKQEALTFARNWGADYILFADTDNILTNNQTLRLLMGQGLPVVAPMLDSQTYYSNFWCGITPQGYYRRTAEYFPTKNRQRRGCFRVPMVHSTFLASLRAEGADQLAFYPPHPNYTWPFDDIIVFAYACQAAGVSVHVCNEHRYGYMNVPVKSHQGLEDERVNFIHLILEALG

SEQ ID NO: 2623 - protein, 517 aa, Homo Sapiens
MLQEWLAAVGDDYAAVVWRPEGEPRFYPDEEGPKHWTKERHQFLMELKQEALTFARNWGADYILFADTDNILTNNQTLRLLMGQGLPVVAPMLDSQTYYSNFWCGITPQGYYRRTAEYFPTKNRQRRGCFRVPMVHSTFLASLRAEGADQLAFYPPHPNYTWPFDDIIVFAYACQAAGVSVHVCNEHRYGYMNVPVKSHQGLEDERVNFIHLILEALVDGPRMQASAHVTRPSKRPSKIGFDEVFVISLARRPDRRERMLASLWEMEISGRVVDAVDGWMLNSSAIRNLGVDLLPGYQDPYSGRTLTKGEVGCFLSHYSIWEEVVARGLARVLVFEDDVRFESNFRGRLERLMEDVEAEKLSWDLIYLGRKQVNPEKETAVEGLPGLVVAGYSYWTLAYALRLAGARKLLASQPLRRMLPVDEFLPIMFDQHPNEQYKAHFWPRDLVAFSAQPLLAAPTHYAGDAEWLSDTETSSPWDDDSGRLISWSGSQKTLRSPRLDLTGSSGHSLQPQPRDEL

SEQ ID NO: 2624 - protein, 517 aa, Homo Sapiens [sequence omitted]

SEQ ID NO: 2625 - protein, 595 aa, Homo Sapiens
MRAARAAPLLQLLLLLGPWLEAAGVAESPLPAVVLAILARNAEHSLPHYLGALERLDYPRARMALWCATDHNVDNTTEMLQEWLAAVGDDYAAVVWRPEGEPRFYPDEEGPKHWTKERHQFLMELKQEALTFARNWGADYILFADTDNILTNNQTLRLLMGQGLPVVAPMLDSQTYYSNFWCGITPQGYYRRTAEYFPTKNRQRRGCFRVPMVHSTFLASLRAEGADQLAFYPPHPNYTWPFDDIIVFAYACQAAGVSVHVCNEHRYGYMNVPVKSHQGLEDERVNFIHLILEALVDGPRMQASAHVTRPSKRPSKIGFDEVFVISLARRPDRRERMLASLWEMEISGRVVDAVDGWMLNSSAIRNLGVDLLPGYQDPYSGRTLTKGEVGCFLSHYSIWEEVVARGLARVLVFEDDVRFESNFRGRLERLMEDVEAEKLSWDLIYLGRKQVNPEKETAVEGLPGLVVAGYSYWTLAYALRLAGARKLLASQPLRRMLPVDEFLPIMFDQHPNEQYKAHFWPRDLVAFSAQPLLAAPTHYAGDAEWLSDTETSSPWDDDSGRLISWSGSQKTLRSPRLDLTGSSGHSLQPQPRDEL

SEQ ID NO: 2626 - protein, 155 aa, Homo Sapiens
MTAKQCPGAGHYCPESRGGGCWQGLQILSDLATTLGMATLPSGPVFHREKPLRDGSHSLKVSQQRSRTPRPLYPAWPDSGPCGPQLVSSWADPRIPSLPKDSAEGPLCPFYLHLSTLPQLDVWVSPAPSSLAGAKYREVKQDPCRHVAQHTVGPQ

SEQ ID NO: 2627 - protein, 337 aa, Homo Sapiens
MAAAGPAAGPTGPEPMPSYAQLVQRGWGSALAAARGCTDCGWGLARRGLAEHAHLAPPELLLLALGALGWTALRSAATARLFRPLAKRCCLQPRDAAKMPESAWKFLFYLGSWSYSAYLLFGTDYPFFHDPPSVFYDWTPGMAVPRDIAAAYLLQGSFYGHSIYATLYMDTWRKDSVVMLLHHVVTLILIVSSYAFRYHNVGILVLFLHDISDVQLEFTKLNIYFKSRGGSYHRLHALAADLGCLSFGFSWFWFRLYWFPLKVLYATSHCSLRTVPDIPFYFFFNALLLLLTLMNLYWFLYIVAFAAKVLTGQVHELKDLREYDTAEAQSLKPSKAE

SEQ ID NO: 2628 - protein, 350 aa, Homo Sapiens
MAAAGPAAGPTGPEPMPSYAQLVQRGWGSALAAARGCTDCGWGLARRGLAEHAHLAPPELLLLALGALGWTALRSAATARLFRPLAKRCCLQPRDAAKMPESAWKFLFYLGSWSYSAYLLFGTDYPFFHDPPSVFYDWTPGMAVPRDIAAAYLLQGSFYGHSIYATLYMDTWRKDSVVMLLHHVVTLILIVSSYAFRYHNVGILVLFLHDISDVQLEFTKLNIYFKSRGGSYHRLHALAADLGCLSFGFSWFWFRLYWFPLKVLYATSHCSLRTVPDIPFYFFFNALLLLLTLMNLYWFLYIVAFAAKVLTGQVHELKDLREYDTAEAQSLKPSKAEKPLRNGLVKDKRF

SEQ ID NO: 2629 - protein, 239 aa, Homo Sapiens
MPESAWKFLFYLGSWSYSAYLLFGTDYPFFHDPPSVFYDWTPGMAVPRDIAAAYLLQGSFYGHSIYATLYMDTWRKDSVVMLLHHVVTLILIVSSYAFRYHNVGILVLFLHDISDVQLEFTKLNIYFKSRGGSYHRLHALAADLGCLSFGFSWFWFRLYWFPLKVLYATSHCSLRTVPDIPFYFFFNALLLLLTLMNLYWFLYIVAFAAKVLTGQVHELKDLREYDTAEAQSLKPSKAE

SEQ ID NO: 2630 - protein, 372 aa, Homo Sapiens
MPPPQQGPCGHHLLLLLALLLPSLPLTRAPVPPGPAAALLQALGLRDEPQGAPRLRPVPPVMWRLFRRRDPQETRSGSRRTSPGVTLQPCHVEELGVAGNIVRHIPDRGAPTRASEPASAAGHCPEWTVVFDLSAVEPAERPSRARLELRFAAAAAAAPEGGWELSVAQAGQGAGADPGPVLLRQLVPALGPPVRAELLGAAWARNASWPRSLRLALALRPRAPAACARLAEASLLLVTLDPRLCHPLARPRRDAEPVLGGGPGGACRARRLYVSFREVGWHRWVIAPRGFLANYCQGQCALPVALSGSGGPPALNHAVLRALMHAAAPGAADLPCCVPARLSPISVLFFDNSDNVVLRQYEDMVVDECGCR

SEQ ID NO: 2631 - protein, 216 aa, Homo Sapiens
  misc_feature (1)..(1): Xaa can be any naturally occurring amino acid
XAAAYLLQGSFYGHSIYATLYMDTWRKDSVVMLLHHVVTLILIVSSYAFRYHNVGILVLFLHDISDVQLEFTKLNIYFKSRGGSYHRLHALAADLGCLSFGFSWFWFRLYWFPLKVLYATSHCSLRTVPDIPFYFFFNALLLLLTLMNLYWFLYIVAFAAKVLTGQVHELKDLREYDTAEAQSLKPSKAEEAVAQSSVTFFGTGGARCRHLTHPGL

SEQ ID NO: 2632 - protein, 44 aa, Homo Sapiens
ERNFHTVPYMVGINKQEFGWLIPMMLEHPPTCMSFSTVQASHQT

SEQ ID NO: 2633 - protein, 131 aa, Homo Sapiens
KELIPEATEKYLGGTDDTVKKKDLFLDLIADVMFGVPSVIVARNHREGASEEEIRLSKMVMKFWANFARNGNPNGEGLPHWPEYNQKEGYLQIGANTQAAQKLKDKEVAFWTNLFAKKAVEKPPQTEHIEL

SEQ ID NO: 2634 - protein, 568 aa, Homo Sapiens
MWLRAFILATLSASAAWAGHPSSPPVVDTVHGKVLGKFVSLEGFAQPVAIFLGIPFAKPPLGPLRFTPPQPAEPWSFVKNATSYPPMCTQDPKAGQLLSELFTNRKENIPLKLSEDCLYLNIYTPADLTKKNRLPVMVWIHGGGLMVGAASTYDGLALAAHENVVVVTIQYRLGIWGFFSTGDEHSRGNWGHLDQVAALRWVQDNIASFGGNPGSVTIFGESAGGESVSVLVLSPLAKNLFHRAISESGVALTSVLVKKGDVKPLAEQIAITAGCKTTTSAVMVHCLRQKTEEELLETTLKMKFLSLDLQGDPRESQPLLGTVIDGMLLLKTPEELQAERNFHTVPYMVGINKQEFGWLIPMQLMSYPLSEGQLDQKTAMSLLWKSYPLVCIAKELIPEATEKYLGGTDDTVKKKDLFLDLIADVMFGVPSVIVARNHRDAGAPTYMYEFQYRPSFSSDMKPKTVIGDHGDELFSVFGAPFLKEGASEEEIRLSKMVMKFWANFARNGNPNGEGLPHWPEYNQKEGYLQIGANTQAAQKLKDKEVAFWTNLFAKKAVEKPPQTEHIEL

SEQ ID NO: 2635 - protein, 567 aa, Homo Sapiens
MWLRAFILATLSASAAWGHPSSPPVVDTVHGKVLGKFVSLEGFAQPVAIFLGIPFAKPPLGPLRFTPPQPAEPWSFVKNATSYPPMCTQDPKAGQLLSELFTNRKENIPLKLSEDCLYLNIYTPADLTKKNRLPVMVWIHGGGLMVGAASTYDGLALAAHENVVVVTIQYRLGIWGFFSTGDEHSRGNWGHLDQVAALRWVQDNIASFGGNPGSVTIFGESAGGESVSVLVLSPLAKNLFHRAISESGVALTSVLVKKGDVKPLAEQIAITAGCKTTTSAVMVHCLRQKTEEELLETTLKMKFLSLDLQGDPRESQPLLGTVIDGMLLLKTPEELQAERNFHTVPYMVGINKQEFGWLIPMQLMSYPLSEGQLDQKTAMSLLWKSYPLVCIAKELIPEATEKYLGGTDDTVKKKDLFLDLIADVMFGVPSVIVARNHRDAGAPTYMYEFQYRPSFSSDMKPKTVIGDHGDELFSVFGAPFLKEGASEEEIRLSKMVMKFWANFARNGNPNGEGLPHWPEYNQKEGYLQIGANTQAAQKLKDKEVAFWTNLFAKKAVEKPPQTEHIEL

SEQ ID NO: 2636 - protein, 566 aa, Homo Sapiens
MWLRAFILATLSASAAWGHPSSPPVVDTVHGKVLGKFVSLEGFAQPVAIFLGIPFAKPPLGPLRFTPPQPAEPWSFVKNATSYPPMCTQDPKAGQLLSELFTNRKENIPLKLSEDCLYLNIYTPADLTKKNRLPVMVWIHGGGLMVGAASTYDGLALAAHENVVVVTIQYRLGIWGFFSTGDEHSRGNWGHLDQVAALRWVQDNIASFGGNPGSVTIFGESAGGESVSVLVLSPLAKNLFHRAISESGVALTSVLVKKGDVKPLAEQIAITAGCKTTTSAVMVHCLRQKTEEELLETTLKMKFLSLDLQGDPRESQPLLGTVIDGMLLLKTPEELQAERNFHTVPYMVGINKQEFGWLIPMLMSYPLSEGQLDQKTAMSLLWKSYPLVCIAKELIPEATEKYLGGTDDTVKKKDLFLDLIADVMFGVPSVIVARNHRDAGAPTYMYEFQYRPSFSSDMKPKTVIGDHGDELFSVFGAPFLKEGASEEEIRLSKMVMKFWANFARNGNPNGEGLPHWPEYNQKEGYLQIGANTQAAQKLKDKEVAFWTNLFAKKAVEKPPQTEHIEL

SEQ ID NO: 2637 - protein, 84 aa, Homo Sapiens
  misc_feature (1)..(1): Xaa can be any naturally occurring amino acid
XRQKTEEELLETTLKMKFLSLDLQGDPRESQPLLGTVIDGMLLLKTPEELQAERNFHTVPYMVGINKQEFGWLIPMGTADISVY

SEQ ID NO: 2638 - protein, 210 aa, Homo Sapiens
MEQMSREDMLAISTPVLTSLDVPPEMMPTVIDEYLGSNSDAQAKCQAFQEFMGDVFINVPTVSFSRYLRDSGSPVFFYEFQHRPSSFAKIKPAWVKADHGAEGAFVFGGPFLMDESSRLAFPEATEEEKQLSLTMMAQWTHFARTGDPNSKALPPWPQFNQAEQYLEINPVPRAGQKFREAWMQFWSETLPSKIQQWHQKQKNRKAQEDL

SEQ ID NO: 2639 - protein, 571 aa, Homo Sapiens
MERAVRVESGVLVGVVCLLLACPATATGPEVAQPEVDTTLGRVRGRQVGVKGTDRLVNVFLGIPFAQPPLGPDRFSAPHPAQPWEGVRDASTAPPMCLQDVESMNSSRFVLNGKQQIFSVSEDCLVLNVYSPAEVPAGSGRPVMVWVHGGALITGAATSYDGSALAAYGDVVVVTVQYRLGVLGFFSTGDEHAPGNQGFLDVVAALRWVQENIAPFGGDLNCVTVFGGSAGGSIISGLVLSPVAAGLFHRAITQSGVITTPGIIDSHPWPLAQKIANTLACSSSSPAEMVQCLQQKEGEELVLSKKLKNTIYPLTVDGTVFPKSPKELLKEKPFHSVPFLMGVNNHEFSWLIPRGWGLLDTMEQMSREDMLAISTPVLTSLDVPPEMMPTVIDEYLGSNSDAQAKCQAFQEFMGDVFINVPTVSFSRYLRDSGSPVFFYEFQHRPSSFAKIKPAWVKADHGAEGAFVFGGPFLMDESSRLAFPEATEEEKQLSLTMMAQWTHFARTGDPNSKALPPWPQFNQAEQYLEINPVPRAGQKFREAWMQFWSETLPSKIQQWHQKQKNRKAQEDL

SEQ ID NO: 2640 - protein, 568 aa, Homo Sapiens
MERAVRVESGVLVGVVCLLLACPATATGPEVAQPEVDTTLGRVRGRQVGVKGTDRLVNVFLGIPFAQPPLGPDRFSAPHPAQPWEGVRDASTAPPMCLQDVESMNSSRFVLNGKQQIFSVSEDCLVLNVYSPAEVPAGSGRPVMVWVHGGALITGAATSYDGSALAAYGDVVVVTVQYRLGVLGFFSTGDEHAPGNQGFLDVVAALRWVQENIAPFGGDLNCVTVFGGSAGGSIISGLVLSPVAAGLFHRAITQSGVITTPGIIDSHPWPLAQKIANTLACSSSSPAEMVQCLQQKEGEELVLSKKLKNTIYPLTVDGTVFPKSPKELLKEKPFHSVPFLMGVNNHEFSWLIPRGWGLLDTMEQMSREDMLAISTPVLTSLDVPPEMMPTVIDEYLGSNSDAQAKCQAFQEFMGDVFINVPTVSFSRYLRDSGSPVFFYEFQHRPSSFAKIKPAWVKADHGAEGAFVFGGPFLMDESSRLEATEEEKQLSLTMMAQWTHFARTGDPNSKALPPWPQFNQAEQYLEINPVPRAGQKFREAWMQFWSETLPSKIQQWHQKQKNRKAQEDL

SEQ ID NO: 2641 - protein, 379 aa, Homo Sapiens
MERAVRVESGVLVGVVCLLLACPATATGPEVAQPEVDTTLGRVRGRQVGVKGTDRLVNVFLGIPFAQPPLGPDRFSAPHPAQPWEGVRDASTAPPMCLQDVESMNSSRFVLNGKQQIFSVSEDCLVLNVYSPAEVPAGSGRPVMVWVHGGALITGAATSYDGSALAAYGDVVVVTVQYRLGVLGFFSTGDEHAPGNQGFLDVVAALRWVQENIAPFGGDLNCVTVFGGSAGGSIISGLVLSPVAAGLFHRAITQSGVITTPGIIDSHPWPLAQKIANTLACSSSSPAEMVQCLQQKEGEELVLSKKLKNTIYPLTVDGTVFPKSPKELLKEKPFHSVPFLMGVNNHEFSWLIPRILEALSFSMSSSIDPVLLRRSNLPG

SEQ ID NO: 2642 - protein, 40 aa, Homo Sapiens
MERAVRVESGVLVGVVCLLLACPATATGYQDAVWARSCSA

SEQ ID NO: 2643 - protein, 454 aa, Homo Sapiens
GKQMHVGKTPIQVFLGVPFSRPPLGILRFAPPEPPEPWKGIRDATTYPPGCLQESWGQLASMYVSTRERYKWLRFSEDCLYLNVYAPARAPGDPQLPVMVWFPGGAFIVGAASSYEGSDLAAREKVVLVFLQHRLGIFGFLSTDDSHARGNWGLLDQMAALRWVQENIAAFGGDPGNVTLFGQSAGAMSISGLMMSPLASGLFHRAISQSGTALFRLFITSNPLKVAKKVAHLAGCNHNSTQILVNCLRALSGTKVMRVSNKMRFLQLNFQRDPEEIIWSMSPVVDGVVIPDDPLVLLTQGKVSSVPYLLGVNNLEFNWLLPYNITKEQVPLVVEEYLDNVNEHDWKMLRNRMMDIVQDATFVYATLQTAHYHRGLSMGKEKALSLQMMKYWANFARTGNPNDGNLPCWPRYNKDEKYLQLDFTTRVGMKLKEKKMAFWMSLYQSQRPEKQRQF

SEQ ID NO: 2644 - protein, 468 aa, Homo Sapiens
MRWILCWSLTLCLMAQTALGALHTKRPQVVTKYGTLQGKQMHVGKTPIQVFLGVPFSRPPLGILRFAPPEPPEPWKGIRDATTYPPGCLQESWGQLASMYVSTRERYKWLRFSEDCLYLNVYAPARAPGDPQLPVMVWFPGGAFIVGAASSYEGSDLAAREKVVLVFLQHRLGIFGFLSTDDSHARGNWGLLDQMAALRWVQENIAAFGGDPGNVTLFGQSAGAMSISGLMMSPLASGLFHRAISQSGTALFRLFITSNPLKVAKKVAHLAGCNHNSTQILVNCLRALSGTKVMRVSNKMRFLQLNFQRDPEEIIWSMSPVVDGVVIPDDPLVLLTQGKVSSVPYLLGVNNLEFNWLLPYIMKFPLNRQAMRKETITKMLWSTRTLLNITKEQVPLVVEEYLDNVNEHDWKMLRNRMMDIVQDATFVYATLQTAHYHRETPMMGICPAGHATTRMKSTCSWILPQEWA

SEQ ID NO: 2645 - protein, 374 aa, Homo Sapiens
MYVSTRERYKWLRFSEDCLYLNVYAPARAPGDPQLPVMVWFPGGAFIVGAASSYEGSDLAAREKVVLVFLQHRLGIFGFLRWRGRTDDSHARGNWGLLDQMAALRWVQENIAAFGGDPGNVTLFGQSAGAMSISGLMMSPLASGLFHRAISQSGTALFRLFITSNPLKVAKKVAHLAGCNHNSTQILVNCLRALSGTKVMRVSNKMRFLQLNFQRDPEEIIWSMSPVVDGVVIPDDPLVLLTQGKVSSVPYLLGVNNLEFNWLLPYIMKFPLNRQAMRKETITKMLWSTRTLLNITKEQVPLVVEEYLDNVNEHDWKMLRNRMMDIVQDATFVYATLQTAHYHRETPMMGICPAGHATTRMKSTCSWILPQEWA

SEQ ID NO: 2646 - protein, 135 aa, Homo Sapiens
MYVSTRERYKWLRFSEDCLYLNVYAPARAPGDPQLPVMVWFPGGAFIVGAASSYEGSDLAAREKVVLVFLQHRLGIFGFLRWRGRYPLGPQLWPERRGLARTTATRAGTGGCWTRWRLCAGCRRTSQPSGETQEM

SEQ ID NO: 2647 - protein, 463 aa, Homo Sapiens
MYVSTRERYKWLRFSEDCLYLNVYAPARAPGDPQLPVMVWFPGGAFIVGAASSYEGSDLAAREKVVLVFLQHRLGIFGFLSTDDSHARGNWGLLDQMAALRWVQENIAAFGGDPGNVTLFGQSAGAMSISGLMMSPLASGLFHRAISQSGTALFRLFITSNPLKVAKKVAHLAGCNHNSTQILVNCLRALSGTKVMRVSNKMRFLQLNFQRDPEEIIWSMSPVVDGVVIPDDPLVLLTQGKVSSVPYLLGVNNLEFNWLLPYIMKFPLNRQAMRKETITKMLWSTRTLLNITKEQVPLVVEEYLDNVNEHDWKMLRNRMMDIVQDATFVYATLQTAHYHRDAGLPVYLYEFEHHARGIIVKPRTDGADHGDEMYFLFGGPFATGLSMGKEKALSLQMMKYWANFARTGNPNDGNLPCWPRYNKDEKYLQLDFTTRVGMKLKEKKMAFWMSLYQSQRPEKQRQF

SEQ ID NO: 2648 - protein, 177 aa, Homo Sapiens
  misc_feature (1)..(1): Xaa can be any naturally occurring amino acid
XALHTKRPQVVTKYGTLQGKQMHVGKTPIQVFLGVPFSRPPLGILRFAPPEPPEPWKGIRDATTYPPGWSLALSPGWSAVARSRLTATSASRVQASLLPQPLSIWGYRCLQESWGQLASMYVSTRERYKWLRFSEDCLYLNVYAPARAPGDPQLPVSDGLVPGRRLHRGRCFFVRGL

SEQ ID NO: 2649 - protein, 604 aa, Homo Sapiens
MAVLVCPASCHGLKEFRIRRGMWRLCLVYYFYPASSTLYVLRIDVLNYTSKDEGPSAEGPQRNTRLGWIQGKQVTVLGSPVPVNVFLGVPFAAPPLGSLRFTNPQPASPWDNLREATSYPNLCLQNSEWLLLDQHMLKVHYPKFGVSEDCLYLNIYAPAHADTGSKLPVLVWFPGGAFKTGSASIFDGSALAAYEDVLVVVVQYRLGIFGFFTTWDQHAPGNWAFKDQVAALSWVQKNIEFFGGDPSSVTIFGESAGAISVSSLILSPMAKGLFHKAIMESGVAIIPYLEAHDYEKSEDLQVVAHFCGNNASDSEALLRCLRTKPSKELLTLSQKTKSFTRVVDGAFFPNEPLDLLSQKAFKAIPSIIGVNNHECGFLLPMKEAPEILSGSNKSLALHLIQNILHIPPQYLHLVANEYFHDKHSLTEIRDSLLDLLGDVFFVVPALITARYHRDAGAPVYFYEFRHRPQCFEDTKPAFVKADHADEVRFVFGGAFLKGDIVMFEGATEEEKLLSRKMMKYWATFARTGNPNGNDLSLWPAYNLTEQYLQLDLNMSLGQRLKEPRVDFWTSTIPLILSASDMLHSPLSSLTFLSLLQPFFFFCAP

SEQ ID NO: 2650 - protein, 355 aa, Homo Sapiens
MEDDLSWRSWSLLCMEILSPMAKGLFHKAIMESGVAIIPYLEAHDYEKSEDLQVVAHFCGNNASDSEALLRCLRTKPSKELLTLSQKTKSFTRVVDGAFFPNEPLDLLSQKAFKAIPSIIGVNNHECGFLLPMEAPEILSGSNKSLALHLIQNILHIPPQYLHLVANEYFHDKHSLTEIRDSLLDLLGDVFFVVPALITARYHRDAGAPVYFYEFRHRPQCFEDTKPAFVKADHADEVRFVFGGAFLKGDIVMFEGATEEEKLLSRKMMKYWATFARTGNPNGNDLSLWPAYNLTEQYLQLDLNMSLGQRLKEPRVDFWTSTIPLILSASDMLHSPLSSLTFLSLLQPFFFFCAP

SEQ ID NO: 2651 - protein, 75 aa, Homo Sapiens
MLKVHYPKFGVSEDCLYLNIYAPAHADTGSKLPVLVWFPGGAFKTGSASIFDGSALAAYEDVLVVVVQYRLGIFG

SEQ ID NO: 2652 - protein, 78 aa, Homo Sapiens
MLKVHYPKFGVSEDCLYLNIYAPAHADTGSKLPVLVWFPGGAFKTGSASIFDGSALAAYEDVLVVVVQYRLGIFGFFT

SEQ ID NO: 2653 - protein, 469 aa, Homo Sapiens
MLKVHYPKFGVSEDCLYLNIYAPAHADTGSKLPVLVWFPGGAFKTGSASIFDGSALAAYEDVLVVVVQYRLGIFGFFTTWDQHAPGNWAFKDQVAALSWVQKNIEFFGGDPSSVTIFGESAGAISVSSLILSPMAKGLFHKAIMESGVAIIPYLEAHDYEKSEDLQVVAHFCGNNASDSEALLRCLRTKPSKELLTLSQKTKSFTRVVDGAFFPNEPLDLLSQKAFKAIPSIIGVNNHECGFLLPMKEAPEILSGSNKSLALHLIQNILHIPPQYLHLVANEYFHDKHSLTEIRDSLLDLLGDVFFVVPALITARYHRDAGAPVYFYEFRHRPQCFEDTKPAFVKADHADEVRFVFGGAFLKGDIVMFEGATEEEKLLSRKMMKYWATFARTGNPNGNDLSLWPAYNLTEQYLQLDLNMSLGQRLKEPRVDFWTSTIPLILSASDMLHSPLSSLTFLSLLQPFFFFCAP

SEQ ID NO: 2654 - protein, 575 aa, Homo Sapiens
MSGNWVHPGQILIWAIWVLAAPTKGPSAEGPQRNTRLGWIQGKQVTVLGSPVPVNVFLGVPFAAPPLGSLRFTNPQPASPWDNLREATSYPNLCLQNSEWLLLDQHMLKVHYPKFGVSEDCLYLNIYAPAHADTGSKLPVLVWFPGGAFKTGSASIFDGSALAAYEDVLVVVVQYRLGIFGFFTTWDQHAPGNWAFKDQVAALSWVQKNIEFFGGDPSSVTIFGESAGAISVSSLILSPMAKGLFHKAIMESGVAIIPYLEAHDYEKSEDLQVVAHFCGNNASDSEALLRCLRTKPSKELLTLSQKTKSFTRVVDGAFFPNEPLDLLSQKAFKAIPSIIGVNNHECGFLLPMKEAPEILSGSNKSLALHLIQNILHIPPQYLHLVANEYFHDKHSLTEIRDSLLDLLGDVFFVVPALITARYHRDAGAPVYFYEFRHRPQCFEDTKPAFVKADHADEVRFVFGGAFLKGDIVMFEGATEEEKLLSRKMMKYWATFARTGNPNGNDLSLWPAYNLTEQYLQLDLNMSLGQRLKEPRVDFWTSTIPLILSASDMLHSPLSSLTFLSLLQPFFFFCAP

SEQ ID NO: 2655 - protein, 525 aa, Homo Sapiens
MSGNWVHPGQILIWAIWVLAAPTKGPSAEGPQRNTRLGWIQGKQVTVLGSPVPVNVFLGVPFAAPPLGSLRFTNPQPASPWDNLREATSYPNLCLQNSEWLLLDQHMLKVHYPKFGVSEDCLYLNIYAPAHADTGSKLPVLVWFPGGAFKTGSASIFDGSALAAYEDVLVVVVQYRLGIFGFFTTWDQHAPGNWAFKDQVAALSWVQKNIEFFGGDPSSVTIFGESAGAISVSSLILSPMAKGLFHKAIMESGVAIIPYLEAHDYEKSEDLQVVAHFCGNNASDSEALLRCLRTKPSKELLTLSQKTKSFTRVVDGAFFPNEPLDLLSQKAFKAIPSIIGVNNHECGFLLPMKEAPEILSGSNKSLALHLIQNILHIPPQYLHLVANEYFHDKHSLTEIRDSLLDLLGDVFFVVPALITARYHREGATEEEKLLSRKMMKYWATFARTGNPNGNDLSLWPAYNLTEQYLQLDLNMSLGQRLKEPRVDFWTSTIPLILSASDMLHSPLSSLTFLSLLQPFFFFCAP

SEQ ID NO: 2656 - protein, 545 aa, Homo Sapiens
MSGNWVHPGQILIWAIWVLAAPTKGPSAEGPQRNTRLGWIQGKQVTVLGSPVPVNVFLGVPFAAPPLGSLRFTNPQPASPWDNLREATSYPNLCLQNSEWLLLDQHMLKVLVWFPGGAFKTGSASIFDGSALAAYEDVLVVVVQYRLGIFGFFTTWDQHAPGNWAFKDQVAALSWVQKNIEFFGGDPSSVTIFGESAGAISVSSLILSPMAKGLFHKAIMESGVAIIPYLEAHDYEKSEDLQVVAHFCGNNASDSEALLRCLRTKPSKELLTLSQKTKSFTRVVDGAFFPNEPLDLLSQKAFKAIPSIIGVNNHECGFLLPMKEAPEILSGSNKSLALHLIQNILHIPPQYLHLVANEYFHDKHSLTEIRDSLLDLLGDVFFVVPALITARYHRDAGAPVYFYEFRHRPQCFEDTKPAFVKADHADEVRFVFGGAFLKGDIVMFEGATEEEKLLSRKMMKYWATFARTGNPNGNDLSLWPAYNLTEQYLQLDLNMSLGQRLKEPRVDFWTSTIPLILSASDMLHSPLSSLTFLSLLQPFFFFCAP

SEQ ID NO: 2657 - protein, 433 aa, Homo Sapiens
MLAATVLTLALLGNAHACSKGTSHEAGIVCRITKPALLVLNHETAKVIQTAFQRASYPDITGEKAMMLLGQVKYGLHNIQISHLSIASSQVELVEAKSIDVSIQNVSVVFKGTLKYGYTTAWWLGIDQSIDFEIDSAIDLQINTQLTCDSGRVRTDAPDCYLSFHKLLLHLQGEREPGWIKQLFTNFISFTLKLVLKGQICKEINVISNIMADFVQTRAASILSDGDIGVDISLTGDPVITASYLESHHKAVLETWGFNTNQEIFQEVVGGFPSQAQVTVHCLKMPKISCQNKGVVVNSSVMVKFLFPRPDQQHSVAYTFEEDIVTTVQASYSKKKLFLSLLDFQITPKTVSNLTESSSESVQSFLQSMITAVGIPEVMSRLEVVFTALMNSKGVSLFDIINPEIITRDGFLLLQMDFGFPEHLLVDFLQSLS

SEQ ID NO: 2658 - protein, 493 aa, Homo Sapiens [sequence omitted]

SEQ ID NO: 2659 - protein, 428 aa, Homo Sapiens
MMLLGQVKYGLHNIQISHLSIASSQVELVEAKSIDVSIQNVSVVFKGTLKYGYTTAWWLGIDQSIDFEIDSAIDLQINTQLTCDSGRVRTDAPDCYLSFHKLLLHLQGEREPGWIKQLFTNFISFTLKLVLKGQICKEINVISNIMADFVQTRAASILSDGDIGVDISLTGDPVITASYLESHHKGHFIYKNVSEDLPLPTFSPTLLGDSRMLYFWFSERVFHSLAKVAFQDGRLMLSLMGDEFKAVLETWGFNTNQEIFQEVVGGFPSQAQVTVHCLKMPKISCQNKGVVVNSSVMVKFLFPRPDQQHSVAYTFEEDIVTTVQASYSKKKLFLSLLDFQITPKTVSNLTESSSESVQSFLQSMITAVGIPEVMSRLEVVFTALMNSKGVSLFDIINPEIITRDGFLLLQMDFGFPEHLLVDFLQSLS

SEQ ID NO: 2660 - protein, 784 aa, Homo Sapiens
METAIWRRSYISLISSERPVHNWRGKSVQKKQAESKSQIKLHTQSAPFGLCPKDMMLTQAPSSVVRSRNSRNHTVNSGGSCLSASTVAIPAINDSSAAMSACSTISAQPASSMDTQMHSPKKQERVNKRVIWGIEVAEELHWKGWELGKETTRNLVLKNRSLKLQKMKYRPPKTKFFFTVIPQPIFLSPGITLTLPIVFRPLEAKEYMDQLWFEKAEGMFCVGLRATLPCHRLICRPPSLQLPMCAVGDTTEAFFCLDNVGDLPTFFTWEFSSPFQMLPATGLLEPGQASQIKVTFQPLTAVIYEVQATCWYGAGSRQRSSIQLQAVAKCAQLLVSIKHKCPEDQDAEGFQKLLYFGSVAVGCTSERQIRLHNPSAVNAPFRIEISPDELAEDQAFSCPTAHGIVLPGEKKCVSVFFHPKTLDTRTVDYCSIMPSGCASKTLLKVVGFCRGPAVSLQHYCVNFSWVNLGERSEQPLWIENQSDCTAHFQFAIDCLESVFTIRPAFGTLVGKARMTLHCAFQPTHPIICFRRVACLIHHQDPLFLDLMGTCHSDSTKPAILKPQHLTWYRTHLARGLTLYPPDILDAMLKEKKLAQDQNGALMIPIQDLEDMPAPQYPYIPPMTEFFFDGTSDITIFPPPISVEPVEVDFGACPGPEAPNPVPLCLMNHTKGKIMVVWTRRSDCPFWVTPESCDVPPLKSMAMRLHFQPPHPNCLYTVELEAFAIYKVCARNEREECGVSARSLSGLVGWQEVTEGSFRLHPLRARLSLGWTVTPMSLSPPKLLA

SEQ ID NO: 2661 - protein, 234 aa, Homo Sapiens
METAIWRRSYISLISSERPVHNWRGKSVQKKQAESKSQIKLHTQSAPFGLCPKDMMLTQAPSSVVRSRNSRNHTVNSGGSCLSASTVAIPAINDSSAAMSACSTISAQPASSMDTQMHSPKKQERVNKRVIWGIEVAEELHWKGWELGKETTRNLVLKNRSLKLQKMKYRPPKTKFFFTVIPQPIFLSPGITLTLPIVFRPLEAPLTAVIYEVQATCWYGAGSRQRSSIQLQAV

SEQ ID NO: 2662 - protein, 1925 aa, Homo Sapiens
MFTLTGCRLVEKTQKVENPSVSFASSFPLIPLLLRGKSVQKKQAESKSQIKLHTQSAPFGLCPKDMMLTQAPSSVVRSRNSRNHTVNSGGSCLSASTVAIPAINDSSAAMSACSTISAQPASSMDTQMHSPKKQERVNKRVIWGIEVAEELHWKGWELGKETTRNLVLKNRSLKLQKMKYRPPKTKFFFTVIPQPIFLSPGITLTLPIVFRPLEAKEYMDQLWFEKAEGMFCVGLRATLPCHRLICRPPSLQLPMCAVGDTTEAFFCLDNVGDLPTFFTWEFSSPFQMLPATGLLEPGQASQIKVTFQPLTAVIYEVQATCWYGAGSRQRSSIQLQAVAKCAQLLVSIKHKCPEDQDAEGFQKLLYFGSVAVGCTSERQIRLHNPSAVNAPFRIEISPDELAEDQAFSCPTAHGIVLPGEKKCVSVFFHPKTLDTRTVDYCSIMPSGCASKTLLKVVGFCRGPAVSLQHYCVNFSWVNLGERSEQPLWIENQSDCTAHFQFAIDCLESVFTIRPAFGTLVGKARMTLHCAFQPTHPIICFRRVACLIHHQDPLFLDLMGTCHSDSTKPAILKPQHLTWYRTHLARGLTLYPPDILDAMLKEKKLAQDQNGALMIPIQDLEDMPAPQYPYIPPMTEFFFDGTSDITIFPPPISVEPVEVDFGACPGPEAPNPVPLCLMNHTKGKIMVVWTRRSDCPFWVTPESCDVPPLKSMAMRLHFQPPHPNCLYTVELEAFAIYKVLQSYSNIEEDCTMCPSWCLTVRARGHSYFAGFEHHIPQYSLDVPKLFPAVSSGEPTYRSLLLVNKDCKLLTFSLAPQRGSDVILRPTSGLVAPGAHQIILICTYPEGSSWKQHTFYLQCNASPQYLKEVSMYSREEPLQLKLDTHKSLYFKPTWVGCSSTSPFTFRNPSRLPLQFEWRVSEQHRKLLAVQPSRGLIQPNERLTLTWTFSPLEETKYLFQVGMWVWEAGLSPNANPAATTHYMLRLVGVGLTSSLSAKEKELAFGNVLVNSKQSRFLVLLNDGNCTLYYRLYLEQGSPEAVDNHPLALQLDRTEGSMPPRSQDTICLTACPKQRSQYSWTITYSLLSHRDNKAGEKQELCCVSLVAVYPLLSILDVSSMGSAEGITRKHLWRLFSLDLLNSYLERDPTPCELTYKVPTRHSMSQIPPVLTPLRLDFNFGAAPFKAPPSVVFLALKNSGVVSLDWAFLLPSDQRIDVELWAEQAELNSTELHQMRVQDNCLFSISPKAGSLSPGQEQMVELKYSHLFIGTDHLPVLFKVSHGREILLNFIGVTVKPEQKYVHFTSTTHQFIPIPIGDTLPPRQIYELYNGGSVPVTYEVQTDVLSQVQEKNFDHPIFCCLNPKGEIQPGSTARVLWIFSPIEAKTYTVDVPIHILGWNSALIHFQGVGYNPHMMGDTAPFHNISSWDNSSIHSRLVVPGQNVFLSQSHISLGNIPVQSKCSRLLFLNNISKNEEIAFSWQPSPLDFGEVSVSPMIGVVAPEETVPFVVTLRASVHASFYSADLVCKLYSQQLMRQYHKELQEWKDEKVRQEVEFTITDMKVKKRTCCTACEPARKYKTLPPIKNQQSVSRPASWKLQTPKEEVSWPCPQPPSPGMLCLGLTARAHATDYFLANFFSEFPCHFLHRELPKRKAPREESETSEEKSPNKWGPVSKQKKQLLVDILTTIIRGLLEDKNFHEAVDQSLVEQVPYFRQFWNEQSTKFMDQKNSLYLMPILPVPSSSWEDGKGKQPKEDRPEHYPGLGKKEEGEEEKGEEEEEELEEEEEEEEETEEEELGKEEIEEKEEERDEKEEKVSWAGIGPTPQPESQESMQWQWQQQLNVMVKEEQEQDEKEAIRRLPAFANLQEALLENMIQNILVEASRGEVVLTSRPRVIALPPFCVPRSLTPDTLLPTQQAEVLHPVVPLPTDLP

SEQ ID NO: 2663 - protein, 1925 aa, Homo Sapiens; identical to SEQ ID NO: 2662

SEQ ID NO: 2664 - protein, 114 aa, Homo Sapiens
MMLTQAPSSVVRSRNSRNHTVNSGGSCLSASTVAIPAINDSSAAMSACSTISAQPASSMDTQMHSPKKQERVNKRVIWGIEVAEELHWKGWELGKETTRNLVLKNRSLKLQKMK

SEQ ID NO: 2665 - protein, 117 aa, Homo Sapiens
MMLTQAPSSVVRSRNSRNHTVNSGGSCLSASTVAIPAINDSSAAMSACSTISAQPASSMDTQMHSPKKQERVNKRVIWGIEVAEELHWKGWELGKETTRNLVLKNRSLKLQKMKYRP

SEQ ID NO: 2666 - protein, 730 aa, Homo Sapiens
MMLTQAPSSVVRSRNSRNHTVNSGGSCLSASTVAIPAINDSSAAMSACSTISAQPASSMDTQMHSPKKQERVNKRVIWGIEVAEELHWKGWELGKETTRNLVLKNRSLKLQKMKYRPPKTKFFFTVIPQPIFLSPGITLTLPIVFRPLEAKEYMDQLWFEKAEGMFCVGLRATLPCHRLICRPPSLQLPMCAVGDTTEAFFCLDNVGDLPTFFTWEFSSPFQMLPATGLLEPGQASQIKVTFQPLTAVIYEVQATCWYGAGSRQRSSIQLQAVAKCAQLLVSIKHKCPEDQDAEGFQKLLYFGSVAVGCTSERQIRLHNPSAVNAPFRIEISPDELAEDQAFSCPTAHGIVLPGEKKCVSVFFHPKTLDTRTVDYCSIMPSGCASKTLLKVVGFCRGPAVSLQHYCVNFSWVNLGERSEQPLWIENQSDCTAHFQFAIDCLESVFTIRPAFGTLVGKARMTLHCAFQPTHPIICFRRVACLIHHQDPLFLDLMGTCHSDSTKPAILKPQHLTWYRTHLARGLTLYPPDILDAMLKEKKLAQDQNGALMIPIQDLEDMPAPQYPYIPPMTEFFFDGTSDITIFPPPISVEPVEVDFGACPGPEAPNPVPLCLMNHTKGKIMVVWTRRSDCPFWVTPESCDVPPLKSMAMRLHFQPPHPNCLYTVELEAFAIYKVCARNEREECGVSARSLSGLVGWQEVTEGSFRLHPLRARLSLGWTVTPMSLSPPKLLA

SEQ ID NO: 2667 - protein, 164 aa, Homo Sapiens
MMLTQAPSSVVRSRNSRNHTVNSGGSCLSASTVAIPAINDSSAAMSACSTISAQPASSMDTQMHSPKKQERVNKRVIWGIEVAEELHWKGWELGKETTRNLVLKNRSLKLQKMKYRYQYKGSRTQCHSLEPRKQALFKTKQNKQKKPLTCHIKASECLKYVQYE

SEQ ID NO: 2668 - protein, 271 aa, Homo Sapiens
MTLHCAFQPTHPIICFRRVACLIHHQDPLFLDLMGTCHSDSTKPAILKPQHLTWYRTHLARGLTLYPPDILDAMLKEKKLAQDQNGALMIPIQDLEDMPAPQYPYIPPMTEFFFDGTSDITIFPPPISVEPVEVDFGACPGPEAPNPVPLCLMNHTKGKIMVVWTRRSDCPFWVTPESCDVPPLKSMAMRLHFQPPHPNCLYTVELEAFAIYKVCARNEREECGVSARSLSGLVGWQEVTEGSFRLHPLRARLSLGWTVTPMSLSPPKLLA

SEQ ID NO: 2669 - protein, 127 aa, Homo Sapiens
  misc_feature (1)..(1): Xaa can be any naturally occurring amino acid
XKQELCCVSLVAVYPLLSILDVSSMGSAEGITRKHLWRLFSLDLLNSYLERDPTPCELTYKVPTRHSMSQIPPVLTPLRLDFNFGAAPFKAPPSVVFLALKNSGVVSLDWYGLKGATGGPGRQVPRG

SEQ ID NO: 2670 - protein, 144 aa, Homo Sapiens
MGSNLSPQLCLMPFILGLLSGGVTTTPWSLARPQGSCSLEGVEIKGGSFRLLQEGQALEYVCPSGFYPYPVQTRTCRSTGSWSTLKTQDQKTVRKAECRAIHCPRPHDFENGEYWPRSPYYNVSDEISFHCYDGYTLRGSANRT

SEQ ID NO: 2671 - protein, 764 aa, Homo Sapiens
MGSNLSPQLCLMPFILGLLSGGVTTTPWSLARPQGSCSLEGVEIKGGSFRLLQEGQALEYVCPSGFYPYPVQTRTCRSTGSWSTLKTQDQKTVRKAECRAIHCPRPHDFENGEYWPRSPYYNVSDEISFHCYDGYTLRGSANRTCQVNGRWSGQTAICDNGAGYCSNPGIPIGTRKVGSQYRLEDSVTYHCSRGLTLRGSQRRTCQEGGSWSGTEPSCQDSFMYDTPQEVAEAFLSSLTETIEGVDAEDGHGPGEQQKRKIVLDPSGSMNIYLVLDGSDSIGASNFTGAKKCLVNLIEKVASYGVKPRYGLVTYATYPKIWVKVSEADSSNADWVTKQLNEINYEDHKLKSGTNTKKALQAVYSMMSWPDDVPPEGWNRTRHVIILMTDGLHNMGGDPITVIDEIRDLLYIGKDRKNPREDYLDVYVFGVGPLVNQVNINALASKKDNEQHVFKVKDMENLEDVFYQMIDESQSLSLCGMVWEHRKGTDYHKQPWQAKISVIRPSKGHESCMGAVVSEYFVLTAAHCFTVDDKEHSIKVSVGGEKRDLEIEVVLFHPNYNINGKKEAGIPEFYDYDVALIKLKNKLKYGQTIRPICLPCTEGTTRALRLPPTTTCQQQKEELLPAQDIKALFVSEEEKKLTRKEVYIKNGDKKGSCERDAQYAPGYDKVKDISEVVTPRFLCTGGVSPYADPNTCRGDSGGPLIVHKRSRFIQVGVISWGVVDVCKNQKRQKQVPAHARDFHINLFQVLPWLKEKLQDEDLGFL

SEQ ID NO: 2672 - protein, 86 aa, Homo Sapiens
MGSNLSPQLCLMPFILGLLSGVRVSFWLLPVPCADTYLQIYGVLEHPEDSRPKDCQEGRVQSNPLSKTTRLRERGILAPVSLLQCE

SEQ ID NO: 2673 - protein, 305 aa, Homo Sapiens
  misc_feature (1)..(1): Xaa can be any naturally occurring amino acid
XDGLHNMGGDPITVIDEIRDLLYIGKDRKNPREDYLDVYVFGVGPLVNQVNINALASKKDNEQHVFKVKDMENLEDVFYQMIGGEKRDLEIEVVLFHPNYNINGKKEAGIPEFYDYDVALIKLKNKLKYGQTIRPICLPCTEGTTRALRLPPTTTCQQQKEELLPAQDIKALFVSEEEKKLTRKEVYIKNGDKKGSCERDAQYAPGYDKVKDISEVVTPRFLCTGGVSPYADPNTCRGDSGGPLIVHKRSRFIQVGVISWGVVDVCKNQKRQKQVPAHARDFHINLFQVLPWLKEKLQDEDLGFL

SEQ ID NO: 2674 - protein, 68 aa, Homo Sapiens
  misc_feature (1)..(1): Xaa can be any naturally occurring amino acid
XPRFLCTGGVSPYADPNTCRGDSGGPLIVHKRSRFIQVSPPFPIWGDAKWSAWAPKQESSMHVASNSR

SEQ ID NO: 2675 - protein, 148 aa, Homo Sapiens
MTWRHHVRLLFTVSLALQIINLGNSYQREKHNGGREEVTKVATQKHRQSPLNWTSSHFGEVTGSAEGWGPEEPLPYSRAFGEDPKDFLASHAHGPSAGGAPSLLLLLPCALLHRLLRPDAPAHPRSLVPSVLQRERRPCGRPGLGHRL

SEQ ID NO: 2676 - protein, 223 aa, Homo Sapiens
MTWRHHVRLLFTVSLALQIINLGNSYQREKHNGGREEVTKVATQKHRQSPLNWTSSHFGEVTGSAEGWGPEEPLPYSRAFGEGASARPRCCRNGGTCVLGSFCVCPAHFTGRYCEHDQRRSECGALEHGAWTLRACHLCRCIFGALHCLPLQTPDRCDPKDFLASHAHGPSAGGAPSLLLLLPCALLHRLLRPDAPAHPRSLVPSVLQRERRPCGRPGLGHRL

SEQ ID NO: 2677 - protein, 191 aa, Homo Sapiens
MTWRHHVRLLFTVSLALQIINLGNSYQREKHNGGREEVTKVATQKHRQSPLNWTSSHFGEVTGSAEGWGPEEPLPYSRAFGEVNAAPWSTEPGPSAPATSAGASSGPCTASPSRRLTAVTRKTSWPPTLTGRAPGARPACYSCCPAHSCTASCARMRPRTLGPWSLPSSSGSGAPAEGRDLGIAFNFLCCK

SEQ ID NO: 2678 - protein, 148 aa, Homo Sapiens
MTWRHHVRLLFTVSLALQIINLGNSYQREKHNGGREEVTKVATQKHRQSPLNWTSSHFGEVTGSAEGWGPEEPLPYSWAFGEDPKDFLASHAHGPSAGGAPSLLLLLPCALLHRLLRPDAPAHPRSLVPSVLQRERRPCGRPGLGHRL

SEQ ID NO: 2679 - protein, 223 aa, Homo Sapiens
MTWRHHVRLLFTVSLALQIINLGNSYQREKHNGGREEVTKVATQKHRQSPLNWTSSHFGEVTGSAEGWGPEEPLPYSWAFGEGASARPRCCRNGGTCVLGSFCVCPAHFTGRYCEHDQRRSECGALEHGAWTLRACHLCRCIFGALHCLPLQTPDRCDPKDFLASHAHGPSAGGAPSLLLLLPCALLHRLLRPDAPAHPRSLVPSVLQRERRPCGRPGLGHRL

SEQ ID NO: 2680 - protein, 191 aa, Homo Sapiens
MTWRHHVRLLFTVSLALQIINLGNSYQREKHNGGREEVTKVATQKHRQSPLNWTSSHFGEVTGSAEGWGPEEPLPYSWAFGEVNAAPWSTEPGPSAPATSAGASSGPCTASPSRRLTAVTRKTSWPPTLTGRAPGARPACYSCCPAHSCTASCARMRPRTLGPWSLPSSSGSGAPAEGRDLGIAFNFLCCK

SEQ ID NO: 2681 - protein, 253 aa, Homo Sapiens
MHSWERLAVLVLLGAAACAAPPRGRILGGREAEAHARPYMASVQLNGAHLCGGVLVAEQWVLSAAHCLEDAADGKVQVLLGAHSLSQPEPSKRLYDVLRAVPHPDSQPDTIDHDLLLLQLSEKATLGPAVRPLPWQRVDRDVAPGTLCDVAGWGIVNHAGRRPDSLQHVLLPVLDRATCNRRTHHDGAITERLMCAESNRRDSCKGDSGGPLVCGGVLEGVVTSGSRVCGNRKKPGIYTRVASYAAWIDSVLA

SEQ ID NO: 2682 - protein, 260 aa, Homo Sapiens
MHSWERLAVLVLLGAAACGEEAWAWAAPPRGRILGGREAEAHARPYMASVQLNGAHLCGGVLVAEQWVLSAAHCLEDAADGKVQVLLGAHSLSQPEPSKRLYDVLRAVPHPDSQPDTIDHDLLLLQLSEKATLGPAVRPLPWQRVDRDVAPGTLCDVAGWGIVNHAGRRPDSLQHVLLPVLDRATCNRRTHHDGAITERLMCAESNRRDSCKGDSGGPLVCGGVLEGVVTSGSRVCGNRKKPGIYTRVASYAAWIDSVLA

SEQ ID NO: 2683 - protein, 299 aa, Homo Sapiens
MEEFDSEDFSTSEEDEDYVPSGGEYSEDDVNELVKEDEVDGEEQTQKTQGKKRKAQSIPARKRRQGGLSLEEEEEEDANSESEGSSSEEEDDAAEQEKGIGSEDARKKKEDELWASFLNDVGPKSKVPPSTQVKKGEETEETSSSKLLVKAEELEKPKETEKVKITKVFDFAGEEVRVTKEVDATSKEAKSFFKQNEKEKPQANVPSALPSLPAGSGLKRSSGMSSLLGKIGAKKQKMSTLEKSKLDWESFKEEEGIGEELAIHNRGKEGYIERKAFLDRVDHRQFEIERDLRLSKMKP

SEQ ID NO: 2684 - protein, 50 aa, Homo Sapiens
MSRRPAYCSLQFLGSSDPPASASPVDGTTGGEYSEDDVNELVKEDEVDGE

SEQ ID NO: 2685 - protein, 19 aa, Homo Sapiens
QANVPSALPSLPAGSGCVI

SEQ ID NO: 2686 - protein, 17 aa, Homo Sapiens
  misc_feature (1)..(1): Xaa can be any naturally occurring amino acid
XALPSLPAGSGKKKFDA

SEQ ID NO: 2687 - protein, 385 aa, Homo Sapiens
MRLLAKIICLMLWAICVAEDCNELPPRRNTEILTGSWSDQTYPEGTQAIYKCRPGYRSLGNVIMVCRKGEWVALNPLRKCQKRPCGHPGDTPFGTFTLTGGNVFEYGVKAVYTCNEGYQLLGEINYRECDTDGWTNDIPICEEISCKSPDVINGSPISQKIIYKENERFQYKCNMGYEYSERGDAVCTESGWRPLPSCEEKSCDNPYIPNGDYSPLRIKHRTGDEITYQCRNGFYPATRGNTAKCTSTGWIPAPRCTLKPCDYPDIKHGGLYHENMRRPYFPVAVGKYYSYYCDEHFETPSGSYWDHIHCTQDGWSPAVPCLRKCYFPYLENGYNQNHGRKFVQGKSIDVACHPGYALPKAQTTVTCMENGWSPTPRCIRVSFTL

SEQ ID NO: 2688 - protein, 1231 aa, Homo Sapiens
MRLLAKIICLMLWAICVAEDCNELPPRRNTEILTGSWSDQTYPEGTQAIYKCRPGYRSLGNVIMVCRKGEWVALNPLRKCQKRPCGHPGDTPFGTFTLTGGNVFEYGVKAVYTCNEGYQLLGEINYRECDTDGWTNDIPICEVVKCLPVTAPENGKIVSSAMEPDREYHFGQAVRFVCNSGYKIEGDEEMHCSDDGFWSKEKPKCVEISCKSPDVINGSPISQKIIYKENERFQYKCNMGYEYSERGDAVCTESGWRPLPSCEEKSCDNPYIPNGDYSPLRIKHRTGDEITYQCRNGFYPATRGNTAKCTSTGWIPAPRCTLKPCDYPDIKHGGLYHENMRRPYFPVAVGKYYSYYCDEHFETPSGSYWDHIHCTQDGWSPAVPCLRKCYFPYLENGYNQNHGRKFVQGKSIDVACHPGYALPKAQTTVTCMENGWSPTPRCIRVKTCSKSSIDIENGFISESQYTYALKEKAKYQCKLGYVTADGETSGSITCGKDGWSAQPTCIKSCDIPVFMNARTKNDFTWFKLNDTLDYECHDGYESNTGSTTGSIVCGYNGWSDLPICYERECELPKIDVHLVPDRKKDQYKVGEVLKFSCKPGFTIVGPNSVQCYHFGLSPDLPICKEQVQSCGPPPELLNGNVKEKTKEEYGHSEVVEYYCNPRFLMKGPNKIQCVDGEWTTLPVCIVEESTCGDIPELEHGWAQLSSPPYYYGDSVEFNCSESFTMIGHRSITCIHGVWTQLPQCVAIDKLKKCKSSNLIILEEHLKNKKEFDHNSNIRYRCRGKEGWIHTVCINGRWDPEVNCSMAQIQLCPPPPQIPNSHNMTTTLNYRDGEKVSVLCQENYLIQEGEEITCKDGRWQSIPLCVEKIPCSQPPQIEHGTINSSRSSQESYAHGTKLSYTCEGGFRISEENETTCYMGKWSSPPQCEGLPCKSPPEISHGVVAHMSDSYQYGEEVTYKCFEGFGIDGPAIAKCLGEKWSHPPSCIKTDCLSLPSFENAIPMGEKKDVYKAGEQVTYTCATYYKMDGASNVTCINSRWTGRPTCRDTSCVNPPTVQNAYIVSRQMSKYPSGERVRYQCRSPYEMFGDEEVMCLNGNWTEPPQCKDSTGKCGPPPPIDNGDITSFPLSVYAPASSVEYQCQNLYQLEGNKRITCRNGQWSEPPKCLHPCVISREIMENYNIALRWTAKQKLYSRTGESVEFVCKRGYRLSSRSHTLRTTCWDGKLEYPTCAKR

SEQ ID NO: 2689 - protein, 449 aa, Homo Sapiens
MRLLAKIICLMLWAICVAEDCNELPPRRNTEILTGSWSDQTYPEGTQAIYKCRPGYRSLGNVIMVCRKGEWVALNPLRKCQKRPCGHPGDTPFGTFTLTGGNVFEYGVKAVYTCNEGYQLLGEINYRECDTDGWTNDIPICEVVKCLPVTAPENGKIVSSAMEPDREYHFGQAVRFVCNSGYKIEGDEEMHCSDDGFWSKEKPKCVEISCKSPDVINGSPISQKIIYKENERFQYKCNMGYEYSERGDAVCTESGWRPLPSCEEKSCDNPYIPNGDYSPLRIKHRTGDEITYQCRNGFYPATRGNTAKCTSTGWIPAPRCTLKPCDYPDIKHGGLYHENMRRPYFPVAVGKYYSYYCDEHFETPSGSYWDHIHCTQDGWSPAVPCLRKCYFPYLENGYNQNHGRKFVQGKSIDVACHPGYALPKAQTTVTCMENGWSPTPRCIRVSFTL

SEQ ID NO: 2690 - protein, 271 aa, Homo Sapiens
MWLLVSVILISRISSVGGEATFCDFPKINHGILYDEEKYKPFSQVPTGEVFYYSCEYNFVSPSKSFWTRITCTEEGWSPTPKCLRLCFFPFVENGHSESSGQTHLEGDTVQIICNTGYRLQNNENNISCVERGWSTPPKCRSTDSTGKCGPPPPIDNGDITSFPLSVYAPASSVEYQCQNLYQLEGNKRITCRNGQWSEPPKCLHPCVISREIMENYNIALRWTAKQKLYLRTGESAEFVCKRGYRLSSRSHTLRTTCWDGKLEYPTCAKR

SEQ ID NO: 2691 - protein, 330 aa, Homo Sapiens
MWLLVSVILISRISSVGGEATFCDFPKINHGILYDEEKYKPFSQVPTGEVFYYSCEYNFVSPSKSFWTRITCTEEGWSPTPKCLRLCFFPFVENGHSESSGQTHLEGDTVQIICNTGYRLQNNENNISCVERGWSTPPKCRSTDTSCVNPPTVQNAHILSRQMSKYPSGERVRYECRSPYEMFGDEEVMCLNGNWTEPPQCKDSTGKCGPPPPIDNGDITSFPLSVYAPASSVEYQCQNLYQLEGNKRITCRNGQWSEPPKCLHPCVISREIMENYNIALRWTAKQKLYLRTGESAEFVCKRGYRLSSRSHTLRTTCWDGKLEYPTCAKR

SEQ ID NO: 2692 - protein, 270 aa, Homo Sapiens; identical to SEQ ID NO: 1650

SEQ ID NO: 2693 - protein, 254 aa, Homo Sapiens
MWLLVSVILISRISSVGGEAMFCDFPKINHGILYDEEKYKPFSQVPTGEVFYYSCEYNFVSPSKSFWTRITCAEEGWSPTPKCLRQTHLEGDTVQIICNTGYRLQNNENNISCVERGWSTPPKCRSTISAEKCGPPPPIDNGDITSFLLSVYAPGSSVEYQCQNLYQLEGNNQITCRNGQWSEPPKCLDPCVISQEIMEKYNIKLKWTNQQKLYSRTGDIVEFVCKSGYHPTKSHSFRAMCQNGKLVYPSCEEK

SEQ ID NO: 2694 - protein, 269 aa, Homo Sapiens
MLLLINVILTLWVSCANGQVKPCDFPDIKHGGLFHENMRRPYFPVAVGKYYSYYCDEHFETPSGSYWDYIHCTQNGWSPAVPCLRKCYFPYLENGYNQNYGRKFVQGNSTEVACHPGYGLPKAQTTVTCTEKGWSPTPRCIRVNSSEKCGPPPPISNGDTTSFLLKVYVPQSRVEYQCQPYYELQGSNYVTCSNGEWSEPPRCIHPCIITEENMNKNNIKLKGRSDRKYYAKTGDTIEFMCKLGYNANTSILSFQAVCREGIVEYPRCE

SEQ ID NO: 2695 - protein, 195 aa, Homo Sapiens
MLLLINVILTLWVSCANGQVKPCDFPDIKHGGLFHENMRRPYFPVAVGKYYSYYCDEHFETPSGSYWDYIHCTQNGWSPAVPCLRKCYFPYLENGYNQNYGRKFVQGNSTEVACHPGYGLPKAQTTVTCTEKGWSPTPRCIRVRTCSKSDIEIENGFISESSSIYILNKEIQYKCKPGYATADGNSSDMVFCISY

SEQ ID NO: 2696 - protein, 330 aa, Homo Sapiens
MLLLINVILTLWVSCANGQVKPCDFPDIKHGGLFHENMRRPYFPVAVGKYYSYYCDEHFETPSGSYWDYIHCTQNGWSPAVPCLRKCYFPYLENGYNQNYGRKFVQGNSTEVACHPGYGLPKAQTTVTCTEKGWSPTPRCIRVRTCSKSDIEIENGFISESSSIYILNKEIQYKCKPGYATADGNSSGSITCLQNGWSAQPICINSSEKCGPPPPISNGDTTSFLLKVYVPQSRVEYQCQPYYELQGSNYVTCSNGEWSEPPRCIHPCIITEENMNKNNIKLKGRSDRKYYAKTGDTIEFMCKLGYNANTSILSFQAVCREGIVEYPRCE

SEQ ID NO: 2697 - protein, 232 aa, Homo Sapiens
MLLLINVILTLWVSCANGQVKPCDFPDIKHGGLFHENMRRPYFPVAVGKYYSYYCDEHFETPSGSYWDYIHCTQNGWSPAVPCLRKCYFPYLENGYNQNYGRKFVQGNSTEVACHPGYGLPKAQTTVTCTEKGWSPTPRCIRVRTCSKSDIEIENGFISESSSIYILNKEIQYKCKPGYATADGNSSGSITCLQNGWSAQPICITACIAFRAHAQKSCTCRGRNECLILNFC

SEQ ID NO: 2698 - protein, 232 aa, Homo Sapiens; identical to SEQ ID NO: 2697

SEQ ID NO: 2699 - protein, 201 aa, Homo Sapiens
MENGWSPPCRCIRVRTCSKSDIEIENGFISESSSIYILNKEIQYKCKPGYATADGNSSGSITCLQNGWSAQPICINSSEKCGPPPPISNGDTTSFLLKVYVPQSRVEYQCQSYYELQGSNYVTCSNGEWSEPPRCIHPCIITEENMNKNNIQLKGKSDIKYYAKTGDTIEFMCKLGYNANTSVLSFQAVCREGIVEYPRCE

SEQ ID NO: 2700 - protein, 331 aa, Homo Sapiens
MLLLINVILTLWVSCANGQEVKPCDFPEIQHGGLYYKSLRRLYFPAAAGQSYSYYCDQNFVTPSGSYWDYIHCTQDGWLPTVPCLRTCSKSDIEIENGFISESSSIYILNKEIQYKCKPGYATADGNSSGSITCLQNGWSAQPICIKFCDMPVFENSRAKSNGMRFKLHDTLDYECYDGYEISYGNTTGSIVCGEDGWSHFPTCYNSSEKCGPPPPISNGDTTSFLLKVYVPQSRVEYQCQSYYELQGSNYVTCSNGEWSEPPRCIHPCIITEENMNKNNIQLKGKSDIKYYAKTGDTIEFMCKLGYNANTSVLSFQAVCREGIVEYPRCE

SEQ ID NO: 2701 - protein, 331 aa, Homo Sapiens
MLLLINVILTLWVSCANGQEVKPCDFPEIQHGGLYYKSLRRLYFPAAAGQSYSYYCDQNFVTPSGSYWDYIHCTQDGWSPTVPCLRTCSKSDIEIENGFISESSSIYILNKEIQYKCKPGYATADGNSSGSITCLQNGWSAQPICIKFCDMPVFENSRAKSNGMRFKLHDTLDYECYDGYEISYGNTTGSIVCGEDGWSHFPTCYNSSEKCGPPPPISNGDTTSFLLKVYVPQSRVEYQCQSYYELQGSNYVTCSNGEWSEPPRCIHPCIITEENMNKNNIQLKGKSDIKYYAKTGDTIEFMCKLGYNANTSVLSFQAVCREGIVEYPRCE

SEQ ID NO: 2702 - protein, 577 aa, Homo Sapiens
MLLLINVILTLWVSCANGQVKPCDFPEIQHGGLYYKSLRRLYFPAAAGQSYSYYCDQNFVTPSGSYWDYIHCTQDGWSPTVPCLRTCSKSDVEIENGFISESSSIYILNEETQYNCKPGYATAEGNSSGSITCLQNGWSTQPICIKFCDMPVFENSRAKSNGMWFKLHDTLDYECYDGYESSYGNTTDSIVCGEDGWSHLPTCYNSSENCGPPPPISNGDTTSFPQKVYLPWSRVEYQCQSYYELQGSKYVTCSNGDWSEPPRCISMKPCEFPEIQHGHLYYENTRRPYFPVATGQSYSYYCDQNFVTPSGSYWDYIHCTQDGWLPTVPCLRTCSKSDIEIENGFISESSSIYILNKEIQYKCKPGYATADGNSSGSITCLQNGWSAQPICIKFCDMPVFENSRAKSNGMRFKLHDTLDYECYDGYEISYGNTTGSIVCGEDGWSHFPTCYNSSEKCGPPPPISNGDTTSFLLKVYVPQSRVEYQCQSYYELQGSNYVTCSNGEWSEPPRCIHPCIITEENMNKNNIQLKGKSDIKYYAKTGDTIEFMCKLGYNANTSVLSFQAVCREGIVEYPRCE

SEQ ID NO: 2703 - protein, 569 aa, Homo Sapiens
MLLLFSVILISWVSTVGGEGTLCDFPKIHHGFLYDEEDYNPFSQVPTGEVFYYSCEYNFVSPSKSFWTRITCTEEGWSPTPKCLRMCSFPFVKNGHSESSGLIHLEGDTVQIICNTGYSLQNNEKNISCVERGWSTPPICSFTKGECHVPILEANVDAQPKKESYKVGDVLKFSCRKNLIRVGSDSVQCYQFGWSPNFPTCKGQVRSCGPPPQLSNGEVKEIRKEEYGHNEVVEYDCNPNFIINGPKKIQCVDGEWTTLPTCVEQVKTCGYIPELEYGYVQPSVPPYQHGVSVEVNCRNEYAMIGNNMITCINGIWTELPMCVATHQLKRCKIAGVNIKTLLKLSGKEFNHNSRIRYRCSDIFRYRHSVCINGKWNPEVDCTEKREQFCPPPPQIPNAQNMTTTVNYQDGEKVAVLCKENYLLPEAKEIVCKDGRWQSLPRCVESTAYCGPPPSINNGDTTSFPLSVYPPGSTVTYRCQSFYKLQGSVTVTCRNKQWSEPPRCLDPCVVSEENMNKNNIQLKWRNDGKLYAKTGDAVEFQCKFPHKAMISSPPFRAICQEGKFEYPICE

SEQ ID NO: 2704 - protein, 161 aa, Homo Sapiens
MKLLHVFLLFLCFHLRFCKVTYTSQEDLVEKKCLAKKYTHLSCDKVFCQPWQRCIEGTCVCKLPYQCPKNGTAVCATNRRSFPTYCQQKSLECLHPGTKFLNNGTCTAEGKFSVSLKHGNTDSEGIVEVKLVDQDKTMFICKSSWSMREANVACLDLGFQQ

SEQ ID NO: 2705 - protein, 591 aa, Homo Sapiens
MKLLHVFLLFLCFHLRFCKVTYTSQEDLVEKKCLAKKYTHLSCDKVFCQPWQRCIEGTCVCKLPYQCPKNGTAVCATNRRSFPTYCQQKSLECLHPGTKFLNNGTCTAEGKFSVSLKHGNTDSEGIVEVKLVDQDKTMFICKSSWSMREANVACLDLGFQQGADTQRRFKLSDLSINSTECLHVHCRGLETSLAECTFTKRRTMGYQDFADVVCYTQKADSPMDDFFQCVNGKYISQMKACDGINDCGDQSDELCCKACQGKGFHCKSGVCIPSQYQCNGEVDCITGEDEVGCAAARHPTIQGFASVTQEETEILTADMDAERRRIKSLLPKLSCGVKNRMHIRRKRIVGGKRAQLGDLPWQVAIKDASGITCGGIYIGGCWILTAAHCLRASKTHRYQIWTTVVDWIHPDLKRIVIEYVDRIIFHENYNAGTYQNDIALIEMKKDGNKKDCELPRSIPACVPWSPYLFQPNDTCIVSGWGREKDNERVFSLQWGEVKLISNCSKFYGNRFYEKEMECAGTYDGSIDACKGDSGGPLVCMDANNVTYVWGVVSWGENCGKPEFPGVYTKVANYFDWISYHVGRPFISQYNV

SEQ ID NO: 2706 - protein, 583 aa, Homo Sapiens
MKLLHVFLLFLCFHLRFCKVTYTSQEDLVEKKCLAKKYTHLSCDKVFCQPWQRCIEGTCVCKLPYQCPKNGTAVCATNRRSFPTYCQQKSLECLHPGTKFLNNGTCTAEGKFSVSLKHGNTDSEGIVEVKLVDQDKTMFICKSSWSMREANVACLDLGFQQGADTQRRFKLSDLSINSTECLHVHCRGLETSLAECTFTKRRTMGYQDFADVVCYTQKADSPMDDFFQCVNGKYISQMKACDGINDCGDQSDELCCKACQGKGFHCKSGVCIPSQYQCNGEVDCITGEDEVGCAGFASVTQEETEILTADMDAERRRIKSLLPKLSCGVKNRMHIRRKRIVGGKRAQLGDLPWQVAIKDASGITCGGIYIGGCWILTAAHCLRASKTHRYQIWTTVVDWIHPDLKRIVIEYVDRIIFHENYNAGTYQNDIALIEMKKDGNKKDCELPRSIPACVPWSPYLFQPNDTCIVSGWGREKDNERVFSLQWGEVKLISNCSKFYGNRFYEKEMECAGTYDGSIDACKGDSGGPLVCMDANNVTYVWGVVSWGENCGKPEFPGVYTKVANYFDWISYHVGRPFISQYNV

SEQ ID NO: 2707 - protein, 576 aa, Homo Sapiens
MKLLHVFLLFLCFHLRFCKVTYTSQEDLVEKKCLAKKYTHLSCDKVFCQPWQRCIEGTCVCKLPYQCPKNGTAVCATNRRSFPTYCQQKSLECLHPGTKFLNNGTCTAEGKFSVSLKHGNTDSEGIVEVKLVDQDKTMFICKSSWSMREANVACLDLGFQQGADTQRRFKLSDLSINSTECLHVHCRGLETSLAECTFTKRRTMGYQDFADVVCYTQKADSPMDDFFQCVNGKYISQMKACDGINDCGDQSDELCCKACQGKGFHCKSGVCIPSQYQCNGEVDCITGEDEVGCAEETEILTADMDAERRRIKSLLPKLSCGVKNRMHIRRKRIVGGKRAQLGDLPWQVAIKDASGITCGGIYIGGCWILTAAHCLRASKTHRYQIWTTVVDWIHPDLKRIVIEYVDRIIFHENYNAGTYQNDIALIEMKKDGNKKDCELPRSIPACVPWSPYLFQPNDTCIVSGWGREKDNERVFSLQWGEVKLISNCSKFYGNRFYEKEMECAGTYDGSIDACKGDSGGPLVCMDANNVTYVWGVVSWGENCGKPEFPGVYTKVANYFDWISYHVGRPFISQYNV

SEQ ID NO: 2708 - protein, 378 aa, Homo Sapiens
MKLLHVFLLFLCFHLRFCKVTYTSQEDLVEKKCLAKKYTHLSCDKVFCQPWQRCIEGTCVCKLPYQCPKNGTAVCATNRRSFPTYCQQKSLECLHPGTKFLNNGTCTAEGKFSVSLKHGNTDSEGIVEVKLVDQDKTMFICKSSWSMREANVACLDLGFQQGADTQRRFKLSDLSINSTECLHVHCRGLETSLAECTFTKRRTMGYQDFADVVCYTQKADSPMDDFFQCVNGKYISQMKACDGINDCGDQSDELCCKACQGKGFHCKSGVCIPSQYQCNGEVDCITGEDEVGCAGFASVTQEETEILTADMDAERRRIKSLLPKLSCGVKNRMHIRRKRIVGGKRAQLGGKMKQISLDIFKGLHRVYAILEFCCIILK

SEQ ID NO: 2709 - protein, 167 aa, Homo Sapiens
MGGWSGWGPWEPCSVTCSKGTRTRRRACNHPAPKCGGHCPGQAQESEACDTQQVCPTHGAWATWGPWTPCSASCHGGPHEPKETRSRKCSAPEPSQKPPGKPCPGLAYEQRRCTGLPPCPVAGGWGPWGPVSPCPVTCGLGQTMEQRTCNHPVPQHGGPFCAGDATR

SEQ ID NO: 2710 - protein, 469 aa, Homo Sapiens
MITEGAQAPRLLLPPLLLLLTLPATGSDPVLCFTQYEESSGKCKGLLGGGVSVEDCCLNTAFAYQKRSGGLCQPCRSPRWSLWSTWAPCSVTCSEGSQLRYRRCVGWNGQCSGKVAPGTLEWQLQACEDQQCCPEMGGWSGWGPWEPCSVTCSKGTRTRRRACNHPAPKCGGHCPGQAQESEACDTQQVCPTHGAWATWGPWTPCSASCHGGPHEPKETRSRKCSAPEPSQKPPGKPCPGLAYEQRRCTGLPPCPVAGGWGPWGPVSPCPVTCGLGQTMEQRTCNHPVPQHGGPFCAGDATRTHICNTAVPCPVDGEWDSWGEWSPCIRRNMKSISCQEIPGQQSRGRTCRGRKFDGHRCAGQQQDIRHCYSIQHCPLKGSWSEWSTWGLCMPPCGPNPTRARQRLCTPLLPKYPPTVSMVEGQGEKNVTFWGRPLPRCEELQGQKLVVEEKRPCLHVPACKDPEEEEL

SEQ ID NO: 2711 - protein, 415 aa, Homo Sapiens
MITEGAQAPRLLLPPLLLLLTLPATGSDPVLCFTQYEESSGKCKGLLGGGVSVEDCCLNTAFAYQKRSGGLCQPCRSPRWSLWSTWAPCSVTCSEGSQLRYRRCVGWNGQCSGKVAPGTLEWQLQACEDQQCCPEMGGWSGWGPWEPCSVTCSKGTRTRRRACNHPAPKCGGHCPGQAQESEACDTQQVCPTHGAWATWGPWTPCSASCHGGPHEPKETRSRKCSAPEPSQKPPGKPCPGLAYEQRRCTGLPPCPVAGGWGPWGPVSPCPVTCGLGQTMEQRTCNHPVPQHGGPFCAGDATRTHICNTAVPCPVDGEWDSWGEWSPCIRRNMKSISCQEIPGQQSRGRTCRGRKFDGHRCAGQQQDIRHCYSIQHCPLKGSWSEWSTWGLCMPPCGPNPTRARQRLCTPLLPKYP

SEQ ID NO: 2712 - protein, 469 aa, Homo Sapiens; identical to SEQ ID NO: 2710

SEQ ID NO: 2713 - protein, 62 aa, Homo Sapiens
MDYYRKYAAIFLVTLSVFLHVLHSAPDVQDCPECTLQENPFFSQPGAPILQCMGCCFSRAYP

SEQ ID NO: 2714 - protein, 101 aa, Homo Sapiens
MDYYRKYAAIFLVTLSVFLHVLHSAPDVQDCPECTLQENPFFSQPGAPILQCMGCCFSRAYPTPLRSKKTMLVQKNVTSESTCCVAKSYNRVRTSRSPEAF

SEQ ID NO: 2715 - protein, 116 aa, Homo Sapiens
MDYYRKYAAIFLVTLSVFLHVLHSAPDVQDCPECTLQENPFFSQPGAPILQCMGCCFSRAYPTPLRSKKTMLVQKNVTSESTCCVAKSYNRVTVMGGFKVENHTACHCSTCYYHKS

SEQ ID NO: 2716 - protein, 147 aa, Homo Sapiens
MDYYRKYAAIFLVTLSVFLHVLHSAPDVQETGFHHVAQAALKLLSSSNPPTKASQSARITDCPECTLQENPFFSQPGAPILQCMGCCFSRAYPTPLRSKKTMLVQKNVTSESTCCVAKSYNRVTVMGGFKVENHTACHCSTCYYHKS

SEQ ID NO: 2717 - protein, 116 aa, Homo Sapiens
MQLSFWSHCRCFCMFSIPLLMCRVRDQICDCPECTLQENPFFSQPGAPILQCMGCCFSRAYPTPLRSKKTMLVQKNVTSESTCCVAKSYNRVTVMGGFKVENHTACHCSTCYYHKS

SEQ ID NO: 2718 - protein, 130 aa, Homo Sapiens; identical to SEQ ID NO: 74

SEQ ID NO: 2719 - protein, 155 aa, Homo Sapiens
MSKRLLLLLLLSMGGTWASKEPLRPRCRPINATLAVEKEGCPVCITVNTTICAGYCPTMTRVLQGVLPALPQVVCNYRDVRFESIRLPGCPRGVNPVVSYAVALSCQCALCRRSTTDCGGPKDHPLTCDDPRFQDSSSSKAPPPSLPSPSRLPGP

SEQ ID NO: 2720 - protein, 130 aa, Homo Sapiens
MGGTWASKEPLRPRCRPINATLAVEKEGCPVCITVNTTICAGYCPTMTRVLQGVLPALPQVVCNYRDVRFESIRLPGCPRGVNPVVSYAVALSCQCALCRRSTTDCGGPKDHPLTCDDPRFQASSSSKAP

SEQ ID NO: 2721 - protein, 163 aa, Homo Sapiens
MSKGLLLLLLLSMGGTWASKEPLRPRCRPINATLAVEKEGCPVCITVNTTICAGYCPTMTRVLQGVLPALPQVVCNYRDVRFESIRLPGCPRGVNPVVSYAVALSCQCALCRRSTTDCGGPKDHPLTCDDPRFQASSSSKAPPPSLPSPSRLPGPSDTPILPQ

SEQ ID NO: 2722 - protein, 165 aa, Homo Sapiens
MEMFQGLLLLLLLSMGGTWASKEPLRPRCRPINATLAVEKEGCPVCITVNTTICAGYCPTMTRVLQGVLPALPQVVCNYRDVRFESIRLPGCPRGVNPVVSYAVALSCQCALCRRSTTDCGGPKDHPLTCDDPRFQDSSSSKAPPPSLPSPSRLPGPSDTPILPQ

SEQ ID NO: 2723 - protein, 165 aa, Homo Sapiens; identical to SEQ ID NO: 2722

SEQ ID NO: 2724 - protein, 165 aa, Homo Sapiens
MEMFQGLLLLLLLSMGGTWASREMLRPRCRPINATLAVEKEGCPVCITVNTTICAGYCPTMTRVLQGVLPALPQVVCNYRDVRFESIRLPGCPRGVNPVVSYAVALSCQCALCRRSTTDCGGPKDHPLTCDDPRFQASSSSKAPPPSLPSPSRLPGPSDTPILPQ

SEQ ID NO: 2725 - protein, 165 aa, Homo Sapiens; identical to SEQ ID NO: 2724

SEQ ID NO: 2726 - protein, 165 aa, Homo Sapiens; identical to SEQ ID NO: 2724

SEQ ID NO: 2727 - protein, 165 aa, Homo Sapiens; identical to SEQ ID NO: 2722

SEQ ID NO: 2728 - protein, 132 aa, Homo Sapiens
MLPLTMTVLILLLLPTGQAAPKDGVTRPDSEVQHQLLPNPFQPGQEQLGLLQSYLKGLGRTEVQLEHLSREQVLLYLFALHDYDQSGQLDGLELLSMLTAALAPGAANSPTTNPGNLDARLDGGEKAMQPQW

SEQ ID NO: 2729 - protein, 301 aa, Homo Sapiens
MLPLTMTVLILLLLPTGQAAPKDGVTRPDSEVQHQLLPNPFQPGQEQLGLLQSYLKGLGRTEVQLEHLSREQVLLYLFALHDYDQSGQLDGLELLSMLTAALAPGAANSPTTNPVILIVDKVLETQDLNGDGLMTPAELINFPGVALRHVEPGEPLAPSPQEPQAVGRQSLLAKSPLRQETQEAPGPREEAKGQVEARRESLDPVQEPGGQAEADGDVPGPRGEAEGQAEAKGDAPGPRGEAGGQAEAEGDAPGPRGEAGGQAEARENGEEAKELPGETLESKNTQNDFEVHIVQVENDEI

SEQ ID NO: 2730 - protein, 318 aa, Homo Sapiens
MLPLTMTVLILLLLPTGQAAPKDGVTRPDSEVQHQLLPNPFQPGQEQLGLLQSYLKGLGRTEVQLEHLSREQVLLYLFALHDYDQSGQLDGLELLSMLTAALAPGAANSPTTNPVILIVDKVLETQDLNGDGLMTPAELINFPGVALRHVEPGEPLAPSPQEPQAVGRQSLLAKSPLRQETQEAPGPREEAKGQVEARRESLDPVQEPGGQAEADGDVPGPRGEAEGQAEAKGDAPGPRGEAGGQAEAEGDAPGPRGEAGGQAEAEGDAPGPRGEAGGQAEARENGEEAKELPGETLESKNTQNDFEVHIVQVENDEI

SEQ ID NO: 2731 - protein, 318 aa, Homo Sapiens; identical to SEQ ID NO: 2730

SEQ ID NO: 2732 - protein, 318 aa, Homo Sapiens; identical to SEQ ID NO: 2730

SEQ ID NO: 2733 - protein, 57 aa, Homo Sapiens
MLPLTMTVLILLLLPTGQAAPKDGVTRPDSEVQHQLLPNPFQPGQEQLGSPLPLCPP

SEQ ID NO: 2734 - protein, 112 aa, Homo Sapiens
MLTAALAPGAANSPTTNPVILIVDKVLETQDLNGDGLMTPAELINFPGVALRPYPPYIGVGPNSNMCSRSDLPEDSNTLYPGSHLWLRHALNSKGNLDARLDGGEKAMQPQW

SEQ ID NO: 2735 - protein, 440 aa, Homo Sapiens
MNGLKEVRYACAVLLWAPWHLVGSKGMGRGVGMRPQLCFRHSRPAFMCFIYKSWSDIYFEHSSMGSLLSVCESSLSRSPVFGAAGRSRQKMRLCLTQPICDTVADASFPRPLILFLVPVPGRMLPLTMTVLILLLLPTGQAAPKDGVTRPDSEVQHQLLPNPFQPGQEQLGLLQSYLKGLGRTEVQLEHLSREQVLLYLFALHDYDQSGQLDGLELLSMLTAALAPGAANSPTTNPVILIVDKVLETQDLNGDGLMTPAELINFPGVALRHVEPGEPLAPSPQEPQAVGRQSLLAKSPLRQETQEAPGPREEAKGQVEARRESLDPVQEPGGQAEADGDVPGPRGEAEGQAEAKGDAPGPRGEAGGQAEAEGDAPGPRGEAGGQAEAEGDAPGPRGEAGGQAEARENGEEAKELPGETLESKNTQNDFEVHIVQVENDEI

SEQ ID NO: 2736 - protein, 359 aa, Homo Sapiens
MVRPMLLLSLGLLAGLLPALAACPQNCHCHSDLQHVICDKVGLQKIPKVSEKTKLLNLQRNNFPVLAANSFRAMPNLVSLHLQHCQIREVAAGAFRGLKQLIYLYLSHNDIRVLRAGAFDDLTELTYLYLDHNKVTELPRGLLSPLVNLFILQLNNNKIRELRAGAFQGAKDLRWLYLSENALSSLQPGALDDVENLAKFHVDRNQLSSYPSAALSKLRVVEELKLSHNPLKSIPDNAFQSFGRYLETLWLDNTNLEKFSDGAFLGVTTLKHVHLENNRLNQLPSNFPFDSLETLALTNNPWKCTCQLRGLRRWLEAKASRPDATCASPAKFKGQHIRDTDAFRSCKFPTKRSKKAGRH

SEQ ID NO: 2737 - protein, 359 aa, Homo Sapiens; identical to SEQ ID NO: 2736

SEQ ID NO: 2738 - protein, 42 aa, Homo Sapiens
  misc_feature (1)..(1): Xaa can be any naturally occurring amino acid
XASRPDATCASPAKFKGQHIRDTDAFRSCKFPTKRSKKAGRH

SEQ ID NO: 2739 - protein, 762 aa, Homo Sapiens
MEGPRSSTHVPLVLPLLVLLLLAPARQAAAQRCPQACICDNSRRHVACRYQNLTEVPDAIPELTQRLDLQGNLLKVIPAAAFQGVPHLTHLDLRHCEVELVAEGAFRGLGRLLLLNLASNHLRELPQEALDGLGSLRRLELEGNALEELRPGTFGALGALATLNLAHNALVYLPAMAFQGLLRVRWLRLSHNALSVLAPEALAGLPALRRLSLHHNELQALPGPVLSQARGLARLELGHNPLTYAGEEDGLALPGLRELLLDGGALQALGPRAFAHCPRLHTLDLRGNQLDTLPPLQGPGQLRRLRLQGNPLWCGCQARPLLEWLARARVRSDGACQGPRRLRGEALDALRPWDLRCPGDAAQEEEELEERAVAGPRAPPRGPPRGPGEERAVAPCPRACVCVPESRHSSCEGCGLQAVPRGFPSDTQLLDLRRNHFPSVPRAAFPGLGHLVSLHLQHCGIAELEAGALAGLGRLIYLYLSDNQLAGLSAAALEGAPRLGYLYLERNRFLQVPGAALRALPSLFSLHLQDNAVDRLAPGDLGRTRALRWVYLSGNRITEVSLGALGPARELEKLHLDRNQLREVPTGALEGLPALLELQLSGNPLRALRDGAFQPVGRSLQHLFLNSSGLEQICPGAFSGLGPGLQSLHLQKNQLRALPALPSLSQLELIDLSSNPFHCDCQLLPLHRWLTGLNLRVGATCATPPNARGQRVKAAAAVFEDCPGWAARKAKRTPASRPSARRTPIKGRQCGADKVGKEKGRL

SEQ ID NO: 2740 - protein, 253 aa, Homo Sapiens [sequence omitted]

SEQ ID NO: 2741 - protein, 684 aa, Homo Sapiens
  misc_feature (1)..(1): Xaa can be any naturally occurring amino acid
XPRSSTHVPLVLPLLVLLLLAPARQAAAQRCPQACICDNSRRHVACRYQNLTEVPDAIPELTQRLDLQGNLLKVIPAAAFQGVPHLTHLDLRHCEVELVAEGAFRGLGRLLLLNLASNHLRELPQEALDGLGSLRRLELEGNALEELRPGTFGALGALATLNLAHNALVYLPAMAFQGLLRVRWLRLSHNALSVLAPEALAGLPALRRLSLHHNELQALPGPVLSQARGLARLELGHNPLTYAGEEDGLALPGLRELLLDGGALQALGPRAFAHCPRLHTLDLRGNQLDTLPPLQGPGQLRRLRLQGNPLWCGCQARPLLEWLARARVRSDGACQGPRRLRGEALDALRPWDLRCPGDAAQEEEELEERAVAGPRAPPRGPPRGPGEERAVAPCPRACVCVPESRHSSCEGCGLQAVPRGFPSDTQLLDLRRNHFPSVPRAAFPGLGHLVSLHLQHCGIAELEAGALAGLGRLIYLYLSDNQLAGLSAAALEGAPRLGYLYLERNRFLQVPGAALRALPSLFSLHLQDNAVDRLAPGDLGRTRALRWVYLSGNRITEVSLGALGPARELEKLHLDRNQLREVPTGALEGLPALLELQLSGNPLRALRDGAFQPVGRSLQHLFLNSSGLEQICPGAFSGLGPGLQSLHLQKNQLRALPALPSARRTPIKGRQCGADKVGKEKGRL

SEQ ID NO: 2742 - protein, 57 aa, Homo Sapiens
FREVGPKNSYIAYIEDHSGNGTFVNTELVGKGKRRPLNNNSEIALSLSRNKVVPVER

SEQ ID NO: 2743 - protein, 137 aa, Homo Sapiens
MERLLYGIGACGEVKLAFERKTCKKVAIKIISKRKFAIGSAREADPALNVETEIEILKKLNHPCIIKIKNFFDAEDYYIVLELMEGGELFDKVVGNKRLKEATCKLYFYQMLLAVQYLHENGIIHRDLKPENVLLSS

SEQ ID NO: 2744 - protein, 172 aa, Homo Sapiens
MLRLLTSMVVMSRESDVEAQQSHGSSACSQPHGSVTQSQGSSSQSQGISSSSTSTMPNSSQSSHSSSGTLSSLETVSTQELYSIPEDQEPEDQEPEEPTPAPWARLWALQDGFANLECVNDNYWFGRDKSCEYCFDEPLLKRTDKYRTYSKKHFRIFREVGPKNSYIAYIED

SEQ ID NO: 2745 - protein, 121 aa, Homo Sapiens
MSKTLGSGACGEVKLAFERKTCKKVAIKIISKRKFAIGSAREADPALNVETEIEILKKLNHPCIIKIKNFFDAEDYYIVLELMEGGELFDKVVGNKRLKEATCKLYFYQMLLAVQYLHENG

SEQ ID NO: 2746 - protein, 161 aa, Homo Sapiens
MSRESDVEAQQSHGSSACSQPHGSVTQSQGSSSQSQGISSSSTSTMPNSSQSSHSSSGTLSSLETVSTQELYSIPEDQEPEDQEPEEPTPAPWARLWALQDGFANLECVNDNYWFGRDKSCEYCFDEPLLKRTDKYRTYSKKHFRIFREENLSCPYRIWFK

SEQ ID NO: 2747 - protein, 165 aa, Homo Sapiens
MSRESDVEAQQSHGSSACSQPHGSVTQSQGSSSQSQGISSSSTSTMPNSSQSSHSSSGTLSSLETVSTQELYSIPEDQEPEDQEPEEPTPAPWARLWALQDGFANLECVNDNYWFGRDKSCEYCFDEPLLKRTDKYRTYSKKHFRIFREENLSCPYRIWFNFCLF

SEQ ID NO: 2748 - protein, 298 aa, Homo Sapiens
MSRESDVEAQQSHGSSACSQPHGSVTQSQGSSSQSQGISSSSTSTMPNSSQSSHSSSGTLSSLETVSTQELYSIPEDQEPEDQEPEEPTPAPWARLWALQDGFANLECVNDNYWFGRDKSCEYCFDEPLLKRTDKYRTYSKKHFRIFREENLSCPYRIWFNGACGEVKLAFERKTCKKVAIKIISKRKFAIGSAREADPALNVETEIEILKKLNHPCIIKIKNFFDAEDYYIVLELMEGGELFDKVVGNKRLKEATCKLYFYQMLLAVQYLHENGIIHRDLKPENVLLSSQEEDCLIK

SEQ ID NO: 2749 - protein, 207 aa, Homo Sapiens
MSRESDVEAQQSHGSSACSQPHGSVTQSQGSSSQSQGISSSSTSTMPNSSQSSHSSSGTLSSLETVSTQELYSIPEDQEPEDQEPEEPTPAPWARLWALQDGFANLECVNDNYWFGRDKSCEYCFDEPLLKRTDKYRTYSKKHFRIFREVGPKNSYIAYIEDHSGNGTFVNTELVGKGKRRPLNNNSEIALSLSRNKEKILKIYSLS

SEQ ID NO: 2750 - protein, 207 aa, Homo Sapiens; identical to SEQ ID NO: 2749

SEQ ID NO: 2751 - protein, 514 aa, Homo Sapiens
MSRESDVEAQQSHGSSACSQPHGSVTQSQGSSSQSQGISSSSTSTMPNSSQSSHSSSGTLSSLETVSTQELYSIPEDQEPEDQEPEEPTPAPWARLWALQDGFANLECVNDNYWFGRDKSCEYCFDEPLLKRTDKYRTYSKKHFRIFREVGPKNSYIAYIEDHSGNGTFVNTELVGKGKRRPLNNNSEIALSLSRNKVFVFFDLTVDDQSVYPKALRDEYIMSKTLGSGACGEVKLAFERKTCKKVAIKIISKRKFAIGSAREADPALNVETEIEILKKLNHPCIIKIKNFFDAEDYYIVLELMEGGELFDKVVGNKRLKEATCKLYFYQMLLAVQITDFGHSKILGETSLMRTLCGTPTYLAPEVLVSVGTAGYNRAVDCWSLGVILFICLSGYPPFSEHRTQVSLKDQITSGKYNFIPEVWAEVSEKALDLVKKLLVVDPKARFTTEEALRHPWLQDEDMKRKFQDLLSEENESTALPQVLAQPSTSRKRPREGEAEGAETTKRPAVCAAVL

SEQ ID NO: 2752 - protein, 543 aa, Homo Sapiens
MSRESDVEAQQSHGSSACSQPHGSVTQSQGSSSQSQGISSSSTSTMPNSSQSSHSSSGTLSSLETVSTQELYSIPEDQEPEDQEPEEPTPAPWARLWALQDGFANLECVNDNYWFGRDKSCEYCFDEPLLKRTDKYRTYSKKHFRIFREVGPKNSYIAYIEDHSGNGTFVNTELVGKGKRRPLNNNSEIALSLSRNKVFVFFDLTVDDQSVYPKALRDEYIMSKTLGSGACGEVKLAFERKTCKKVAIKIISKRKFAIGSAREADPALNVETEIEILKKLNHPCIIKIKNFFDAEDYYIVLELMEGGELFDKVVGNKRLKEATCKLYFYQMLLAVQYLHENGIIHRDLKPENVLLSSQEEDCLIKITDFGHSKILGETSLMRTLCGTPTYLAPEVLVSVGTAGYNRAVDCWSLGVILFICLSGYPPFSEHRTQVSLKDQITSGKYNFIPEVWAEVSEKALDLVKKLLVVDPKARFTTEEALRHPWLQDEDMKRKFQDLLSEENESTALPQVLAQPSTSRKRPREGEAEGAETTKRPAVCAAVL

SEQ ID NO: 2753 - protein, 514 aa, Homo Sapiens; identical to SEQ ID NO: 2751

SEQ ID NO: 2754 - protein, 543 aa, Homo Sapiens; identical to SEQ ID NO: 2752

SEQ ID NO: 2755 - protein, 289 aa, Homo Sapiens
MSRESDVEAQQSHGSSACSQPHGSVTQSQGSSSQSQGISSSSTSTMPNSSQSSHSSSGTLSSLETVSTQELYSIPEDQEPEDQEPEEPTPAPWARLWALQDGFANLECVNDNYWFGRDKSCEYCFDEPLLKRTDKYRTYSKKHFRIFREVGPKNSYIAYIEDHSGNGTFVNTELVGKGKRRPLNNNSEIALSLSRNKVFVFFDLTVDDQSVYPKALRDEYIMSKTLGSGACGEVKLAFERKTCKKVAIKIISKRKFAIGSAREADPALNVETEIEILKKLNHDGRGRAV

SEQ ID NO: 2756 - protein, 543 aa, Homo Sapiens; identical to SEQ ID NO: 2752

SEQ ID NO: 2757 - protein, 203 aa, Homo Sapiens
MSRESDVEAQQSHGSSACSQPHGSVTQSQGSSSQSQGISSSSTSTMPNSSQSSHSSSGTLSSLETVSTQELYSIPEDQEPEDQEPEEPTPAPWARLWALQDGFANLECVNDNYWFGRDKSCEYCFDEPLLKRTDKYRTYSKKHFRIFREVGPKNSYIAYIEDHSGNGTFVNTELVGKGKRRPLNNNSEIALSLSRNKVVPVER

SEQ ID NO: 2758 - protein, 295 aa, Homo Sapiens
MSRESDVEAQQSHGSSACSQPHGSVTQSQGSSSQSQGISSSSTSTMPNSSQSSHSSSGTLSSLETVSTQELYSIPEDQEPEDQEPEEPTPAPWARLWALQDGFANLETESGHVTQSDLELLLSSDPPASASQSAGIRECVNDNYWFGRDKSCEYCFDEPLLKRTDKYRTYSKKHFRIFREVGPKNSYIAYIEDHSGNGTFVNTELVGKGKRRPLNNNSEIALSLSRNKVFVFFDLTVDDQSVYPKALRDEYIMSKTLGSGACGEVKLAFERKTCKKVAIKIISKRKFAIGSAREA

SEQ ID NO: 2759 - protein, 586 aa, Homo Sapiens
MSRESDVEAQQSHGSSACSQPHGSVTQSQGSSSQSQGISSSSTSTMPNSSQSSHSSSGTLSSLETVSTQELYSIPEDQEPEDQEPEEPTPAPWARLWALQDGFANLETESGHVTQSDLELLLSSDPPASASQSAGIRGVRHHPRPVCSLKCVNDNYWFGRDKSCEYCFDEPLLKRTDKYRTYSKKHFRIFREVGPKNSYIAYIEDHSGNGTFVNTELVGKGKRRPLNNNSEIALSLSRNKVFVFFDLTVDDQSVYPKALRDEYIMSKTLGSGACGEVKLAFERKTCKKVAIKIISKRKFAIGSAREADPALNVETEIEILKKLNHPCIIKIKNFFDAEDYYIVLELMEGGELFDKVVGNKRLKEATCKLYFYQMLLAVQYLHENGIIHRDLKPENVLLSSQEEDCLIKITDFGHSKILGETSLMRTLCGTPTYLAPEVLVSVGTAGYNRAVDCWSLGVILFICLSGYPPFSEHRTQVSLKDQITSGKYNFIPEVWAEVSEKALDLVKKLLVVDPKARFTTEEALRHPWLQDEDMKRKFQDLLSEENESTALPQVLAQPSTSRKRPREGEAEGAETTKRPAVCAAVL

SEQ ID NO: 2760 - protein, 452 aa, Homo Sapiens
MSRESDVEAQQSHGSSACSQPHGSVTQSQGSSSQSQGISSSSTSTMPNSSQSSHSSSGTLSSLETVSTQELYSIPEDQEPEDQEPEEPTPAPWARLWALQDGFANLVFVFFDLTVDDQSVYPKALRDEYIMSKTLGSGACGEVKLAFERKTCKKVAIKIISKRKFAIGSAREADPALNVETEIEILKKLNHPCIIKIKNFFDAEDYYIVLELMEGGELFDKVVGNKRLKEATCKLYFYQMLLAVQYLHENGIIHRDLKPENVLLSSQEEDCLIKITDFGHSKILGETSLMRTLCGTPTYLAPEVLVSVGTAGYNRAVDCWSLGVILFICLSGYPPFSEHRTQVSLKDQITSGKYNFIPEVWAEVSEKALDLVKKLLVVDPKARFTTEEALRHPWLQDEDMKRKFQDLLSEENESTALPQVLAQPSTSRKRPREGEAEGAETTKRPAVCAAVL

SEQ ID NO: 2761 - protein, 45 aa, Homo Sapiens
SSDPPASASQSAGIRGVRHHPRPVCSLIETGFHRVSQDGLHLLTS

SEQ ID NO: 2762 - protein, 276 aa, Homo Sapiens
  misc_feature (1)..(1): Xaa can be any naturally occurring amino acid
XIGSAREADPALNVETEIEILKKLNHPCIIKIKNFFDAEDYYIVLELMEGGELFDKVVGNKRLKEATCKLYFYQMLLAVQYLHENGIIHRDLKPENVLLSSQEEDCLIKITDFGHSKILGETSLMRTLCGTPTYLAPEVLVSVGTAGYNRAVDCWSLGVILFIWTQVSLKDQITSGKYNFIPEVWAEVSEKALDLVKKLLVVDPKARFTTEEALRHPWLQDEDMKRKFQDLLSEENESTALPQVLAQPSTSRKRPREGEAEGAETTKRPAVCAAVL

SEQ ID NO: 2763 - protein, 144 aa, Homo Sapiens
  misc_feature (1)..(1): Xaa can be any naturally occurring amino acid
XIISKRKFAIGSAREADPALNVETEIEILKKLNHPCIIKIKNFFDAEDYYIVLELMEGGELFDKVVGNKRLKEATCKLYFYQMLLAVQDEDMKRKFQDLLSEENESTALPQVLAQPSTSRKRPREGEAEGAETTKRPAVCAAVL

SEQ ID NO: 2764 - protein, 38 aa, Homo Sapiens
MRSAAVLALLLCAGQVTALPVNSPMNKGDTEMNGSFPF

SEQ ID NO: 2765 - protein, 457 aa, Homo Sapiens
MRSAAVLALLLCAGQVTALPVNSPMNKGDTEVMKCIVEVISDTLSKPSPMPVSQECFETLRGDERILSILRHQNLLKELQDLALQGAKERAHQQKKHSGFEDELSEVLENQSSQAELKEAVEEPSSKDVMEKREDSKEAEKSGEATDGARPQALPEPMQESKAEGNNQAPGEEEEEEEEATNTHPPASLPSQKYPGPQAEGDSEGLSQGLVDREKGLSAEPGWQAKREEEEEEEEEAEAGEEAVPEEEGPTVVLNPHPSLGYKEIRKGESRSEALAVDGAGKPGAEEAQDPEGKGEQEHSQQKEEEEEMAVVPQGLFRGGKSGELEQEEERLSKEWEDSKRWSKMDQLAKELTAEKRLEGQEEEEDNRDSSMKLSFRARAYGFRGPGPQLRRGWRPSSREDSLEAGLPLQVRGYPEEKKEEEGSANRRPEDQELESLSAIEAELEKVAHQLQALRRG

SEQ ID NO: 2766 - protein, 306 aa, Homo Sapiens
MRSAAVLALLLCAGQVTALPVNSPMNKGDTEVMKCIVEVISDTLSKPSPMPVSQECFETLRGDERILSILRHQNLLKELQDLALQGAKERAHQQKKHSGFEDELSEVLENQSSQAELKGRSEALAVDGAGKPGAEEAQDPEGKGEQEHSQQKEEEEEMAVVPQGLFRGGKSGELEQEEERLSKEWEDSKRWSKMDQLAKELTAEKRLEGQEEEEDNRDSSMKLSFRARAYGFRGPGPQLRRGWRPSSREDSLEAGLPLQVRGYPEEKKEEEGSANRRPEDQELESLSAIEAELEKVAHQLQALRRG

SEQ ID NO: 2767 - protein, 289 aa, Homo Sapiens
MPVDNRNHNEGMVTRCIIEVLSNALSKSSAPPITPECRQVLKTSRKDVKDKETTENENTKFEVRLLRDPADASEAHESSSRGEAGAPGEEDIQGPTKADTEKWAEGGGHSRERADEPQWSLYPSDSQVSEEVKTRHSEKSQREDEEEEEGENYQKGERGEDSSEEKHLEEPGETQNAFLNERKQASAIKKEELVARSETHAAGHSQEKTHSREKSSQESGEETGSQENHPQESKGQPRSQEESEEGEEDATSEVDKRRTRPRHHHGRSRPDRSSQGGSLPSEEKGHPQE

SEQ ID NO: 2768 - protein, 677 aa, Homo Sapiens
MQPTLLLSLLGAVGLAAVNSMPVDNRNHNEGMVTRCIIEVLSNALSKSSAPPITPECRQVLKTSRKDVKDKETTENENTKFEVRLLRDPADASEAHESSSRGEAGAPGEEDIQGPTKADTEKWAEGGGHSRERADEPQWSLYPSDSQVSEEVKTRHSEKSQREDEEEEEGENYQKGERGEDSSEEKHLEEPGETQNAFLNERKQASAIKKEELVARSETHAAGHSQEKTHSREKSSQESGEETGSQENHPQESKGQPRSQEESEEGEEDATSEVDKRRTRPRHHHGRSRPDRSSQGGSLPSEEKGHPQEESEESNVSMASLGEKRDHHSTHYRASEEEPEYGEEIKGYPGVQAPEDLEWERYRGRGSEEYRAPRPQSEESWDEEDKRNYPSLELDKMAHGYGEESEEERGLEPGKGRHHRGRGGEPRAYFMSDTREEKRFLGEGHHRVQENQMDKARRHPQGAWKELDRNYLNYGEEGAPGKWQQQGDLQDTKENREEARFQDKQYSSHHTAEKRKRLGELFNPYYDPLQWKSSHFERRDNMNDNFLEGEEENELTLNEKNFFPEYNYDWWEKKPFSEDVNWGYEKRNLARVPKLDLKRQYDRVAQLDQLLHYRKKSAEFPDFYDSEEPVSTHQEAENEKDRADQTVLTEDEKKELENLAAMDLELQKIAEKFSQRG

SEQ ID NO: 2769 - protein, 383 aa, Homo Sapiens
MGVKASQTGFVVLVLLQCCSAYKLVCYYTSWSQYREGDGSCFPDALDRFLCTHIIYSFANISNDHIDTWEWNDVTLYGMLNTLKNRNPNLKTLLSVGGWNFGSQRFSKIASNTQSRRTFIKSVPPFLRTHGFDGLDLAWLYPGRRDKQHFTTLIKEMKAEFIKEAQPGKKQLLLSAALSAGKVTIDSSYDIAKISQHLDFISIMTYDFHGAWRGTTGHHSPLFRGQEDASPDRFSNTDYAVGYMLRLGAPASKLVMGIPTFGRSFTLASSETGVGAPISGPGIPGRFTKEAGTLAYYEICDFLRGATVHRILGQQVPYATKGNQWVGYDDQESVKSKVQYLKDRQLAGAMVWALDLDDFQGSFCGQDLRFPLTNAIKDALAAT

SEQ ID NO: 2770 - protein, 152 aa, Homo Sapiens
  misc_feature (1)..(1): Xaa can be any naturally occurring amino acid
XLLLSAALSAGKVTIDSSYDIAKISQHLDFISIMTYDFHGAWRGTTGHHSPLFRGQEDASPDRFSNTICDFLRGATVHRILGQQVPYATKGNQWVGYDDQESVKSKVQYLKDRQLAGAMVWALDLDDFQGSFCGQDLRFPLTNAIKDALAAT

SEQ ID NO: 2771 - protein, 380 aa, Homo Sapiens
MGATTMDQKSLWAGSAYKLVCYFTNWSQDRQEPGKFTPENIDPFLCSHLIYSFASIENNKVIIKDKSEVMLYQTINSLKTKNPKLKILLSIGGYLFGSKGFHPMVDSSTSRLEFINSIILFLRNHNFDGLDVSWIYPDQKENTHFTVLIHELAEAFQKDFTKSTKERLLLTAGVSAGRQMIDNSYQVEKLAKDLDFINLLSFDFHGSWEKPLITGHNSPLSKGWQDRGPSSYYNVEYAVGYWIHKGMPSEKVVMGIPTYGHSFTLASAETTVGAPASGPGAAGPITESSGFLAYYEICQFLKGAKITRLQDQQVPYAVKGNQWVGYDDVKSMETKVQFLKNLNLGGAMIWSIDMDDFTGKSCNQGPYPLVQAVKRSLGSL

SEQ ID NO: 2772 - protein, 182 aa, Homo Sapiens
MGATTMDQKSLWAGVVVLLLLQGGSAYKLVCYFTNWSQDRQEPGKFTPENIDPFLCSHLIYSFASIENNKVIIKDKSEVMLYQTINSLKTKNPKLKILLSIGGYLFGSKGFHPMVDSSTSRLEFINSIILFLRNHNFDGLDELAEAFQKDFTKSTKERLLLTAGVSAGRQMIDNSYQVEKLA

SEQ ID NO: 2773 - protein, 201 aa, Homo Sapiens
MGATTMDQKSLWAGVVVLLLLQGGSAYKLVCYFTNWSQDRQEPGKFTPENIDPFLCSHLIYSFASIENNKVIIKDKSEVMLYQTINSLKTKNPKLKILLSIGGYLFGSKGFHPMVDSSTSRLEFINSIILFLRNHNFDGLDVSWIYPDQKENTHFTVLIHELAEAFQKDFTKSTKERLLLTAGVSAGRQMIDNSYQVEKLA

SEQ ID NO: 2774 - protein, 221 aa, Homo Sapiens
MGATTMDQKSLWAGVVVLLLLQGGSAYKLVCYFTNWSQDRQEPGKFTPENIDPFLCSHLIYSFASIENNKVIIKDKSEVMLYQTINSLKTKNPKLKILLSIGGYLFGSKGFHPMVDSSTSRLEFINSIILFLRNHNFDGLDVSWIYPDQKENTHFTVLIHELAEAFQKDFTKSTKERLLLTAGVSAGRQMIDNSYQVEKLAKDLDFINLLSFDFHGSWEKP

SEQ ID NO: 2775 - protein, 390 aa, Homo Sapiens
MGATTMDQKSLWAGVVVLLLLQGGSAYKLVCYFTNWSQDRQEPGKFTPENIDPFLCSHLIYSFASIENNKVIIKDKSEVMLYQTINSLKTKNPKLKILLSIGGYLFGSKGFHPMVDSSTSRLEFINSIILFLRNHNFDGLDVSWIYPDQKENTHFTVLIHELAEAFQKDFTKSTKERLLLTAGVSAGRQMIDNSYQVEKLAKDLDFINLLSFDFHGSWEKPLITGHNSPLSKGWQDRGPSSYYNVEYAVGYWIHKGMPSEKVVMGIPTYGHSFTLASAETTVGAPASGPGAAGPITESSGFLAYYEICQFLKGAKITRLQDQQVPYAVKGNQWVGYDDVKSMETKVQFLKNLNLGGAMIWSIDMDDFTGKSCNQGPYPLVQAVKRSLGSL

SEQ ID NO: 2776 - protein, 390 aa, Homo Sapiens; identical to SEQ ID NO: 2775

SEQ ID NO: 2777 - protein, 145 aa, Homo Sapiens
MLYQTINSLKTKFHPMVDSSTSRLEFINSIILFLRNHNFDGLDVSWIYPDQKENTHFTVLIHELAEAFQKDFTKSTKERLLLTAGVSAGRQMIDNSYQVEKLAKDLDFINLLSFDFHGSWEKPLITGHNSPLSKGWQDRGPSSYY

SEQ ID NO: 2778 - protein, 122 aa, Homo Sapiens
MLYQTINSLKTKNPKLKILLSIGGYLFGSKGFHPMVDSSTSRLEFINSIILFLRNHNFDGLDVSWIYPDQKENTHFTVLIHELAEAFQKDFTKSTKERLLLTAGVSAGRQMIDNSYQVEKLA

SEQ ID NO: 2779 - protein, 169 aa, Homo Sapiens
MLYQTINSLKTKNPKLKILLSIGGYLFGSKGFHPMVDSSTSRLEFINSIILFLRNHNFDGLDVSWIYPDQKENTHFTVLIHELAEAFQKDFTKSTKERLLLTAGVSAGRQMIDNSYQVEKLAKDLDFINLLSFDFHGSWEKPLITGHNSPLSKGWQDRGPSSYYNVEYA

SEQ ID NO: 2780 - protein, 311 aa, Homo Sapiens
MLYQTINSLKTKNPKLKILLSIGGYLFGSKGFHPMVDSSTSRLEFINSIILFLRNHNFDGLDVSWIYPDQKENTHFTVLIHELAEAFQKDFTKSTKERLLLTAGVSAGRQMIDNSYQVEKLAKDLDFINLLSFDFHGSWEKPLITGHNSPLSKGWQDRGPSSYYNVEYAVGYWIHKGMPSEKVVMGIPTYGHSFTLASAETTVGAPASGPGAAGPITESSGFLAYYEICQFLKGAKITRLQDQQVPYAVKGNQWVGYDDVKSMETKVQFLKNLNLGGAMIWSIDMDDFTGKSCNQGPYPLVQAVKRSLGSL

SEQ ID NO: 2781 - protein, 311 aa, Homo Sapiens; identical to SEQ ID NO: 2780

SEQ ID NO: 2782 - protein, 183 aa, Homo Sapiens
PDQKENTHFTVLIHELAEAFQKDFTKSTKERLLLTAGVSAGRQMIDNSYQVEKLAKDLDFINLLSFDFHGSWEKPLITGHNSPLSKGWQDRGPSSYYNVICQFLKGAKITRLQDQQVPYAVKGNQWVGYDDVKSMETKVQFLKNLNLGGAMIWSIDMDDFTGKSCNQGPYPLVQAVKRSLGSL

SEQ ID NO: 2783 - protein, 161 aa, Homo Sapiens
  misc_feature (1)..(1): Xaa can be any naturally occurring amino acid
XFTNWSQDRQEPGKFTPENIDPFLCSHLIYSFASIENNKVIIKDKSEVMLYQTINSLKTKNPKLKILLSIGGYLFGSKGDLDFINLLSFDFHGSWEKPLITGHNSPLSKGWQDRGPSSYYNVEYAVGYWIHKGMPSEKVVMGIPTYGHSFTLASAETTVGA

SEQ ID NO: 2784 - protein, 42 aa, Homo Sapiens
YEICQFLKGAKITRLQDQQVPYAVKGNQWVGYDDVKSMETKD

SEQ ID NO: 2785 - protein, 420 aa, Homo Sapiens
ETSSSVHEQVADSGAQAVAFQSGGESSIVWNSQLKTLLAIGGWNFGTAPFTAMVSTPENRQTFITSVIKFLRQYEFDGLDFDWEYPGSRGSPPQDKHLFTVLVQEMREAFEQEAKQINKPRLMVTAAVAAGISNIQSGYEIPQLSQYLDYIHVMTYDLHGSWEGYTGENSPLYKYPTDTGSNAYLNVDYVMNYWKDNGAPAEKLIVGFPTYGHNFILSNPSNTGIGAPTSGAGPAGPYAKESGIWAYYEICTFLKNGATQGWDAPQEVPYAYQGNVWVGYDNIKSFDIKAQWLKHNKFGGAMVWAIDLDDFTGTFCNQGKFPLISTLKKALGLQSASCTAPAQPIEPITAAPSGSGNGSGSSSSGGSSGGSGFCAVRANGLYPVANNRNAFWHCVNGVTYQQNCQAGLVFDTSCDCCNWA

SEQ ID NO: 2786 - protein, 315 aa, Homo Sapiens
MREAFEQEAKQINKPRLMVTAAVAAGISNIQSGYEIPQLSQYLDYIHVMTYDLHGSWEGYTGENSPLYKYPTDTGSNAYLNVDYVMNYWKDNGAPAEKLIVGFPTYGHNFILSNPSNTGIGAPTSGAGPAGPYAKESGIWAYYEICTFLKNGATQGWDAPQEVPYAYQGNVWVGYDNIKSFDIKAQWLKHNKFGGAMVWAIDLDDFTGTFCNQGKFPLISTLKKALGLQSASCTAPAQPIEPITAAPSGSGNGSGSSSSGGSSGGSGFCAVRANGLYPVANNRNAFWHCVNGVTYQQNCQAGLVFDTSCDCCNWA

SEQ ID NO: 2787 - protein, 315 aa, Homo Sapiens; identical to SEQ ID NO: 2786

SEQ ID NO: 2788 - protein, 287 aa, Homo Sapiens
MREAFEQEAKQINKPRLMVTAAVAAGISNIQSGYEIPQLSQYLDYIHVMTYDLHGSWEGYTGENSPLYKYPTDTGSNAYLNVDYVMNYWKDNGAPAEKLIVGFPTYGHNFILSNPSNTGIGAPTSGAGPAGPYAKESGIWAYYEICTFLKNGATQGWDAPQEVPYAYQGNVWVGYDNIKSFDIKAQWLKHNKFGGAMVWAIDLDDFTGTFCNQGKFPLISTLKKALGLQSASCTAPAQPIEPITAAPSGSGNGSGSSSSGGSSGGSGFCAVRANGLYPVANNRNAFW

SEQ ID NO: 2789 - protein, 315 aa, Homo Sapiens; identical to SEQ ID NO: 2786

SEQ ID NO: 2790 - protein, 476 aa, Homo Sapiens [sequence omitted]

SEQ ID NO: 2791 - protein, 476 aa, Homo Sapiens [sequence omitted]

SEQ ID NO: 2792 - protein, 368 aa, Homo Sapiens
MVSTPENRQTFITSVIKFLRQYEFDGLDFDWEYPGSRGSPPQDKHLFTVLVQEMREAFEQEAKQINKPRLMVTAAVAAGISNIQSGYEIPQLSQYLDYIHVMTYDLHGSWEGYTGENSPLYKYPTDTGSNAYLNVDYVMNYWKDNGAPAEKLIVGFPTYGHNFILSNPSNTGIGAPTSGAGPAGPYAKESGIWAYYEICTFLKNGATQGWDAPQEVPYAYQGNVWVGYDNIKSFDIKAQWLKHNKFGGAMVWAIDLDDFTGTFCNQGKFPLISTLKKALGLQSASCTAPAQPIEPITAAPSGSGNGSGSSSSGGSSGGSGFCAVRANGLYPVANNRNAFWHCVNGVTYQQNCQAGLVFDTSCDCCNWA

SEQ ID NO: 2793 - protein, 101 aa, Homo Sapiens
MVSTPENRQTFITSVIKFLRQYEFDGLDFDWEYPGSRGSPPQDKHLFTVLVQMRKLKYREDLSNLPKITQLVGIITSSAVWPQSPLLLSITLGCPLLLRNA

SEQ ID NO: 2794 - protein, 69 aa, Homo Sapiens
LKDHRPRMVWDSQASEHFFEYKKSRSGRHVVFYPTLKSLQVRLELARELGVGVSIWELGQGLDYFYDLL

SEQ ID NO: 2795 - protein, 26 aa, Homo Sapiens
MRTLFNLLWLALACSPVHTTLSKSDA

SEQ ID NO: 2796 - protein, 84 aa, Homo Sapiens
MRTLFNLLWLALACSPVHTTLSKSDAKKAASKTLLEKAGAQWRDLGSPQPLPPRFKRFSCFSLPSSWDYRVSFQISRCKTGVWW

SEQ ID NO: 2797 - protein, 84 aa, Homo Sapiens
MRTLFNLLWLALACSPVHTTLSKSDAKKAASKTLLEKSQFSDKPVQDRGLVVTDLKAESVVLEHRSYCSAKARDRHFAGDVLGY

SEQ ID NO: 2798 - protein, 116 aa, Homo Sapiens
MRTLFNLLWLALACSPVHTTLSKSDAKKAASKTLLEKSQFSDKPVQDRGLVVTDLKAESVVLEHRSYCSAKARDRHFAGDVLGYVTPWNSHGYDVTKVFGSKFTQISPVWLQLKRR

SEQ ID NO: 2799 - protein, 119 aa, Homo Sapiens
MRTLFNLLWLALACSPVHTTLSKSDAKKAASKTLLEKSQFSDKPVQDRGLVVTDLKAESVVLEHRSYCSAKARDRHFAGDVLGYVTPWNSHGYDVTKVFGSKFTQISPVWLQLKRRGRE

SEQ ID NO: 2800 - protein, 224 aa, Homo Sapiens
MRTLFNLLWLALACSPVHTTLSKSDAKKAASKTLLEKSQFSDKPVQDRGLVVTDLKAESVVLEHRSYCSAKARDRHFAGDVLGYVTPWNSHGYDVTKVFGSKFTQISPVWLQLKRRGREMFEARLLALLVIPPAITPGTDQLGMFTHKEFEQLAPVLDGFSLMTYDYSTAHQPGPNAPLSWVRACVQVLDPKSKWRSKILLGLNFYGMDYATSKDAREPVVGAR

SEQ ID NO: 2801 - protein, 132 aa, Homo Sapiens
MRTLFNLLWLALACSPVHTTLSKSDAKKAASKTLLEKSQFSDKPVQDRGLVVTDLKAESVVLEHRSYCSAKARDRHFAGDVLGYVTPWNSHGYDVTKVFGSKFTQISPVWLQLKRRGREMFEVTGLHDVDQG

SEQ ID NO: 2802 - protein, 162 aa, Homo Sapiens
MRTLFNLLWLALACSPVHTTLSKSDAKKAASKTLLEKSQFSDKPVQDRGLVVTDLKAESVVLEHRSYCSAKARDRHFAGDVLGYVTPWNSHGYDVTKVFGSKFTQISPVWLQLKRRGREMFEVTGLHDVDQGSHPSCLTVLAPQAEKSGGCELSGSMPRACT

SEQ ID NO: 2803 - protein, 393 aa, Homo Sapiens
MRTLFNLLWLALACSPVHTTLSKSDAKKAASKTLLEKSQFSDKPVQDRGLVVTDLKAESVVLEHRSYCSAKARDRHFAGDVLGYVTPWNSHGYDVTKVFGSKFTQISPVWLQLKRRGREMFEVTGLHDVDQGWMRAVRKHAKGLHIVPRLLFEDWTYDDFRNVLDSEDEIEELSKTVVQVAKNQHFDGFVVEVWNQLLSQKRVGLIHMLTHLAEALHQARLLALLVIPPAITPGTDQLGMFTHKEFEQLAPVLDGFSLMTYDYSTAHQPGPNAPLSWVRACVQVLDPKSKWRSKILLGLNFYGMDYATSKDAREPVVGARYIQTLKDHRPRMVWDSQASEHFFEYKKSRSGRHVVFYPTLKSLQVRLELARELGVGVSIWELGQGLDYFYDLL

SEQ ID NO: 2804 - protein, 393 aa, Homo Sapiens; identical to SEQ ID NO: 2803

SEQ ID NO: 2805 - protein, 393 aa, Homo Sapiens; identical to SEQ ID NO: 2803

SEQ ID NO: 2806 - protein, 362 aa, Homo Sapiens
MRTLFNLLWLALACSPVHTTLSKSDAKKAASKTLLEKSQFSDKPVQDRGLVVTDLKAESVVLEHRSYCSAKARDRHFAGDVLGYVTPWNSHGYDVTKVFGSKFTQISPVWLQLKRRGREMFEVTGLHDVDQGWMRAVRKHAKGLHIVPRLLFEDWTYDDFRNVLDSEDEIEELSKTVVQVAKNQHFDGFVVEVWNQLLSQKRVTDQLGMFTHKEFEQLAPVLDGFSLMTYDYSTAHQPGPNAPLSWVRACVQVLDPKSKWRSKILLGLNFYGMDYATSKDAREPVVGARYIQTLKDHRPRMVWDSQASEHFFEYKKSRSGRHVVFYPTLKSLQVRLELARELGVGVSIWELGQGLDYFYDLL

SEQ ID NO: 2807 - protein, 38 aa, Homo Sapiens
MRTLFNLLWLALACSPVHTTLSKSDAKKAASKTLLEKV

SEQ ID NO: 2808 - protein, 418 aa, Homo Sapiens
MRTLFNLLWLALACSPVHTTLSKSDAKKAASKTLLEKVKFCSCCPGWSAMARSWLTATSATQSQFSDKPVQDRGLVVTDLKAESVVLEHRSYCSAKARDRHFAGDVLGYVTPWNSHGYDVTKVFGSKFTQISPVWLQLKRRGREMFEVTGLHDVDQGWMRAVRKHAKGLHIVPRLLFEDWTYDDFRNVLDSEDEIEELSKTVVQVAKNQHFDGFVVEVWNQLLSQKRVGLIHMLTHLAEALHQARLLALLVIPPAITPGTDQLGMFTHKEFEQLAPVLDGFSLMTYDYSTAHQPGPNAPLSWVRACVQVLDPKSKWRSKILLGLNFYGMDYATSKDAREPVVGARYIQTLKDHRPRMVWDSQASEHFFEYKKSRSGRHVVFYPTLKSLQVRLELARELGVGVSIWELGQGLDYFYDLL

SEQ ID NO: 2809 - protein, 418 aa, Homo Sapiens; identical to SEQ ID NO: 2808

SEQ ID NO: 2810 - protein, 84 aa, Homo Sapiens
  misc_feature (1)..(1): Xaa can be any naturally occurring amino acid
XDAREPVVGARYIQTLKDHRPRMVWDSQASEHFFEYKKSRSGRHVVFYPTLKSLQVRLELARELGVGVSIWELGQGLDYFYDLL

SEQ ID NO: 2811 - protein, 108 aa, Homo Sapiens
  misc_feature (1)..(1): Xaa can be any naturally occurring amino acid
XPKSKWRSKILLGLNFYGMDYATSKDAREPVVGARYIQTLKDHRPRMVWDSQASEHFFEYKKSRSGRHVVFYPTLKSLQVRLELARELGVGVSIWELGQGLDYFYDLL

SEQ ID NO: 2812 - protein, 72 aa, Homo Sapiens
  misc_feature (1)..(1): Xaa can be any naturally occurring amino acid
XQLGMFTHKEFEQLAPVLDGFSLMTYDYSTAHQPGPNAPLSWVRACVQVLDPKSKWRSKILLGLNFYGTSRH

SEQ ID NO: 2813 - protein, 447 aa, Homo Sapiens
MVRSVAWAGFMVLLMIPWGSAAKLVCYFTNWAQYRQGEARFLPKDLDPSLCTHLIYAFAGMTNHQLSTTEWNDETLYQEFNGLKKMFTDMVATANNRQTFVNSAIRFLRKYSFDGLDLDWEYPGSQGSPAVDKERFTTLVQDLANAFQQEAQTSGKERLLLSAAVPAGQTYVDAGYEVDKIAQNLDFVNLMAYDFHGSWEKVTGHNSPLYKRQEESGAAASLNVDAAVQQWLQKGTPASKLILGMPTYGRSFTLASSSDTRVGAPATGSGTPGPFTKEGGMLAYYEVCSWKGATKQRIQDQKVPYIFRDNQWVGFDDVESFKTKVSYLKQKGLGGAMVWALDLDDFAGFSCNQGRYPLIQTLRQELSLPYLPSGTPELEVPKPGQPSEPEHGPSPGQDTFCQGKADGLYPNPRERSSFYSCAAGRLFQQSCPTGLVFSNSCKCCTWN

SEQ ID NO: 2814 - protein, 466 aa, Homo Sapiens
MVRSVAWAGFMVLLMIPWGSAAKLVCYFTNWAQYRQGEARFLPKDLDPSLCTHLIYAFAGMTNHQLSTTEWNDETLYQEFNGLKKMNPKLKTLLAIGGWNFGTQKFTDMVATANNRQTFVNSAIRFLRKYSFDGLDLDWEYPGSQGSPAVDKERFTTLVQDLANAFQQEAQTSGKERLLLSAAVPAGQTYVDAGYEVDKIAQNLDFVNLMAYDFHGSWEKVTGHNSPLYKRQEESGAAASLNVDAAVQQWLQKGTPASKLILGMPTYGRSFTLASSSDTRVGAPATGSGTPGPFTKEGGMLAYYEVCSWKGATKQRIQDQKVPYIFRDNQWVGFDDVESFKTKVSYLKQKGLGGAMVWALDLDDFAGFSCNQGRYPLIQTLRQELSLPYLPSGTPELEVPKPGQPSEPEHGPSPGQDTFCQGKADGLYPNPRERSSFYSCAAGRLFQQSCPTGLVFSNSCKCCTWN

SEQ ID NO: 2815 - protein, 387 aa, Homo Sapiens
MVRSVAWAGFMVLLMIPWGSAAKLVCYFTNWAQYRQGEARFLPKDLDPSLCTHLIYAFAGMTNHQLSTTEWNDETLYQEFNGLKKMNPKLKTLLAIGGWNFGTQKFTDMVATANNRQTFVNSAIRFLRKYSFDGLDLDWEYPGSQGSPAVDKERFTTLVQDLANAFQQEAQTSGKERLLLSAAVPAGQTYVDAGYEVDKIAQNLDFVNLMAYDFHGSWEKVTGHNSPLYKRQEESGAAASLNVDAAVQQWLQKGTPASKLILGMPTYGRSFTLASSSDTRVGAPATGSGTPGPFTKEGGMLAYYEVCSWKGATKQRIQDQKVPYIFRDNQWVGFDDVESFKTKVSYLKQKGLGGAMVWALDLDDFAGFSCNQGRYPLIQTLRQELNG

SEQ ID NO: 2816 - protein, 361 aa, Homo Sapiens
MVRSVAWAGFMVLLMIPWGSAAKLVCYFTNWAQYRQGEARFLPKDLDPSLCTHLIYAFAGMTNHQLSTTEWNDETLYQEFNGLKKMNPKLKTLLAIGGWNFGTQKFTDMVATANNRQTFVNSAIRFLRKYSFDGLDLDWEYPGSQGSPAVDKERFTTLVQDLANAFQQEAQTSGKERLLLSAAVPAGQTYVDAGYEVDKIAQNLDFVNLMAYDFHGSWEKVTGHNSPLYKRQEESGAAASLNVDAAVQQWLQKGTPASKLILGMPTYGRSFTLASSSDTRVGAPATGSGTPGPFTKEGGMLAYYEVCSWKGATKQRIQDQKVPYIFRDNQWVGFDDVESFKTKVMLTLRQGDCKMTDVQAA

SEQ ID NO: 2817 - protein, 66 aa, Homo Sapiens
MEPLLLGRGLIVYLMFLLLKFSKAIEIPSSVQQVPTIIKQSKVQVAFPFDEYFQIECEAKGNPEPT

SEQ ID NO: 2818 - protein, 85 aa, Homo Sapiens
MEPLLLGRGLIVYLMFLLLKFSKAIEIPSSVQQVPTIIKQSKVQVAFPFDEYFQIECEAKGNPEPTFSWTKDGNPFYFTDHRIIP

SEQ ID NO: 2819 - protein, 96 aa, Homo Sapiens
MEPLLLGRGLIVYLMFLLLKFSKAIEIPSSVQQVPTIIKQSKVQVAFPFDEYFQIECEAKGNPEPTFSWTKDGNPFYFTDHRIIPSNNSGTFRIPN

SEQ ID NO: 2820 - protein, 181 aa, Homo Sapiens
MEPLLLGRGLIVYLMFLLLKFSKAIEIPSSVQQVPTIIKQSKVQVAFPFDEYFQIECEAKGNPEPTFSWTKDGNPFYFTDHRIIPSNNSGTFRIPNEGHISHFQGKYRCFASNKLGIAMSEEIEFIVPSVPKFPKEKIDPLEVEEGDPIVLPCNPPKGLPPLHIYWMNIELEHIEQDERVY

SEQ ID NO: 2821 - protein, 1224 aa, Homo Sapiens
MEPLLLGRGLIVYLMFLLLKFSKAIEIPSSVQQVPTIIKQSKVQVAFPFDEYFQIECEAKGNPEPTFSWTKDGNPFYFTDHRIIPSNNSGTFRIPNEGHISHFQGKYRCFASNKLGIAMSEEIEFIVPSVPKFPKEKIDPLEVEEGDPIVLPCNPPKGLPPLHIYWMNIELEHIEQDERVYMSQKGDLYFANVEEKDSRNDYCCFAAFPRLRTIVQKMPMKLTVNSLKHANDSSSSTEIGSKANSIKQRKPKLLLPPTESGSESSITILKGEILLLECFAEGLPTPQVDWNKIGGDLPKGRETKENYGKTLKIENVSYQDKGNYRCTASNFLGTATHDFHVIVEEPPRWTKKPQSAVYSTGSNGILLCEAEGEPQPTIKWRVNGSPVDNHPFAGDVVFPREISFTNLQPNHTAVYQCEASNVHGTILANANIDVVDVRPLIQTKDGENYATVVGYSAFLHCEFFASPEAVVSWQKVEEVKPLEGRRYHIYENGTLQINRTTEEDAGSYSCWVENAIGKTAVTANLDIRNATKLRVSPKNPRIPKLHMLELHCESKCDSHLKHSLKLSWSKDGEAFEINGTEDGRIIIDGANLTISNVTLEDQGIYCCSAHTALDSAADITQVTVLDVPDPPENLHLSERQNRSVRLTWEAGADHNSNISEYIVEFEGNKEEPGRWEELTRVQGKKTTVILPLAPFVRYQFRVIAVNEVGRSQPSQPSDHHETPPAAPDRNPQNIRVQASQPKEMIIKWEPLKSMEQNGPGLEYRVTWKPQGAPVEWEEETVTNHTLRVMTPAVYAPYDVKVQAINQLGSGPDPQSVTLYSGEDYPDTAPVIHGVDVINSTLVKVTWSTVPKDRVHGRLKGYQINWWKTKSLLDGRTHPKEVNILRFSGQRNSGMVPSLDAFSEFHLTVLAYNSKGAGPESEPYIFQTPEGVPEQPTFLKVIKVDKDTATLSWGLPKKLNGNLTGYLLQYQIINDTYEIGELNDINITTPSKPSWHLSNLNATTKYKFYLRACTSQGCGKPITEESSTLGEGSKGIGKISGVNLTQKTHPIEVFEPGAEHIVRLMTKNWGDNDSIFQDVIETRGREYAGLYDDISTQGWFIGLMCAIALLTLLLLTVCFVKRNRGGKYSVKEKEDLHPDPEIQSVKDETFGEYSDSDEKPLKGSLRSLNRDMQPTESADSLVEYGEGDHGLFSEDGSFIGAYAGSKEKGSVESNGSSTATFPLRA

SEQ ID NO: 2822 - protein, 1171 aa, Homo Sapiens
MEPLLLGRGLIVYLMFLLLKFSKAIEIPSSVQQVPTIIKQSKVQVAFPFDEYFQIECEAKGNPEPTFSWTKDGNPFYFTDHRIIPSNNSGTFRIPNEGHISHFQGKYRCFASNKLGIAMSEEIEFIVPSVPKFPKEKIDPLEVEEGDPIVLPCNPPKGLPPLHIYWMNIELEHIEQDERVYMSQKGDLYFANVEEKDSRNDYCCFAAFPRLRTIVQKMPMKLTVNSLKHANDSSSSTEIGSKANSIKQRKPKLLLPPTESGSESSITILKGEILLLECFAEGLPTPQVDWNKIGGDLPKGRETKENYGKTLKIENVSYQDKGNYRCTASNFLGTATHDFHVIVEEPPRWTKKPQSAVYSTGSNGILLCEAEGEPQPTIKWRVNGSPVDNHPFAGDVVFPREISFTNLQPNHTAVYQCEASNVHGTILANANIDVVDVRPLIQTKDGENYATVVGYSAFLHCEFFASPEAVVSWQKVEEVKPLEGRRYHIYENGTLQINRTTEEDAGSYSCWVENAIGKTAVTANLDIRNATKLRVSPKNPRIPKLHMLELHCESKCDSHLKHSLKLSWSKDGEAFEINGTEDGRIIIDGANLTISNVTLEDQGIYCCSAHTALDSAADITQVTVLDVPDPPENLHLSERQNRSVRLTWEAGADHNSNISEYIVEFEGNKEEPGRWEELTRVQGKKTTVILPLAPFVRYQFRVIAVNEVGRSQPSQPSDHHETPPAAPDRNPQNIRVQASQPKEMIIKWEPLKSMEQNGPGLEYRVTWKPQGAPVEWEEETVTNHTLRVMTPAVYAPYDVKVQAINQLGSGPDPQSVTLYSGEDYPDTAPVIHGVDVINSTLVKVTWSTVPKDRVHGRLKGYQINWWKTKSLLDGRTHPKEVNILRFSGQRNSGMVPSLDAFSEFHLTVLAYNSKGAGPESEPYIFQTPEGVPEQPTFLKVIKVDKDTATLSWGLPKKLNGNLTGYLLQYQIINDTYEIGELNDINITTPSKPSWHLSNLNATTKYKFYLRACTSQGCGKPITEESSTLGEGKYAGLYDDISTQGWFIGLMCAIALLTLLLLTVCFVKRNRGGKYSVKEKEDLHPDPEIQSVKDETFGEYSDSDEKPLKGSLRSLNRDMQPTESADSLVEYGEGDHGLFSEDGSFIGAYAGSKEKGSVESNGSSTATFPLRA

SEQ ID NO: 2823 - protein, 1208 aa, Homo Sapiens
MEPLLLGRGLIVYLMFLLLKFSKAIEIPSSVQQVPTIIKQSKVQVAFPFDEYFQIECEAKGNPEPTFSWTKDGNPFYFTDHRIIPSNNSGTFRIPNEGHISHFQGKYRCFASNKLGIAMSEEIEFIVPSVPKFPKEKIDPLEVEEGDPIVLPCNPPKGLPPLHIYWMNIELEHIEQDERVYMSQKGDLYFANVEEKDSRNDYCCFAAFPRLRTIVQKMPMKLTVNSSNSIKQRKPKLLLPPTESGSESSITILKGEILLLECFAEGLPTPQVDWNKIGGDLPKGRETKENYGKTLKIENVSYQDKGNYRCTASNFLGTATHDFHVIVEEPPRWTKKPQSAVYSTGSNGILLCEAEGEPQPTIKWRVNGSPVDNHPFAGDVVFPREISFTNLQPNHTAVYQCEASNVHGTILANANIDVVDVRPLIQTKDGENYATVVGYSAFLHCEFFASPEAVVSWQKVEEVKPLEGRRYHIYENGTLQINRTTEEDAGSYSCWVENAIGKTAVTANLDIRNATKLRVSPKNPRIPKLHMLELHCESKCDSHLKHSLKLSWSKDGEAFEINGTEDGRIIIDGANLTISNVTLEDQGIYCCSAHTALDSAADITQVTVLDVPDPPENLHLSERQNRSVRLTWEAGADHNSNISEYIVEFEGNKEEPGRWEELTRVQGKKTTVILPLAPFVRYQFRVIAVNEVGRSQPSQPSDHHETPPAAPDRNPQNIRVQASQPKEMIIKWEPLKSMEQNGPGLEYRVTWKPQGAPVEWEEETVTNHTLRVMTPAVYAPYDVKVQAINQLGSGPDPQSVTLYSGEDYPDTAPVIHGVDVINSTLVKVTWSTVPKDRVHGRLKGYQINWWKTKSLLDGRTHPKEVNILRFSGQRNSGMVPSLDAFSEFHLTVLAYNSKGAGPESEPYIFQTPEGVPEQPTFLKVIKVDKDTATLSWGLPKKLNGNLTGYLLQYQIINDTYEIGELNDINITTPSKPSWHLSNLNATTKYKFYLRACTSQGCGKPITEESSTLGEGSKGIGKISGVNLTQKTHPIEVFEPGAEHIVRLMTKNWGDNDSIFQDVIETRGREYAGLYDDISTQGWFIGLMCAIALLTLLLLTVCFVKRNRGGKYSVKEKEDLHPDPEIQSVKDETFGEYSDSDEKPLKGSLRSLNRDMQPTESADSLVEYGEGDHGLFSEDGSFIGAYAGSKEKGSVESNGSSTATFPLRA

SEQ ID NO: 2824 - protein, 93 aa, Homo Sapiens
MPPAWSGESMDRGVVGLGSTKTQRGARAPPPQTAEGREGAPGAVVAMAPGSGARGAGDAGRGWSLLPLCASLFLSLFFFFWSVSVRGEAARRK

SEQ ID NO: 2825 - protein, 358 aa, Homo Sapiens
  misc_feature (1)..(1): Xaa can be any naturally occurring amino acid
XSVTLYSGEDYPDTAPVIHGVDVINSTLVKVTWSTVPKDRVHGRLKGYQINWWKTKSLLDGRTHPKEVNILRFSGQRNSGMVPSLDAFSEFHLTVLAYNSKGAGPESEPYIFQTPEGVPEQPTFLKVIKVDKDTATLSWGLPKKLNGNLTGYLLQYQIINDTYEIGELNDINITTPSKPSWHLSNLNATTKYKFYLRACTSQGCGKPITEESSTLGEGKYAGLYDDISTQGWFIGLMCAIALLTLLLLTVCFVKRNRGGKYSVKEKEDLHPDPEIQSVKDETFGEYSDSDEKPLKGSLRSLNRDMQPTESADSLVEYGEGDHGLFSEDGSFIGAYAGSKEKGSVESNGSSTATFPLRA

SEQ ID NO: 2826 - protein, 23 aa, Homo Sapiens
MALTLFDTDEYRPPVWKSYCFMA

SEQ ID NO: 2827 - protein, 459 aa, Homo Sapiens
MALTLFDTDEYRPPVWKSYLYQLQQEAPHPRRITCTCEVENRPKYYGREFHGMISREAADQLLIVAEGSYLIRESQRQPGTYTLALRFGSQTRNFRLYYDGKHFVGEKRFESIHDLVTDGLITLYIETKAAEYIAKMTINPIYEHVGYTTLNREPAYKKHMPVLKETHDERDSTGQDGVSEKRLTSLVRRATLKENEQIPKYEKIHNFKVHTFRGPHWCEYCANFMWGLIAQGVKCADCGLNVHKQCSKMVPNDCKPDLKHVKKVYSCDLTTLVKAHTTKRPMVVDMCIREIESRGLNSEGLYRVSGFSDLIEDVKMAFDRDGEKADISVNMYEDINIITGALKLYFRDLPIPLITYDAYPKFIESAKIMDPDEQLETLHEALKLLPPAHCETLRYLMAHLKRVTLHEKENLMNAENLGIVFGPTLMRSPELDAMAALNDIRYQRLVVELLIKNEDILF

SEQ ID NO: 2828 - protein, 433 aa, Homo Sapiens
MALTLFDTDEYRPPVWKSYLYQLQQEAPHPRRITCTCEVENRPKYYGREFHGMISREAADQLLIVAEGSYLIRESQRQPGTYTLALRFGSQTRNFRLYYDGKHFVGEKRFESIHDLVTDGLITLYIETKAAEYIAKMTINPIYEHVGYTTLNREPAYKKHMPVLKETHDERDSTGQDGVSEKRVHTFRGPHWCEYCANFMWGLIAQGVKCADCGLNVHKQCSKMVPNDCKPDLKHVKKVYSCDLTTLVKAHTTKRPMVVDMCIREIESRGLNSEGLYRVSGFSDLIEDVKMAFDRDGEKADISVNMYEDINIITGALKLYFRDLPIPLITYDAYPKFIESAKIMDPDEQLETLHEALKLLPPAHCETLRYLMAHLKRVTLHEKENLMNAENLGIVFGPTLMRSPELDAMAALNDIRYQRLVVELLIKNEDILF

SEQ ID NO: 2829 - protein, 22 aa, Homo Sapiens
MALTLFDTDEYRPPVWKSYYIL

SEQ ID NO: 2830 - protein, 185 aa, Homo Sapiens
MATMGLLMLLTLAASPHFLSICFHHVCVHTFRGPHWCEYCANFMWGLIAQGVKCADCGLNVHKQCSKMVPNDCKPDLKHVKKVYSCDLTTLVKAHTTKRPMVVDMCIREIESRGLNSEGLYRVSGFSDLIEDVKMAFDRDGEKADISVNMYEDINIITGALKLYFRDLPIPLITYDAYPKFIESA

SEQ ID NO: 2831 - protein, 275 aa, Homo Sapiens
MATMGLLMLLTLAASPHFLSICFHHVHTFRGPHWCEYCANFMWGLIAQGVKCADCGLNVHKQCSKMVPNDCKPDLKHVKKVYSCDLTTLVKAHTTKRPMVVDMCIREIESRGLNSEGLYRVSGFSDLIEDVKMAFDRDGEKADISVNMYEDINIITGALKLYFRDLPIPLITYDAYPKFIESAKIMDPDEQLETLHEALKLLPPAHCETLRYLMAHLKRVTLHEKENLMNAENLGIVFGPTLMRSPELDAMAALNDIRYQRLVVELLIKNEDILF

SEQ ID NO: 2832 - protein, 334 aa, Homo Sapiens
MPSKESWSGRKTNRAAVHKSKQEGRQQDLLIAALGMKLGSPKSSVTIWQPLKLFAYSQLTSLVRRATLKENEQIPKYEKIHNFKVHTFRGPHWCEYCANFMWGLIAQGVKCADCGLNVHKQCSKMVPNDCKPDLKHVKKVYSCDLTTLVKAHTTKRPMVVDMCIREIESRGLNSEGLYRVSGFSDLIEDVKMAFDRDGEKADISVNMYEDINIITGALKLYFRDLPIPLITYDAYPKFIESAKIMDPDEQLETLHEALKLLPPAHCETLRYLMAHLKRVTLHEKENLMNAENLGIVFGPTLMRSPELDAMAALNDIRYQRLVVELLIKNEDILF

SEQ ID NO: 2833 - protein, 165 aa, Homo Sapiens
MPSKESWSGRKTNRAAVHKSKQEGRQQDLLIAALGMKLGSPKSSVTIWQPLKLFAYSQLTSLVRRATLKENEQIPKYEKIHNFKVHTFRGPHWCEYCANFMWGLIAQGVKCAVLEARKSKIKLAAGSVSDCGLNVHKQCSKMVPNDCKPDLKHVKKVYSCDLTTL

SEQ ID NO: 2834 - protein, 186 aa, Homo Sapiens
MRGGRNRDRLTSLVRRATLKENEQIPKYEKIHNFKVHTFRGPHWCEYCANFMWGLIAQGVKCADCGLNVHKQCSKMVPNDCKPDLKHVKKVYSCDLTTLVKAHTTKRPMVVDMCIREIESRGLNSEGLYRVSGFSDLIEDVKMAFDRDGEKADISVNMYEDINIITGALKLYFRDLPIPLITYDAY

SEQ ID NO: 2835 - protein, 173 aa, Homo Sapiens
MWGLIAQGVKCADCGLNVHKQCSKMVPNDCKPDLKHVKKVYSCDLTTLVKAHTTKRPMVVDMCIREIESRGLNSEGLYRVSGFSDLIEDVKMAFDRDGEKADISVNMYEDINIITGALKLYFRDLPIPLITYDAYPKFIESAKIMDPDEQLETLHEALKLLPPAHCETLRYLM

SEQ ID NO: 2836 - protein, 194 aa, Homo Sapiens
MWGLIAQGVKCAVLEARKSKIKLAAGSVSDCGLNVHKQCSKMVPNDCKPDLKHVKKVYSCDLTTLVKAHTTKRPMVVDMCIREIESRGLNSEGLYRVSGFSDLIEDVKMAFDRDGEKADISVNMYEDINIITGALKLYFRDLPIPLITYDAYPKFIESAKIMDPDEQLETLHEALKLLPPAHCETLRYLMAHLK

SEQ ID NO: 2837 - protein, 613 aa, Homo Sapiens
MAVVTLGEERPIGHLHLALRHLLEQHGDDFDWFFLVPDTTYTEAHGLARLTGHLSLASAAHLYLGRPQDFIGGEPTPGRYCHGGFGVLLSRMLLQQLRPHLEGCRNDIVSARPDEWLGRCILDATGVGCTGDHEGVHYSHLELSPGEPVQEGDPHFRSALTAHPVRDPVHMYQLHKAFARAELERTYQEIQELQWEIQNTSHLAVDGDQAAAWPVGIPAPSRPASRFEVLRWDYFTEQHAFSCADGSPRCPLRGADRADVADVLGTALEELNRRYHPALRLQKQQLVNGYRRFDPARGMEYTLDLQLEALTPQGGRRPLTRRVQLLRPLSRVEILPVPYVTEASRLTVLLPLAAAERDLAPGFLEAFATAALEPGDAAAALTLLLLYEPRQAQRVAHADVFAPVKAHVAELERRFPGARVPWLSVQTAAPSPLRLMDLLSKKHPLDTLFLLAGPDTVLTPDFLNRCRMHAISGWQAFFPMHFQAFHPAVAPPQGPGPPELGRDTGRFDRQAASEACFYNSDYVAARGRLAAASEQEEELLESLDVYELFLHFSSLHVLRAVEPALLQRYRAQTCSARLSEDLYHRCLQSVLEGLGSRTQLAMLLFEQEQGNST

SEQ ID NO: 2838 - protein, 775 aa, Homo Sapiens
MRASLLLSVLRPAGPVAVGISLGFTLSLLSVTWVEEPCGPGPPQPGDSELPPRGNTNAARRPNSVQPGAEREKPGAGEGAGENWEPRVLPYHPAQPGQAAKKAVRTRYISTELGIRQRLLVAVLTSQTTLPTLGVAVNRTLGHRLERVVFLTGARGRRAPPGMAVVTLGEERPIGHLHLALRHLLEQHGDDFDWFFLVPDTTYTEAHGLARLTGHLSLASAAHLYLGRPQDFIGGEPTPGRYCHGGFGVLLSRMLLQQLRPHLEGCRNDIVSARPDEWLGRCILDATGVGCTGDHEGVHYSHLELSPGEPVQEGDPHFRSALTAHPVRDPVHMYQLHKAFARAELERTYQEIQELQWEIQNTSHLAVDGDQAAAWPVGIPAPSRPASRFEVLRWDYFTEQHAFSCADGSPRCPLRGADRADVADVLGTALEELNRRYHPALRLQKQQLVNGYRRFDPARGMEYTLDLQLEALTPQGGRRPLTRRVQLLRPLSRVEILPVPYVTEASRLTVLLPLAAAERDLAPGFLEAFATAALEPGDAAAALTLLLLYEPRQAQRVAHADVFAPVKAHVAELERRFPGARVPWLSVQTAAPSPLRLMDLLSKKHPLDTLFLLAGPDTVLTPDFLNRCRMHAISGWQAFFPMHFQAFHPAVAPPQGPGPPELGRDTGRFDRQAASEACFYNSDYVAARGRLAAASEQEEELLESLDVYELFLHFSSLHVLRAVEPALLQRYRAQTCSARLSEDLYHRCLQSVLEGLGSRTQLAMLLFEQEQGNST

SEQ ID NO: 2839 - protein, 298 aa, Homo Sapiens
MRASLLLSVLRPAGPVAVGISLGFTLSLLSVTWVEEPCGPGPPQPGDSELPPRGNTNAARRPNSVQPGAEREKPGAGEGAGENWEPRVLPYHPAQPGQAAKKAVRTRYISTELGIRQRLLVAVLTSQTTLPTLGVAVNRTLGHRLERVVFLTGARGRRAPPGMAVVTLGEERPIGHLHLALRHLLEQHGDDFDWFFLVPDTTYTEAHGLARLTGHLSLASAAHLYLGRPQDFIGGEPTPGRYCHGGFGVLLSRMLLQQLRPHLEGCRNDIVSARPDEWLGRCILDATGVGCTGDHEVG

SEQ ID NO: 2840 - protein, 123 aa, Homo Sapiens
CHGGFGYLLSRSLLLRLRPHLDGCRGDILSARPDEWLGRCLIDSLGVGCVSQHQGQQYRSFELAKNRDPEKEGSSAFLSAFAVHPVSEGTLMYRLHKRFSALELERAYSEIEQLQNCPKKAQG

SEQ ID NO: 2841 - protein, 90 aa, Homo Sapiens
MLSLARPPLPPTGLRTRTRYIQTELGSRERLLVAVLTSRATLSTLAVAVNRTVAHHFPRLLYFTGQRGARAPAGMQVVSHGDERPAWLMS

SEQ ID NO: 2842 - protein, 764 aa, Homo Sapiens
MLSLARPPLPPTGLRTSLSLLRVSWIQGEGEDPCVEAVGERGGPQNPDSRARLDQSDEDFKPRIVPYYRDPNKPYKKVLRTRYIQTELGSRERLLVAVLTSRATLSTLAVAVNRTVAHHFPRLLYFTGQRGARAPAGMQVVSHGDERPAWLMSETLRHLHTHFGADYDWFFIMQDDTYVQAPRLAALAGHLSINQDLYLGRAEEFIGAGEQARYCHGGFGYLLSRSLLLRLRPHLDGCRGDILSARPDEWLGRCLIDSLGVGCVSQHQGQQYRSFELAKNRDPEKEGSSAFLSAFAVHPVSEGTLMYRLHKRFSALELERAYSEIEQLQAQIRNLTVLTPEGEAGLSWPVGLPAPFTPHSRFEVLGWDYFTEQHTFSCADGAPKCPLQGASRADVGDALETALEQLNRRYQPRLRFQKQRLLNGYRRFDPARGMEYTLDLLLECVTQRGHRRALARRVSLLRPLSRVEILPMPYVTEATRVQLVLPLLVAEAAAAPAFLEAFAANVLEPREHALLTLLLVYGPREGGRGAPDPFLGVKAAAAELERRYPGTRLAWLAVRAEAPSQVRLMDVVSKKHPVDTLFFLTTVWTRPGPEVLNRCRMNAISGWQAFFPVHFQEFNPALSPQRSPPGPPGAGPDPPSPPGADPSRGAPIGGRFDRQASAEGCFYNADYLAARARLAGELAGQEEEEALEGLEVMDVFLRFSGLHLFRAVEPGLVQKFSLRDCSPRLSEELYHRCRLSNLEGLGGRAQLAMALFEQEQANST

SEQ ID NO: 2843 - protein, 772 aa, Homo Sapiens
MRLSSLLALLRPALPLILGLSLGCSLSLLRVSWIQGEGEDPCVEAVGERGGPQNPDSRARLDQSDEDFKPRIVPYYRDPNKPYKKVLRTRYIQTELGSRERLLVAVLTSRATLSTLAVAVNRTVAHHFPRLLYFTGQRGARAPAGMQVVSHGDERPAWLMSETLRHLHTHFGADYDWFFIMQDDTYVQAPRLAALAGHLSINQDLYLGRAEEFIGAGEQARYCHGGFGYLLSRSLLLRLRPHLDGCRGDILSARPDEWLGRCLIDSLGVGCVSQHQGQQYRSFELAKNRDPEKEGSSAFLSAFAVHPVSEGTLMYRLHKRFSALELERAYSEIEQLQAQIRNLTVLTPEGEAGLSWPVGLPAPFTPHSRFEVLGWDYFTEQHTFSCADGAPKCPLQGASRADVGDALETALEQLNRRYQPRLRFQKQRLLNGYRRFDPARGMEYTLDLLLECVTQRGHRRALARRVSLLRPLSRVEILPMPYVTEATRVQLVLPLLVAEAAAAPAFLEAFAANVLEPREHALLTLLLVYGPREGGRGAPDPFLGVKAAAAELERRYPGTRLAWLAVRAEAPSQVRLMDVVSKKHPVDTLFFLTTVWTRPGPEVLNRCRMNAISGWQAFFPVHFQEFNPALSPQRSPPGPPGAGPDPPSPPGADPSRGAPIGGRFDRQASAEGCFYNADYLAARARLAGELAGQEEEEALEGLEVMDVFLRFSGLHLFRAVEPGLVQKFSLRDCSPRLSEELYHRCRLSNLEGLGGRAQLAMALFEQEQANST

SEQ ID NO: 2844 - protein, 86 aa, Homo Sapiens
MPSLPAPPAPLLLLGLLLLGSRPARGAGPEPPVLPIRSEKEPLPVRGAAGCTFGGKVYALDETWHPDLGEPFGVMRCVLCACEAGP

SEQ ID NO: 2845 - protein, 955 aa, Homo Sapiens
MPSLPAPPAPLLLLGLLLLGSRPARGAGPEPPVLPIRSEKEPLPVRGAAGCTFGGKVYALDETWHPDLGEPFGVMRCVLCACEAPQWGRRTRGPGRVSCKNIKPECPTPACGQPRQLPGHCCQTCPQERSSSERQPSGLSFEYPRDPEHRSYSDRGEPGAEERARGDGHTDFVALLTGPRSQAVARARVSLLRSSLRFSISYRRLDRPTRIRFSDSNGSVLFEHPAAPTQDGLVCGVWRAVPRLSLRLLRAEQLHVALVTLTHPSGEVWGPLIRHRALAAETFSAILTLEGPPQQGVGGITLLTLSDTEDSLHFLLLFRGLLEPRSGGLTQVPLRLQILHQGQLLRELQANVSAQEPGFAEVLPNLTVQEMDWLVLGELQMALEWAGRPGLRISGHIAARKSCDVLQSVLCGADALIPVQTGAAGSASLTLLGNGSLIYQVQVVGTSSEVVAMTLETKPQRRDQRTVLCHMAGLQPGGHTAVGICPGLGARGAHMLLQNELFLNVGTKDFPDGELRGHVAALPYCGHSARHDTLPVPLAGALVLPPVKSQAAGHAWLSLDTHCHLHYEVLLAGLGGSEQGTVTAHLLGPPGTPGPRRLLKGFYGSEAQGVVKDLEPELLRHLAKGMASLMITTKGSPRGELRGQVHIANQCEVGGLRLEAAGAEGVRALGAPDTASAAPPVVPGLPALAPAKPGGPGRPRDPNTCFFEGQQRPHGARWAPNYDPLCSLCTCQRRTVICDPVVCPPPSCPHPVQAPDQCCPVCPEKQDVRDLPGLPRSRDPGEGCYFDGDRSWRAAGTRWHPVVPPFGLIKCAVCTCKGGTGEVHCEKVQCPRLACAQPVRVNPTDCCKQCPVGSGAHPQLGDPMQADGPRGCRFAGQWFPESQSWHPSVPPFGEMSCITCRCGAGVPHCERDDCSLPLSCGSGKESRCCSRCTAHRRPAPETRTDPELEKEAEGS

SEQ ID NO: 2846 - protein, 915 aa, Homo Sapiens
MPSLPAPPAPLLLLGLLLLGSRPARGAGPEPPVLPIRSEKEPLPVRGAAGCTFGGKVYALDETWHPDLGEPFGVMRCVLCACEAPQWGRRTRGPGRVSCKNIKPECPTPACGQPRQLPGHCCQTCPQERSSSERQPSGLSFEYPRDPEHRSYSDRGEPGAEERARGDGHTDFVALLTGPRSQAVARARVSLLRSSLRFSISYRRLDRPTRIRFSDSNGSVLFEHPAAPTQDGLVCGVWRAVPRLSLRLLRAEQLHVALVTLTHPSGEVWGPLIRHRALAAETFSAILTLEGPPQQGVGGITLLTLSDTEDSLHFLLLFRGLLEPRSGGLTQVPLRLQILHQGQLLRELQANVSAQEPGFAEVLPNLTVQEMDWLVLGELQMALEWAGRPGLRISGHIAARKSCDVLQSVLCGADALIPVQTGAAGSASLTLLGNGSLIYQAVGICPGLGARGAHMLLQNELFLNVGTKDFPDGELRGHVAALPYCGHSARHDTLPVPLAGALVLPPVKSQAAGHAWLSLDTHCHLHYEVLLAGLGGSEQGTVTAHLLGPPGTPGPRRLLKGFYGSEAQGVVKDLEPELLRHLAKGMASLMITTKGSPRGELRGQVHIANQCEVGGLRLEAAGAEGVRALGAPDTASAAPPVVPGLPALAPAKPGGPGRPRDPNTCFFEGQQRPHGARWAPNYDPLCSLCTCQRRTVICDPVVCPPPSCPHPVQAPDQCCPVCPEKQDVRDLPGLPRSRDPGEGCYFDGDRSWRAAGTRWHPVVPPFGLIKCAVCTCKGGTGEVHCEKVQCPRLACAQPVRVNPTDCCKQCPVGSGAHPQLGDPMQADGPRGCRFAGQWFPESQSWHPSVPPFGEMSCITCRCGAGVPHCERDDCSLPLSCGSGKESRCCSRCTAHRRPAPETRTDPELEKEAEGS

SEQ ID NO: 2847 - protein, 350 aa, Homo Sapiens
MPSLPAPPAPLLLLGLLLLGSRPARGAGPEPPVLPIRSEKEPLPVRGAAGCTFGGKVYALDETWHPDLGEPFGVMRCVLCACEAPQWGRRTRGPGRVSCKNIKPECPTPACGQPRQLPGHCCQTCPQERSSSERQPSGLSFEYPRDPEHRSYSDRGEPGAEERARGDGHTDFVALLTGPRSQAVARARVSLLRSSLRFSISYRRLDRPTRIRFSDSNGSVLFEHPAAPTQDGLVCGVWRAVPRLSLRLLRAEQLHVALVTLTHPSGEVWGPLIRHRALAAETFSAILTLEGPPQQGVGGITLLTLSDTEDSLHFLLLFRGLLEPRSGDSTPGAATARTSGQCLSPGTRLC

SEQ ID NO: 2848 - protein, 954 aa, Homo Sapiens
MPSLPAPPAPLLLLGLLLLGSRPARGAGPEPPVLPIRSEKEPLPVRGAAGCTFGGKVYALDETWHPDLGEPFGVMRCVLCACEAPQWGRRTRGPGRVSCKNIKPECPTPACGQPRQLPGHCCQTCPQERSSSERQPSGLSFEYPRDPEHRSYSDRGEPGAEERARGDGHTDFVALLTGPRSQAVARARVSLLRSSLRFSISYRRLDRPTRIRFSDSNGSVLFEHPAAPTQDGLVCGVWRAVPRLSLRLLRAEQLHVALVTLTHPSGEVWGPLIRHRALAAETFSAILTLEGPPQQGVGGITLLTLSDTEDSLHFLLLFRGLLEPRSGGLTQVPLRLQILHQGQLLRELQANVSAQEPGFAEVLPNLTVQEMDWLVLGELQMALEWAGRPGLRISGHIAARKSCDVLQSVLCGADALIPVQTGAAGSASLTLLGNGSLIYQVQVVGTSSEVVAMTLETKPQRRDQRTVLCHMAGLQPGGHTAVGICPGLGARGAHMLLQNELFLNVGTKDFPDGELRGHVAALPYCGHSARHDTLPVPLAGALVLPPVKSQAAGHAWLSLDTHCHLHYEVLLAGLGGSEQGTVTAHLLGPPGTPGPRRLLKGFYGSEAQGVVKDLEPELLRHLAKGMASLMITTKGSPRGELRGQVHIANQCEVGGLRLEAAGAEGVRALGAPDTASAAPPVVPGLPALAPAKPGGPGRPRDPNTCFFEGQQRPHGARWAPNYDPLCSLCTCQRRTVICDPVVCPPPSCPHPVQAPDQCCPVCPEKQDVRDLPGLPRSRDPGEGCYFDGDRSWRAAGTRWHPVVPPFGLIKCAVCTCKGGTGEVHCEKVQCPRLACAQPVRVNPTDCCKQCPVGSGAHPQLGDPMQADGPRGCRFAGQWFPESQSWHPSVPPFGEMSCITCRCGAGVPHCERDDCSLPLSCGSGKESRCCSRCTAHRRPPETRTDPELEKEAEGS

SEQ ID NO: 2849 - protein, 94 aa, Homo Sapiens
MPSLPAPPAPLLLLGLLLLGSRPARGAGPEPPVLPIRSEKEPLPVRGAAGCTFGGKVYALDETWHPDLGEPFGVMRCVLCACEATGTLRPREMK

SEQ ID NO: 2850 - protein, 450 aa, Homo Sapiens
MGGMKYIFSLLFFLLLEGGKTEQVKHSETYCMFQDKKYRVGERWHPYLEPYGLVYCVNCICSENGNVLCSRVRCPNVHCLSPVHIPHLCCPRCPDSLPPVNNKVTSKSCEYNGTTYQHGELFVAEGLFQNRQPNQCTQCSCSEGNVYCGLKTCPKLTCAFPVSVPDSCCRVCRGDGELSWEHSDGDIFRQPANREARHSYHRSHYDPPPSRQAGGLSRFPGARSHRGALMDSQQASGTIVQIVINNKHKHGQVCVSNGKTYSHGESWHPNLRAFGIVECVLCTCNVTKQECKKIHCPNRYPCKYPQKIDGKCCKVCPGKKAKELPGQSFDNKGYFCGEETMPVYESVFMEDGETTRKIALETERPPQVEVHVWTIRKGILQHFHIEKISKRMFEELPHFKLVTRTTLSQWKIFTEGEAQISQMCSSRVCRTELEDLVKVLYLERSEKGHC

SEQ ID NO: 2851 - protein, 456 aa, Homo Sapiens
MRKKWKMGGMKYIFSLLFFLLLEGGKTEQVKHSETYCMFQDKKYRVGERWHPYLEPYGLVYCVNCICSENGNVLCSRVRCPNVHCLSPVHIPHLCCPRCPDSLPPVNNKVTSKSCEYNGTTYQHGELFVAEGLFQNRQPNQCTQCSCSEGNVYCGLKTCPKLTCAFPVSVPDSCCRVCRGDGELSWEHSDGDIFRQPANREARHSYHRSHYDPPPSRQAGGLSRFPGARSHRGALMDSQQASGTIVQIVINNKHKHGQVCVSNGKTYSHGESWHPNLRAFGIVECVLCTCNVTKQECKKIHCPNRYPCKYPQKIDGKCCKVCPGKKAKELPGQSFDNKGYFCGEETMPVYESVFMEDGETTRKIALETERPPQVEVHVWTIRKGILQHFHIEKISKRMFEELPHFKLVTRTTLSQWKIFTEGEAQISQMCSSRVCRTELEDLVKVLYLERSEKGHC

SEQ ID NO: 2852 - protein, 457 aa, Homo Sapiens
MRKKWKMGGMKYIFSLLFFLLLEGGKTEQVKHSETYCMFQDKKYRVGERWHPYLEPYGLVYCVNCICSENGNVLCSRVRCPNVHCLSPVHIPHLCCPRCPDSLPPVNNKVTSKSCEYNGTTYQHGELFVAEGLFQNRQPNQCTQCSCSEGNVYCGLKTCPKLTCAFPVSVPDSCCRVCRGDGELSWEHSDGDIFRQPANREARHSYHRSHYDPPPSRQAGGLSRFPGARSHRGALMDSQQASGTIVQIVINNKHKHGQVCVSNGKTYSHGESWHPNLRAFGIVECVLCTCNVTKQECKKIHCPNRYPCKYPQKIDGKCCKVCPGKKAKEELPGQSFDNKGYFCGEETMPVYESVFMEDGETTRKIALETERPPQVEVHVWTIRKGILQHFHIEKISKRMFEELPHFKLVTRTTLSQWKIFTEGEAQISQMCSSRVCRTELEDLVKVLYLERSEKGHC

SEQ ID NO: 2853 - protein, 458 aa, Homo Sapiens
MRKKWKMGGMKYIFSLLFFLLLEGGKTEQVKHSETYCMFQDKKYRVGERWHPYLEPYGLVYCVNCICSENGNVLCSRVRCPNVHCLSPVHIPHLCCPRCPEDSLPPVNNKVTSKSCEYNGTTYQHGELFVAEGLFQNRQPNQCTQCSCSEGNVYCGLKTCPKLTCAFPVSVPDSCCRVCRGDGELSWEHSDGDIFRQPANREARHSYHRSHYDPPPSRQAGGLSRFPGARSHRGALMDSQQASGTIVQIVINNKHKHGQVCVSNGKTYSHGESWHPNLRAFGIVECVLCTCNVTKQECKKIHCPNRYPCKYPQKIDGKCCKVCPGKKAKEELPGQSFDNKGYFCGEETMPVYESVFMEDGETTRKIALETERPPQVEVHVWTIRKGILQHFHIEKISKRMFEELPHFKLVTRTTLSQWKIFTEGEAQISQMCSSRVCRTELEDLVKVLYLERSEKGHC

SEQ ID NO: 2854 - protein, 378 aa, Homo Sapiens
MRKKWKMGGMKYIFSLLFFLLLEGGKTEQVKHSETYCMFQDKKYRVGERWHPYLEPYGLVYCVNCICSENGNVLCSRVRCPNVHCLSPVHIPHLCCPRCPGDGELSWEHSDGDIFRQPANREARHSYHRSHYDPPPSRQAGGLSRFPGARSHRGALMDSQQASGTIVQIVINNKHKHGQVCVSNGKTYSHGESWHPNLRAFGIVECVLCTCNVTKQECKKIHCPNRYPCKYPQKIDGKCCKVCPGKKAKEELPGQSFDNKGYFCGEETMPVYESVFMEDGETTRKIALETERPPQVEVHVWTIRKGILQHFHIEKISKRMFEELPHFKLVTRTTLSQWKIFTEGEAQISQMCSSRVCRTELEDLVKVLYLERSEKGHC

SEQ ID NO: 2855 - protein, 142 aa, Homo Sapiens
MALVGLPGPDMFCLFHGKRYSPGESWHPYLEPQGLMYCLRCTCSEGAHVSCYRLHCPPVHCPQPVTEPQQCCPKCVEPHTPSGLRAPPKSCQHNGTMYQHGEIFSAHELFPSRLPNQCVLCSCTMRQVSNRMKRTVCSRSMG

SEQ ID NO: 2856 - protein, 93 aa, Homo Sapiens
MALVGLPGPDMFCLFHGKRYSPGESWHPYLEPQGLMYCLRCTCSENLTLPLDSGPHQSPASTTGPCTNTERSSVPMSCSPPACPTSVSSAAAQ

SEQ ID NO: 2857 - protein, 142 aa, Homo Sapiens
MALVGLPGPDMFCLFHGKRYSPGESWHPYLEPQGLMYCLRCTCSENLTLPLDSGPHQSPASTTGPCTNTERSSVPMSCSPPACPTSVSSAAAQRARSTAASQPAPNQAAQHPSRCQTPAARPAKMRQVSNRMKRTVCSRSMG

SEQ ID NO: 2858 - protein, 451 aa, Homo Sapiens
MVPEVRVLSSLLGLALLWFPLDSHARARPDMFCLFHGKRYSPGESWHPYLEPQGLMYCLRCTCSEGAHVSCYRLHCPPVHCPQPVTEPQQCCPKCVEPHTPSGLRAPPKSCQHNGTMYQHGEIFSAHELFPSRLPNQCVLCSCTEGQIYCGLTTCPEPGCPAPLPLPDSCCQACKDEASEQSDEEDSVQSLHGVRHPQDPCSSDAGRKRGPGTPAPTGLSAPLSFIPRHFRPKGAGSTTVKIVLKEKHKKACVHGGKTYSHGEVWHPAFRAFGPLPCILCTCEDGRQDCQRVTCPTEYPCRHPEKVAGKCCKICPEDKADPGHSEISSTRCPKAPGRVLVHTSVSPSPDNLRRFALEHEASDLVEIYLWKLVKDEETEAQRGEVPGPRPHSQNLPLDSDQESQEARLPERGTALPTARWPPRRSLERLPSPDPGAEGHGQSRQSDQDITKT

SEQ ID NO: 2859 - protein, 429 aa, Homo Sapiens
MVPEVRVLSSLLGLALLWFPLDSHARARPDMFCLFHGKRYSPGESWHPYLEPQGLMYCLRCTCSEGAHVSCYRLHCPPVHCPQPVTEPQQCCPKCVEPHTPSGLRAPPKSCQHNGTMYQHGEIFSAHELFPSRLPNQCVLCSCTEGQIYCGLTTCPEPGCPAPLPLPDSCCQACKDEASEQSDEEDSVQSLHGVRHPQDPCSSDAGRKRGPGTPAPTGLSAPLSFIPRHFRPKGAGSTTVKIVLKEKHKKACVHGGKTYSHGEVWHPAFRAFGPLPCILCTCEDGRQDCQRVTCPTEYPCRHPEKVAGKCCKICPEDKADPGHSEISSTRCPKAPGRVLVHTSVSPSPDNLRRFALEHEASDLVEIYLWKLVKGIFHLTQIKKVRKQDFQKEAQHFRLLAGPHEGHWNVFLAQTLELKVTASPDKVTKT

SEQ ID NO: 2860 - protein, 308 aa, Homo Sapiens
MVPEVRVLSSLLGLALLWFPLDSHARARPDMFCLFHGKRYSPGESWHPYLEPQGLMYCLRCTCSEGAHVSCYRLHCPPVHCPQPVTEPQQCCPKCVEPHTPSGLRAPPKSCQHNGTMYQHGEIFSAHELFPSRLPNQCVLCSCTEGQIYCGLTTCPEPGCPAPLPLPDSCCQACKDEASEQSDEEDSVQSLHGVRHPQDPCSSDAGRKRGPGTPAPTGLSAPLSFIPRHFRPKGAGSTTVKIVLKEKHKKEDKADPGHSEISSTRCPKAPGRVLVHTSVSPSPDNLRRFALEHEASDLVEIYLWKLVK

SEQ ID NO: 2861 - protein, 281 aa, Homo Sapiens [sequence omitted]

SEQ ID NO: 2862 - protein, 91 aa, Homo Sapiens
  misc_feature (1)..(1): Xaa can be any naturally occurring amino acid
XGDRSRISKENRQKKTGFTVEATGRQGRGMTGNLPLDSDQESQEARLPERGTALPTARWPPRRSLERLPSPDPGAEGHGQSRQSDQDITKT

SEQ ID NO: 2863 - protein, 177 aa, Homo Sapiens
  misc_feature (1)..(1): Xaa can be any naturally occurring amino acid
XSSDAGRKRGPGTPAPTGLSAPLSFIPRHFRPKGAGSTTVKIVLKEKHKKACVHGGKTYSHGEVWHPAFRAFGPLPCILCTCEDGRQDCQRVTCPTEYPCRHPEKVAGKCCKICPEDKADPGHSEISSTRCPKAPGRVLVHTSVSPSPDNLRRFALEHEASDLVEIYLWKLVTGTSS

SEQ ID NO: 2864 - protein, 507 aa, Homo Sapiens
MAGGEEAKRPPPRAPGDPLSSPSPTALPQGGSHTETEDRLFKHLFRGYNRWARPVPNTSDVVIVRFGLSIAQLIDVDEKNQMMTTNVWLKQEWSDYKLRWNPTDFGNITSLRVPSEMIWIPDIVLYNNADGEFAVTHMTKAHLFSTGTVHWVPPAIYKSSCSIDVTFFPFDQQNCKMKFGSWTYDKAKIDLEQMEQTVDLKDYWESGEWAIVNATGTYNSKKYDCCAEIYPDVTYAFVIRRLPLFYTINLIIPCLLISCLTVLVFYLPSDCGEKITLCISVLLSLTVFLLLITEIIPSTSLVIPLIGEYLLFTMIFVTLSIVITVFVLNVHHRSPSTHTMPHWVRGALLGCVPRWLLMNRPPPPVELCHPLRLKLSPSYHWLESNVDAEEREVVVEEEDRWACAGHVAPSVGTLCSHGHLHSGASGPKAEALLQEGELLLSPHMQKALEGVHYIADHLRSEDADSSVKEDWKYVAMVIDRIFLWLFIIVCFLGTIGLFLPPFLAGMI

SEQ ID NO: 2865 - protein, 19 aa, Homo Sapiens
MGPSCPVFLSFTKLSLWWL

SEQ ID NO: 2866 - protein, 50 aa, Homo Sapiens
MGPSCPVFLSFTKLSLWWLLLTPAGGEEAKRPPPRAPGDPLSSPSPTALP

SEQ ID NO: 2867 - protein, 81 aa, Homo Sapiens
MGPSCPVFLSFTKLSLWWLLLTPAGGEEAKRPPPRAPGDPLSSPSPTALPQGGSHTETEDRLFKHLFRGYNRWARPVPNTS

SEQ ID NO: 2868 - protein, 514 aa, Homo Sapiens
MGPSCPVFLSFTKLSLWWLLLTPAGGEEAKRPPPRAPGDPLSSPSPTALPQGGSHTETEDRLFKHLFRGYNRWARPVPNTSDVDEKNQMMTTNVWLKQEWSDYKLRWNPTDFGNITSLRVPSEMIWIPDIVLYNNADGEFAVTHMTKAHLFSTGTVHWVPPAIYKSSCSIDVTFFPFDQQNCKMKFGSWTYDKAKIDLEQMEQTVDLKDYWESGEWAIVNATGTYNSKKYDCCAEIYPDVTYAFVIRRLPLFYTINLIIPCLLISCLTVLVFYLPSDCGEKITLCISVLLSLTVFLLLITEIIPSTSLVIPLIGEYLLFTMIFVTLSIVITVFVLNVHHRSPSTHTMPHWVRGALLGCVPRWLLMNRPPPPVELCHPLRLKLSPSYHWLESNVDAEEREVVVEEEDRWACAGHVAPSVGTLCSHGHLHSGASGPKAEALLQEGELLLSPHMQKALEGVHYIADHLRSEDADSSVKEDWKYVAMVIDRIFLWLFIIVCFLGTIGLFLPPFLAGMI

SEQ ID NO: 2869 - protein, 108 aa, Homo Sapiens
MGPSCPVFLSFTKLSLWWLLLTPAGGEEAKRPPPRAPGDPLSSPSPTALPQGGSHTETEDRLFKHLFRGYNRWARPVPNTSDVVIVRFGLSIAQLIDVDEKNQMMTTN

SEQ ID NO: 2870 - protein, 529 aa, Homo Sapiens
MGPSCPVFLSFTKLSLWWLLLTPAGGEEAKRPPPRAPGDPLSSPSPTALPQGGSHTETEDRLFKHLFRGYNRWARPVPNTSDVVIVRFGLSIAQLIDVDEKNQMMTTNVWLKQEWSDYKLRWNPTDFGNITSLRVPSEMIWIPDIVLYNNADGEFAVTHMTKAHLFSTGTVHWVPPAIYKSSCSIDVTFFPFDQQNCKMKFGSWTYDKAKIDLEQMEQTVDLKDYWESGEWAIVNATGTYNSKKYDCCAEIYPDVTYAFVIRRLPLFYTINLIIPCLLISCLTVLVFYLPSDCGEKITLCISVLLSLTVFLLLITEIIPSTSLVIPLIGEYLLFTMIFVTLSIVITVFVLNVHHRSPSTHTMPHWVRGALLGCVPRWLLMNRPPPPVELCHPLRLKLSPSYHWLESNVDAEEREVVVEEEDRWACAGHVAPSVGTLCSHGHLHSGASGPKAEALLQEGELLLSPHMQKALEGVHYIADHLRSEDADSSVKEDWKYVAMVIDRIFLWLFIIVCFLGTIGLFLPPFLAGMI

SEQ ID NO: 2871 - protein, 154 aa, Homo Sapiens
MGPSCPVFLSFTKLSLWWLLLTPAGGEEAKRPPPRAPGDPLSSPSPTALPQGGSHTETEDRLFKHLFRGYNRWARPVPNTSDVVIVRFGLSIAQLIDVDEKNQMMTTNVWLKQEWSDYKLRWNPTDFGNITSLRVPSEMIWIPDIVLYNNRTAR

SEQ ID NO: 2872 - protein, 133 aa, Homo Sapiens
MGPSCPVFLSFTKLSLWWLLLTPAGGEEAKRPPPRAPGDPLSSPSPTALPQGGSHTETEDRLFKHLFRGYNRWARPVPNTSDVVIVRFGLSIAQLIDVVRLSSHRWPEEGDPRPPTAFPLLLPLPQPCPHAQQ

SEQ ID NO: 2873 - protein, 160 aa, Homo Sapiens
MAARGSGPRALRLLLLVQLVAGRCGLAGAAGGAQRGLSEPSSIAKHEDSLLKDLFQDYERWVRPVEHLNDKIKIKFGLAISQLVDVDEKNQLMTTNVWLKQEWIDVKLRWNPDDYGGIKVIRVPSDSVWTPDIVLFDNADGRFEGTSTKTVIRLLKIGNS

SEQ ID NO: 2874 - protein, 468 aa, Homo Sapiens
MAARGSGPRALRLLLLVQLVAGRCGLAGAAGGAQRGLSEPSSIAKHEDSLLKDLFQDYERWVRPVEHLNDKIKIKFGLAISQLVDVDEKNQLMTTNVWLKQEWIDVKLRWNPDDYGGIKVIRVPSDSVWTPDIVLFDNADGRFEGTSTKTVIRYNGTVTWTPPANYKSSCTIDVTFFPFDLQNCSMKFGSWTYDGSQVDIILEDQDVDKRDFFDNGEWEIVSATGSKGNRTDSCCWYPYVTYSFVIKRLPLFYTLFLIIPCIGLSFLTVLVFYLPSNEGEKICLCTSVLVSLTVFLLVIEEIIPSSSKVIPLIGEYLVFTMIFVTLSIMVTVFAINIHHRSSSTHNAMAPLVRKIFLHTLPKLLCMRSHVDRYFTQKEETESGSGPKSSRNTLEAALDSIRYITRHIMKENDVREVVEDWKFIAQVLDRMFLWTFLFVSIVGSLGLFVPVIYKWANILIPVHIGNANK

SEQ ID NO: 2875 - protein, 182 aa, Homo Sapiens
  misc_feature (1)..(1): Xaa can be any naturally occurring amino acid
XRPVEHLNDKIKIKFGLAISQLVDVDEKNQLMTTNVWLKQEWIDVKLRWNPDDYGGIKVIRVPSDSVWTPDIVLFDNADGRFEGTSTKTVIRYNGTVTWTPPANYKSSCTIDVTFFPFDLQNCSMKFGSWTYDGSQVDIILEDQDVDKRDFFDNGEWEIVSATGSKGNRTDSCCWLLKIGNS

SEQ ID NO: 2876 - protein, 56 aa, Homo Sapiens
  misc_feature (1)..(1): Xaa can be any naturally occurring amino acid
XTLSIMVTVFAINIHHRSSSTHNAMAPLVRKIFLHTLPKLLCMRSHVDRLLKIGNS

SEQ ID NO: 2877 - protein, 429 aa, Homo Sapiens
MSTKVYLDLEWTDYRLSWDPAEHDGIDSLRITAESVWLPDVVLLNNNDGNFDVALDISVVVSSDGSVRWQPPGIYRSSCSIQVTYFPFDWQNCTMVFSSYSYDSSEVSLQTGLGPDGQGHQEIHIHEGTFIENGQWEIIHKPSRLIQPPGDPRGGREGQRQEVIFYLIIRRKPLFYLVNVIAPCILITLLAIFVFYLPPDAGEKMGLSIFALLTLTVFLLLLADKVPETSLSVPIIIKYLMFTMVLVTFSVILSVVVLNLHHRSPHTHQMPLWVRQIFIHKLPLYLRLKRPKPERDLMPEPPHCSSPGSGWGRGTDEYFIRKPPSDFLFPKPNRFQPELSAPDLRRFIDGPNRAVALLPELREVVSSISYIARQLQEQEDHDALKEDWQFVAMVVDRLFLWTFIIFTSVGTLVIFLDATYHLPPPDPFP

SEQ ID NO: 2878 - protein, 380 aa, Homo Sapiens
MSTKVYLDLEWTDYRLSWDPAEHDGIDSLRITAESVWLPDVVLLNNNDGNFDVALDISVVVSSDGSVRWQPPGIYRSSCSIQVTYFPFDWQNCTMVFSSYSYDSSEVSLQTGLGPDGQGHQEIHIHEGTFIENGQWEIIHKPSRLIQPPGDPRGGREGQRQEVIFYLIIRRKPLFYLVNVIAPCILITLLAIFVFYLPPDAVILSVVVLNLHHRSPHTHQMPLWVRQIFIHKLPLYLRLKRPKPERDLMPEPPHCSSPGSGWGRGTDEYFIRKPPSDFLFPKPNRFQPELSAPDLRRFIDGPNRAVALLPELREVVSSISYIARQLQEQEDHDALKEDWQFVAMVVDRLFLWTFIIFTSVGTLVIFLDATYHLPPPDPFP

SEQ ID NO: 2879 - protein, 158 aa, Homo Sapiens
MTPGALLMLLGALGAPLAPGVRGSEAEGRLREKLFSGYDSSVRPAREVGDRVRVSVGLILAQLISLNEKDEEMSTKVYLDLAVLECGGSSHPPASGGTSTSAEITAEWTDYRLSWDPAEHDGIDSLRITAESVWLPDVVLLNNNDGNFDVALDISVVV

SEQ ID NO: 2880 - protein, 501 aa, Homo Sapiens
MTPGALLMLLGALGAPLAPGVRGSEAEGRLREKLFSGYDSSVRPAREVGDRVRVSVGLILAQLISLNEKDEEMSTKVYLDLEWTDYRLSWDPAEHDGIDSLRITAESVWLPDVVLLNNNDGNFDVALDISVVVSSDGSVRWQPPGIYRSSCSIQVTYFPFDWQNCTMVFSSYSYDSSEVSLQTGLGPDGQGHQEIHIHEGTFIENGQWEIIHKPSRLIQPPGDPRGGREGQRQEVIFYLIIRRKPLFYLVNVIAPCILITLLAIFVFYLPPDAGEKMGLSIFALLTLTVFLLLLADKVPETSLSVPIIIKYLMFTMVLVTFSVILSVVVLNLHHRSPHTHQMPLWVRQIFIHKLPLYLRLKRPKPERDLMPEPPHCSSPGSGWGRGTDEYFIRKPPSDFLFPKPNRFQPELSAPDLRRFIDGPNRAVALLPELREVVSSISYIARQLQEQEDHDALKEDWQFVAMVVDRLFLWTFIIFTSVGTLVIFLDATYHLPPPDPFP

SEQ ID NO: 2881 - protein, 37 aa, Homo Sapiens
MVVDRLFLWTFIIFTSVGTLVIFLDATYHLPPPDPFP

SEQ ID NO: 2882 - protein, 316 aa, Homo Sapiens
  misc_feature (1)..(1): Xaa can be any naturally occurring amino acid
XPAREVGDRVRVSVGLILAQLISLNEKDEEMSTKVYLDLEWTDYRLSWDPAEHDGIDSLRITAESVWLPDVVLLNNNDGNFDVALDISVVVSSDGSVRWQPPGIYRSSCSIQVTYFPFDWQNCTMVFSSYSYDSSEVSLQTGLGPDGQGHQEIHIHEGTFIGEKMGLSIFALLTLTVFLLLLADKVPETSLSVPIIIKYLMFTMVLVTFSVILSVVVLNLHHRSPHTHQMPLWVRQIFIHKLPLYLRLKRPKPERDLMPEPPHCSSPGSGWGRGTDEYFIRKPPSDFLFPKPNRFQPELSAPDLRRFIDGPNRAVA

SEQ ID NO: 2883 - protein, 172 aa, Homo Sapiens
MEGPVLTLGLLAALAVCGSWGLNEEERLIRHLFQEKGYNKELRPVAHKEESVDVALALTLSNLISLGWTDNRLKWNAEEFGNISVLRLPPDMVWLPEIVLENNNDGSFQISYSCNVLVYHYGFVYWLPPAIFRSSCPISVTYFPFDWQNCSLKFSSLKYTAKEITLSLKQDA

SEQ ID NO: 2884 - protein, 502 aa, Homo Sapiens
MEGPVLTLGLLAALAVCGSWGLNEEERLIRHLFQEKGYNKELRPVAHKEESVDVALALTLSNLISLGWTDNRLKWNAEEFGNISVLRLPPDMVWLPEIVLENNNDGSFQISYSCNVLVYHYGFVYWLPPAIFRSSCPISVTYFPFDWQNCSLKFSSLKYTAKEITLSLKQDAKENRTYPVEWIIIDPEGFTENGEWEIVHRPARVNVDPRAPLDSPSRQDITFYLIIRRKPLFYIINILVPCVLISFMVNLVFYLPADSGEKTSVAISVLLAQSVFLLLISKRLPATSMAIPLIGKFLLFGMVLVTMVVVICVIVLNIHFRTPSTHVLSEGVKKLFLETLPELLHMSRPAEDGPSPGALVRRSSSLGYISKAEEYFLLKSRSDLMFEKQSERHGLARRLTTARRPPASSEQAQQELFNELKPAVDGANFIVNHMRDQNNYNEEKDSWNRVARTVDRLCLFVVTPVMVVGTAWIFLQGVYNQPPPQPFPGDPYSYNVQDKRFI

SEQ ID NO: 2885 - protein, 108 aa, Homo Sapiens
MEGPVLTLGLLAALAVCGSWGLNEEERLIRHLFQEKGYNKELRPVAHKEESVDVALALTLSNLISLKEVEETLTTNVWIEHGWTDNRLKWNAEEFGNISVLRLPPDMQ

SEQ ID NO: 2886 - protein, 235 aa, Homo Sapiens
MEGPVLTLGLLAALAVCGSWGLNEEERLIRHLFQEKGYNKELRPVAHKEESVDVALALTLSNLISLKEVEETLTTNVWIEHGWTDNRLKWNAEEFGNISVLRLPPDMVWLPEIVLENNNDGSFQISYSCNVLVYHYGFVYWLPPAIFRSSCPISVTYFPFDWQNCSLKFRERGVGDSPPAGQGQRGPQSPSGQPQPPGHHLLPHHPPQAPLLHHQHPGALRAHLLHGQPGLLPTG

SEQ ID NO: 2887 - protein, 171 aa, Homo Sapiens
MEGPVLTLGLLAALAVCGSWGLNEEERLIRHLFQEKGYNKELRPVAHKEESVDVALALTLSNLISLKEVEETLTTNVWIEHGWTDNRLKWNAEEFGNISVLRLPPDMVWLPEIVLENNNDGSFQISYSCNVLVYHYGFVYWLPPAIFRSSCPISVTYFPFDWQNCSLKFRW

SEQ ID NO: 2888 - protein, 517 aa, Homo Sapiens
MEGPVLTLGLLAALAVCGSWGLNEEERLIRHLFQEKGYNKELRPVAHKEESVDVALALTLSNLISLKEVEETLTTNVWIEHGWTDNRLKWNAEEFGNISVLRLPPDMVWLPEIVLENNNDGSFQISYSCNVLVYHYGFVYWLPPAIFRSSCPISVTYFPFDWQNCSLKFSSLKYTAKEITLSLKQDAKENRTYPVEWIIIDPEGFTENGEWEIVHRPARVNVDPRAPLDSPSRQDITFYLIIRRKPLFYIINILVPCVLISFMVNLVFYLPADSGEKTSVAISVLLAQSVFLLLISKRLPATSMAIPLIGKFLLFGMVLVTMVVVICVIVLNIHFRTPSTHVLSEGVKKLFLETLPELLHMSRPAEDGPSPGALVRRSSSLGYISKAEEYFLLKSRSDLMFEKQSERHGLARRLTTARRPPASSEQAQQELFNELKPAVDGANFIVNHMRDQNNYNEEKDSWNRVARTVDRLCLFVVTPVMVVGTAWIFLQGVYNQPPPQPFPGDPYSYNVQDKRFI

SEQ ID NO: 2889 - protein, 411 aa, Homo Sapiens
MQCSWKAVLLLALASIAIQYTAIRTFTAKSFHTCPGLAEAGLAERLCEESPTFAYNLSRKTHILILATTRSGSSFVGQLFNQHLDVFYLFEPLYHVQNTLIPRFTQGKSPADRRVMLGASRDLLRSLYDCDLYFLENYIKPPPVNHTTDRIFRRGASRVLCSRPVCDPPGPADLVLEEGDCVRKCGLLNLTVAAEACRERSHVAIKTVRVPEVNDLRALVEDPRLNLKVIQLVRDPRGILASRSETFRDTYRLWRLWYGTGRKPYNLDVTQLTTVCEDFSNSVSTGLMRPPWLKGKYMLVRYEDLARNPMKKTEEIYGFLGIPLDSHVARWIQNNTRGDPTLGKHKYGTVRNSAATAEKWRFRLSYDIVAFAQNACQQVLAQLGYKIAASEEELKNPSVSLVEERDFRPFS

SEQ ID NO: 2890 - protein, 33 aa, Homo Sapiens
MHHQWLLLAACFWVIFMFMVASKFITLTFKDPD

SEQ ID NO: 2891 - protein, 64 aa, Homo Sapiens
MHHQWLLLAACFWVIFMFMVASKFITLTFKDPDVYSAKQEFLFLTTMPEVRKLPEEKHIPEELK

SEQ ID NO: 2892 - protein, 85 aa, Homo Sapiens
MHHQWLLLAACFWVIFMFMVASKFITLTFKDPDVYSAKQEFLFLTTMPEVRKLPEEKHIPEELKPTGKELPDSQLVQPLVYMERL

SEQ ID NO: 2893 - protein, 133 aa, Homo Sapiens
MHHQWLLLAACFWVIFMFMVASKFITLTFKDPDVYSAKQEFLFLTTMPEVRKLPEEKHIPEELKPTGKELPDSQLVQPLVYMERLELIRNVCRDDALKNLSHTPVSKFVLDRIFVCDKHKILFCQTPKVGNTQ

SEQ ID NO: 2894 - protein, 141 aa, Homo Sapiens
MHHQWLLLAACFWVIFMFMVASKFITLTFKDPDVYSAKQEFLFLTTMPEVRKLPEEKHIPEELKPTGKELPDSQLVQPLVYMERLELIRNVCRDDALKNLSHTPVSKFVLDRIFVCDKHKILFCQTPKVGNTQWKKVLIVL

SEQ ID NO: 2895 - protein, 356 aa, Homo Sapiens
MHHQWLLLAACFWVIFMFMVASKFITLTFKDPDVYSAKQEFLFLTTMPEVRKLPEEKHIPEELKPTGKELPDSQLVQPLVYMERLELIRNVCRDDALKNLSHTPVSKFVLDRIFVCDKHKILFCQTPKVGNTQWKKVLIVLNGAFSSIEEIPENVVHDHEKNGLPRLSSFSDAEIQKRLKTYFKFFIVRDPFERLISAFKDKFVHNPRFEPWYRHEIAPGIIRKYRRNRTETRGIQFEDFVRYLGDPNHRWLDLQFGDHIIHWVTYVELCAPCEIMYSVIGHHETLEDDAPYILKEAGIDHLVSYPTIPPGITVYNRTKVEHYFLGISKRDIRRLYARFEGDFKLFGYQKPDFLLN

SEQ ID NO: 2896 - protein, 356 aa, Homo Sapiens; identical to SEQ ID NO: 2895

SEQ ID NO: 2897 - protein, 142 aa, Homo Sapiens
MQRKAGKKEHVQLRDKRNQEPQFRGNTARKCEPQAAEGRVSEWLRCDNMHHQWLLLAACFWVIFMFMVASKFITLTFKDPDVYSAKQEFLFLTTMPEVRKLPEEKHIPEELKPTGKELPDSQLVQPLVYMERLELIRNVCRD

SEQ ID NO: 2898 - protein, 347 aa, Homo Sapiens
MKPALLEVMRMNRICRMVLATCLGSFILVIFYFQIMRRNPFGVDICCRKGSRSPLQELYNPIQLELSNTAVLHQMRRDQVTDTCRANSATSRKRRVLTPNDLKHLVVDEDHELIYCYVPKVACTNWKRLMMVLTGRGKYSDPMEIPANEAHVSANLKTLNQYSIPEINHRLKSYMKFLFVREPFERLVSAYRNKFTQKYNISFHKRYGTKIIKRQRKNATQEALRKGDDVKFEEFVAYLIDPHTQREEPFNEHWQTVYSLCHPCHIHYDLVGKYETLEEDSNYVLQLAGVGSYLKFPTYAKSTRTTDEMTTEFFQNISSEHQTQLYEVYKLDFLMFNYSVPSYLKLE

SEQ ID NO: 2899 - protein, 72 aa, Homo Sapiens
MKPALLEVMRMNRICRMVLATCLGSFILVIFYFQIMRRNPFGVDICCRKGSRSPLQELYNPIQVSFKHSVSM

SEQ ID NO: 2900 - protein, 352 aa, Homo Sapiens
MKPALLEVMRMNRICRMVLATCLGSFILVIFYFQSMLHPVMRRNPFGVDICCRKGSRSPLQELYNPIQLELSNTAVLHQMRRDQVTDTCRANSATSRKRRVLTPNDLKHLVVDEDHELIYCYVPKVACTNWKRLMMVLTGRGKYSDPMEIPANEAHVSANLKTLNQYSIPEINHRLKSYMKFLFVREPFERLVSAYRNKFTQKYNISFHKRYGTKIIKRQRKNATQEALRKGDDVKFEEFVAYLIDPHTQREEPFNEHWQTVYSLCHPCHIHYDLVGKYETLEEDSNYVLQLAGVGSYLKFPTYAKSTRTTDEMTTEFFQNISSEHQTQLYEVYKLDFLMFNYSVPSYLKLE

SEQ ID NO: 2901 - protein, 77 aa, Homo Sapiens
MKPALLEVMRMNRICRMVLATCLGSFILVIFYFQSMLHPVMRRNPFGVDICCRKGSRSPLQELYNPIQVSFKHSVSM

SEQ ID NO: 2902 - protein, 158 aa, Homo Sapiens
MRRNPFGVDICCRKGSRSPLQELYNPIQLELSNTAVLHQMRRDQVTDTCRANSATSRKRRVLTPNDLKHLVVDEDHELIYCYVPKVACTNWKRLMMVLTGRGKYSDPMEIPANEAHVSANLKTLNQYSIPEINHRLKSYMKFLFVREPFERLVSAYRN

SEQ ID NO: 2903 - protein, 225 aa, Homo Sapiens [sequence omitted]

SEQ ID NO: 2904 - protein, 341 aa, Homo Sapiens
MGRRCCRRRVLAAACLGAALLLLCAAPRSLRPAFGNRALGSSWLGGEKRSPLQKLYDLDQDPRSTLAKVHRQRRDLLNSACSRHSRRQRLLQPEDLRHVLVDDAHGLLYCYVPKVACTNWKRVLLALSGQARGDPRAISAQEAHAPGRLPSLADFSPAEINRRLRAYLAFLFVREPFERLASAYRNKLARPYSAAFQRRYGARIVQRLRPRALPDARARGHDVRFAEFLAYLLDPRTRREEPFNEHWERAHALCHPCRLRYDVVGKFETLAEDAAFVLGLAGASDLSFPGPPRPRGAAASRDLAARLFRDISPFYQRRLFDLYKMDFLLFNYSAPSYLRLL

SEQ ID NO: 2905 - protein, 386 aa, Homo Sapiens
MLLPKKMKLLLFLVSQMAILALFFHMYSHNISSLSMKAQPERMHVLVLSSWRSGSSFVGQLFGQHPDVFYLMEPAWHVWMTFKQSTAWMLHMAVRDLIRAVFLCDMSVFDAYMEPGPRRQSSLFQWENSRALCSAPACDIIPQDEIIPRAHCRLLCSQQPFEVVEKACRSYSHVVLKEVRFFNLQSLYPLLKDPSLNLHIVHLVRDPRAVFRSRERTKGDLMIDSRIVMGQHEQKLKKEDQPYYVMQVICQSQLEIYKTIQSLPKALQERYLLVRYEDLARAPVAQTSRMYEFVGLEFLPHLQTWVHNITRGKGMGDHAFHTNARDALNVSQAWRWSLPYEKVSRLQKACGDAMNLLGYRHVRSEQEQRNLLLDLLSTWTVPEQIH

SEQ ID NO: 2906 - protein, 386 aa, Homo Sapiens; identical to SEQ ID NO: 2905

SEQ ID NO: 2907 - protein, 411 aa, Homo Sapiens
MGMRARVPKVAHSTRRPPAARMWLPRFSSKTVTVLLLAQTTCLLLFIISRPGPSSPAGGEDRVHVLVLSSWRSGSSFLGQLFSQHPDVFYLMEPAWHVWTTLSQGSAATLHMAVRDLMRSIFLCDMDVFDAYMPQSRNLSAFFNWATSRALCSPPACSAFPRGTISKQDVCKTLCTRQPFSLAREACRSYSHVVLKEVRFFNLQVLYPLLSDPALNLRIVHLVRDPRAVLRSREAAGPILARDNGIVLGTNGKWVEADPHLRLIREVCRSHVRIAEAATLKPPPFLRGRYRLVRFEDLAREPLAEIRALYAFTGLTLTPQLEAWIHNITHGSGIGKPIEAFHTSSRNARNVSQAWRHALPFTKILRVQEVCAGALQLLGYRPVYSADQQRDLTLDLVLPRGPDHFSWASPD

SEQ ID NO: 2908 - protein, 99 aa, Homo Sapiens
MSRHLPWICDQRCSSPSSPGRWPPAARMWLPRFSSKTVTVLLLAQTTCLLLFIISRPGPSSPAGGEDRVHVLVLSSWRSGSSFLGQLFSQHPDVFYLME

SEQ ID NO: 2909 - protein, 395 aa, Homo Sapiens
MWLPRVSSTAVTALLLAQTFLLLFLVSRPGPSSPAGGEARVHVLVLSSWRSGSSFVGQLFNQHPDVFYLMEPAWHVWTTLSQGSAATLHMAVRDLVRSVFLCDMDVFDAYLPWRRNLSDLFQWAVSRALCSPPACSAFPRGAISSEAVCKPLCARQSFTLAREACRSYSHVVLKEVRFFNLQVLYPLLSDPALNLRIVHLVRDPRAVLRSREQTAKALARDNGIVLGTNGTWVEADPGLRVVREVCRSHVRIAEAATLKPPPFLRGRYRLVRFEDLAREPLAEIRALYAFTGLSLTPQLEAWIHNITHGSGPGARREAFKTSSRNALNVSQAWRHALPFAKIRRVQELCAGALQLLGYRPVYSEDEQRNLALDLVLPRGLNGFTWASSTASHPRN

SEQ ID NO: 2910 - protein, 395 aa, Homo Sapiens; identical to SEQ ID NO: 2909

SEQ ID NO: 2911 - protein, 486 aa, Homo Sapiens
MKGRRRRRREYCKFALLLVLYTLVLLLVPSVLDGGRDGDKGAEHCPGLQRSLGVWSLEAAAAGEREQGAEARAAEEGGANQSPRFPSNLSGAVGEAVSREKQHIYVHATWRTGSSFLGELFNQHPDVFYLYEPMWHLWQALYPGDAESLQGALRDMLRSLFRCDFSVLRLYAPPGDPAARAPDTANLTTAALFRWRTNKVICSPPLCPGAPRARAEVGLVEDTACERSCPPVAIRALEAECRKYPVVVIKDVRLLDLGVLVPLLRDPGLNLKVVQLFRDPRAVHNSRLKSRQGLLRESIQVLRTRQRGDRFHRVLLAHGVGARPGGQSRALPAAPRADFFLTGALEVICEAWLRDLLFARGAPAWLRRRYLRLRYEDLVRQPRAQLRRLLRFSGLRALAALDAFALNMTRGAAYGADRPFHLSARDAREAVHAWRERLSREQVRQVEAACAPAMRLLAYPRSGEEGDAEQPREGETPLEMDADGAT

SEQ ID NO: 2912 - protein, 178 aa, Homo Sapiens
MTLRPGTMRLACMFSSILLFGAAGLLLFISLQDPTELAPQQVPGIKFNIRPRQPHHDLPPGGSQDGDLKEPTERVTRDLSSGAPRGRNLPAPDQPQPPLQRGTRLRLRQRRRRLLIKKMPAAATIPANSSDAPFIRPGPGTLDGRWVSLHRSQQERKRVMQEACAKYRASSSRRAVTP

SEQ ID NO: 2913 - protein, 424 aa, Homo Sapiens
MTLRPGTMRLACMFSSILLFGAAGLLLFISLQDPTELAPQQVPGIKFNIRPRQPHHDLPPGGSQDGDLKEPTERVTRDLSSGAPRGRNLPAPDQPQPPLQRGTRLRLRQRRRRLLIKKMPAAATIPANSSDAPFIRPGPGTLDGRWVSLHRSQQERKRVMQEACAKYRASSSRRAVTPRHVSRIFVEDRHRVLYCEVPKAGCSNWKRVLMVLAGLASSTADIQHNTVHYGSALKRLDTFDRQGILHRLSTYTKMLFVREPFERLVSAFRDKFEHPNSYYHPVFGKAILARYRANASREALRTGSGVRFPEFVQYLLDVHRPVGMDIHWDHVSRLCSPCLIDYDFVGKFESMEDDANFFLSLIRAPRNLTFPRFKDRHSQEARTTARIAHQYFAQLSALQRQRTYDFYYMDYLMFNYSKPFADLY

SEQ ID NO: 2914 - protein, 424 aa, Homo Sapiens; identical to SEQ ID NO: 2913

SEQ ID NO: 2915 - protein, 424 aa, Homo Sapiens; identical to SEQ ID NO: 2913

SEQ ID NO: 2916 - protein, 53 aa, Homo Sapiens
EDVEVGRCVRRFAGVQCVWSYEDKRVRKPLLCNELKRCLSPNGKLSLCSSDGL

SEQ ID NO: 2917 - protein, 802 aa, Homo Sapiens
MAARGRRAWLSVLLGLVLGFVLASRLVLPRASELKRAGPRRRASPEGCRSGQAAASQAGGARGDARGAQLWPPGSDPDGGPRDRNFLFVGVMTAQKYLQTRAVAAYRTWSKTIPGKVQFFSSEGSDTSVPIPVVPLRGVDDSYPPQKKSFMMLKYMHDHYLDKYEWFMRADDDVYIKGDRLENFLRSLNSSEPLFLGQTGLGTTEEMGKLALEPGENFCMGGPGVIMSREVLRRMVPHIGKCLREMYTTHEDVEVGRCVRRFAGVQCVWSYEMQQLFYENYEQNKKGYIRDLHNSKIHQAITLHPNKNPPYQYRLHSYMLSRKISELRHRTIQLHREIVLMSKYSNTEIHKEDLQLGIPPSFMRFQPRQREEILEWEFLTGKYLYSAVDGQPPRRGMDSAQREALDDIVMQVMEMINANAKTRGRIIDFKEIQYGYRRVNPMYGAEYILDLLLLYKKHKGKKMTVPVRRHAYLQQTFSKIQFVEHEELDAQELAKRINQESGSLSFLSNSLKKLVPFQLPGSKSEHKEPKDKKINILIPLSGRFDMFVRFMGNFEKTCLIPNQNVKLVVLLFNSDSNPDKAKQVELMRDYRIKYPKADMQILPVSGEFSRALALEVGSSQFNNESLLFFCDVDLVFTTEFLQRCRANTVLGQQIYFPIIFSQYDPKIVYSGKVPSDNHFAFTQKTGFWRNYGFGITCIYKGDLVRVGGFDVSIQGWGLEDVDLFNKVVQAGLKTFRSQEVGVVHVHHPVFCDPNLDPKQYKMCLGSKASTYGSTQQLAEMWLEKNDPSYSKSSNNNGSVRTA

SEQ ID NO: 2918 - protein, 882 aa, Homo Sapiens
MAVRSRRPWMSVALGLVLGFTAASWLIAPRVAELSERKRRGSSLCSYYGRSAAGPRAGAQQPLPQPQSRPRQEQSPPPARQDLQGPPLPEAAPGITSFRSSPWQQPPPLQQRRRGREPEGATGLPGAPAAEGEPEEEDGGAAGQRRDGRPGSSHNGSGDGGAAAPSARPRDFLYVGVMTAQKYLGSRALAAQRTWARFIPGRVEFFSSQQPPNAGQPPPPLPVIALPGVDDSYPPQKKSFMMIKYMHDHYLDKYEWFMRADDDVYIKGDKLEEFLRSLNSSKPLYLGQTGLGNIEELGKLGLEPGENFCMGGPGMIFSREVLRRMVPHIGECLREMYTTHEDVEVGRCVRRFGGTQCVWSYEMQQLFHENYEHNRKGYIQDLHNSKIHAAITLHPNKRPAYQYRLHNYMLSRKISELRYRTIQLHRESALMSKLSNTEVSKEDQQLGVIPSFNHFQPRERNEVIEWEFLTGKLLYSAAENQPPRQSLSSILRTALDDTVLQVMEMINENAKSRGRLIDFKEIQYGYRRVNPMHGVEYILDLLLLYKRHKGRKLTVPVRRHAYLQQLFSKPFFRETEELDVNSLVESINSETQSFSFISNSLKILSSFQGAKEMGGHNEKKVHILVPLIGRYDIFLRFMENFENMCLIPKQNVKLVIILFSRDSGQDSSKHIELIKGYQNKYPKAEMTLIPMKGEFSRGLGLEMASAQFDNDTLLLFCDVDLIFREDFLQRCRDNTIQGQQVYYPIIFSQYDPKVTNGGNPPTDDYFIFSKKTGFWRDYGYGITCIYKSDLLGAGGFDTSIQGWGLEDVDLYNKVILSGLRPFRSQEVGVVHIFHPVHCDPNLDPKQYKMCLGSKASTFASTMQLAELWLEKHLGVRYNRTLS

SEQ ID NO: 2919 - protein, 65 aa, Homo Sapiens
HILYGKIIHLEKPFAVLVKHTPGDQDCDELGRETGTRYLVTALIKDKILFKTRPKPIITSVPKKV

SEQ ID NO: 2920 - protein, 524 aa, Homo Sapiens
MKEPRIFPRERPTPWTRAPLPPRGRLDGSLGPQGGPVLNTGHPLGVNSDPFLMAAGSLGGNLTPFPRNPSPFPASSGSLASNPAPFPAGARDPSMASFPRGMNPTGTGAVSFPRPGGLLGPGPGPGPTLNPRTGALPGPGPLSNPRLGGLPGPGPMSNPRAGGLLGAGPDPRGGGPMGPGSGPNLRAGVLLTSGNGPPNPRPVGLGPGPNPNLRSGFLGTNPAPRSGVFPGPGLGPNPRPSGLGPGPNLDARAGGLLGTGSGLNLRMAGPQGLDLAPILRAAGLLGANSASFSQASGNMGTSPSSMARVPGPMGPNSGPSSRGIGLPGPNPSPMSRAPGPIGPNSAHFSRPVGPMGVNANPFPRGAGSSAFSQSSGTLASNPATFQRSAGLQGSNPTIFPRASGPLGPNPANFPRATGLQGPSPTTFPRSTGPLGPGQVTFPRPAAGHLGPSPAGPVGINPAPFTRPTGTLGLNPASFPRMNGPAGKSFVPFPRVGSLPGTNPAAFPRPGGPMAAMYPNGMLPP

SEQ ID NO: 2921 - protein, 12 aa, Homo Sapiens
MVQIVISRESLC

SEQ ID NO: 2922 - protein, 12 aa, Homo Sapiens
MVQIVISRESLC

SEQ ID NO: 2923 - protein, 121 aa, Homo Sapiens
MVQIVISSARAGGLAEWVLMELQGEIEARYSTGLAGNLLGDLHYTTEGIPVLIVGHHILYGKIIHLEKPFAVLVKHTPGDQDCDELGRETGTRYLVTALIKDKILFKTRPKPIITSVPKKV

SEQ ID NO: 2924 - protein, 121 aa, Homo Sapiens; identical to SEQ ID NO: 2923

SEQ ID NO: 2925 - protein, 58 aa, Homo Sapiens
MVQIVISSARAGGLAEWVLMELQGEIEARYSTGLAGNLLGDLHYTTEGYIGLQVPVHM

SEQ ID NO: 2926 - protein, 75 aa, Homo Sapiens
MVQIVISSARAGGLAEWVLMELQGEIEARYSTGLAGNLLGDLHYTTELHQAHWLQIQHLSRLVLVTQVWLLFQEG

SEQ ID NO: 2927 - protein, 99 aa, Homo Sapiens
MVQIVISSARAGGLAEWVLMELQGEIEARYSTGLAGNLLGDLHYTTEVRGLFFPCLMPQESKLHQGGAPRTQSEDCLRFVIQGLANLRCSLLVLPLPLQ

SEQ ID NO: 2928 - protein, 144 aa, Homo Sapiens
  misc_feature (1)..(1): Xaa can be any naturally occurring amino acid
XAVLAAAATAAGGSVVARWPRGAALGGRHCSARAGGLAEWVLMELQGEIEARYSTGLAGNLLGDLHYTTEGIPVLIVGHHILYGKIIHLEKPFAVLVKHTPGDQDCDELGRETGTRYLVTALIKDKILFKTRPKPIITSVPKKV

SEQ ID NO: 2929 - protein, 104 aa, Homo Sapiens
  misc_feature (1)..(1): Xaa can be any naturally occurring amino acid
XSARGGGDGGGRFGCRPLAARRRARRPPLQGIPVLIVGHHILYGKIIHLEKPFAVLVKHTPGDQDCDELGRETGTRYLVTALIKDKILFKTRPKPIITSVPKKV

SEQ ID NO: 2930 - protein, 1184 aa, Homo Sapiens
MVGTKAWVFSFLVLEVTSVLGRQTMLTQSVRRVQPGKKNPSIFAKPADTLESPGEWTTWFNIDYPGGKGDYERLDAIRFYYGDRVCARPLRLEARTTDWTPAGSTGQVVHGSPREGFWCLNREQRPGQNCSNYTVRFLCPPGSLRRDTERIWSPWSPWSKCSAACGQTGVQTRTRICLAEMVSLCSEASEEGQHCMGQDCTACDLTCPMGQVNADCDACMCQDFMLHGAVSLPGGAPASGAAIYLLTKTPKLLTQTDSDGRFRIPGLCPDGKSILKITKVKFAPIVLTMPKTSLKAATIKAEFVRAETPYMVMNPETKARRAGQSVSLCCKATGKPRPDKYFWYHNDTLLDPSLYKHESKLVLRKLQQHQAGEYFCKAQSDAGAVKSKVAQLIVIASDETPCNPVPESYLIRLPHDCFQNATNSFYYDVGRCPVKTCAGQQDNGIRCRDAVQNCCGISKTEEREIQCSGYTLPTKVAKECSCQRCTETRSIVRGRVSAADNGEPMRFGHVYMGNSRVSMTGYKGTFTLHVPQDTERLVLTFVDRLQKFVNTTKVLPFNKKGSAVFHEIKMLRRKKPITLEAMETNIIPLGEVVGEDPMAELEIPSRSFYRQNGEPYIGKVKASVTFLDPRNISTATAAQTDLNFINDEGDTFPLRTYGMFSVDFRDEVTSEPLNAGKVKVHLDSTQVKMPEHISTVKLWSLNPDTGLWEEEGDFKFENQRRNKREDRTFLVGNLEIRERRLFNLDVPESRRCFVKVRAYRSERFLPSEQIQGVVISVINLEPRTGFLSNPRAWGRFDSVITGPNGACVPAFCDDQSPDAYSAYVLASLAGEELQAVESSPKFNPNAIGVPQPYLNKLNYRRTDHEDPRVKKTAFQISMAKPRPNSAEESNGPIYAFENLRACEEAPPSAAHFRFYQIEGDRYDYNTVPFNEDDPMSWTEDYLAWWPKPMEFRACYIKVKIVGPLEVNVRSRNMGGTHRQTVGKLYGIRDVRSTRDRDQPNVSAACLEFKCSGMLYDQDRVDRTLVKVIPQGSCRRASVNPMLHEYLVNHLPLAVNNDTSEYTMLAPLDPLGHNYGIYTVTDQDPRTAKEIALGRCFDGTSDGSSRIMKSNVGVALTFNCVERQVGRQSAFQYLQSTPAQSPAAGTVQGRVPSRRQQRASRGGQRQGGVVASLRFPRVAQQPLIN

SEQ ID NO: 2931 - protein, 1162 aa, Homo Sapiens
MASLLPLLCLCVVAAHLAGARDATPTEEPMATALGLERRSVYTGQPSPALEDWEARAVPAEASEWTSWFNVDHPGGDGDFESLAAIRFYYGPARVCPRPLALEARTTDWALPSAVGERVHLNPTRGFWCLNREQPRGRRCSNYHVRFRCPLEASWGAWGPWGPCSGSCGPGRRLRRRHCPSPAGDACPGRPLEAQKCVRPRCPGCSLDTCECPDHILLGSVVTPSGQPLLGARVSLRDQPGTVATSDAHGTFRVPGVCADSRANIRAQMDGFSAGEAQAQANGSISVVTIILDKLEKPYLVKHPESRVREAGQNVTFCCKASGTPMPKKYSWFHNGTLLDRRAHGYGAHLELRGLRPDQAGIYHCKAWNEAGAVRSGTARLTVLAPGQPACDPRPREYLIKLPEDCGQPGSGPAYLDVGLCPDTRCPSLAGSSPRCGDASSRCCSVRRLERREIHCPGYVLPVKVVAECGCQKCLPPRGLVRGRVVAADSGEPLRFARILLGQEPIGFTAYQGDFTIEVPPSTQRLVVTFVDPSGEFMDAVRVLPFDPRGAGVYHEVKAMRKKAPVILHTSQSNTIPLGELEDEAPLGELVLPSGAFRRADGKPYSGPVEARVTFVDPRDLTSAASAPSDLRFVDSDGELAPLRTYGMFSVDLRAPGSAEQLQVGPVAVRVAASQIHMPGHVEALKLWSLNPETGLWEEESGFRREGSSGPRVRREERVFLVGNVEIRERRLFNLDVPERRRCFVKVRAYANDKFTPSEQVEGVVVTLVNLEPAPGFSANPRAWGRFDSAVTGPNGACLPAFCDADRPDAYTALVTATLGGEELEPAPSLPRPLPATVGVTQPYLDRLGYRRTDHDDPAFKRNGFRINLAKPRPGDPAEANGPVYPWRSLRECQGAPVTASHFRFARVEADKYEYNVVPFREGTPASWTGDLLAWWPNPQEFRACFLKVKIQGPQEYMVRSHNAGGSHPRTRGQLYGLRDARSVRDPERPGTSAACVEFKCSGMLFDQRQVDRTLVTIMPQGSCRRVAVNGLLRDYLTRHPPPVPAEDPAAFSMLAPLDPLGHNYGVYTVTDQSPRLAKEIAIGRCFDGSSDGFSREMKADAGTAVTFQCREPPAGRPSLFQRLLESPATALGDIRREMSEAAQAQARASGPLRTRRGRVRQ

SEQ ID NO: 2932 - protein, 1156 aa, Homo Sapiens
MASLLPLLCLCVVAAHLAGARDATPTEEPMATALGLERRSVYTGQPSPALEDWEEASEWTSWFNVDHPGGDGDFESLAAIRFYYGPARVCPRPLALEARTTDWALPSAVGERVHLNPTRGFWCLNREQPRGRRCSNYHVRFRCPLEASWGAWGPWGPCSGSCGPGRRLRRRHCPSPAGDACPGRPLEAQKCVRPRCPGCSLDTCECPDHILLGSVVTPSGQPLLGARVSLRDQPGTVATSDAHGTFRVPGVCADSRANIRAQMDGFSAGEAQAQANGSISVVTIILDKLEKPYLVKHPESRVREAGQNVTFCCKASGTPMPKKYSWFHNGTLLDRRAHGYGAHLELRGLRPDQAGIYHCKAWNEAGAVRSGTARLTVLAPGQPACDPRPREYLIKLPEDCGQPGSGPAYLDVGLCPDTRCPSLAGSSPRCGDASSRCCSVRRLERREIHCPGYVLPVKVVAECGCQKCLPPRGLVRGRVVAADSGEPLRFARILLGQEPIGFTAYQGDFTIEVPPSTQRLVVTFVDPSGEFMDAVRVLPFDPRGAGVYHEVKAMRKKAPVILHTSQSNTIPLGELEDEAPLGELVLPSGAFRRADGKPYSGPVEARVTFVDPRDLTSAASAPSDLRFVDSDGELAPLRTYGMFSVDLRAPGSAEQLQVGPVAVRVAASQIHMPGHVEALKLWSLNPETGLWEEESGFRREGSSGPRVRREERVFLVGNVEIRERRLFNLDVPERRRCFVKVRAYANDKFTPSEQVEGVVVTLVNLEPAPGFSANPRAWGRFDSAVTGPNGACLPAFCDADRPDAYTALVTATLGGEELEPAPSLPRPLPATVGVTQPYLDRLGYRRTDHDDPAFKRNGFRINLAKPRPGDPAEANGPVYPWRSLRECQGAPVTASHFRFARVEADKYEYNVVPFREGTPASWTGDLLAWWPNPQEFRACFLKVKIQGPQEYMVRSHNAGGSHPRTRGQLYGLRDARSVRDPERPGTSAACVEFKCSGMLFDQRQVDRTLVTIMPQGSCRRVAVNGLLRDYLTRHPPPVPAEDPAAFSMLAPLDPLGHNYGVYTVTDQSPRLAKEIAIGRCFDGSSDGFSREMKADAGTAVTFQCREPPAGRPSLFQRLLESPATALGDIRREMSEAAQAQARASGPLRTRRGRVRQ

SEQ ID NO: 2933 - protein, 113 aa, Homo Sapiens
MDNVQPKIKHRPFCFSVKGHVKMLRLALTVTSMTFFIIAQAPEPYIVITGFEVTVILFFILLYVLRLDRLMKWLFWPLLDIINSLVTTVFMLIVSVLALIPETTTLTVGGGLF

SEQ ID NO: 2934 - protein, 152 aa, Homo Sapiens
MDNVQPKIKHRPFCFSVKGHVKMLRLALTVTSMTFFIIAQAPEPYIVITGFEVTVILFFILLYVLRLDRLMKWLFWPLLDIINSLVTTVFMLIVSVLALIPETTTLTVGGGVFALVTAVCCLADGALIYRKLLFNPSGPYQKKPVHEKKEVL

SEQ ID NO: 2935 - protein, 120 aa, Homo Sapiens
MDNVQPKIKHRPFCFSVKGHVKMLRLALTVTSMTFFIIAQAPEPYIVITGFEVTVILFFILLYVLRLDRLMKWLFWPLLVFALVTAVCCLADGALIYRKLLFNPSGPYQKKPVHEKKEVL

SEQ ID NO: 2936 - protein, 99 aa, Homo Sapiens
MDNVQPKIKHRPFCFSVKGHVKMLRLDIINSLVTTVFMLIVSVLALIPETTTLTVGGGVFALVTAVCCLADGALIYRKLLFNPSGPYQKKPVHEKKEVL

SEQ ID NO: 2937 - protein, 33 aa, Homo Sapiens
MDNVQPKIKHRPFCFSVKGHVKMLRLHCLVVFM

SEQ ID NO: 2938 - protein, 67 aa, Homo Sapiens
MDNVQPKIKHRPFCFSVKGHVKMLRLVFALVTAVCCLADGALIYRKLLFNPSGPYQKKPVHEKKEVL

SEQ ID NO: 2939 - protein, 69 aa, Homo Sapiens
MAGPFSRLLSARPGLRLLALAGAGSLAAGFLLRPEPVRAASERRRLYPPRLFPSSIRSVVSWEERTEQI

SEQ ID NO: 2940 - protein, 148 aa, Homo Sapiens
MAGPFSRLLSARPGLRLLALAGAGSLAAGFLLRPEPVRAASERRRLYPPSAEYPDLRKHNNCMASHLTPAVYARLCDKTTPTGWTLDQCIQTGVDNPGHPFIKTVGMVAGDEETYEVFADLFDPVIQERHNGYDPRTMKHTTDLDASK

SEQ ID NO: 2941 - protein, 417 aa, Homo Sapiens
MAGPFSRLLSARPGLRLLALAGAGSLAAGFLLRPEPVRAASERRRLYPPSAEYPDLRKHNNCMASHLTPAVYARLCDKTTPTGWTLDQCIQTGVDNPGHPFIKTVGMVAGDEETYEVFADLFDPVIQERHNGYDPRTMKHTTDLDASKIRSGYFDERYVLSSRVRTGRSIRGLSLPPACTRAERREVERVVVDALSGLKGDLAGRYYRLSEMTEAEQQQLIDDHFLFDKPVSPLLTAAGMARDWPDARGIWHNNEKSFLIWVNEEDHTRVISMEKGGNMKRVFERFCRGLKEVERLIQERGWEFMWNERLGYILTCPSNLGTGLRAGVHIKLPLLSKDSRFPKILENLRLQKRGTGGVDTAATGGVFDISNLDRLGKSEVELVQLVIDGVNYLIDCERRLERGQDIRIPTPVIHTKH

SEQ ID NO: 2942 - protein, 417 aa, Homo Sapiens; identical to SEQ ID NO: 2941

SEQ ID NO: 2943 - protein, 298 aa, Homo Sapiens
MAGPFSRLLSARPGLRLLALAGAGSLAAGFLLRPEPVRAASERRRLYPPSAEYPDLRKHNNCMASHLTPAVYARLCDKTTPTGWTLDQCIQTGVDNPGHPFIKTVGMVAGDEETYEVFADLFDPVIQERHNGYDPRTMKHTTDLDASKIRSGYFDERYVLSSRVRTGRSIRGLSLPPACTRAERREVERVVVDALSGLKGDLAGRYYRLSEMTEAEQQQLIDDHFLFDKPVSPLLTAAGMARDWPDARGIWHNNEKSFLIWVNEEDHTRVISMEKGGNMKRVFERFCRGLKEVVVGIK

SEQ ID NO: 2944 - protein, 222 aa, Homo Sapiens
MAGPFSRLLSARPGLRLLALAGAGSLAAGFLLRPEPVRAASERRRLYPPSQTWPTGQLPGNCTRSRRLCPPSMVTGYPLPSAEYPDLRKHNNCMASHLTPAVYARLCDKTTPTGWTLDQCIQTGVDNPGHPFIKTVGMVAGDEETYEVFADLFDPVIQERHNGYDPRTMKHTTDLDASKIRSGYFDERYVLSSRVRTGRSIRGLSLPPACTRAERREVERVV

SEQ ID NO: 2945 - protein, 58 aa, Homo Sapiens
MAGPFSRLLSARPGLRLLALAGAGSLAAGFLLRPEPVRAASERRRLYPPRYLLTCLTL

SEQ ID NO: 2946 - protein, 103 aa, Homo Sapiens
MAGPFSRLLSARPGLRLLALAGAGSLAAGFLLRPEPVRAASERRRLYPPSAEYPDLRKHNNCMASHLTPAVYARLCDKTTPTGWTLDQCIQTGVDNPGHPFIK

SEQ ID NO: 2947 - protein, 129 aa, Homo Sapiens
MAGPFSRLLSARPGLRLLALAGAGSLAAGFLLRPEPVRAASERRRLYPPSAEYPDLRKHNNCMASHLTPAVYARLCDKTTPTGWTLDQCIQTGVDNPGHPFIKTVGMVAGDEETYEVFADLFDPVIQER

SEQ ID NO: 2948 - protein, 241 aa, Homo Sapiens
MAGPFSRLLSARPGLRLLALAGAGSLAAGFLLRPEPVRAASERRRLYPPSAEYPDLRKHNNCMASHLTPAVYARLCDKTTPTGWTLDQCIQTGVDNPGHPFIKTVGMVAGDEETYEVFADLFDPVIQERHNGYDPRTMKHTTDLDASKIRSGYFDERYVLSSRVRTGRSIRGLSLPPACTRAERREVERVVVDALSGLKGDLAGRYYRLSEMTEAEQQQLIDDHFLFDKPVSPLLTAAGMA

SEQ ID NO: 2949 - protein, 417 aa, Homo Sapiens; identical to SEQ ID NO: 2941

SEQ ID NO: 2950 - protein, 298 aa, Homo Sapiens; identical to SEQ ID NO: 2943

SEQ ID NO: 2951 - protein, 417 aa, Homo Sapiens; identical to SEQ ID NO: 2941

SEQ ID NO: 2952 - protein, 298 aa, Homo Sapiens; identical to SEQ ID NO: 2943

SEQ ID NO: 2953 - protein, 96 aa, Homo Sapiens
MAGPFSRLLSARPGLRLLALAGAGSLAAGFLLRPEPVRAASERRRLYPPSQTWPTGQLPGNCTRSRRLCPPSMVTGYPLPSAEYPDLRKHNNCMAS

SEQ ID NO: 2954 - protein, 203 aa, Homo Sapiens
MAGPFSRLLSARPGLRLLALAGAGSLAAGFLLRPEPVRAASERRRLYPPSQTWPTGQLPGNCTRSRRLCPPSMVTGYPLPSAEYPDLRKHNNCMASHLTPAVYARLCDKTTPTGWTLDQCIQTGVDNPGHPFIKTVGMVAGDEETYEVFADLFDPVIQERHNGYDPRTMKHTTDLDASKIRSGYFDERYVLSSRVRTGRSIRG

SEQ ID NO: 2955 - protein, 914 aa, Homo Sapiens
MGPFKSSVFILILHLLEGALSNSLIQLNNNGYEGIVVAIDPNVPEDETLIQQIKDMVTQASLYLLEATGKRFYFKNVAILIPETWKTKADYVRPKLETYKNADVLVAESTPPGNDEPYTEQMGNCGEKGERIHLTPDFIAGKKLAEYGPQGRAFVHEWAHLRWGVFDEYNNDEKFYLSNGRIQAVRCSAGITGTNVVKKCQGGSCYTKRCTFNKVTGLYEKGCEFVLQSRQTEKASIMFAQHVDSIVEFCTEQNHNKEAPNKQNQKCNLRSTWEVIRDSEDFKKTTPMTTQPPNPTFSLLQIGQRIVCLVLDKSGSMATGNRLNRLNQAGQLFLLQTVELGSWVGMVTFDSAAHVQNELIQINSGSDRDTLAKRLPAAASGGTSICSGLRSAFTVIRKKYPTDGSEIVLLTDGEDNTISGCFNEVKQSGAIIHTVALGPSAAQELEELSKMTGGLQTYASDQVQNNGLIDAFGALSSGNGAVSQRSIQLESKGLTLQNSQWMNGTVIVDSTVGKDTLFLITWTMQPPQILLWDPSGQKQGGFVVDKNTKMAYLQIPGIAKVGTWKYSLQASSQTLTLTVTSRASNATLPPITVTSKTNKDTSKFPSPLVVYANIRQGASPILRASVTALIESVNGKTVTLELLDNGAGADATKDDGVYSRYFTTYDTNGRYSVKVRALGGVNAARRRVIPQQSGALYIPGWIENDEIQWNPPRPEINKDDVQHKQVCFSRTSSGGSFVASDVPNAPIPDLFPPGQITDLKAEIHGGSLINLTWTAPGDDYDHGTAHKYIIRISTSILDLRDKFNESLQVNTTALIPKEANSEEVFLFKPENITFENGTDLFIAIQAVDKVDLKSEISNIARVSLFIPPQTPPETPSPDETSAPCPNIHINSTIPGIHILKIMWKWIGELQLSIA

SEQ ID NO: 2956 - protein, 914 aa, Homo Sapiens; identical to SEQ ID NO: 2955

SEQ ID NO: 2957 - protein, 225 aa, Homo Sapiens
MDLRAGDSWGMLACLCTVLWHLPAVPALNRTGDPGPGPSIQKTYDLTRYLEHQLRSLAGTYLNYLGPPFNEPDFNPPRLGAETLPRATVDLEVWRSLNDKLRLTQNYEAYSHLLCYLRGLNRQAATAELRRSLAHFCTSLQGLLGSIAGVMAALGYPLPQPLPGTEPTWTPGPAHSDFLQKMDDFWLLKELQTWLWRSAKDFNRLKKKMQPPAAAVTLHLGAHGF

SEQ ID NO: 2958 - protein, 215 aa, Homo Sapiens
MLACLCTVLWHLPAVPALNRTGDPGPGPSIQKTYDLTRYLEHQLRSLAGTYLNYLGPPFNEPDFNPPRLGAETLPRATVDLEVWRSLNDKLRLTQNYEAYSHLLCYLRGLNRQAATAELRRSLAHFCTSLQGLLGSIAGVMAALGYPLPQPLPGTEPTWTPGPAHSDFLQKMDDFWLLKELQTWLWRSAKDFNRLKKKMQPPAAAVTLHLGAHGF

SEQ ID NO: 2959 - protein, 170 aa, Homo Sapiens
MSMAVETFGFFMATVGLLMLGVTLPNSYWRVSTVHGNVITTNTIFENLWFSCATDSLGVYNCWEFPSMLALSGIAGLRCTNIGGLELSRKAKLAATAGALHILAGICGMVAISWYAFNITRDFFDPLYPGTKYELGPALYLGWSASLISILGGLCLCSACCCGSDEDPAA

SEQ ID NO: 2960 - protein, 148 aa, Homo Sapiens
MSMAVETFGFFMATVGLLMLGVTLPNSYWRVSTVHGNVITTNTIFENLWFSCATDSLGVYNCWEFPSMLALSGICGMVAISWYAFNITRDFFDPLYPGTKYELGPALYLGWSASLISILGGLCLCSACCCGSDEDPAASARRPYQAPV

SEQ ID NO: 2961 - protein, 128 aa, Homo Sapiens
MSMAVETFGFFMATVGLLMLGVTLPNSYWRVSTVHGNVITTNTIFENLWFSCATDSLGVYNCWEFPSMLALSGSTDSPASLSGGTGLLVRLMSIKGPCEGRRLASCRLSVRCKEAVCVQGIFRPAGHS

SEQ ID NO: 2962 - protein, 228 aa, Homo Sapiens
MSMAVETFGFFMATVGLLMLGVTLPNSYWRVSTVHGNVITTNTIFENLWFSCATDSLGVYNCWEFPSMLALSGYIQACRALMITAILLGFLGLLLGIAGLRCTNIGGLELSRKAKLAATAGALHILAGICGMVAISWYAFNITRDFFDPLYPGTKYELGPALYLGWSASLISILGGLCLCSACCCGSDEDPAASARRPYQAPVSVMPVATSDQEGDSSFGKYGRNAYV

SEQ ID NO: 2963 - protein, 228 aa, Homo Sapiens; identical to SEQ ID NO: 2962

SEQ ID NO: 2964 - protein, 106 aa, Homo Sapiens
  misc_feature (1)..(1): Xaa can be any naturally occurring amino acid
XGNVITTNTIFENLWFSCATDSLGVYNCWEFPSMLALSGYIQACRALMITAILLGFLGLLLGIAGLRCTNIGGLELSRKAKLAATAGALHILADLLAANQPIGSVS

SEQ ID NO: 2965 - protein, 140 aa, Homo Sapiens
MANSGLQLLGFSMALLGWVGLVACTAIPQWQMSSYAGDNIITAQAMYKGLWMDCVTQSTGMMSCKIGLAGHSSPNGGLPGAGLPGHVCGHDGHEVHALWGRRQSEEGPYSHGWRHNFHRGRSCRLGSLLLVWPSDCHRLL

SEQ ID NO: 2966 - protein, 129 aa, Homo Sapiens
MANSGLQLLGFSMALLGWVGLVACTAIPQWQMSSYAGDNIITAQAMYKGLWMDCVTQSTGMMSCKMYDSVLALSAALQATRALMVVSLVLGFLAMFVATMGMKCTRCGGDDKVKKARIAMGGGIIFIVA

SEQ ID NO: 2967 - protein, 211 aa, Homo Sapiens
MANSGLQLLGFSMALLGWVGLVACTAIPQWQMSSYAGDNIITAQAMYKGLWMDCVTQSTGMMSCKMYDSVLALSAALQATRALMVVSLVLGFLAMFVATMGMKCTRCGGDDKVKKARIAMGGGIIFIVAGLAALVACSWYGHQIVTDFYNPLIPTNIKYEFGPAIFIGWAGSALVILGGALLSCSCPGNESKAGYRVPRSYPKSNSSKEYV

SEQ ID NO: 2968 - protein, 211 aa, Homo Sapiens; identical to SEQ ID NO: 2967

SEQ ID NO: 2969 - protein, 145 aa, Homo Sapiens
MANSGLQLLGFSMALLGWVGLVACTAIPQWQMSSYAGDNIITAQAMYKGLWMDCVTQSTGMMSCKMYDSVLALSAALQATRALMVVSLVLGFLAMFVATMGMKCTRCGGDDKVKKARIAMGGGIIFIVAGMSLALPSLLAGQGLP

SEQ ID NO: 2970 - protein, 194 aa, Homo Sapiens
MPEGTVGLPARRPQCFLRAEMANSGLQLLGFSMALLGWVGLVACTAIPQWQMSSYAGDNIITAQAMYKGLWMDCVTQSTGMMSCKMYDSVLALSAALQATRALMVVSLVLGFLAMFVATMGMKCTRCGGDDKVKKARIAMGGGIIFIVAGLAALVACSWYGHQIVTDFYNPLIPTNIKYEFGPAIFIGWAGSAL

SEQ ID NO: 2971 - protein, 100 aa, Homo Sapiens
MVVSLVLGFLAMFVATMGMKCTRCGGDDKVKKARIAMGGGIIFIVAGLAALVACSWYGHQIVTDFYNPLIPTNIKYEFGPAIFIGWAGSALVILGGALLS

SEQ ID NO: 2972 - protein, 72 aa, Homo Sapiens
FVSLGLMCFGALIGLCACICRSLYPTIATGILHLLAGLCTLGSVSCYVAGIELLHQKLELPDNPSTIKNVSP

SEQ ID NO: 2973 - protein, 155 aa, Homo Sapiens
KSIWDEFISDEADEKTYNDALFRYNGTVGLWRRCITIPKNMHWYSPPERTESFDVVTKCVSFTLTEQFMEKFVDPGNHNSGIDLLRTYLWRCQFLLPFVSLGLMCFGALIGLCACICRSLYPTIATGILHLLAAQYYKERFTIMTLQSWETYHKI

SEQ ID NO: 2974 - protein, 138 aa, Homo Sapiens
MAASIGTDFWYEYRSPVQENSSDLNKSIWDEFISDEADEKTYNDALFRYNGTVGLWRRCITIPKNMHWYSPPERTESFDVVTKCVSFTLTEQFMEKFVDPGNHNSGIDLLRTYLWRCQFLLPFVSLGLMCFGALIGLC

SEQ ID NO: 2975 - protein, 223 aa, Homo Sapiens
MAASIGTDFWYEYRSPVQENSSDLNKSIWDEFISDEADEKTYNDALFRYNGTVGLWRRCITIPKNMHWYSPPERTESFDVVTKCVSFTLTEQFMEKFVDPGNHNSGIDLLRTYLWRCQFLLPFVSLGLMCFGALIGLCACICRSLYPTIATGILHLLAGLCTLGSVSCYVAGIELLHQKLELPDNVSGEFGWSFCLACVSAPLQFMASALFIWAAHTNRKEYT

SEQ ID NO: 2976 - protein, 89 aa, Homo Sapiens
MDNRFATAFVIACVLSLISTIYMAASIGTDFWYEYRSPVQENSSDLNKSIWDEFISDEADEKTYNDALFRYNGTVGLWRRCITIPKNMH

SEQ ID NO: 2977 - protein, 145 aa, Homo Sapiens
MDNRFATAFVIACVLSLISTIYMAASIGTDFWYEYRSPVQENSSDLNKSIWDEFISDEADEKTYNDALFRYNGTVGLWRRCITIPKNMHWYSPPERTESFDVVTKCVSFTLTEQFMEKFVDPGNHNSGIDLLRTYLWRCQFLLPF

SEQ ID NO: 2978 - protein, 172 aa, Homo Sapiens
MDNRFATAFVIACVLSLISTIYMAASIGTDFWYEYRSPVQENSSDLNKSIWDEFISDEADEKTYNDALFRYNGTVGLWRRCITIPKNMHWYSPPERTESFDVVTKCVSFTLTEQFMEKFVDPGNHNSGIDLLRTYLWRCQFLLPFVSLGLMCFGALIGLCACICRSLYPTIA

SEQ ID NO: 2979 - protein, 177 aa, Homo Sapiens
MDNRFATAFVIACVLSLISTIYMAASIGTDFWYEYRSPVQENSSDLNKSIWDEFISDEADEKTYNDALFRYNGTVGLWRRCITIPKNMHWYSPPERTESFDVVTKCVSFTLTEQFMEKFVDPGNHNSGIDLLRTYLWRCQFLLPFVSLGLMCFGALIGLCACICRSLYPTIATGILH

SEQ ID NO: 2980 - protein, 180 aa, Homo Sapiens
MDNRFATAFVIACVLSLISTIYMAASIGTDFWYEYRSPVQENSSDLNKSIWDEFISDEADEKTYNDALFRYNGTVGLWRRCITIPKNMHWYSPPERTESFDVVTKCVSFTLTEQFMEKFVDPGNHNSGIDLLRTYLWRCQFLLPFVSLGLMCFGALIGLCACICRSLYPTIATGILHLLA

SEQ ID NO: 2981 - protein, 213 aa, Homo Sapiens
MDNRFATAFVIACVLSLISTIYMAASIGTDFWYEYRSPVQENSSDLNKSIWDEFISDEADEKTYNDALFRYNGTVGLWRRCITIPKNMHWYSPPERTESFDVVTKCVSFTLTEQFMEKFVDPGNHNSGIDLLRTYLWRCQFLLPFVSLGLMCFGALIGLCACICRSLYPTIATGILHLLAGLCTLGSVSCYVAGIELLHQKLELPDNVSGEFG

SEQ ID NO: 2982 - protein, 237 aa, Homo Sapiens
MDNRFATAFVIACVLSLISTIYMAASIGTDFWYEYRSPVQENSSDLNKSIWDEFISDEADEKTYNDALFRYNGTVGLWRRCITIPKNMHWYSPPERTESFDVVTKCVSFTLTEQFMEKFVDPGNHNSGIDLLRTYLWRCQFLLPFVSLGLMCFGALIGLCACICRSLYPTIATGILHLLAGLCTLGSVSCYVAGIELLHQKLELPDNVSGEFGWSFCLACVSAPLQFMASALFIWAA

SEQ ID NO: 2983 - protein, 239 aa, Homo Sapiens
MDNRFATAFVIACVLSLISTIYMAASIGTDFWYEYRSPVQENSSDLNKSIWDEFISDEADEKTYNDALFRYNGTVGLWRRCITIPKNMHWYSPPERTESFDVVTKCVSFTLTEQFMEKFVDPGNHNSGIDLLRTYLWRCQFLLPFVSLGLMCFGALIGLCACICRSLYPTIATGILHLLAGLCTLGSVSCYVAGIELLHQKLELPDNVSGEFGWSFCLACVSAPLQFMASALFIWAAHT

SEQ ID NO: 2984 - protein, 245 aa, Homo Sapiens
MDNRFATAFVIACVLSLISTIYMAASIGTDFWYEYRSPVQENSSDLNKSIWDEFISDEADEKTYNDALFRYNGTVGLWRRCITIPKNMHWYSPPERTESFDVVTKCVSFTLTEQFMEKFVDPGNHNSGIDLLRTYLWRCQFLLPFVSLGLMCFGALIGLCACICRSLYPTIATGILHLLAGLCTLGSVSCYVAGIELLHQKLELPDNVSGEFGWSFCLACVSAPLQFMASALFIWAAHTNRKEYT

SEQ ID NO: 2985 - protein, 253 aa, Homo Sapiens
MDNRFATAFVIACVLSLISTIYMAASIGTDFWYEYRSPVQENSSDLNKSIWDEFISDEADEKTYNDALFRYNGTVGLWRRCITIPKNMHWYSPPERTESFDVVTKCVSFTLTEQFMEKFVDPGNHNSGIDLLRTYLWRCQFLLPFVSLGLMCFGALIGLCACICRSLYPTIATGILHLLAGLCTLGSVSCYVAGIELLHQKLELPDNVSGEFGWSFCLACVSAPLQFMASALFIWAAHTNRKEYTLMKAYRVA

SEQ ID NO: 2986 - protein, 253 aa, Homo Sapiens; identical to SEQ ID NO: 2985

SEQ ID NO: 2987 - protein, 253 aa, Homo Sapiens; identical to SEQ ID NO: 2985

SEQ ID NO: 2988 - protein, 253 aa, Homo Sapiens; identical to SEQ ID NO: 2985

SEQ ID NO: 2989 - protein, 253 aa, Homo Sapiens; identical to SEQ ID NO: 2985

SEQ ID NO: 2990 - protein, 253 aa, Homo Sapiens; identical to SEQ ID NO: 2985

SEQ ID NO: 2991 - protein, 210 aa, Homo Sapiens
MDNRFATAFVIACVLSLISTIYMAASIGTDFWYEYRSPVQENSSDLNKSIWDEFISDEADEKTYNDALFRYNGTVGLWRRCITIPKNMHWYSPPERTESFDVVTKCVSFTLTEQFMEKFVDPGNHNSGIDLLRTYLWRCQFLLPFVSLGLMCFGALIGLCACICRSLYPTIATGILHLLAVTKESMLPAGAESKHTATPAHACVQTGKPK

SEQ ID NO: 2992 - protein, 106 aa, Homo Sapiens
MDNRFATAFVIACVLSLISTIYMAASIGTDFWYEYRSPVQENSSDLNKSIWDEFISDEADEKTYNDALFRYNGTVGLWRRCITIPKNMHWYSPPERTGNCSCSRVI

SEQ ID NO: 2993 - protein, 100 aa, Homo Sapiens
MEKFVDPGNHNSGIDLLRTYLWRCQFLLPFVSLGLMCFGALIGLCACICRSLYPTIATGILHLLAGLCTLGSVSCYVAGIELLHQKLELPDNVSGEFGWS

SEQ ID NO: 2994 - protein, 122 aa, Homo Sapiens
MEKFVDPGNHNSGIDLLRTYLWRCQFLLPFVSLGLMCFGALIGLCACICRSLYPTIATGILHLLAGLCTLGSVSCYVAGIELLHQKLELPDNVSGEFGWSFCLACVSAPLQFMASALFIWAA

SEQ ID NO: 2995 - protein, 87 aa, Homo Sapiens
MGESFDVVTKCVSFTLTEQFMEKFVDPGNHNSGIDLLRTYLWRCQFLLPFVSLGLMCFGALIGLCACICRSLYPTIATGILHLLAEN

SEQ ID NO: 2996 - protein, 158 aa, Homo Sapiens
MGESFDVVTKCVSFTLTEQFMEKFVDPGNHNSGIDLLRTYLWRCQFLLPFVSLGLMCFGALIGLCACICRSLYPTIATGILHLLAGLCTLGSVSCYVAGIELLHQKLELPDNVSGEFGWSFCLACVSAPLQFMASALFIWAAHTNRKEYTLMKAYRVA

SEQ ID NO: 2997 - protein, 276 aa, Homo Sapiens
MGGDRLENKTSVSVASWSSLNARMDNRFATAFVIACVLSLISTIYMAASIGTDFWYEYRSPVQENSSDLNKSIWDEFISDEADEKTYNDALFRYNGTVGLWRRCITIPKNMHWYSPPERTESFDVVTKCVSFTLTEQFMEKFVDPGNHNSGIDLLRTYLWRCQFLLPFVSLGLMCFGALIGLCACICRSLYPTIATGILHLLAGLCTLGSVSCYVAGIELLHQKLELPDNVSGEFGWSFCLACVSAPLQFMASALFIWAAHTNRKEYTLMKAYRVA

SEQ ID NO: 2998 - protein, 317 aa, Homo Sapiens
MQAAWLLGALVVPQLLGFGHGARGAEREWEGGWGGAQEEEREREALMLKHLQEALGLPAGRGDENPAGTVEGKEDWEMEEDQGEEEEEEATPTPSSGPSPSPTPEDIVTYILGRLAGLDAGLHQLHVRLHALDTRVVELTQGLRQLRNAAGDTRDAVQALQEAQGRAEREHGRLEDSECMTPPPSLPGPAHRLPEGAAPGPQVLPALARLRSSGGGAGAVHGAGREPGAAGRPPADGGAHSVPARGARSLQLARVAGRARSARRGPLPLRKRPARVLLRLASLTPPRARRPAQRLAASAQPGPAQRWHARELRGAGL

SEQ ID NO: 2999 - protein, 323 aa, Homo Sapiens
MQAAWLLGALVVPQLLGFGHGARGAEREWEGGWGGAQEEEREREALMLKHLQEALGLPAGRGDENPAGTVEGKEDWEMEEDQGEEEEEEATPTPSSGPSPSPTPEDIVTYILGRLAGLDAGLHQLHVRLHALDTRVVELTQGLRQLRNAAGDTRDAVQALQEAQGRAEREHGRLEGCLKGLRLGHKCFLLSRDFEAQAAAQARCTARGGSLAQPADRQQMEALTRYLRAALAPYNWPVWLGVHDRRAEGLYLFENGQRVSFFAWHRSPRPELGAQPSASPHPLSPDQPNGGTLENCVAQASDDGSWWDHDCQRRLYYVCEFPF

SEQ ID NO: 3000 - protein, 245 aa, Homo Sapiens
MQAAWLLGALVVPQLLGFGHGARGAEREWEGGWGGAQEEEREREALMLKHLQEALGLPAGRGDENPAGTVEGKEDWEMEEDQGEEEEEEATPTPSSGPSPSPTPEDIVTYILGRLAGLDAGLHQLHVRLHALDTRVVELTQGLRQLRNAAGDTRDAVQALQEAQGRAEREHGRLEGCLKGLRLGHKCFLLSRDFEAQPSASPHPLSPDQPNGGTLENCVAQASDDGSWWDHDCQRRLYYVCEFPF

SEQ ID NO: 3001 - protein, 118 aa, Homo Sapiens
LAKGRIQARRMKMQRIAALLDLPIQPTTEVLGFGLGSSTSTQHLPFRFYDQGRRGSSDPTVQRSVFASVDKVPALLTAAVERQPRWPLPSLLVPWLTDCCGGLCLLIYRRFSRIVFKI

SEQ ID NO: 3002 - protein, 906 aa, Homo Sapiens
MFGRSRSWVGGGHGKTSRNIHSLDHLKYLYHVLTKNTTVTEQNRNLLVETIRSITEILIWGDQNDSSVFDFFLEKNMFVFFLNILRQKSGRYVCVQLLQTLNILFENISHETSLYYLLSNNYVNSIIVHKFDFSDEEIMAYYISFLKTLSLKLNNHTVHFFYNEHTNDFALYTEAIKFFNHPESMVRIAVRTITLNVYKVDNQAMLHYIRDKTAVPYFSNLVWFIGSHVIELDDCVQTDEEHRNRGKLSDLVAEHLDHLHYLNDILIINCEFLNDVLTDHLLNRLFLPLYVYSLENQDKGGERPKISLPVSLYLLSQVFLIIHHAPLVNSLAEVILNGDLSEMYAKTEQDIQRSSAKPSIRCFIKPTETLERSLEMNKHKGKRRVQKRPNYKNVGEEEDEEKGPTEDAQEDAEKAKEIEMVIMERSKLSELAASTSVQEQNTTDEEKSAAATCSESTQWSRPFLDMVYHALDSPDDDYHALFVLCLLYAMSHNKGMDPEKLERIQLPVPNAAEKTTYNHPLAERLIRIMNNAAQPDGKIRLATLELSCLLLKQQVLMSAGCIMKDVHLACLEGAREESVHLVRHFYKGEDIFLDMFEDEYRSMTMKPMNVEYLMMDASILLPPTGTPLTGIDFVKRLPCGDVEKTRRAIRVFFMLRSLSLQLRGEPETQLPLTREEDLIKTDDVLDLNNSDLIACTVITKDGGMVQRFLAVDIYQMSLVEPDVSRLGWGVVKFAGLLQDMQVTGVEDDSRALNITIHKPASSPHSKPFPILQATFIFSDHIRCIIAKQRLAKGRIQARRMKMQRIAALLDLPIQPTTEVLGFGLGSSTSTQHLPFRFYDQGRRGSSDPTVQRSVFASVDKVPGEPAPRPAPQLVHHGGRSRSFSLWSLCELPFLSQKPRRLAAPAS

SEQ ID NO: 3003 - protein, 1053 aa, Homo Sapiens
MFGRSRSWVGGGHGKTSRNIHSLDHLKYLYHVLTKNTTVTEQNRNLLVETIRSITEILIWGDQNDSSVFDFFLEKNMFVFFLNILRQKSGRYVCVQLLQTLNILFENISHETSLYYLLSNNYVNSIIVHKFDFSDEEIMAYYISFLKTLSLKLNNHTVHFFYNEHTNDFALYTEAIKFFNHPESMVRIAVRTITLNVYKVSLDNQAMLHYIRDKTAVPYFSNLVWFIGSHVIELDDCVQTDEEHRNRGKLSDLVAEHLDHLHYLNDILIINCEFLNDVLTDHLLNRLFLPLYVYSLENQDKGGERPKISLPVSLYLLSQVFLIIHHAPLVNSLAEVILNGDLSEMYAKTEQDIQRSSAKPSIRCFIKPTETLERSLEMNKHKGKRRVQKRPNYKNVGEEEDEEKGPTEDAQEDAEKAKGTEGGSKGIKTSGESEEIEMVIMERSKLSELAASTSVQEQNTTDEEKSAAATCSESTQWSRPFLDMVYHALDSPDDDYHALFVLCLLYAMSHNKGMDPEKLERIQLPVPNAAEKTTYNHPLAERLIRIMNNAAQPDGKIRLATLELSCLLLKQQVLMSAGCIMKDVHLACLEGAREESVHLVRHFYKGEDIFLDMFEDEYRSMTMKPMNVEYLMMDASILLPPTGTPLTGIDFVKRLPCGDVEKTRRAIRVFFMLRSLSLQLRGEPETQLPLTREEDLIKTDDVLDLNNSDLIACTVITKDGGMVQRFLAVDIYQMSLVEPDVSRLGWGVVKFAGLLQDMQVTGVEDDSRALNITIHKPASSPHSKPFPILQATFIFSDHIRCIIAKQRLAKGRIQARRMKMQRIAALLDLPIQPTTEVLGFGLGSSTSTQHLPFRFYDQGRRGSSDPTVQRSVFASVDKVPGFAVAQCINQHSSPSLSSQSPPSASGSPSGSGSTSHCDSGGTSSSSTPSTAQSPADAPMSPELPKPHLPDQLVIVNETEADSKPSKNVARSAAVETASLSPSLVPARQPTISLLCEDTADTLSVESLTLVPPVDPHSLRSLTGMPPLSTPAAACTEPVGEEAACAEPVGTAED

SEQ ID NO: 3004 - protein, 60 aa, Homo Sapiens
  misc_feature (1)..(1): Xaa can be any naturally occurring amino acid
XEVLGFGLGSSTSTQHLPFRFYDQGRRGSSDPTVQRSVFASVDKVPDPSLCSCISYMCQS

SEQ ID NO: 3005 - protein, 152 aa, Homo Sapiens
  misc_feature (1)..(1): Xaa can be any naturally occurring amino acid
XKGRIQARRMKMQRIAALLDLPIQPTTEVLGFGLGSSTSTQHLPFRFYDQGRRGSSDPTVQRSVFASVDKVPGFAVAQCINQHSSPSLSSQSPPSASGSPSGSGSTSHCDSGGTSSSSTPSTAQSPAVRSGRKGRRRVFSLSEADSHGGHWV

SEQ ID NO: 3006 - protein, 128 aa, Homo Sapiens
  misc_feature (1)..(1): Xaa can be any naturally occurring amino acid
XMQVTGVEDDSRALNITIHKPASSPHSKPFPILQATFIFSDHIRCIIAKQRLAKGRIQARRMKMQRIAALLDLPIQPTTEVLGFGLGSSTSTQHLPFRFYDQGRRGSSDPTVQRSVFASVDKVPGFQG

SEQ ID NO: 3007 - protein, 446 aa, Homo Sapiens
MLHPETSPGRGHLLAVLLALLGTAWAEVWPPQLQEQAPMAGALNRKESFLLLSLHNRLRSWVQPPAADMRRLDWSDSLAQLAQARAALCGTPTPSLASGLWRTLQVGWNMQLLPAGLVSFVEVVSLWFAEGQRYSHAAGECARNATCTHYTQLVWATSSQLGCGRHLCSAGQAAIEAFVCAYSPRGNWEVNGKTIVPYKKGAWCSLCTASVSGCFKAWDHAGGLCEVPRNPCRMSCQNHGRLNISTCHCHCPPGYTGRYCQVRCSLQCVHGRFREEECSCVCDIGYGGAQCATKVHFPFHTCDLRIDGDCFMVSSEADTYYRARMKCQRKGGVLAQIKSQKVQDILAFYLGRLETTNEVIDSDFETRNFWIGLTYKTAKDSFRWATGEHQAFTSFAFGQPDNHGFGNCVELQASAAFNWNDQRCKTRNRYICQFAQEHISRWGPGS

SEQ ID NO: 3008 - protein, 446 aa, Homo Sapiens; identical to SEQ ID NO: 3007

SEQ ID NO: 3009 - protein, 455 aa, Homo Sapiens
MLHPETSPGRGHLLAVLLALLGTAWAEVWPPQLQEQAPMAGALNRKESFLLLSLHNRLRSWVQPPAADMRRLDWSDSLAQLAQARAALCGTPTPSLASGLWRTLQVGWNMQLLPAGLVSFVEVVSLWFAEGQRYSHAAGECARNATCTHYTQLVWATSSQLGCGRHLCSAGQAAIEAFVCAYSPRGNWEVNGKTIVPYKKGAWCSLCTASVSGCFKAWDHAGGLCEVPRNPCRMSCQNHGRLNISTCHCHCPPGYTGRYCQVRCSLQCVHGRFREEECSCVCDIGYGGAQCATKVHFPFHTCDLRIDGDCFMVSSEADTYYRARMKCQRKGGVLAQIKSQKVQDILAFYLGRLETTNEVIDSDFETRNFWIGLTYKTAKDSFRWATGEHQAFTSFAFGQPDNHGLVWLSAAMGFGNCVELQASAAFNWNDQRCKTRNRYICQFAQEHISRWGPGS

SEQ ID NO: 3010 - protein, 446 aa, Homo Sapiens; identical to SEQ ID NO: 3007

SEQ ID NO: 3011 - protein, 446 aa, Homo Sapiens; identical to SEQ ID NO: 3007

SEQ ID NO: 3012 - protein, 66 aa, Homo Sapiens
MRRLLVWATSSQLGCGRHLCSAGQAAIEAFVCAYSPRGNWEVNGKTIVPYKKGAWCSLCTASVSGC

SEQ ID NO: 3013 - protein, 455 aa, Homo Sapiens
MLHPETSPGRGHLLAVLLALLGTTWAEVWPPQLQEQAPMAGALNRKESFLLLSLHNRLRSWVQPPAADMRRLDWSDSLAQLAQARAALCGIPTPSLASGLWRTLQVGWNMQLLPAGLASFVEVVSLWFAEGQRYSHAAGECARNATCTHYTQLVWATSSQLGCGRHLCSAGQTAIEAFVCAYSPGGNWEVNGKTIIPYKKGAWCSLCTASVSGCFKAWDHAGGLCEVPRNPCRMSCQNHGRLNISTCHCHCPPGYTGRYCQVRCSLQCVHGRFREEECSCVCDIGYGGAQCATKVHFPFHTCDLRIDGDCFMVSSEADTYYRARMKCQRKGGVLAQIKSQKVQDILAFYLGRLETTNEVIDSDFETRNFWIGLTYKTAKDSFRWATGEHQAFTSFAFGQPDNHGLVWLSAAMGFGNCVELQASAAFNWNDQRCKTRNRYICQFAQEHISRWGPGS

SEQ ID NO: 3014 - protein, 446 aa, Homo Sapiens
MLHPETSPGRGHLLAVLLALLGTTWAEVWPPQLQEQAPMAGALNRKESFLLLSLHNRLRSWVQPPAADMRRLDWSDSLAQLAQARAALCGIPTPSLASGLWRTLQVGWNMQLLPAGLASFVEVVSLWFAEGQRYSHAAGECARNATCTHYTQLVWATSSQLGCGRHLCSAGQTAIEAFVCAYSPRGNWEVNGKTIIPYKKGAWCSLCTASVSGCFKAWDHAGGLCEVPRNPCRMSCQNHGRLNISTCHCHCPPGYTGRYCQVRCSLQCVHGRFREEECSCVCDIGYGGAQCATKVHFPFHTCDLRIDGDCFMVSSEADTYYRARMKCQRKGGVLAQIKSQKVQDILAFYLGRLETTNEVIDSDFETRNFWIGLTYKTAKDSFRWATGEHQAFTSFAFGQPDNHGFGNCVELQASAAFNWNDQRCKTRNRYICQFAQEHISRWGPGS

SEQ ID NO: 3015 - protein, 303 aa, Homo Sapiens [sequence omitted]

SEQ ID NO: 3016 - protein, 446 aa, Homo Sapiens; identical to SEQ ID NO: 3014

SEQ ID NO: 3017 - protein, 119 aa, Homo Sapiens
MLHPETSPGRGHLLAVLLALLGTAWAEVWPPQLQEQAPMAGALNRKESFLLLSLHNRLRSWVQPPAADMRRLDWSDSLAQLAQARAALCGIPTPSLASGLWRTLQVGWNMQLLPAGLAS

SEQ ID NO: 3018 - protein, 446 aa, Homo Sapiens
MLHPETSPGRGHLLAVLLALLGTAWAEVWPPQLQEQAPMAGALNRKESFLLLSLHNRLRSWVQPPAADMRRLDWSDSLAQLAQARAALCGIPTPSLASGLWRTLQVGWNMQLLPAGLASFVEVVSLWFAEGQRYSHAAGECARNATCTHYTQLVWATSSQLGCGRHLCSAGQAAIEAFVCAYSPRGNWEVNGKTIVPYKKGAWCSLCTASVSGCFKAWDHAGGLCEVPRNPCRMSCQNHGRLNISTCHCHCPPGYTGRYCQVRCSLQCVHGRFREEECSCVCDIGYGGAQCATKVHFPFHTCDLRIDGDCFMVSSEADTYYRARMKCQRKGGVLAQIKSQKVQDILAFYLGRLETTNEVIDSDFETRNFWIGLTYKTAKDSFRWATGEHQAFTSFAFGQPDNHGFGNCVELQASAAFNWNNQRCKTRNRYICQFAQEHISRWGPGS

SEQ ID NO: 3019 - protein, 455 aa, Homo Sapiens
MLHPETSPGRGHLLAVLLALLGTAWAEVWPPQLQEQAPMAGALNRKESFLLLSLHNRLRSWVQPPAADMRRLDWSDSLAQLAQARAALCGIPTPSLASGLWRTLQVGWNMQLLPAGLASFVEVVSLWFAEGQRYSHAAGECARNATCTHYTQLVWATSSQLGCGRHLCSAGQAAIEAFVCAYSPRGNWEVNGKTIVPYKKGAWCSLCTASVSGCFKAWDHAGGLCEVPRNPCRMSCQNHGRLNISTCHCHCPPGYTGRYCQVRCSLQCVHGRFREEECSCVCDIGYGGAQCATKVHFPFHTCDLRIDGDCFMVSSEADTYYRARMKCQRKGGVLAQIKSQKVQDILAFYLGRLETTNEVIDSDFETRNFWIGLTYKTAKDSFRWATGEHQAFTSFAFGQPDNHGLVWLSAAMGFGNCVELQASAAFNWNNQRCKTRNRYICQFAQEHISRWGPGS

SEQ ID NO: 3020 - protein, 446 aa, Homo Sapiens; identical to SEQ ID NO: 3018

SEQ ID NO: 3021 - protein, 446 aa, Homo Sapiens; identical to SEQ ID NO: 3018

SEQ ID NO: 3022 - protein, 446 aa, Homo Sapiens; identical to SEQ ID NO: 3018

SEQ ID NO: 3023 - protein, 134 aa, Homo Sapiens
MLHPETSPGRGHLLAVLLALLGTAWAEVWPPQLQEQAPMAGALNRKESFLLLSLHNRLRSWVQPPAADMRRLLVWATSSQLGCGRHLCSAGQAAIEAFVCAYSPRGNWEVNGKTIVPYKKGAWCSLCTASVSGC

SEQ ID NO: 3024 - protein, 86 aa, Homo Sapiens
MQRWTLWAAAFLTLHSAQAFPQTDISISPALPELPLPSLCPLFWMEFKGHCYRFFPLNKTWAEADLYCSEFSVGRKSAKLASIHSL

SEQ ID NO: 3025 - protein, 186 aa, Homo Sapiens
MQRWTLWAAAFLTLHSAQAFPQTDISISPALPELPLPSLCPLFWMEFKGHCYRFFPLNKTWAEADLYCSEFSVGRKSAKLASIHSWEENVFVYDLVNSCVPGIPADVWTGLHDHRQEGQFEWTDGSSYDYSYWDGSQPDDGVHADPEEEDCVQIWYRPTSALRSWNDNTCSRKFPFVCKIPSLTIH

SEQ ID NO: 3026 - protein, 136 aa, Homo Sapiens
MQRWTLWAAAFLTLHSAQAFPQTDISISPALPELPLPSLCPLFWMEFKGHCYRFFPLNKTWAEADLYCSEFSVGRKSAKLASIHSWEENVFVYDLVNSCVPGIPADVWTGLHDHRQVRKQWPLGPLGSSSQDSILI

SEQ ID NO: 3027 - protein, 65 aa, Homo Sapiens
MQRWTLWAAAFLTLHSAQAFPQTDISISPVCFLSAPSPARAAPAFPVPPVLDGVQRPLLSILPSQ

SEQ ID NO: 3028 - protein, 80 aa, Homo Sapiens
MILKLILSLKNFLRRYKCSSDHWIGLKMAKNRTGQWVDGATFTKSFGMRGSEGCAYLSDDGAATARCYTERKWICRKRIH

SEQ ID NO: 3029 - protein, 149 aa, Homo Sapiens
MMTKHKKCFIIVGVLITTNIITLIVKLTRDSQSLCPYDWIGFQNKCYYFSKEEGDWNSSKYNCSTQHADLTIIDNIEEMNFLRRYKCSSDHWIGLKMAKNRTGQWVDGATFTKSFGMRGSEGCAYLSDDGAATARCYTERKWICRKRIH

SEQ ID NO: 3030 - protein, 206 aa, Homo Sapiens
MAQQACPRAMAKNGLVICILVITLLLDQTTSHTSRLKARKHSKRRVRDKDGDLKTQIEKLWTEVNALKEIQALQTVCLRGTKVHKKCYLASEGLKHFHEANEDCISKGGILVIPRNSDEINALQDYGKRSLPGVNDFWLGINDMVTEGKFVDVNGIAISFLNWDRAQPNGGKRENCVLFSQSAQGKWSDEACRSSKRYICEFTIPQ

SEQ ID NO: 3031 - protein, 50 aa, Homo Sapiens
MAQQACPRAMAKNGLVICILVITLLLDQTTSHTSRLKARKHSKRRVRGIC

SEQ ID NO: 3032 - protein, 202 aa, Homo Sapiens
MELWGAYLLLCLFSLLTQVTTEPPTQKPKKIVNAKKDVVNTKMFEELKSRLDTLAQEVALLKEQQALQTVCLKGTKVHMKCFLAFTQTKTFHEASEDCISRGGTLGTPQTGSENDALYEYLRQSVGNEAEIWLGLNDMAAEGTWVDMTGARIAYKNWETEITAQPDGGKTENCAVLSGAANGKWFDKRCRDQLPYICQFGIV

SEQ ID NO: 3033 - protein, 160 aa, Homo Sapiens
MFEELKSRLDTLAQEVALLKEQQALQTVCLKGTKVHMKCFLAFTQTKTFHEASEDCISRGGTLGTPQTGSENDALYEYLRQSVGNEAEIWLGLNDMAAEGTWVDMTGARIAYKNWETEITAQPDGGKTENCAVLSGAANGKWFDKRCRDQLPYICQFGIV

SEQ ID NO: 3034 - protein, 179 aa, Homo Sapiens
MHFQAFWLCLGLLFISINAEFMDDDVETEDFEENSEEIDVNESELSSEIKYKTPQPIGEVYFAETFDSGRLAGWVLSKAKKDDMDEEISIYDGRWEIEELKENQVPGDRGLVLKSRAKHHAISAVLAKPFIFADKPLIVQYEVNFQDGIDCGGAYIKLLADTDDLILENFYDKTSYIIM

SEQ ID NO: 3035 - protein, 610 aa, Homo Sapiens
MHFQAFWLCLGLLFISINAEFMDDDVETEDFEENSEEIDVNESELSSEIKYKTPQPIGEVYFAETFDSGRLAGWVLSKAKKDDMDEEISIYDGRWEIEELKENQVPGDRGLVLKSRAKHHAISAVLAKPFIFADKPLIVQYEVNFQDGIDCGGAYIKLLADTDDLILENFYDKTSYIIMFGPDKCGEDYKLHFIFRHKHPKTGVFEEKHAKPPDVDLKKFFTDRKTHLYTLVMNPDDTFEVLVDQTVVNKGSLLEDVVPPIKPPKEIEDPNDKKPEEWDERAKIPDPSAVKPEDWDESEPAQIEDSSVVKPAGWLDDEPKFIPDPNAEKPDDWNEDTDGEWEAPQILNPACRIGCGEWKPPMIDNPKYKGVWRPPLVDNPNYQGIWSPRKIPNPDYFEDDHPFLLTSFSALGLELWSMTSDIYFDNFIICSEKEVADHWAADGWRWKIMIANANKPGVLKQLMAAAEGHPWLWLIYLVTAGVPIALITSFCWPRKVKKKHKDTEYKKTDICIPQTKGVLEQEEKEEKAALEKPMDLEEEKKQNDGEMLEKEEESEPEEKSEEEIEIIEGQEESNQSNKSGSEDEMKEADESTGSGDGPIKSVRKRRVRKD

SEQ ID NO: 3036 - protein, 610 aa, Homo Sapiens; identical to SEQ ID NO: 3035

SEQ ID NO: 3037 - protein, 277 aa, Homo Sapiens
GCSLMAQEVDTAQGAEMRRGAGAARGRASWCWALALLWLAVVPGWSRVSGIPSRRHWPVPYKRFDFRPKPDPYCQAKYTFCPTGSPIPVMEGDDDIEVFRLQAPVWEFKYGDLLGHLKIMHDAIGFRSTLTGKNYTMEWYELFQLGNCTFPHLRPEMDAPFWCNQGAACFFEGIDDVHWKENGTLVQVATISGFHHVGQDSIELRTSSDPPILASQSAGITDVSHCTRPTIRILPQRGTLYYLSLALLPGWSTVVRPRLTATSASRIQTIFLPQPPK

SEQ ID NO: 3038 - protein, 204 aa, Homo Sapiens
GSTGCSLMAQEVDTAQGAEMRRGAGAARGRASWCWALALLWLAVVPGWSRVSGIPSRRHWPVPYKRFDFRPKPDPYCQAKYTFCPTGSPIPVMEGDDDIEVFRLQAPVWEFKYGDLLGHLKIMHDAIGFRSTLTGKNYTMEWYELFQLGNCTFPHLRPEMDAPFWCNQGAACFFEGIDDVHWKENGTLVQVATISDGETEAQRG

SEQ ID NO: 3039 - protein, 271 aa, Homo Sapiens
LMAQEVDTAQGAEMRRGAGAARGRASWCWALALLWLAVVPGWSRVSGIPSRRHWPVPYKRFDFRPKPDPYCQAKYTFCPTGSPIPVMEGDDDIEVFRLQAPVWEFKYGDLLGHLKIMHDAIGFRSTLTGKNYTMEWYELFQLGNCTFPHLRPEMDAPFWCNQGAACFFEGIDDVHWKENGTLVQVATISGFHHVGQDSIELRTSSDPPILASQSAGITDVSHCTRPTIRILPQRGTLYYLLWTKTFLLCSLQFSWDFQNIATPYFNLLPKP

SEQ ID NO: 3040 - protein, 358 aa, Homo Sapiens
MAQEVDTAQGAEMRRGAGAARGRASWCWALALLWLAVVPGWSRVSGIPSRRHWPVPYKRFDFRPKPDPYCQAKYTFCPTGSPIPVMEGDDDIEVFRLQAPVWEFKYGDLLGHLKIMHDAIGFRSTLTGKNYTMEWYELFQLGNCTFPHLRPEMDAPFWCNQGAACFFEGIDDVHWKENGTLVQVATISGNMFNQMAKWVKQDNETGIYYETWNVKASPEKGAETWFDSYDCSKFVLRTFNKLAEFGAEFKNIETNYTRIFLYSGEPTYLGNETSVFGPTGNKTLGLAIKRFYYPFKPHLPTKEFLLSLLQIFDAVIVHKQFYLFYNFEYWFLPMKFPFIKITYEEIPLPIRNKTLSGL

SEQ ID NO: 3041 - protein, 36 aa, Homo Sapiens
MEGDDDIEVFRLQAPVWEFKYGDLLGHLLLYLAPGR

SEQ ID NO: 3042 - protein, 407 aa, Homo Sapiens
MRRNLRLGPSSGADAQGQGAPRPGLAAPRMLLPPASQASRGSGSTGCSLMAQEVDTAQGAEMRRGAGAARGRASWCWALALLWLAVVPGWSRVSGIPSRRHWPVPYKRFDFRPKPDPYCQAKYTFCPTGSPIPVMEGDDDIEVFRLQAPVWEFKYGDLLGHLKIMHDAIGFRSTLTGKNYTMEWYELFQLGNCTFPHLRPEMDAPFWCNQGAACFFEGIDDVHWKENGTLVQVATISGNMFNQMAKWVKQDNETGIYYETWNVKASPEKGAETWFDSYDCSKFVLRTFNKLAEFGAEFKNIETNYTRIFLYSGEPTYLGNETSVFGPTGNKTLGLAIKRFYYPFKPHLPTKEFLLSLLQIFDAVIVHKQFYLFYNFEYWFLPMKFPFIKITYEEIPLPIRNKTLSGL

SEQ ID NO: 3043 - protein, 125 aa, Homo Sapiens
  misc_feature (1)..(1): Xaa can be any naturally occurring amino acid
XGRASWCWALALLWLAVVPGWSRVSGIPSRRHWPVPYKRFDFRPKPDPYCQAKYTFCPTGSPIPVMEGDDDIEVFRLQAPVWEFKYGDLLGHLVTWTHGCVTVAFIHVLSLHRKLCMMPLDSEVH

SEQ ID NO: 3044 - protein, 304 aa, Homo Sapiens
  misc_feature (1)..(1): Xaa can be any naturally occurring amino acid
XGYKRFDFRPKPDPYCQAKYTFCPTGSPIPVMEGDDDIEVFRLQAPVWEFKYGDLLGHLKIMHDAIGFRSTLTGKNYTMEWYELFQLGNCTFPHLRPEMDAPFWCNQGAACFFEGIDDVHWKENGTLVQVATISGNMFNQMAKWVKQDNETGIYYETWNVKASPEKGAETWFDSYDCSKFVLRTFNKLAEFGAEFKNIETNYTRIFLYSGEPTYLGNETSVFGPTGNKTLGLAIKRFYYPFKPHLPTKEFLLSLLQIFDAVIVHKQFYLFYNFEYWFLPMKFPFIKITYEEIPLPIRNKTLSGL

SEQ ID NO: 3045 - protein, 216 aa, Homo Sapiens
  misc_feature (1)..(1): Xaa can be any naturally occurring amino acid
XLPPASQASRGSGSTGCSLMAQEVDTAQGAEMRRGAGAARGRASWCWALALLWLAVVPGWSRVSGIPSRRHWPVPYKRFDFRPKPDPYCQAKYTFCPTGSPIPVMEGDDDIEVFRLQAPVWEFKYGDLLGHLKIMHDAIGFRSTLTGKNYTMEWYELFQLGNCTFPHLRPEMDAPFWCNQGAACFFEGIDDVHWKENGTLVQVATISDGETEAQRG

SEQ ID NO: 3046 - protein, 249 aa, Homo Sapiens
  misc_feature (1)..(1): Xaa can be any naturally occurring amino acid
XMAQEVDTAQGAEMRRGAGAARGRASWCWALALLWLAVVPGWSRVSGIPSRRHWPVPYKRFDFRPKPDPYCQAKYTFCPTGSPIPVMEGDDDIEVFRLQAPVWEFKYGDLLGHLKIMHDAIGFRSTLTGKNYTMEWYELFQLGNCTFPHLRPEMDAPFWCNQGAACFFEGIDDVHWKENGTLVQVATISGFHHVGQDSIELRTSSDPPILASQSAGITDVSHCTRPTIRILPQRGTLYYLRWVLLCCPG

SEQ ID NO: 3047 - protein, 205 aa, Homo Sapiens
  misc_feature (1)..(1): Xaa can be any naturally occurring amino acid
XQASRGSGSTGCSLMAQEVDTAQGAEMRRGAGAARGRASWCWALALLWLAVVPGWSRVSGIPSRRHWPVPYKRFDFRPKPDPYCQAKYTFCPTGSPIPVMEGDDDIEVFRLQAPVWEFKYGDLLGHLKIMHDAIGFRSTLTGKNYTMEWYELFQLGNCTFPHLRPEMDAPFWCNQGAACFFEGIDDVHWKENGTLVQVATISGKL

SEQ ID NO: 3048 - protein, 210 aa, Homo Sapiens
  misc_feature (1)..(1): Xaa can be any naturally occurring amino acid
XSLMAQEVDTAQGAEMRRGAGAARGRASWCWALALLWLAVVPGWSRVSGIPSRRHWPVPYKRFDFRPKPDPYCQAKYTFCPTGSPIPVMEGDDDIEVFRLQAPVWEFKYGDLLGHLKIMHDAIGFRSTLTGKNYTMEWYELFQLGNCTFPHLRPEMDAPFWCNQGAACFFEGIDDVHWKENGTLVQVATISEISCALKNGIKLAELGFLL

SEQ ID NO: 3049 - protein, 112 aa, Homo Sapiens
MEKILILLLVALSVAYAAPGPRGIIINLENGELCMNSAQCKSNCCQHSSALGLARCTSMASENSECSVKTLYGIYYKCPCERGLTCEGDKTIVGSITNTNFGICHDAGRSKQ

SEQ ID NO: 3050 - protein, 71 aa, Homo Sapiens
MEKILILLLVALSVAYAAPGPRGIIINLTLYGIYYKCPCERGLTCEGDKTIVGSITNTNFGICHDAGRSKQ

SEQ ID NO: 3051 - protein, 98 aa, Homo Sapiens
MILLPQPPKKLGLQENGELCMNSAQCKSNCCQHSSALGLARCTSMASENSECSVKTLYGIYYKCPCERGLTCEGDKTIVGSITNTNFGICHDAGRSKQ

SEQ ID NO: 3052 - protein, 42 aa, Homo Sapiens
GCCQRAPDNCESHCAEKGSEGSLCQTQLPATPCFLPSNTVRT

SEQ ID NO: 3053 - protein, 121 aa, Homo Sapiens
MMLPQWLLLLFLLFFFLFLLTRGSLSPTKYNLLELKESCIRNQDCETGCCQRAPDNCESHCAEKGSEGSLCQTQVFFGQYRACPCLRNLTCIYSKNEKWLSIAYGRCQKIGRQKLAKKMFF

SEQ ID NO: 3054 - protein, 100 aa, Homo Sapiens
MAAALALVAGVLSGAVLPLWSALPQYKKKITDRCFHHSECYSGCCLMDLDSGGAFCAPRARITMICLPQTKGATNIICPCRMGLTCISKDLMCSRRCHMI

SEQ ID NO: 3055 - protein, 153 aa, Homo Sapiens
MAAALALVAGVLSGAVLPLWSALPQYKKKITDRCFHHSECYSGCCLMDLDSGGAFCAPRARITMICLPQWLELFKGRDRIIFIYEAPTPSLVSAHNQGSYQHHLPLPDGLDVHIQGLDVFPPVPYDLEEDAGWSLLPWGHRPWLPPTCSKSSS

SEQ ID NO: 3056 - protein, 633 aa, Homo Sapiens
MPSCGACTCGAAAVRLITSSLASAQRGISGGRIHMSVLGRLGTFETQILQRAPLRSFTETPAYFASKDGISKDGSGDGNKKSASEGSSKKSGSGNSGKGGNQLRCPKCGDLCTHVETFVSSTRFVKCEKCHHFFVVLSEADSKKSIIKEPESAAEAVKLAFQQKPPPPPKKIYNYLDKYVVGQSFAKKVLSVAVYNHYKRIYNNIPANLRQQAEVEKQTSLTPRELEIRRREDEYRFTKLLQIAGISPHGNALGASMQQQVNQQIPQEKRGGEVLDSSHDDIKLEKSNILLLGPTGSGKTLLAQTLAKCLDVPFAICDCTTLTQAGYVGEDIESVIAKLLQDANYNVEKAQQGIVFLDEVDKIGSVPGIHQLRDVGGEGVQQGLLKLLEGTIVNVPEKNSRKLRGETVQVDTTNILFVASGAFNGLDRIISRRKNEKYLGFGTPSNLGKGRRAAAAADLANRSGESNTHQDIEEKDRLLRHVEARDLIEFGMIPEFVGRLPVVVPLHSLDEKTLVQILTEPRNAVIPQYQALFSMDKCELNVTEDALKAIARLALERKTGARGLRSIMEKLLLEPMFEVPNSDIVCVEVDKEVVEGKKEPGYIRAPTKESSEEEYDSGVEEEGWPRQADAANS

SEQ ID NO: 3057 - protein, 268 aa, Homo Sapiens
MPSCGACTCGAAAVRLITSSLASAQRGISGGRIHMSVLGRLGTFETQILQRAPLRSFTETPAYFASKDGISKDGSGDGNKKSASEGSSKKSGSGNSGKGGNQLRCPKCGDLCTHVETFVSSTRFVKCEKCHHFFVVLSEADSKKSIIKEPESAAEAVKLAFQQKPPPPPKKIYNYLDKYVVGQSFAKKVLSVAVYNHYKRIYNNIPANLRQQAEVEKQTSLTPRELEIRRREDEYRFTKLLQIAGISPHGNALGASMQQQVKLCWHKP

SEQ ID NO: 3058 - protein, 130 aa, Homo Sapiens
MSVLGRLGTFETQILQRAPLRSFTETPAYFASKDGISKDGSGDGNKKSASEGSSKKSGSGNSGKGGNQLRCPKCGDLCTHVETFVSSTRFVKCEKCHHFFVVLSEADSKKSIIKEPESAAEAVKLAFQQK

SEQ ID NO: 3059 - protein, 129 aa, Homo Sapiens
MENDNTVLLNPPLFALDKDAPLRYAGEICGFRLHGSGVPFEAVILDKATGEGLIRAKEPVDCEAQKEHTFTIQAYDCGEGPDGANTKKSHKATVHVRVNDVNEFAPVFVERLYRAAVTEGKLYDRILRV

SEQ ID NO: 3060 - protein, 142 aa, Homo Sapiens
MENDNTVLLNPPLFALDKDAPLRYAGEICGFRLHGSGVPFEAVILDKATGEGLIRAKEPVDCEAQKEHTFTIQAYDCGEGPDGANTKKSHKATVHVRVNDVNEFAPVFVERLYRAAVTEGKLYDRILRVEAIDGDCSPQYSQ

SEQ ID NO: 3061 - protein, 154 aa, Homo Sapiens
MENDNTVLLNPPLFALDKDAPLRYAGEICGFRLHGSGVPFEAVILDKATGEGLIRAKEPVDCEAQKEHTFTIQAYDCGEGPDGANTKKSHKATVHVRVNDVNEFAPVFVERLYRAAVTEGKLYDRILRVEAIDGDCSPQYSQICYYEILTPNTP

SEQ ID NO: 3062 - protein, 134 aa, Homo Sapiens
MTLLLLPLLLASLLASCSCNKANKHKPWIEAEYQGIVMENDNTVLLNPPLFALDKDAPLRYAGEICGFRLHGSGVPFEAVILDKATGEGLIRAKEPVDCEAQKEHTFTIQAYDCGEGPDGANTKKSHKATVHVR

SEQ ID NO: 3063 - protein, 956 aa, Homo Sapiens
MTLLLLPLLLASLLASCSCNKANKHKPWIEAEYQGIVMENDNTVLLNPPLFALDKDAPLRYAGEICGFRLHGSGVPFEAVILDKATGEGLIRAKEPVDCEAQKEHTFTIQAYDCGEGPDGANTKKSHKATVHVRVNDVNEFAPVFVERLYRAAVTEGKLYDRILRVEAIDGDCSPQYSQICYYEILTPNTPFLIDNDGNIENTEKLQYSGERLYKFTVTAYDCGKKRAADDAEVEIQVKPTCKPSWQGWNKRIEYAPGAGSLALFPGIRLETCDEPLWNIQATIELQTSHVAKGCDRDNYSERALRKLCGAATGEVDLLPMPGPNANWTAGLSVHYSQDSSLIYWFNGTQAVQVPLGGPSGLGSGPQDSLSDHFTLSFWMKHGVTPNKGKKEEETIVCNTVQNEDGFSHYSLTVHGCRIAFLYWPLLESARPVKFLWKLEQVCDDEWHHYALNLEFPTVTLYTDGISFDPALIHDNGLIHPPRREPALMIGACWTEEKNKEKEKGDNSTDTTQGDPLSIHHYFHGYLAGFSVRSGRLESREVIECLYACREGLDYRDFESLGKGMKVHVNPSQSLLTLEGDDVETFNHALQHVAYMNTLRFATPGVRPLRLTTAVKCFSEESCVSIPEVEGYVVVLQPDAPQILLSGTAHFARPAVDFEGTNGVPLFPDLQITCSISHQVEAKKDESWQGTVTDTRMSDEIVHNLDGCEISLVGDDLDPERESLLLDTTSLQQRGLELTNTSAYLTIAGVESITVYEEILRQARYRLRHGAALYTRKFRLSCSEMNGRYSSNEFIVEVNVLHSMNRVAHPSHVLSSQQFLHRGHQPPPEMAGHSLASSHRNSMIPSAATLIIVVCVGFLVLMVVLGLVRIHSLHRRVSGAGGPPGASSDPKDPDLFWDDSALTIIVNPMESYQNRQSCVTGAVGGQQEDEDSSDSEVADSPSSDERRIIETPPHRY

SEQ ID NO: 3064 - protein, 968 aa, Homo Sapiens
MVLGCELSGSTRVVVGVEALLTGASSPLPGVGPANKHKPWIEAEYQGIVMENDNTVLLNPPLFALDKDAPLRYAGEICGFRLHGSGVPFEAVILDKATGEGLIRAKEPVDCEAQKEHTFTIQAYDCGEGPDGANTKKSHKATVHVRVNDVNEFAPVFVERLYRAAVTEGKLYDRILRVEAIDGDCSPQYSQICYYEILTPNTPFLIDNDGNIENTEKLQYSGERLYKFTVTAYDCGKKRAADDAEVEIQVKPTCKPSWQGWNKRIEYAPGAGSLALFPGIRLETCDEPLWNIQATIELQTSHVAKGCDRDNYSERALRKLCGAATGEVDLLPMPGPNANWTAGLSVHYSQDSSLIYWFNGTQAVQVPLGGPSGLGSGPQDSLSDHFTLSFWMKHGVTPNKGKKEEETIVCNTVQNEDGFSHYSLTVHGCRIAFLYWPLLESARPVKFLWKLEQVCDDEWHHYALNLEFPTVTLYTDGISFDPALIHDNGLIHPPRREPALMIGACWTEEKNKEKEKGDNSTDTTQGDPLSIHHYFHGYLAGFSVRSGRLESREVIECLYACREGLDYRDFESLGKGMKVHVNPSQSLLTLEGDDVETFNHALQHVAYMNTLRFATPGVRPLRLTTAVKCFSEESCVSIPEVEGYVVVLQPDAPQILLSGTAHFARPAVDFEGTNGVPLFPDLQITCSISHQVEAKKDESWQGTVTDTRMSDEIVHNLDGCEISLVGDDLDPERESLLLDTTSLQQRGLELTNTSAYLTIAGVESITVYEEILRQARYRLRHGAALYTRKFRLSCSEMNGRYSSNEFIVEVNVLHSMNRVAHPSHVLSSQQFLHRGHQPPPEMAGHSLASSHRNSMIPSAATLIIVVCVGFLVLMVVLGLVRIHSLHRRVSGAGGPPGASSDPKDPDLFWDDSALTIIVNPMESYQNRQSCVTGAVGGQQEDEDSSDSEVADSPSSDERRIIETPPHRY

SEQ ID NO: 3065 - protein, 176 aa, Homo Sapiens
MVVITNKHKPWIEAEYQGIVMENDNTVLLNPPLFALDKDAPLRYAGEICGFRLHGSGVPFEAVILDKATGEGLIRAKEPVDCEAQKEHTFTIQAYDCGEGPDGANTKKSHKATVHVRVNDVNEFAPVFVERLYRAAVTEGKLYDRILRVEAIDGDCSPQYSQICYYEILTPNTPFL

SEQ ID NO: 3066 - protein, 297 aa, Homo Sapiens
MEACKDSRIGGMMKTLLLFVGLLLTWESGQVLGDQTVSDNELQEMSNQGSKYVNKEIQNAVNGVKQIKTLIEKTNEERKTLLSNLEEAKKKKEDALNETRESETKLKELPGVCNETMMALWEECKPCLKQTCMKFYARVCRSGSGLVGRQLEEFLNQSSPFYFWMNGDRIDSLLENDRQQTHMLDVMQDHFSRASSIIDELFQDRFFTREPQDTYHYLPFSLPHRRPHFFFPKSRIVRSLMPFSPYEPLNFHAMFQPFLEMIHEAQQAMDIHFHSPAFQHPPTEFIREGDDDRTVCR

SEQ ID NO: 3067 - protein, 32 aa, Homo Sapiens
MMKTLLLFVGLLLTWESGQVLGDQTVSDNELQ

SEQ ID NO: 3068 - protein, 82 aa, Homo Sapiens
MMKTLLLFVGLLLTWESGQVLGDQTVSDNELQEMSNQGSKYVNKEIQNAVNGVKQIKTLIEKTNEERKTLLSNLEEAKKKKE

SEQ ID NO: 3069 - protein, 82 aa, Homo Sapiens; identical to SEQ ID NO: 3068

SEQ ID NO: 3070 - protein, 129 aa, Homo Sapiens
MMKTLLLFVGLLLTWESGQVLGDQTVSDNELQEMSNQGSKYVNKEIQNAVNGVKQIKTLIEKTNEERKTLLSNLEEAKKKKEDALNETRESETKLKELPGVCNETMMALWEECKPCLKQTCMKFYARVC

SEQ ID NO: 3071 - protein, 136 aa, Homo Sapiens
MMKTLLLFVGLLLTWESGQVLGDQTVSDNELQEMSNQGSKYVNKEIQNAVNGVKQIKTLIEKTNEERKTLLSNLEEAKKKKEDALNETRESETKLKELPGVCNETMMALWEECKPCLKQTCMKFYARVCRSGSGLV

SEQ ID NO: 3072 - protein, 139 aa, Homo Sapiens
MMKTLLLFVGLLLTWESGQVLGDQTVSDNELQEMSNQGSKYVNKEIQNAVNGVKQIKTLIEKTNEERKTLLSNLEEAKKKKEDALNETRESETKLKELPGVCNETMMALWEECKPCLKQTCMKFYARVCRSGSGLVGRQ

SEQ ID NO: 3073 - protein, 204 aa, Homo Sapiens
MMKTLLLFVGLLLTWESGQVLGDQTVSDNELQEMSNQGSKYVNKEIQNAVNGVKQIKTLIEKTNEERKTLLSNLEEAKKKKEDALNETRESETKLKELPGVCNETMMALWEECKPCLKQTCMKFYARVCRSGSGLVGRQLEEFLNQSSPFYFWMNGDRIDSLLENDRQQTHMLDVMQDHFSRASSIIDELFQDRFFTREPQDTY

SEQ ID NO: 3074 - protein, 449 aa, Homo Sapiens
MMKTLLLFVGLLLTWESGQVLGDQTVSDNELQEMSNQGSKYVNKEIQNAVNGVKQIKTLIEKTNEERKTLLSNLEEAKKKKEDALNETRESETKLKELPGVCNETMMALWEECKPCLKQTCMKFYARVCRSGSGLVGRQLEEFLNQSSPFYFWMNGDRIDSLLENDRQQTHMLDVMQDHFSRASSIIDELFQDRFFTREPQDTYHYLPFSLPHRRPHFFFPKSRIVRSLMPFSPYEPLNFHAMFQPFLEMIHEAQQAMDIHFHSPAFQHPPTEFIREGDDDRTVCREIRHNSTGCLRMKDQCDKCREILSVDCSTNNPSQAKLRRELDESLQVAERLTRKYNELLKSYQWKMLNTSSLLEQLNEQFNWVSRLANLTQGEDQYYLRVTTVASHTSDSDVPSGVTEVVVKLFDSDPITVTVPVEVSRKNPKFMETVAEKALQEYRKKHREE

SEQ ID NO: 3075 - protein, 449 aa, Homo Sapiens; identical to SEQ ID NO: 3074

SEQ ID NO: 3076 - protein, 449 aa, Homo Sapiens; identical to SEQ ID NO: 3074

SEQ ID NO: 3077 - protein, 271 aa, Homo Sapiens
MMKTLLLFVGLLLTWESGQVLGDQTVSDNELQEMSNQGSKYVNKEIQNAVNGVKQIKTLIEKTNEERKTLLSNLEEAKKKKEDALNETRESETKLKELPGVCNETMMALWEECKPCLKQTCMKFYARVCRSGSGLVGRQLEEFLNQSSPFYFWMNGDRIDSLLENDRQQTHMLDVMQDHFSRASSIIDELFQDSLMPFSPYEPLNFHAMFQPFLEMIHEAQQAMDIHFHSPAFQHPPTEFIREGDDDRTVCREIRHNSTGCLRMKDQCDKC

SEQ ID NO: 3078 - protein, 140 aa, Homo Sapiens
  misc_feature (1)..(1): Xaa can be any naturally occurring amino acid
XADCSTNNPSQAKLRRELDESLQVAERLTRKYNELLKSYQWKMLNTSSLLEQLNEQFNWVSRLANLTQGEDQYYLRVTTVASHTSDSDVPSGVTEVVVKLFDSDPITVTVPVEVSRKNPKFMETVAEKALQEYRKKHREE

SEQ ID NO: 3079 - protein, 284 aa, Homo Sapiens
  misc_feature (1)..(1): Xaa can be any naturally occurring amino acid
XQLEEFLNQSSPFYFWMNGDRIDSLLENDRQQTHMLDVMQDHFSRASSIIDELFQDRFFTREPQDTYHYLPFSLPHRRPHFFFPKSRIVRSLMPFSPYEPLNFHAMFQPFLEMIHEAQQAMDIHFHSPAFQHPPTEFIREGDDDRTVCREIRHNSTGCLRMKDQCDKCREILSVDCSTNNPSQAKLRRELDESLQVAERLTRKYNELLKSYQWKMLNTSSLLEQLNEQFNWVSRLANLTQGEDQYYLRVTTVASHTSDSDVPSGVTEVVVKLFDSDPITVTVPV

SEQ ID NO: 3080 - protein, 466 aa, Homo Sapiens
MKPPLLVFIVCLLWLKDSHCAPTWKDKTAISENLKSFSEVGEIDADEEVKKALTGIKQMKIMMERKEKEHTNLMSTLKKCREEKQEALKLLNEVQEHLEEEERLCRESLADSWGECRSCLENNCMRIYTTCQPSWSSVKNKIERFFRKIYQFLFPFHEDNEKDLPISEKLIEEDAQLTQMEDVFSQLTVDVNSLFNRSFNVFRQMQQEFDQTFQSHFISDTDLTEPYFFPAFSKEPMTKADLEQCWDIPNFFQLFCNFSVSIYESVSETITKMLKAIEDLPKQDKAPDHGGLISKMLPGQDRGLCGELDQNLSRCFKFHEKCQKCQAHLSEDCPDVPALHTELDEAIRLVNVSNQQYGQILQMTRKHLEDTAYLVEKMRGQFGWVSELANQAPETEIIFNSIQVVPRIHEGNISKQDETMMTDLSILPSSNFTLKIPLEESAESSNFIGYVVAKALQHFKEHFKTW

SEQ ID NO: 3081 - protein, 466 aa, Homo Sapiens; identical to SEQ ID NO: 3080

SEQ ID NO: 3082 - protein, 466 aa, Homo Sapiens; identical to SEQ ID NO: 3080

SEQ ID NO: 3083 - protein, 491 aa, Homo Sapiens
MNSMEAAVGTEVPLLDNLQHCNSGNMKPPLLVFIVCLLWLKDSHCAPTWKDKTAISENLKSFSEVGEIDADEEVKKALTGIKQMKIMMERKEKEHTNLMSTLKKCREEKQEALKLLNEVQEHLEEEERLCRESLADSWGECRSCLENNCMRIYTTCQPSWSSVKNKIERFFRKIYQFLFPFHEDNEKDLPISEKLIEEDAQLTQMEDVFSQLTVDVNSLFNRSFNVFRQMQQEFDQTFQSHFISDTDLTEPYFFPAFSKEPMTKADLEQCWDIPNFFQLFCNFSVSIYESVSETITKMLKAIEDLPKQDKAPDHGGLISKMLPGQDRGLCGELDQNLSRCFKFHEKCQKCQAHLSEDCPDVPALHTELDEAIRLVNVSNQQYGQILQMTRKHLEDTAYLVEKMRGQFGWVSELANQAPETEIIFNSIQVVPRIHEGNISKQDETMMTDLSILPSSNFTLKIPLEESAESSNFIGYVVAKALQHFKEHFKTW

SEQ ID NO: 3084 - protein, 518 aa, Homo Sapiens
MRTWDYRWSLALVAQTGVHCCNLSSLQPLPPRFKRFSCLSLSSGWDYSNSGNMKPPLLVFIVCLLWLKDSHCAPTWKDKTAISENLKSFSEVGEIDADEEVKKALTGIKQMKIMMERKEKEHTNLMSTLKKCREEKQEALKLLNEVQEHLEEEERLCRESLADSWGECRSCLENNCMRIYTTCQPSWSSVKNKIERFFRKIYQFLFPFHEDNEKDLPISEKLIEEDAQLTQMEDVFSQLTVDVNSLFNRSFNVFRQMQQEFDQTFQSHFISDTDLTEPYFFPAFSKEPMTKADLEQCWDIPNFFQLFCNFSVSIYESVSETITKMLKAIEDLPKQDKAPDHGGLISKMLPGQDRGLCGELDQNLSRCFKFHEKCQKCQAHLSEDCPDVPALHTELDEAIRLVNVSNQQYGQILQMTRKHLEDTAYLVEKMRGQFGWVSELANQAPETEIIFNSIQVVPRIHEGNISKQDETMMTDLSILPSSNFTLKIPLEESAESSNFIGYVVAKALQHFKEHFKTW

SEQ ID NO: 3085 - protein, 518 aa, Homo Sapiens; identical to SEQ ID NO: 3084

SEQ ID NO: 3086 - protein, 82 aa, Homo Sapiens
MRTWDYSNSGNMKPPLLVFIVCLLWLKDSHCAPTWKDKTAISENLKSFSEVGEIDADEEVKKALTGIKQMKIMMERKEKEHT

SEQ ID NO: 3087 - protein, 34 aa, Homo Sapiens
  misc_feature (1)..(1): Xaa can be any naturally occurring amino acid
XQFGWVSELANQAPETEIIFNSIQVRRSNASYIQ

SEQ ID NO: 3088 - protein, 136 aa, Homo Sapiens
MLLKLKEKASLTLAVGTLPFPSQFNFVPPGRMCRVAGWGRTGVLKPGSDTLQEVKLRLMDPQACSHFRDFDHNLQLCVGNPRKTKSAFKGDSGGPLLCAGVAQGIVSYGRSDAKPPAVFTRISHYRPWINQILQAN

SEQ ID NO: 3089 - protein, 247 aa, Homo Sapiens
MLLLPLPLLLFLLCSRAEAGEIIGGTECKPHSRPYMAYLEIVTSNGPSKFCGGFLIRRNFVLTAAHCAGRSITVTLGAHNITEEEDTWQKLEVIKQFRHPKYNTSTLHHDIMLLKLKEKASLTLAVGTLPFPSQFNFVPPGRMCRVAGWGRTGVLKPGSDTLQEVKLRLMDPQACSHFRDFDHNLQLCVGNPRKTKSAFKGDSGGPLLCAGVAQGIVSYGRSDAKPPAVFTRISHYRPWINQILQAN

SEQ ID NO: 3090 - protein, 179 aa, Homo Sapiens
MLSRCRSGLLHVLGLSFLLQTRRPILLCSPRLMKPLVVFVLGGPGAGKGTQCARIVEEMDQTMAANAQKNKFLIDGFPRNQDNLQGWNKTMDGKADVSFVLFFDCNNEICIERCLERGKSSGRSDDNRESLEKRIQTYLQSTKPIIDLYEEMGKVKKIDASKSVDEVFDEVVQIFDKEG

SEQ ID NO: 3091 - protein, 58 aa, Homo Sapiens
MLSRCRSGLLHVLGLSFLLQTRRPILLCSPRLMKPLVVFVLGGPGAGKGTQCARIVEG

SEQ ID NO: 3092 - protein, 228 aa, Homo Sapiens
MLSRCRSGLLHVLGLSFLLQTRRPILLCSPRLMKPLVVFVLGGPGAGKGTQCARIVEKYGYTHLSAGELLRDERKNPDSQYGELIEKYIKEGKIVPVEITISLLKREMDQTMAANAQKNKFLIDGFPRNQDNLQGWNKTMDGKADVSFVLFFDCNNEICIERCLERGKSSGRSDDNRESLEKRIQTYLQSTKPIIDLYEEMGKVKKIDASKSVDEVFDEVVQIFDKEG

SEQ ID NO: 3093 - protein, 169 aa, Homo Sapiens
MLSRCRSGLLHVLGLSFLLQTRRPILLCSPRLMKPLVVFVLGGPGAGKGTQCARIVEKYGYTHLSAGELLRDERKNPDSQYGELIEKYIKEGKIVPVEITISLLKREMDQTMAANAQKNKFLIDGFPRNQDNLQGWNKTMDGKADVSFVLFFDCNNENSDLPSVNKANY

SEQ ID NO: 3094 - protein, 436 aa, Homo Sapiens
MPMSSLPAAILSHMTAINNVPPPPLHSIPNLKKSKHINYGQLNALCHIRGQHSRSMSNILSAHDTFMKQYPKVFLHQKPRLPKLFKQEEQRELNEGKEESQHQQPDDSNNIAVHVQRAHGGHILYRPKRATEKFEEFLAILKKLPIHRTPYEHKTVWKFLKTIPDLTFQLNDKHLKTLSKTVFSETWLKGSTVVANDGFYVILKGLARPQTNVYKNLIEGSDSPDSFISQSFHSFIWSEEFKNSTLAEMYLPSYDSMLSKWSTFGTLEVMPQNESETQMFSVVTEDDCEILKIPAKGYAKIKEEKIKLENMQKLKLIRMCPYYEEWPTLSIYELIALLKWKKFPPGHVIVESGNIISFVGYINSGCCNIYRSIIGFVKLRSNKVKRSQKLVYMGKLKEKESFGEISVLLQVPFTCTIITKKEVEMAIIEDKDLFVA

SEQ ID NO: 3095 - protein, 292 aa, Homo Sapiens [sequence omitted]

SEQ ID NO: 3096 - protein, 161 aa, Homo Sapiens
  misc_feature (1)..(1): Xaa can be any naturally occurring amino acid
XGCCNIYRSIIGFVKLRSNKVKRSQKLVYMGKLKEKESFGEISVLLQVPFTCTIITKKEVEMAIIEDKDLFELDPVTKQLMLQTAKPTFGHLTDEDVKNEYLKKEQQKEWKDFKIASWTKEITDFICLYEKHQDNFTLPKIAHLERITKRIKNNSILIHLE

SEQ ID NO: 3097 - protein, 207 aa, Homo Sapiens
  misc_feature (1)..(1): Xaa can be any naturally occurring amino acid
XNMQKLKLIRMCPYYEEWPTLSIYELIALLKWKKFPPGHVIVESGNIISFVGYINSGCCNIYRSIIGFVKLRSNKVKRSQKLVYMGKLKEKESFGEISVLLQVPFTCTIITKKEVEMAIIEDKDLFELDPVTKQLMLQTAKPTFGHLTDEDVKNEYLKKEQQKEWKDFKDKTVKNSLYYKGIIPGFGKWDHYCTSIPRNLKDTLVNY

SEQ ID NO: 3098 - protein, 507 aa, Homo Sapiens
MDPKLGRMAASLLAVLLLLLERGMFSSPSPPPALLEKVFQYIDLHQDEFVQTLKEWVAIESDSVQPVPRFRQELFRMMAVAADTLQRLGARVASVDMGPQQLPDGQSLPIPPVILAELGSDPTKGTVCFYGHLDVQPADRGDGWLTDPYVLTEVDGKLYGRGATDNKGPVLAWINAVSAFRALEQDLPVNIKFIIEGMEEAGSVALEELVEKEKDRFFSGVDYIVISDNLWISQRKPAITYGTRGNSYFMVEVKCRDQDFHSGTFGGILHEPMADLVALLGSLVDSSGHILVPGIYDEVVPLTEEEINTYKAIHLDLEEYRNSSRVEKFLFDTKEEILMHLWRYPSLSIHGIEGAFDEPGTKTVIPGRVIGKFSIRLVPHMNVSAVEKQVTRHLEDVFSKRNSSNKMVVSMTLGLHPWIANIDDTQYLAAKRAIRTVFGTEPDMIRDGSTIPIAKMFQEIVHKSVVLIPLGAVDDGEHSQNEKINRWNYIEGTKLFAAFFLEMAQLH

SEQ ID NO: 3099 - protein, 464 aa, Homo Sapiens
MDPKLGRMTLKEWVAIESDSVQPVPRFRQELFRMMAVAADTLQRLGARVASVDMGPQQLPDGQSLPIPPVILAELGSDPTKGTVCFYGHLDVQPADRGDGWLTDPYVLTEVDGKLYGRGATDNKGPVLAWINAVSAFRALEQDLPVNIKFIIEGMEEAGSVALEELVEKEKDRFFSGVDYIVISDNLWISQRKPAITYGTRGNSYFMVEVKCRDQDFHSGTFGGILHEPMADLVALLGSLVDSSGHILVPGIYDEVVPLTEEEINTYKAIHLDLEEYRNSSRVEKFLFDTKEEILMHLWRYPSLSIHGIEGAFDEPGTKTVIPGRVIGKFSIRLVPHMNVSAVEKQVTRHLEDVFSKRNSSNKMVVSMTLGLHPWIANIDDTQYLAAKRAIRTVFGTEPDMIRDGSTIPIAKMFQEIVHKSVVLIPLGAVDDGEHSQNEKINRWNYIEGTKLFAAFFLEMAQLH

SEQ ID NO: 3100 - protein, 38 aa, Homo Sapiens
  misc_feature (1)..(1): Xaa can be any naturally occurring amino acid
XADRGDGWLTDPYVLTEGNFMDEERPTTKALSWLGSML

SEQ ID NO: 3101 - protein, 61 aa, Homo Sapiens
ILQKILLDDTGLAYICQTYERFSHVAMILGKMVLQLSKEPSARLLKHVVRCYLRLSDNPRC

SEQ ID NO: 3102 - protein, 41 aa, Homo Sapiens
MHSLATAADLALLPRLECSGVILAHRNLDLLGSVDSPTSAS

SEQ ID NO: 3103 - protein, 299 aa, Homo Sapiens
MHSLATAAPVPTTLAQVDREKIYQWINELSSPETRENALLELSKKRESVPDLAPMLWHSFGTIAALLQEIVNIYPSINPPTLTAHQSNRVCNALALLQCVASHPETRSAFLAAHIPLFLYPFLHTVSKTRPFEYLRLTSLGVIGALVKTDEQEVINFLLTTEIIPLCLRIMESGSELSKTVATFILQKILLDDTGLAYICQTYERFSHVAMILGKMVLQLSKEPSARLLKHVVRCYLRLSDNPRAREALRQCLPDQLKDTTFAQVLKDDTTTKRWLAQLVKNLQEGQVTDPRGIPLPPQ

SEQ ID NO: 3104 - protein, 299 aa, Homo Sapiens; identical to SEQ ID NO: 3103

SEQ ID NO: 3105 - protein, 258 aa, Homo Sapiens
MHSLATAAPVPTTLAQVDREKIYQWINELSSPETRENALLELSKKRESVPDLAPMLWHSFGTIAALLQEIVNIYPSINPPTLTAHQSNRVCNALALLQCVASHPETRSAFLAAHIPLFLYPFLHTVSKTRPFEYLRLTSLGVIGALVKTDEQEVINFLLTTEIIPLCLRIMESGSELSKTVATFILQKILLDDTGLAYICQTYERFSHVAMILGKMVLQLSKEPSARLLKHVVRCYLRLSDNPRFSDLTFCWSSFQRK

SEQ ID NO: 3106 - protein, 331 aa, Homo Sapiens
MHSLATAAPVPTTLAQVDREKIYQWINELSSPETRENALLELSKKRESVPDLAPMLWHSFGTIAALLQEIVNIYPSINPPTLTAHQSNRVCNALALLQCVASHPETRSAFLAAHIPLFLYPFLHTVSKTRPFEYLRLTSLGVIVETGFHHVGQADLELPTSSDLPASASQSAGITGALVKTDEQEVINFLLTTEIIPLCLRIMESGSELSKTVATFILQKILLDDTGLAYICQTYERFSHVAMILGKMVLQLSKEPSARLLKHVVRCYLRLSDNPRAREALRQCLPDQLKDTTFAQVLKDDTTTKRWLAQLVKNLQEGQVTDPRGIPLPPQ

SEQ ID NO: 3107 - protein, 75 aa, Homo Sapiens
MHSLATAAPVPTTLAQVDREKIYQWINELSSPETRENALLELSKKRESVPDLAPMLWHSFGTIAALLQVIVMQVI

SEQ ID NO: 3108 - protein, 80 aa, Homo Sapiens
KNYVRVVGRNGESSELDLQGIRIDSDISGTLKFACESIVEEYEDELIEFFSREADNVKDKLCSKRTDLCDHALHISHDEL

SEQ ID NO: 3109 - protein, 102 aa, Homo Sapiens
MGSFRINPDGSQSVVEVPYARSEAHLTELLEEICDRMKEYGEQIDPSTHRKNYVRVVGRNGESSELDLQGIRIDSDISGTLKFACESIVEEYEDELIEFFSR

SEQ ID NO: 3110 - protein, 168 aa, Homo Sapiens
MKGWGWLALLLGALLGTAWARRSQDLHCGACRALVDELEWEIAQVDPKKTIQMGSFRINPDGSQSVVEVPYARSEAHLTELLEEICDRMKEYGEQIDPSTHRKNYVRVVGRNGESSELDLQGIRIDSDISGTLKFACESIVEEYEDELIEFFSREADNVKDKLCSKRT

SEQ ID NO: 3111 - protein, 182 aa, Homo Sapiens
MKGWGWLALLLGALLGTAWARRSQDLHCGACRALVDELEWEIAQVDPKKTIQMGSFRINPDGSQSVVEVPYARSEAHLTELLEEICDRMKEYGEQIDPSTHRKNYVRVVGRNGESSELDLQGIRIDSDISGTLKFACESIVEEYEDELIEFFSREADNVKDKLCSKRTDLCDHALHISHDEL

SEQ ID NO: 3112 - protein, 41 aa, Homo Sapiens
  misc_feature (1)..(1): Xaa can be any naturally occurring amino acid
XACRALVDELEWEIAQVDPKKTIQMGSFRINPDGSQSVVER

SEQ ID NO: 3113 - protein, 278 aa, Homo Sapiens [sequence omitted]

SEQ ID NO: 3114 - protein, 143 aa, Homo Sapiens
MDSMPEPASRCLLLLPLLLLLLLLLPAPELGPSQAGAEENDWVRLPSKCEVCKYVAVELKSAFEETGKTKEVIGTGYGILDQKASGVKYTKSDLRLIEVTETICKRLLIIACTRRGPAAIDLPRACQRPLRHYTTWYTKGSRW

SEQ ID NO: 3115 - protein, 36 aa, Homo Sapiens
MATLKGLVQKGVKVDLGIPLELWDEPSVEVTYLKKQ

SEQ ID NO: 3116 - protein, 248 aa, Homo Sapiens
MGPVRLGILLFLFLAVHEAWAGMLKEEDDDTERLPSKCEVCKLLSTELQAELSRTGRSREVLELGQVLDTGKRKRHVPYSVSETRLEEALENLCERILDYSVHAERKGSLRYAKGQSQTMATLKGLVQKGVKVDLGIPLELWDEPSVEVTYLKKQCETMLEEFEDIVGDWYFHHQEQPLQNFLCEGHVLPAAETACLQETWTGKEITDGEEKTEGEEEQEEEEEEEEEEGGDKMTKTGSHPKLDREDL

SEQ ID NO: 3117 - protein, 118 aa, Homo Sapiens
  misc_feature (1)..(1): Xaa can be any naturally occurring amino acid
XCKLLSTELQAELSRTGRSREVLELGQVLDTGKRKRHVPYSVSETRLEEALENLCERILDYSVHAERKGSLRYAKGQSQTMATLKGLVQKGVKVDLGIPLELWDEPSVEVTYLKKQSG

SEQ ID NO: 3118 - protein, 372 aa, Homo Sapiens
MAAPVPWACCAVLAAAAAVVYAQRHSPQEAPHVQYERLGSDVTLPCGTANWDAAVTWRVNGTDLAPDLLNGSQLVLHGLELGHSGLYACFHRDSWHLRHQVLLHVGLPPREPVLSCRSNTYPKGFYCSWHLPTPTYIPNTFNVTVLHGSKIMVCEKDPALKNRCHIRYMHLFSTIKYKVSISVSNALGHNATAITFDEFTIVKPDPPENVVARPVPSNPRRLEVTWQTPSTWPDPESFPLKFFLRYRPLILDQWQHVELSDGTAHTITDAYAGKEYIIQVAAKDNEIGTWSDWSVAAHATPWTEEPRHLTTEAQAAETTTSTTSSLAPPPTTKICDPGELGSGGGPSAPFLVSVPITLALAAAAATASSLLI

SEQ ID NO: 3119 - protein, 372 aa, Homo Sapiens; identical to SEQ ID NO: 3118

SEQ ID NO: 3120 - protein, 256 aa, Homo Sapiens
MAAPVPWACCAVLAAAAAVVYAQRHSPQEAPHVQYERLGSDVTLPCGTANWDAAVTWRVNGTDLAPDLLNGSQLVLHGLELGHSGLYACFHRDSWHLRHQVLLHVGLPPREPVLSCRSNTYPKGFYCSWHLPTPTYIPNTFNVTVLHGSKIMVCEKDPALKNRCHIRYMHLFSTIKYKVSISVSNALGHNATAITFDEFTIVKPDPPENVVARPVPSNPRRLEVTWQTPSTWPDPESFPLKFFLRYRPLILDQWQH

SEQ ID NO: 3121 - protein, 372 aa, Homo Sapiens; identical to SEQ ID NO: 3118

SEQ ID NO: 3122 - protein, 57 aa, Homo Sapiens
KHSIEVPIPRDGEYVVEVRAHSDGGDGVVSQVKISEGKSTSLRSKTAKDHRSIRTMS

SEQ ID NO: 3123 - protein, 63 aa, Homo Sapiens
MKMWLLVSHLVIISITTCLAEFTWYRRYGHGVSEEDKGFGPIFEEQPINTIYPEESLEGKVSL

SEQ ID NO: 3124 - protein, 73 aa, Homo Sapiens
MKMWLLVSHLVIISITTCLAEFTWYRRYGHGVSEEDKGFGPIFEEQPINTIYPEESLEGKVSLNCRARASPFP

SEQ ID NO: 3125 - protein, 85 aa, Homo Sapiens
MKMWLLVSHLVIISITTCLAEFTWYRRYGHGVSEEDKGFGPIFEEQPINTIYPEESLEGKVSLNCRARASPFPVYKWRMNNGDVD

SEQ ID NO: 3126 - protein, 90 aa, Homo Sapiens
MKMWLLVSHLVIISITTCLAEFTWYRRYGHGVSEEDKGFGPIFEEQPINTIYPEESLEGKVSLNCRARASPFPVYKWRMNNGDVDLTSDR

SEQ ID NO: 3127 - protein, 1018 aa, Homo Sapiens
MKMWLLVSHLVIISITTCLAEFTWYRRYGHGVSEEDKGFGPIFEEQPINTIYPEESLEGKVSLNCRARASPFPVYKWRMNNGDVDLTSDRYSMVGGNLVINNPDKQKDAGIYYCLASNNYGMVRSTEATLSFGYLDPFPPEERPEVRVKEGKGMVLLCDPPYHFPDDLSYRWLLNEFPVFITMDKRRFVSQTNGNLYIANVEASDKGNYSCFVSSPSITKSVFSKFIPLIPIPERTTKPYPADIVVQFKDVYALMGQNVTLECFALGNPVPDIRWRKVLEPMPSTAEISTSGAVLKIFNIQLEDEGIYECEAENIRGKDKHQARIYVQAFPEWVEHINDTEVDIGSDLYWPCVATGKPIPTIRWLKNGYAYHKGELRLYDVTFENAGMYQCIAENTYGAIYANAELKILALAPTFEMNPMKKKILAAKGGRVIIECKPKAAPKPKFSWSKGTEWLVNSSRILIWEDGSLEINNITRNDGGIYTCFAENNRGKANSTGTLVITDPTRIILAPINADITVGENATMQCAASFDPALDLTFVWSFNGYVIDFNKENIHYQRNFMLDSNGELLIRNAQLKHAGRYTCTAQTIVDNSSASADLVVRGPPGPPGGLRIEDIRATSVALTWSRGSDNHSPISKYTIQTKTILSDDWKDAKTDPPIIEGNMEAARAVDLIPWMEYEFRVVATNTLGRGEPSIPSNRIKTDGAAPNVAPSDVGGGGGRNRELTITWAPLSREYHYGNNFGYIVAFKPFDGEEWKKVTVTNPDTGRYVHKDETMSPSTAFQVKVKAFNNKGDGPYSLVAVINSAQDAPSEAPTEVGVKVLSSSEISVHWEHVLEKIVESYQIRYWAAHDKEEAANRVQVTSQEYSARLENLLPDTQYFIEVGACNSAGCGPPSDMIEAFTKKAPPSQPPRIISSVRSGSRYIITWDHVVALSNESTVTGYKVLYRPDGQHDGKLYSTHKHSIEVPIPRDGEYVVEVRAHSDGGDGVVSQVKISGAPTLSPSLLGLLLPAFGILVYLEF

SEQ ID NO: 3128 - protein, 1018 aa, Homo Sapiens; identical to SEQ ID NO: 3127

SEQ ID NO: 3129 - protein, 627 aa, Homo Sapiens
MKMWLLVSHLVIISITTCLAEFTWYRRYGHGVSEEDKGFGPIFEEQPINTIYPEESLEGKVSLNCRARASPFPVYKWRMNNGDVDLTSDRYSMVGGNLVINNPDKQKDAGIYYCLASNNYGMVRSTEATLSFGYLDPFPPEERPEVRVKEGKGMVLLCDPPYHFPDDLSYRWLLNEFPVFITMDKRRFVSQTNGNLYIANVEASDKGNYSCFVSSPSITKSVFSKFIPLIPIPERTTKPYPADIVVQFKDVYALMGQNVTLECFALGNPVPDIRWRKVLEPMPSTAEISTSGAVLKIFNIQLEDEGIYECEAENIRGKDKHQARIYVQAFPEWVEHINDTEVDIGSDLYWPCVATGKPIPTIRWLKNGYAYHKGELRLYDVTFENAGMYQCIAENTYGAIYANAELKILALAPTFEMNPMKKKILAAKGGRVIIECKPKAAPKPKFSWSKGTEWLVNSSRILIWEDGSLEINNITRNDGGIYTCFAENNRGKANSTGTLVITDPTRIILAPINADITVGENATMQCAASFDPALDLTFVWSFNGYVIDFNKENIHYQRNFMLDSNGELLIRNAQLKHAGRYTCTAQTIVDNSSASADLVVRGKNRKGGEKNMVDSFLPVCASLPPTW

SEQ ID NO: 3130 - protein, 627 aa, Homo Sapiens; identical to SEQ ID NO: 3129

SEQ ID NO: 3131 - protein, 1007 aa, Homo Sapiens
MKMWLLVSHLVIISITTCLAVSEEDKGFGPIFEEQPINTIYPEESLEGKVSLNCRARASPFPVYKWRMNNGDVDLTSDRYSMVGGNLVINNPDKQKDAGIYYCLASNNYGMVRSTEATLSFGYLDPFPPEERPEVRVKEGKGMVLLCDPPYHFPDDLSYRWLLNEFPVFITMDKRRFVSQTNGNLYIANVEASDKGNYSCFVSSPSITKSVFSKFIPLIPIPERTTKPYPADIVVQFKDVYALMGQNVTLECFALGNPVPDIRWRKVLEPMPSTAEISTSGAVLKIFNIQLEDEGIYECEAENIRGKDKHQARIYVQAFPEWVEHINDTEVDIGSDLYWPCVATGKPIPTIRWLKNGYAYHKGELRLYDVTFENAGMYQCIAENTYGAIYANAELKILALAPTFEMNPMKKKILAAKGGRVIIECKPKAAPKPKFSWSKGTEWLVNSSRILIWEDGSLEINNITRNDGGIYTCFAENNRGKANSTGTLVITDPTRIILAPINADITVGENATMQCAASFDPALDLTFVWSFNGYVIDFNKENIHYQRNFMLDSNGELLIRNAQLKHAGRYTCTAQTIVDNSSASADLVVRGPPGPPGGLRIEDIRATSVALTWSRGSDNHSPISKYTIQTKTILSDDWKDAKTDPPIIEGNMEAARAVDLIPWMEYEFRVVATNTLGRGEPSIPSNRIKTDGAAPNVAPSDVGGGGGRNRELTITWAPLSREYHYGNNFGYIVAFKPFDGEEWKKVTVTNPDTGRYVHKDETMSPSTAFQVKVKAFNNKGDGPYSLVAVINSAQDAPSEAPTEVGVKVLSSSEISVHWEHVLEKIVESYQIRYWAAHDKEEAANRVQVTSQEYSARLENLLPDTQYFIEVGACNSAGCGPPSDMIEAFTKKAPPSQPPRIISSVRSGSRYIITWDHVVALSNESTVTGYKVLYRPDGQHDGKLYSTHKHSIEVPIPRDGEYVVEVRAHSDGGDGVVSQVKISGAPTLSPSLLGLLLPAFGILVYLEF

SEQ ID NO: 3132 - protein, 1040 aa, Homo Sapiens
MGTATRRKPHLLLVAAVALVSSSAWSSALGSQTTFGPVFEDQPLSVLFPEESTEEQVLLACRARASPPATYRWKMNGTEMKLEPGSRHQLVGGNLVIMNPTKAQDAGVYQCLASNPVGTVVSREAILRFGFLQEFSKEERDPVKAHEGWGVMLPCNPPAHYPGLSYRWLLNEFPNFIPTDGRHFVSQTTGNLYIARTNASDLGNYSCLATSHMDFSTKSVFSKFAQLNLAAEDTRLFAPSIKARFPAETYALVGQQVTLECFAFGNPVPRIKWRKVDGSLSPQWTTAEPTLQIPSVSFEDEGTYECEAENSKGRDTVQGRIIVQAQPEWLKVISDTEADIGSNLRWGCAAAGKPRPTVRWLRNGEPLASQNRVEVLAGDLRFSKLSLEDSGMYQCVAENKHGTIYASAELAVQALAPDFRLNPVRRLIPAARGGEILIPCQPRAAPKAVVLWSKGTEILVNSSRVTVTPDGTLIIRNISRSDEGKYTCFAENFMGKANSTGILSVRDATKITLAPSSADINLGDNLTLQCHASHDPTMDLTFTWTLDDFPIDFDKPGGHYRRTNVKETIGDLTILNAQLRHGGKYTCMAQTVVDSASKEATVLVRGPPGPPGGVVVRDIGDTTIQLSWSRGFDNHSPIAKYTLQARTPPAGKWKQVRTNPANIEGNAETAQVLGLTPWMDYEFRVIASNILGTGEPSGPSSKIRTREAAPSVAPSGLSGGGGAPGELIVNWTPMSREYQNGDGFGYLLSFRRQGSTHWQTARVPGADAQYFVYSNESVRPYTPFEVKIRSYNRRGDGPESLTALVYSAEEEPRVAPTKVWAKGVSSSEMNVTWEPVQQDMNGILLGYEIRYWKAGDKEAAADRVRTAGLDTSARVSGLHPNTKYHVTVRAYNRAGTGPASPSANATTMKPPPRRPPGNISWTFSSSSLSIKWDPVVPFRNESAVTGYKMLYQNDLHLTPTLHLTGKNWIEIPVPEDIGHALVQIRTTGPGGDGIPAEVHIVRNGGTSMMVENMAVRPAPHPGTVISHSVAMLILIGSLEL

SEQ ID NO: 3133 - protein, 1040 aa, Homo Sapiens; identical to SEQ ID NO: 3132

SEQ ID NO: 3134 - protein, 1085 aa, Homo Sapiens
MGTATRRKPHLLLVAAVALVSSSAWSSALGSQTTFGPVFEDQPLSVLFPEESTEEQVLLACRARASPPATYRWKMNGTEMKLEPGSRHQLVGGNLVIMNPTKAQDAGVYQCLASNPVGTVVSREAILRFGFLQEFSKEERDPVKAHEGWGVMLPCNPPAHYPGLSYRWLLNEFPNFIPTDGRHFVSQTTGNLYIARTNASDLGNYSCLATSHMDFSTKSVFSKFAQLNLAAEDTRLFAPSIKARFPAETYALVGQQVTLECFAFGNPVPRIKWRKVDGSLSPQWTTAEPTLQIPSVSFEDEGTYECEAENSKGRDTVQGRIIVQAQPEWLKVISDTEADIGSNLRWGCAAAGKPRPTVRWLRNGEPLASQNRVEVLAGDLRFSKLSLEDSGMYQCVAENKHGTIYASAELAVQALAPDFRLNPVRRLIPAARGGEILIPCQPRAAPKAVVLWSKGTEILVNSSRVTVTPDGTLIIRNISRSDEGKYTCFAENFMGKANSTGILSVRDATKITLAPSSADINLGDNLTLQCHASHDPTMDLTFTWTLDDFPIDFDKPGGHYRRTNVKETIGDLTILNAQLRHGGKYTCMAQTVVDSASKEATVLVRGPPGPPGGVVVRDIGDTTIQLSWSRGFDNHSPIAKYTLQARTPPAGKWKQVRTNPANIEGNAETAQVLGLTPWMDYEFRVIASNILGTGEPSGPSSKIRTREAAPSVAPSGLSGGGGAPGELIVNWTPMSREYQNGDGFGYLLSFRRQGSTHWQTARVPGADAQYFVYSNESVRPYTPFEVKIRSYNRRGDGPESLTALVYSAEEEPRVAPTKVWAKGVSSSEMNVTWEPVQQDMNGILLGYEIRYWKAGDKEAAADRVRTAGLDTSARVSGLHPNTKYHVTVRAYNRAGTGPASPSANATTMKPPPRRPPGNISWTFSSSSLSIKWDPVVPFRNESAVTGYKMLYQNDLHLTPTLHLTGKNWIEIPVPEDIGHALVQIRTTGPGGDGIPAEVHIVRNGEMALWDPIRTPPLESSPRPGRNTRHEQVEELERSAHLTILQSKEEGQALGPRALPPSPSSSSKDPDAVPDNSLGAPACPSG

SEQ ID NO: 3135 - protein, 1040 aa, Homo Sapiens; identical to SEQ ID NO: 3132

SEQ ID NO: 3136 - protein, 1040 aa, Homo Sapiens; identical to SEQ ID NO: 3132

SEQ ID NO: 3137 - protein, 764 aa, Homo Sapiens
MGTATRRKPHLLLVAAVALVSSSAWSSALGSQTTFGPVFEDQPLSVLFPEESTEEQVLLACRARASPPATYRWKMNGTEMKLEPGSRHQLVGGNLVIMNPTKAQDAGVYQCLASNPVGTVVSREAILRFGFLQEFSKEERDPVKAHEGWGVMLPCNPPAHYPGLSYRWLLNEFPNFIPTDGRHFVSQTTGNLYIARTNASDLGNYSCLATSHMDFSTKSVFSKFAQLNLAAEDTRLFAPSIKARFPAETYALVGQQVTLECFAFGNPVPRIKWRKVDGSLSPQWTTAEPTLQIPSVSFEDEGTYECEAENSKGRDTVQGRIIVQAQPEWLKVISDTEADIGSNLRWGCAAAGKPRPTVRWLRNGEPLASQNRVEVLAGDLRFSKLSLEDSGMYQCVAENKHGTIYASAELAVQALAPDFRLNPVRRLIPAARGGEILIPCQPRAAPKAVVLWSKGTEILVNSSRVTVTPDGTLIIRNISRSDEGKYTCFAENFMGKANSTGILSVRDATKITLAPSSADINLGDNLTLQCHASHDPTMDLTFTWTLDDFPIDFDKPGGHYRRTNVKETIGDLTILNAQLRHGGKYTCMAQTVVDSASKEATVLVRGPPGPPGGVVVRDIGDTTIQLSWSRGFDNHSPIAKYTLQARTPPAGKWKQVRTNPANIEGNAETAQVLGLTPWMDYEFRVIASNILGTGEPSGPSSKIRTREAAPSVAPSGLSGGGGAPGELIVNWTAGQHSLADRPGAWRRCPVLCLQQRERPALHAL

SEQ ID NO: 3138 - protein, 41 aa, Homo Sapiens
MGTATRRKPHLLLVAAVALVSSSGEDTEAQKSSITFPRSHS

SEQ ID NO: 3139 - protein, 41 aa, Homo Sapiens; identical to SEQ ID NO: 3138

SEQ ID NO: 3140 - protein, 527 aa, Homo Sapiens
  misc_feature (1)..(1): Xaa can be any naturally occurring amino acid
XAQTVVDSASKEATVLVRGPPGPPGGVVVRDIGDTTIQLSWSRGFDNHSPIAKYTLQARTPPAGKWKQVRTNPANIEGNAETAQVLGLTPWMDYEFRVIASNILGTGEPSGPSSKIRTREAAPSVAPSGLSGGGGAPGELIVNWTPMSREYQNGDGFGYLLSFRRQGSTHWQTARVPGADAQYFVYSNESVRPYTPFEVKIRSYNRRGDGPESLTALVYSAEEEPRVAPTKVWAKGVSSSEMNVTWEPVQQDMNGILLGYEIRYWKAGDKEAAADRVRTAGLDTSARVSGLHPNTKYHVTVRAYNRAGTGPASPSANATTMKPPPRRPPGNISWTFSSSSLSIKWDPVVPFRNESAVTGYKMLYQNDLHLTPTLHLTGKNWIEIPVPEDIGHALVQIRTTGPGGDGIPAEVHIVRNGGAAPPLPLSPREIQDPPRYLRGSFPPRPTPISTRKGKWKAGRNQVQSSLRTASPPPFYPAPRTSPRAREGRRVQGEAEDQPAIANGLQSTVGVGLRRPPSRPLPGLQLAL

SEQ ID NO: 3141 - protein, 115 aa, Homo Sapiens
  misc_feature (1)..(1): Xaa can be any naturally occurring amino acid
XGKANSTGILSVRDATKITLAPSSADINLGDNLTLQCHASHDPTMDLTFTWTLDDFPIDFDKPGGHYRRTNVKETIGDLTILNAQLRHGGKYTCMAQTVVDSASKEATVLVRGPK

SEQ ID NO: 3142 - protein, 473 aa, Homo Sapiens
  misc_feature (1)..(1): Xaa can be any naturally occurring amino acid
XIKWRKVDGSLSPQWTTAEPTLQIPSVSFEDEGTYECEAENSKGRDTVQGRIIVQAQPEWLKVISDTEADIGSNLRWGCAAAGKPRPTVRWLRNGEPLASQNRVEVLAGDLRFSKLSLEDSGMYQCVAENKHGTIYASAELAVQALAPDFRLNPVRRLIPAARGGEILIPCQPRAAPKAVVLWSKGTEILVNSSRVTVTPDGTLIIRNISRSDEGKYTCFAENFMGKANSTGILSVRDATKITLAPSSADINLGDNLTLQCHASHDPTMDLTFTWTLDDFPIDFDKPGGHYRRTNVKETIGDLTILNAQLRHGGKYTCMAQTVVDSASKEATVLVRGPPGPPGGVVVRDIGDTTIQLSWSRGFDNHSPIAKYTLQARTPPAGKWKQVRTNPANIEGNAETAQVLGLTPWMDYEFRVIASNILGTGEPSGPSSKIRTREAAPSVAPSGLSGGGGAPGELIVNWTQRERPALHAL

SEQ ID NO: 3143 - protein, 1011 aa, Homo Sapiens
  misc_feature (1)..(1): Xaa can be any naturally occurring amino acid
XPTDGRHFVSQTTGNLYIARTNASDLGNYSCLATSHMDFSTKSVFSKFAQLNLAAEDTRLFAPSIKARFPAETYALVGQQVTLECFAFGNPVPRIKWRKVDGSLSPQWTTAEPTLQIPSVSFEDEGTYECEAENSKGRDTVQGRIIVQAQPEWLKVISDTEADIGSNLRWGCAAAGKPRPTVRWLRNGEPLASQNRVEVLAGDLRFSKLSLEDSGMYQCVAENKHGTIYASAELAVQALAPDFRLNPVRRLIPAARGGEILIPCQPRAAPKAVVLWSKGTEILVNSSRVTVTPDGTLIIRNISRSDEGKYTCFAENFMGKANSTGILSVRDATKITLAPSSADINLGDNLTLQCHASHDPTMDLTFTWTLDDFPIDFDKPGGHYRRTNVKETIGDLTILNAQLRHGGKYTCMAQTVVDSASKEATVLVRGPPGPPGGVVVRDIGDTTIQLSWSRGFDNHSPIAKYTLQARTPPAGKWKQVRTNPANIEGNAETAQVLGLTPWMDYEFRVIASNILGTGEPSGPSSKIRTREAAPSVAPSGLSGGGGAPGELIVNWTPMSREYQNGDGFGYLLSFRRQGSTHWQTARVPGADAQYFVYSNESVRPYTPFEVKIRSYNRRGDGPESLTALVYSAEEEPRVAPTKVWAKGVSSSEMNVTWEPVQQDMNGILLGYEIRYWKAGDKEAAADRVRTAGLDTSARVSGLHPNTKYHVTVRAYNRAGTGPASPSANATTMKPPPRRPPGNISWTFSSSSLSIKWDPVVPFRNESAVTGYKMLYQNDLHLTPTLHLTGKNWIEIPVPEDIGHALVQIRTTGPGGDGIPAEVHIVRNGGAAPPLPLSPREIQDPPRYLRGSFPPRPTPISTRKGKWKAGRNQVQSSLRTASPPPFYPAPRTSPRAREGRRVQGEAEDQPAIANGLQSTVGVGLRRPPSRPLPGLQLALHKHDGGEHGSPPSTTPWHRHFPLRGDADPHRLPGALILEPLPLRRSWTPPPTDTASPFLLPRWPDTVPESGWF

SEQ ID NO: 3144 - protein, 1028 aa, Homo Sapiens
MMFPWKQLILLSFIGCLGGELLLQGPVFIKEPSNSIFPVGSEDKKITLHCEARGNPSPHYRWQLNGSDIDMSMEHRYKLNGGNLVVINPNRNWDTGTYQCFATNSLGTIVSREAKLQFAYLENFKTKMRSTVSVREGQGVVLLCGPPPHSGELSYAWIFNEYPSFVEEDSRRFVSQETGHLYISKVEPSDVGNYTCVVTSMVTNARVLGSPTPLVLRSDGVMGEYEPKIEVQFPETLPAAKGSTVKLECFALGNPIPQINWRRSDGLPFSSKIKLRKFSGVLEIPNFQQEDAGSYECIAENSRGKNVARGRLTYYAKPHWVQLIKDVEIAVEDSLYWECRASGKPKPSYRWLKNGAALVLEERTQIENGALTISNLSVTDSGMFQCIAENKHGLVYSSAELKVVASAPDFSKNPMKKLVQVQVGSLVSLDCKPRASPRALSSWKKGDVSVQEHERISLLNDGGLKIANVTKADAGTYTCMAENQFGKANGTTHLVVTEPTRITLAPSNMDVSVGESVILPCQVQHDPLLDIIFTWYFNGALADFKKDGSHFEKVGGSSSGDLMIRNIQLKHSGKYVCMVQTGVDSVSSAADLIVRGSPGPPENVKVDEITDTTAQLSWKEGKDNHSPVISYSIQARTPFSVGWQTVTTVPEVIDGKTHTATVVELNPWVEYEFRVVASNKIGGGEPSLPSEKVRTEEAVPEVPPSEVNGGGGSRSELVITWDPVPEELQNGEGFGYVVAFRPLGVTTWIQTVVTSPDTPRYVFRNESIVPYSPYEVKVGVYNNKGEGPFSPVTTVFSAEEEPTVAPSQVSANSLSSSEIEVSWNTIPWKLSNGHLLGYEVRYWNGGGKEESSSKMKVAGNETSARLRGLKSNLAYYTAVRAYNSAGAGPFSATVNVTTKKTPPSQPPGNVVWNATDTKVLLNWEQVKAMENESEVTGYKVFYRTSSQNNVQVLNTNKTSAELVLPIKEDYIIEVKATTDGGDGTSSEQIRIPRITSMDARGSTSAISNVHPMSSYMPIVLFLIVYVLW

SEQ ID NO: 3145 - protein, 698 aa, Homo Sapiens
MEENVFWECKANGRPKPTYKWLKNGEPLLTRDRIQIEQGTLNITIVNLSDAGMYQCLAENKHGVIFSNAELSVIAVGPDFSRTLLKRVTLVKVGGEVVIECKPKASPKPVYTWKKGRDILKENERITISEDGNLRIINVTKSDAGSYTCIATNHFGTASSTGNLVVKDPTRVMVPPSSMDVTVGESIVLPCQVTHDHSLDIVFTWSFNGHLIDFDRDGDHFERVGGQDSAGDLMIRNIQLKHAGKYVCMVQTSVDRLSAAADLIVRGPPGPPEAVTIDEITDTTAQLSWRPGPDNHSPITMYVIQARTPFSVGWQAVSTVPELIDGKTFTATVVGLNPWVEYEFRTVAANVIGIGEPSRPSEKRRTEEALPEVTPANVSGGGGSKSELVITWETVPEELQNGRGFGYVVAFRPYGKMIWMLTVLASADASRYVFRNESVHPFSPFEVKVGVFNNKGEGPFSPTTVVYSAEEEPTKPPASIFARSLSATDIEVFWASPLEKNRGRIQGYEVKYWRHEDKEENARKIRTVGNQTSTKITNLKGSVLYHLAVKAYNSAGTGPSSATVNVTTRKPPPSQPPGNIIWNSSDSKIILNWDQVKALDNESEVKGYKVLYRWNRQSSTSVIETNKTSVELSLPFDEDYIIEIKPFSDGGDGSSSEQIRIPKISNAYARGSGASTSNACTLSAISTIMISLTARSSL

SEQ ID NO: 3146 - protein, 54 aa, Homo Sapiens
MRLPWELLVLQSFILCLADDSTLHGPIFIQEPSPVMFPLDSEEKKVKLNCEVKG

SEQ ID NO: 3147 - protein, 116 aa, Homo Sapiens
MRLPWELLVLQSFILCLADDSTLHGPIFIQEPSPVMFPLDSEEKKVKLNCEVKGNPKPHIRWKLNGTDVDTGMDFRYSVVEGSLLINNPNKTQDAGTYQCTATNSFGTIVSREAKL

SEQ ID NO: 3148 - protein, 1026 aa, Homo Sapiens
MRLPWELLVLQSFILCLADDSTLHGPIFIQEPSPVMFPLDSEEKKVKLNCEVKGNPKPHIRWKLNGTDVDTGMDFRYSVVEGSLLINNPNKTQDAGTYQCTATNSFGTIVSREAKLQFAYLDNFKTRTRSTVSVRRGQGMVLLCGPPPHSGELSYAWIFNEYPSYQDNRRFVSQETGNLYIAKVEKSDVGNYTCVVTNTVTNHKVLGPPTPLILRNDGVMGEYEPKIEVQFPETVPTAKGATVKLECFALGNPVPTIIWRRADGKPIARKARRHKSNGILEIPNFQQEDAGLYECVAENSRGKNVARGQLTFYAQPNWIQKINDIHVAMEENVFWECKANGRPKPTYKWLKNGEPLLTRDRIQIEQGTLNITIVNLSDAGMYQCLAENKHGVIFSNAELSVIAVGPDFSRTLLKRVTLVKVGGEVVIECKPKASPKPVYTWKKGRDILKENERITISEDGNLRIINVTKSDAGSYTCIATNHFGTASSTGNLVVKDPTRVMVPPSSMDVTVGESIVLPCQVTHDHSLDIVFTWSFNGHLIDFDRDGDHFERVGGQDSAGDLMIRNIQLKHAGKYVCMVQTSVDRLSAAADLIVRGPPGPPEAVTIDEITDTTAQLSWRPGPDNHSPITMYVIQARTPFSVGWQAVSTVPELIDGKTFTATVVGLNPWVEYEFRTVAANVIGIGEPSRPSEKRRTEEALPEVTPANVSGGGGSKSELVITWETVPEELQNGRGFGYVVAFRPYGKMIWMLTVLASADASRYVFRNESVHPFSPFEVKVGVFNNKGEGPFSPTTVVYSAEEEPTKPPASIFARSLSATDIEVFWASPLEKNRGRIQGYEVKYWRHEDKEENARKIRTVGNQTSTKITNLKGSVLYHLAVKAYNSAGTGPSSATVNVTTRKPPPSQPPGNIIWNSSDSKIILNWDQVKALDNESEVKGYKVLYRWNRQSSTSVIETNKTSVELSLPFDEDYIIEIKPFSDGGDGSSSEQIRIPKISNAYARGSGASTSNACTLSAISTIMISLTARSSL

SEQ ID NO: 3149 - protein, 1026 aa, Homo Sapiens; identical to SEQ ID NO: 3148

SEQ ID NO: 3150 - protein, 1026 aa, Homo Sapiens; identical to SEQ ID NO: 3148

SEQ ID NO: 3151 - protein, 232 aa, Homo Sapiens
MRLPWELLVLQSFILCLADDSTLHGPIFIQEPSPVMFPLDSEEKKVKLNCEVKGNPKPHIRWKLNGTDVDTGMDFRYSVVEGSLLINNPNKTQDAGTYQCTATNSFGTIVSREAKLQFAYLDNFKTRTRSTVSVRRGQGMVLLCGPPPHSGELSYAWIFNEYPSYQDNRRFVSQETGNLYIAKVEKSDVGNYTCVVTNTVTNHKVLGPPTPLILRNDVQYQLLSGEELMESQ

SEQ ID NO: 3152 - protein, 137 aa, Homo Sapiens
MRLPWELLVLQSFILCLAGSQTDFWSLLGVLPALEADDSTLHGPIFIQEPSPVMFPLDSEEKKVKLNCEVKGNPKPHIRWKLNGTDVDTGMDFRYSVVEGSLLINNPNKTQDAGTYQCTATNSFGTIVSREAKLQFA

SEQ ID NO: 3153 - protein, 143 aa, Homo Sapiens
NDIHVAMEENVFWECKANGRPKPTYKWLKNGEPLLTRDRIQIEQGTLNITIVNLSDAGMYQCLAENKHGVIFSNAELSVIAVGPDFSRTLLKRVTLVKVGGEVVIECKPKASPKPVYTWKKGRDILKENESVHQGFGSGSAPL

SEQ ID NO: 3154 - protein, 1022 aa, Homo Sapiens [sequence omitted]

SEQ ID NO: 3155 - protein, 1084 aa, Homo Sapiens
LTEYSKSLPGLSTSYAALLRIKKSSSSSLFGSKTRPRYSSPSLGTLSASSPSWLGAAQNYYSPINLYHSSDAFKQDESVDYGPVFVQEPDDIIFPTDSDEKKVALNCEVRGNPVPSYRWLRNGTEIDLESDYRYSLIDGTFIISNPSEAKDSGHYQCLATNTVGSILSREATLQFAYLGNFSGRTRSAVSVREGQGVVLMCSPPPHSPEIIYSWVFNEFPSFVAEDSRRFISQETGNLYISKVQTSDVGSYICLVKNTVTNARVLSPPTPLTLRNDGVMGEYEPKIEVHFPFTVTAAKGTTVKMECFALGNPVPTITWMKVNGYIPSKARLRKSQAVLEIPNVQLDDAGIYECRAENSRGKNSFRGQLQVYTYPHWVEKLNDTQLDSGSPLRWECKATGKPRPTYRWLKNGVPLSPQSRVEMVNGVLMIHNVNQSDAGMYQCLAENKYGAIYASAELKILASAPTFALNQLKKTIIVTKDQEVVIECKPQGSPKPTISWKKGDRAVRENKRIAILPDGSLRILNASKSDEGKYVCRGENVFGSAEIIASLSVKEPTRIELTPKRTELTVGESIVLNCKAIHDASLDVTFYWTLKGQPIDFEEEGGHFESIRAQASSADLMIRNILLMHAGRYGCRVQTTADSVSDEAELLVRGPPGPPGIVIVEEITESTATLSWSPAADNHSPISSYNLQARSPFSLGWQTVKTVPEIITGDMESAMAVDLNPWVEYEFRVVATNPIGTGDPSTPSRMIRTNEAVPKTAPTNVSGRSGRRHELVIAWEPVSEEFQNGEGFGYIVAFRPNGTRGWKEKMVTSSEASKFIYRDESVPPLTPFEVKVGVYNNKGDGPFSQIVVICSAEGEPSAAPTDVKATSVSVSEILVAWKHIKESLGRPQGFEVGYWKDMEQEDTAETVKTRGNESFVILTGLEGNTLYHFTVRAYNGAGYGPPSSEVSATTKKSPPSQAPSNLRWEQQGSQVSLGWEPVIPLANESEVVGYKVFYRQEGHSNSQVIETQKLQAVVPLPDAGVYIIEVRAYSEGGDGTASSQIRVPSYSGGKITSAQSTLHSLSTSSSSVTLLLALMIPSTSW

SEQ ID NO: 3156 - protein, 1026 aa, Homo Sapiens
MASSWKLMLFLSVTMCLSESVDYGPVFVQEPDDIIFPTDSDEKKVALNCEVRGNPVPSYRWLRNGTEIDLESDYRYSLIDGTFIISNPSEAKDSGHYQCLATNTVGSILSREATLQFAYLGNFSGRTRSAVSVREGQGVVLMCSPPPHSPEIIYSWVFNEFPSFVAEDSRRFISQETGNLYISKVQTSDVGSYICLVKNTVTNARVLSPPTPLTLRNDGVMGEYEPKIEVHFPFTVTAAKGTTVKMECFALGNPVPTITWMKVNGYIPSKARLRKSQAVLEIPNVQLDDAGIYECRAENSRGKNSFRGQLQVYTYPHWVEKLNDTQLDSGSPLRWECKATGKPRPTYRWLKNGVPLSPQSRVEMVNGVLMIHNVNQSDAGMYQCLAENKYGAIYASAELKILASAPTFALNQLKKTIIVTKDQEVVIECKPQGSPKPTISWKKGDRAVRENKRIAILPDGSLRILNASKSDEGKYVCRGENVFGSAEIIASLSVKEPTRIELTPKRTELTVGESIVLNCKAIHDASLDVTFYWTLKGQPIDFEEEGGHFESIRAQASSADLMIRNILLMHAGRYGCRVQTTADSVSDEAELLVRGPPGPPGIVIVEEITESTATLSWSPAADNHSPISSYNLQARSPFSLGWQTVKTVPEIITGDMESAMAVDLNPWVEYEFRVVATNPIGTGDPSTPSRMIRTNEAVPKTAPTNVSGRSGRRHELVIAWEPVSEEFQNGEGFGYIVAFRPNGTRGWKEKMVTSSEASKFIYRDESVPPLTPFEVKVGVYNNKGDGPFSQIVVICSAEGEPSAAPTDVKATSVSVSEILVAWKHIKESLGRPQGFEVGYWKDMEQEDTAETVKTRGNESFVILTGLEGNTLYHFTVRAYNGAGYGPPSSEVSATTKKSPPSQAPSNLRWEQQGSQVSLGWEPVIPLANESEVVGYKVFYRQEGHSNSQVIETQKLQAVVPLPDAGVYIIEVRAYSEGGDGTASSQIRVPSYSGGKITSAQSTLHSLSTSSSSVTLLLALMIPSTSW

SEQ ID NO: 3157 - protein, 1100 aa, Homo Sapiens
MASSWKLMLFLSVTMCLSEYSKSLPGLSTSYAALLRIKKSSSSSLFGSKTRPRYSSPSLGTLSASSPSWLGAAQNYYSPINLYHSSDAFKQDESVDYGPVFVQEPDDIIFPTDSDEKKVALNCEVRGNPVPSYRWLRNGTEIDLESDYRYSLIDGTFIISNPSEAKDSGHYQCLATNTVGSILSREATLQFAYLGNFSGRTRSAVSVREGQGVVLMCSPPPHSPEIIYSWVFNEFPSFVAEDSRRFISQETGNLYISKVQTSDVGSYICLVKNTVTNARVLSPPTPLTLRNDGVMGEYEPKIEVHFPFTVTAAKGTTVKMECFALGNPVPTITWMKVNGYIPSKARLRKSQAVLEIPNVQLDDAGIYECRAENSRGKNSFRGQLQVYTYPHWVEKLNDTQLDSGSPLRWECKATGKPRPTYRWLKNGVPLSPQSRVEMVNGVLMIHNVNQSDAGMYQCLAENKYGAIYASAELKILASAPTFALNQLKKTIIVTKDQEVVIECKPQGSPKPTISWKKGDRAVRENKRIAILPDGSLRILNASKSDEGKYVCRGENVFGSAEIIASLSVKEPTRIELTPKRTELTVGESIVLNCKAIHDASLDVTFYWTLKGQPIDFEEEGGHFESIRAQASSADLMIRNILLMHAGRYGCRVQTTADSVSDEAELLVRGPPGPPGIVIVEEITESTATLSWSPAADNHSPISSYNLQARSPFSLGWQTVKTVPEIITGDMESAMAVDLNPWVEYEFRVVATNPIGTGDPSTPSRMIRTNEAVPKTAPTNVSGRSGRRHELVIAWEPVSEEFQNGEGFGYIVAFRPNGTRGWKEKMVTSSEASKFIYRDESVPPLTPFEVKVGVYNNKGDGPFSQIVVICSAEGEPSAAPTDVKATSVSVSEILVAWKHIKESLGRPQGFEVGYWKDMEQEDTAETVKTRGNESFVILTGLEGNTLYHFTVRAYNGAGYGPPSSEVSATTKKSPPSQAPSNLRWEQQGSQVSLGWEPVIPLANESEVVGYKVFYRQEGHSNSQVIETQKLQAVVPLPDAGVYIIEVRAYSEGGDGTASSQIRVPSYSGGKITSAQSTLHSLSTSSSSVTLLLALMIPSTSW

SEQ ID NO: 3158 - protein, 1100 aa, Homo Sapiens; identical to SEQ ID NO: 3157

SEQ ID NO: 3159 - protein, 911 aa, Homo Sapiens
MASSWKLMLFLSVTMCLSEYSKSLPGLSTSYAALLRIKKSSSSSLFGSKTRPRYSSPSLGTLSASSPSWLGAAQNYYSPINLYHSSDAFKQDESVDYGPVFVQEPDDIIFPTDSDEKKVALNCEVRGNPVPSYRWLRNGTEIDLESDYRYSLIDGTFIISNPSEAKDSGHYQCLATNTVGSILSREATLQFAYLGNFSGRTRSAVSVREGQGVVLMCSPPPHSPEIIYSWVFNEFPSFVAEDSRRFISQETGNLYISKVQTSDVGSYICLVKNTVTNARVLSPPTPLTLRNDGVMGEYEPKIEVHFPFTVTAAKGTTVKMECFALGNPVPTITWMKVNGYIPSKARLRKSQAVLEIPNVQLDDAGIYECRAENSRGKNSFRGQLQVYTYPHWVEKLNDTQLDSGSPLRWECKATGKPRPTYRWLKNGVPLSPQSRVEMVNGVLMIHNVNQSDAGMYQCLAENKYGAIYASAELKILASAPTFALNQLKKTIIVTKDQEVVIECKPQGSPKPTISWKKGDRAVRENKRIAILPDGSLRILNASKSDEGKYVCRGENVFGSAEIIASLSVKEPTRIELTPKRTELTVGESIVLNCKAIHDASLDVTFYWTLKGQPIDFEEEGGHFESIRAQASSADLMIRNILLMHAGRYGCRVQTTADSVSDEAELLVRGPPGPPGIVIVEEITESTATLSWSPAADNHSPISSYNLQARSPFSLGWQTVKTVPEIITGDMESAMAVDLNPWVEYEFRVVATNPIGTGDPSTPSRMIRTNEAVPKTAPTNVSGRSGRRHELVIAWEPVSEEFQNGEGFGYIVAFRPNGTRGWKEKMVTSSEASKFIYRDESVPPLTPFEVKVGVYNNKGDGPFSQIVVICSAEGEPSAAPTDVKATSVSVSEILVAWKHIKESLGRPQGFEV

SEQ ID NO: 3160 - protein, 390 aa, Homo Sapiens
MNGVTLDLEERAKVTSGFISGCSGHCTSYGTNCENGGKCLERYHGYSCDCSNTAYDGTFCNKDVGAFFEEGMWLRYNFQAPATNARDSSSRVDNAPDQQNSHPDLAQEEIRFSFSTTKAPCILLYISSFTTDFLAVLVKPTGSLQIRYNLGGTREPYNIDVDHRNMANGQPHSVNITRHEKTIFLKLDHYPSVSYHLPSSSDTLFNSPKSLFLGKVIETGKIDQEIHKYNTPGFTGCLSRVQFNQIAPLKAALRQTNASAHVHIQGELVESNCGASPLTLSPMSSATDPWHLDHLDSASADFPYNPGQGQAIRNGVNRNSAIIGGVIAVVIFTILCTLVFLIRYMFRHKGTYHTNEAKGAESAESADAAIMNNDPNFTETIDESKKEWLI

SEQ ID NO: 3161 - protein, 120 aa, Homo Sapiens
MQAAPRAGCGAALLLWIVSSCLCRAWTAPSTSQKCDEPLVSGLPHVAFSSSSSISGSYSPGYAKINKRGGAGGWSPSDSDHYQWLQVDFGNRKQISAIATQGRYSSSDWVTQYRMLYSDT

SEQ ID NO: 3162 - protein, 1331 aa, Homo Sapiens
MQAAPRAGCGAALLLWIVSSCLCRAWTAPSTSQKCDEPLVSGLPHVAFSSSSSISGSYSPGYAKINKRGGAGGWSPSDSDHYQWLQVDFGNRKQISAIATQGRYSSSDWVTQYRMLYSDTGRNWKPYHQDGNIWAFPGNINSDGVVRHELQHPIIARYVRIVPLDWNGEGRIGLRIEVYGCSYWADVINFDGHVVLPYRFRNKKMKTLKDVIALNFKTSESEGVILHGEGQQGDYITLELKKAKLVLSLNLGSNQLGPIYGHTSVMTGSLLDDHHWHSVVIERQGRSINLTLDRSMQHFRTNGEFDYLDLDYEITFGGIPFSGKPSSSSRKNFKGCMESINYNGVNITDLARRKKLEPSNVGNLSFSCVEPYTVPVFFNATSYLEVPGRLNQDLFSVSFQFRTWNPNGLLVFSHFADNLGNVEIDLTESKVGVHINITQTKMSQIDISSGSGLNDGQWHEVRFLAKENFAILTIDGDEASAVRTNSPLQVKTGEKYFFGGFLNQMNNSSHSVLQPSFQGCMQLIQVDDQLVNLYEVAQRKPGSFANVSIDMCAIIDRCVPNHCEHGGKCSQTWDSFKCTCDETGYSGATCHNSIYEPSCEAYKHLGQTSNYYWIDPDGSGPLGPLKVYCNMTEDKVWTIVSHDLQMQTPVVGYNPEKYSVTQLVYSASMDQISAITDSAEYCEQYVSYFCKMSRLLNTPDGSPYTWWVGKANEKHYYWGGSGPGIQKCACGIERNCTDPKYYCNCDADYKQWRKDAGFLSYKDHLPVSQVVVGDTDRQGSEAKLSVGPLRCQGDRNYWNAASFPNPSSYLHFSTFQGETSADISFYFKTLTPWGVFLENMGKEDFIKLELKSATEVSFSFDVGNGPVEIVVRSPTPLNDDQWHRVTAERNVKQASLQVDRLPQQIRKAPTEGHTRLELYSQLFVGGAGGQQGFLGCIRSLRMNGVTLDLEERAKVTSGFISGCSGHCTSYGTNCENGGKCLERYHGYSCDCSNTAYDGTFCNKDVGAFFEEGMWLRYNFQAPATNARDSSSRVDNAPDQQNSHPDLAQEEIRFSFSTTKAPCILLYISSFTTDFLAVLVKPTGSLQIRYNLGGTREPYNIDVDHRNMANGQPHSVNITRHEKTIFLKLDHYPSVSYHLPSSSDTLFNSPKSLFLGKVIETGKIDQEIHKYNTPGFTGCLSRVQFNQIAPLKAALRQTNASAHVHIQGELVESNCGASPLTLSPMSSATDPWHLDHLDSASADFPYNPGQGQAIRNGVNRNSAIIGGVIAVVIFTILCTLVFLIRYMFRHKGTYHTNEAKGAESAESADAAIMNNDPNFTETIDESKKEWLI

SEQ ID NO: 3163 - protein, 108 aa, Homo Sapiens
MSSATDPWHLDHLDSASADFPYNPGQGQAIRNGVNRNSAIIGGVIAVVIFTILCTLVFLIRYMFRHKGTYHTNEAKGAESAESADAAIMNNDPNFTETIDESKKEWLI

SEQ ID NO: 3164 - protein, 1288 aa, Homo Sapiens
MASVAWAVLKVLLLLPTQTWSPVGAGNPPDCDAPLASALPRSSFSSSSELSSSHGPGFSRLNRRDGAGGWTPLVSNKYQWLQIDLGERMEVTAVATQGGYGSSDWVTSYLLMFSDGGRNWKQYRREESIWGFPGNTNADSVVHYRLQPPFEARFLRFLPLAWNPRGRIGMRIEVYGCAYKSEVVYFDGQSALLYRLDKKPLKPIRDVISLKFKAMQSNGILLHREGQHGNHITLELIKGKLVFFLNSGNAKLPSTIAPVTLTLGSLLDDQHWHSVLIELLDTQVNFTVDKHTHHFQAKGDSSYLDLNFEISFGGIPTPGRSRAFRRKSFHGCLENLYYNGVDVTELAKKHKPQILMMGNVSFSCPQPQTVPVTFLSSRSYLALPGNSGEDKVSVTFQFRTWNRAGHLLFGELRRGSGSFVLFLKDGKLKLSLFQPGQSPRNVTAGAGLNDGQWHSVSFSAKWSHMNVVVDDDTAVQPLVAVLIDSGDTYYFGGCLDNSSGSGCKSPLGGFQGCLRLITIGDKAVDPILVQQGALGSFRDLQIDSCGITDRCLPSYCEHGGECSQSWDTFSCDCLGTGYTGETCHSSLYEQSCEAHKHRGNPSGLYYIDADGSGPLGPFLVYCNMTADAAWTVVQHGGPDAVTLRGAPSGHPRSAVSFAYAAGAGQLRSAVNLAERCEQRLALRCGTARRPDSRDGTPLSWWVGRTNETHTSWGGSLPDAQKCTCGLEGNCIDSQYYCNCDAGRNEWTSDTIVLSQKEHLPVTQIVMTDAGRPHSEAAYTLGPLLCRGDQSFWNSASFNTETSYLHFPAFHGELTADVCFFFKTTVSSGVFMENLGITDFIRIELRAPTEVTFSFDVGNGPCEVTVQSPTPFNDNQWHHVRAERNVKGASLQVDQLPQKMQPAPADGHVRLQLNSQLFIGGTATRQRGFLGCIRSLQLNGVALDLEERATVTPGVEPGCAGHCSTYGHLCRNGGRCREKRRGVTCDCAFSAYDGPFCSNEISAYFATGSSMTYHFQEHYTLSENSSSLVSSLHRDVTLTREMITLSFRTTRTPSLLLYVSSFYEEYLSVILANNGSLQIRYKLDRHQNPDAFTFDFKNMADGQLHQVKINREEAVVMVEVNQSTKKQVILSSGTEFNAVKSLILGKVLEAAGADPDTRRAATSGFTGCLSAVRFGRAAPLKAALRPSGPSRVTVRGHVAPMARCAAGAASGSPARELAPRLAGGAGRSGPADEGEPLVNADRRDSAVIGGVIAVVIFILLCITAIAIRIYQQRKLRKENESKVSKKEEC

SEQ ID NO: 3165 - protein, 1207 aa, Homo Sapiens
MASVAWAVLKVLLLLPTQTWSPVGAGNPPDCDAPLASALPRSSFSSSSELSSSHGPGFSRLNRRDGAGGWTPLVSNKYQWLQIDLGERMEVTAVATQGGYGSSDWVTSYLLMFSDGGRNWKQYRREESIWGFPGNTNADSVVHYRLQPPFEARFLRFLPLAWNPRGRIGMRIEVYGCAYKSEVVYFDGQSALLYRLDKKPLKPIRDVISLKFKAMQSNGILLHREGQHGNHITLELIKGKLVFFLNSGNAKLPSTIAPVTLTLGSLLDDQHWHSVLIELLDTQVNFTVDKHTHHFQAKGDSSYLDLNFEISFGGIPTPGRSRAFRRKSFHGCLENLYYNGVDVTELAKKHKPQILMMGNVSFSCPQPQTVPVTFLSSRSYLALPGNSGEDKVSVTFQFRTWNRAGHLLFGELRRGSGSFVLFLKDGKLKLSLFQPGQSPRNVTAGAGLNDGQWHSVSFSAKWSHMNVVVDDDTAVQPLVAVLIDSGDTYYFGGCLDNSSGSGCKSPLGGFQGCLRLITIGDKAVDPILVQQGALGSFRDLQIDSCGITDRCLPSYCEHGGECSQSWDTFSCDCLGTGYTGETCHSSLYEQSCEAHKHRGNPSGLYYIDADGSGPLGPFLVYCNMTDAAWTVVQHGGPDAVTLRGAPSGHPRSAVSFAYAAGAGQLRSAVNLAERCEQRLALRCGTARRPDSRDGTPLSWWVGRTNETHTSWGGSLPDAQKCTCGLEGNCIDSQYYCNCDAGRNEWTSDTIVLSQKEHLPVTQIVMTDAGRPHSEAAYTLGPLLCRGDQSFWNSASFNTETSYLHFPAFHGELTADVCFFFKTTVSSGVFMENLGITDFIRIELRAPTEVTFSFDVGNGPCEVTVQSPTPFNDNQWHHVRAERNVKGASLQVDQLPQKMQPAPADGHVRLQLNSQLFIEISAYFATGSSMTYHFQEHYTLSENSSSLVSSLHRDVTLTREMITLSFRTTRTPSLLLYVSSFYEEYLSVILANNGSLQIRYKLDRHQNPDAFTFDFKNMADGQLHQVKINREEAVVMVEVNQSTKKQVILSSGTEFNAVKSLILGKVLEAAGADPDTRRAATSGFTGCLSAVRFGRAAPLKAALRPSGPSRVTVRGHVAPMARCAAGAASGSPARELAPRLAGGAGRSGPADEGEPLVNADRRDSAVIGGVIAVVIFILLCITAIAIRIYQQRKLRKENESKVSKKEEC

SEQ ID NO: 3166 - protein, 745 aa, Homo Sapiens
MASVAWAVLKVLLLLPTQTWSPVGAGNPPDCDAPLASALPRSSFSSSSELSSSHGPGFSRLNRRDGAGGWTPLVSNKYQWLQIDLGERMEVTAVATQGGYGSSDWVTSYLLMFSDGGRNWKQYRREESIWGFPGNTNADSVVHYRLQPPFEARFLRFLPLAWNPRGRIGMRIEVYGCAYKSEVVYFDGQSALLYRLDKKPLKPIRDVISLKFKAMQSNGILLHREGQHGNHITLELIKGKLVFFLNSGNAKLPSTIAPVTLTLGSLLDDQHWHSVLIELLDTQVNFTVDKHTHHFQAKGDSSYLDLNFEISFGGIPTPGRSRAFRRKSFHGCLENLYYNGVDVTELAKKHKPQILMMGNVSFSCPQPQTVPVTFLSSRSYLALPGNSGEDKVSVTFQFRTWNRAGHLLFGELRRGSGSFVLFLKDGKLKLSLFQPGQSPRNVTAGAGLNDGQWHSVSFSAKWSHMNVVVDDDTAVQPLVAVLIDSGDTYYFGGCLDNSSGSGCKSPLGGFQGCLRLITIGDKAVDPILVQQGALGSFRDLQIDSCGITDRCLPSYCEHGGECSQSWDTFSCDCLGTGYTGETCHSSLYEQSCEAHKHRGNPSGLYYIDADGSGPLGPFLVYCNMTDAAWTVVQHGGPDAVTLRGAPSGHPRSAVSFAYAAGAGQLRSAVNLAERCEQRLALRCGTARRPDSRDGTPLSWWVGRTNETHTSWGGSLPDAQKCTCGLEGNCIDSQYYCNCDAGRNEW

SEQ ID NO: 3167 - protein, 604 aa, Homo Sapiens
MASVAWAVLKVLLLLPTQTWSPVGAGNPPDCDAPLASALPRSSFSSSSELSSSHGPGFSRLNRRDGAGGWTPLVSNKYQWLQIDLGERMEVTAVATQGGYGSSDWVTSYLLMFSDGGRNWKQYRREESIWGFPGNTNADSVVHYRLQPPFEARFLRFLPLAWNPRGRIGMRIEVYGCAYKSEVVYFDGQSALLYRLDKKPLKPIRDVISLKFKAMQSNGILLHREGQHGNHITLELIKGKLVFFLNSGNAKLPSTIAPVTLTLGSLLDDQHWHSVLIELLDTQVNFTVDKHTHHFQAKGDSSYLDLNFEISFGGIPTPGRSRAFRRKSFHGCLENLYYNGVDVTELAKKHKPQILMMGNVSFSCPQPQTVPVTFLSSRSYLALPGNSGEDKVSVTFQFRTWNRAGHLLFGELRRGSGSFVLFLKDGKLKLSLFQPGQSPRNVTAGAGLNDGQWHSVSFSAKWSHMNVVVDDDTAVQPLVAVLIDSGDTYYFGALYEQSCEAHKHRGNPSGLYYIDADGSGPLGPFLVYCNMTDAAWTVVQHGGPDAVTLRGAPSGHPRSAVSFAYAAGAGQLRSAVNLAERCEQRLALRCGTARRPDSRGLVTQ

SEQ ID NO: 3168 - protein, 1039 aa, Homo Sapiens
MEVTAVATQGGYGSSDWVTSYLLMFSDGGRNWKQYRREESIWGFPGNTNADSVVHYRLQPPFEARFLRFLPLAWNPRGRIGMRIEVYGCAYKSEVVYFDGQSALLYRLDKKPLKPIRDVISLKFKAMQSNGILLHREGQHGNHITLELIKGKLVFFLNSGNAKLPSTIAPVTLTLGSLLDDQHWHSVLIELLDTQVNFTVDKHTHHFQAKGDSSYLDLNFEISFGGIPTPGRSRAFRRKSFHGCLENLYYNGVDVTELAKKHKPQILMMGNVSFSCPQPQTVPVTFLSSRSYLALPGNSGEDKVSVTFQFRTWNRAGHLLFGELRRGSGSFVLFLKDGKLKLSLFQPGQSPRNVTAGAGLNDGQWHSVSFSAKWSHMNVVVDDDTAVQPLVAVLIDSGDTYYFGGCLDNSSGSGCKSPLGGFQGCLRLITIGDKAVDPILVQQGALGSFRDLQIDSCGITDRCLPSYCEHGGECSQSWDTFSCDCLGTGYTGETCHSSLYEQSCEAHKHRGNPSGLYYIDADGSGPLGPFLVYCNMTADAAWTVVQHGGPDAVTLRGAPSGHPRSAVSFAYAAGAGQLRSAVNLAERCEQRLALRCGTARRPDSRDGTPLSWWVGRTNETHTSWGGSLPDAQKCTCGLEGNCIDSQYYCNCDAGRNEWTSDTIVLSQKEHLPVTQIVMTDAGRPHSEAAYTLGPLLCRGDQSFWNSASFNTETSYLHFPAFHGELTADVCFFFKTTVSSGVFMENLGITDFIRIELRAPTEVTFSFDVGNGPCEVTVQSPTPFNDNQWHHVRAERNVKGASLQVDQLPQKMQPAPADGHVRLQLNSQLFIGGTATRQRGFLGCIRSLQLNGVALDLEERATVTPGVEPGCAGHCSTYGHLCRNGGRCREKRRGVTCDCAFSAYDGPFCSNEISAYFATGSSMTYHFQEHYTLSENSSSLVSSLHRDVTLTREMITLSFRTTRTPSLLLYVSSFYEEYLSVILANNGSLQIRYKLDRHQNPDAFTFDFKNMADGQLHQVKINREEAVVMVEVIPQMQKSN

SEQ ID NO: 3169 - protein, 380 aa, Homo Sapiens
MASVAWAVLKVLLLLPTQTWSPVGAGNPPDCDSPLASALPRSSFSSSSELSSSHGPGFSRLNRRDGAGGWTPLVSNKYQWLQIDLGERMEVTAVATQGGYGSSDWVTSYLLMFSDGGRNWKQYRREESIWGFPGNTNADSVVHYRLQPPFEARFLRFLPLAWNPRGRIGMRIEVYGCAYKSEVVYFDGQSALLYTLDKKPLKPIRDVISLKFKAMQSNGILLHREGQHGNHITLELIKGKLVFFLNSGNAKLPSTIAPVTLTLGSLLDDQHWHSVLIELLDTQVNFTVDKHTHHFQAKGDSSNLDLNFEISFGGILSPGRSRAFTRKSFHGCLENLYYNGVDVTELAKKHKPQILMMELAHGLQDQNLKISLTVCHQTTQ

SEQ ID NO: 3170 - protein, 745 aa, Homo Sapiens
MASVAWAVLKVLLLLPTQTWSPVGAGNPPDCDSPLASALPRSSFSSSSELSSSHGPGFSRLNRRDGAGGWTPLVSNKYQWLQIDLGERMEVTAVATQGGYGSSDWVTSYLLMFSDGGRNWKQYRREESIWGFPGNTNADSVVHYRLQPPFEARFLRFLPLAWNPRGRIGMRIEVYGCAYKSEVVYFDGQSALLYTLDKKPLKPIRDVISLKFKAMQSNGILLHREGQHGNHITLELIKGKLVFFLNSGNAKLPSTIAPVTLTLGSLLDDQHWHSVLIELLDTQVNFTVDKHTHHFQAKGDSSNLDLNFEISFGGILSPGRSRAFTRKSFHGCLENLYYNGVDVTELAKKHKPQILMMGNVSFSCPQPQTVPVTFLSSRSYLALPGNSGEDKVSVTFQFRTWNRAGHLLFGELQRGSGSFVLFLKDGKLKLSLFQAGQSPRNVTAGAGLNDGQWHSVSFSAKWSHMNVVVDDDTAVQPLVAVLIDSGDTYYFGGCLGNSSGSGCKSPLGGFQGCLRLITIGDKAVDPILVQQGALGSFRDLQIDSCGITDRCLPSYCEHGGECSQSWDTFSCDCLGTGYTGETCHSSLYEQSCEAHKHRGNPSGLYYIDADGSGPLGPFLVYCNMTDSAWTVVRHGGPDAVTLRGAPSGHPLSAVSFAYAAGAGQLRAAVNLAERCEQRLALRCGTARRPDSRDGTPLSWWVGRTNETHTSWGGSLPDAQKCTCGLEGNCIDSQYYCNCDAGQNEW

SEQ ID NO: 3171 - protein, 1288 aa, Homo Sapiens
MASVAWAVLKVLLLLPTQTWSPVGAGNPPDCDSPLASALPRSSFSSSSELSSSHGPGFSRLNRRDGAGGWTPLVSNKYQWLQIDLGERMEVTAVATQGGYGSSDWVTSYLLMFSDGGRNWKQYRREESIWGFPGNTNADSVVHYRLQPPFEARFLRFLPLAWNPRGRIGMRIEVYGCAYKSEVVYFDGQSALLYTLDKKPLKPIRDVISLKFKAMQSNGILLHREGQHGNHITLELIKGKLVFFLNSGNAKLPSTIAPVTLTLGSLLDDQHWHSVLIELLDTQVNFTVDKHTHHFQAKGDSSNLDLNFEISFGGILSPGRSRAFTRKSFHGCLENLYYNGVDVTELAKKHKPQILMMGNVSFSCPQPQTVPVTFLSSRSYLALPGNSGEDKVSVTFQFRTWNRAGHLLFGELQRGSGSFVLFLKDGKLKLSLFQAGQSPRNVTAGAGLNDGQWHSVSFSAKWSHMNVVVDDDTAVQPLVAVLIDSGDTYYFGGCLGNSSGSGCKSPLGGFQGCLRLITIGDKAVDPILVQQGALGSFRDLQIDSCGITDRCLPSYCEHGGECSQSWDTFSCDCLGTGYTGETCHSSLYEQSCEAHKHRGNPSGLYYIDADGSGPLGPFLVYCNMTADSAWTVVRHGGPDAVTLRGAPSGHPLSAVSFAYAAGAGQLRAAVNLAERCEQRLALRCGTARRPDSRDGTPLSWWVGRTNETHTSWGGSLPDAQKCTCGLEGNCIDSQYYCNCDAGQNEWTSDTIVLSQKEHLPVTQIVMTDTGQPHSEADYTLGPLLCRGDKSFWNSASFNTETSYLHFPAFHGELTADVCFFFKTTVSSGVFMENLGITDFIRIELRAPTEVTFSFDVGNGPCEVTVQSPTPFNDNQWHHVRAERNVKGASLQVDQLPQKMQPAPADGHVRLQLNSQLFIGGTATRQRGFLGCIRSLQLNGVALDLEERATVTPGVEPGCAGHCSTYGHLCRNGGRCREKRRGVTCDCAFSAYDGPFCSNEISAYFATGSSMTYHFQEHYTLSENSSSLVSSLHRDVTLTREMITLSFRTTRTPSLLLYVSSFYEEYLSVILANNGSLQIRYKLDRHQNPDAFTFDFKNMADGQLHQVKINREEAVVMVEVNQSAKKQVILSSGTEFNAVKSLILGKVLEAAGADPDTRRAATSGFTGCLSAVRFGCAAPLKAALRPSGPSRVTVRGHVAPMARCAAGAASGSPARELAPRLAGGAGRSGPVDEGEPLVNADRRDSAVIGGVIAVEIFILLCITAIAIRIYQQRKLRKENESKVSKKEEC

SEQ ID NO: 3172 - protein, 605 aa, Homo Sapiens
MASVAWAVLKVLLLLPTQTWSPVGAGNPPDCDSPLASALPRSSFSSSSELSSSHGPGFSRLNRRDGAGGWTPLVSNKYQWLQIDLGERMEVTAVATQGGYGSSDWVTSYLLMFSDGGRNWKQYRREESIWGFPGNTNADSVVHYRLQPPFEARFLRFLPLAWNPRGRIGMRIEVYGCAYKSEVVYFDGQSALLYTLDKKPLKPIRDVISLKFKAMQSNGILLHREGQHGNHITLELIKGKLVFFLNSGNAKLPSTIAPVTLTLGSLLDDQHWHSVLIELLDTQVNFTVDKHTHHFQAKGDSSNLDLNFEISFGGILSPGRSRAFTRKSFHGCLENLYYNGVDVTELAKKHKPQILMMGNVSFSCPQPQTVPVTFLSSRSYLALPGNSGEDKVSVTFQFRTWNRAGHLLFGELQRGSGSFVLFLKDGKLKLSLFQAGQSPRNVTAGAGLNDGQWHSVSFSAKWSHMNVVVDDDTAVQPLVAVLIDSGDTYYFGALYEQSCEAHKHRGNPSGLYYIDADGSGPLGPFLVYCNMTADSAWTVVRHGGPDAVTLRGAPSGHPLSAVSFAYAAGAGQLRAAVNLAERCEQRLALRCGTARRPDSRGLVTQ

SEQ ID NO: 3173 - protein, 1207 aa, Homo Sapiens
MASVAWAVLKVLLLLPTQTWSPVGAGNPPDCDSPLASALPRSSFSSSSELSSSHGPGFSRLNRRDGAGGWTPLVSNKYQWLQIDLGERMEVTAVATQGGYGSSDWVTSYLLMFSDGGRNWKQYRREESIWGFPGNTNADSVVHYRLQPPFEARFLRFLPLAWNPRGRIGMRIEVYGCAYKSEVVYFDGQSALLYTLDKKPLKPIRDVISLKFKAMQSNGILLHREGQHGNHITLELIKGKLVFFLNSGNAKLPSTIAPVTLTLGSLLDDQHWHSVLIELLDTQVNFTVDKHTHHFQAKGDSSNLDLNFEISFGGILSPGRSRAFTRKSFHGCLENLYYNGVDVTELAKKHKPQILMMGNVSFSCPQPQTVPVTFLSSRSYLALPGNSGEDKVSVTFQFRTWNRAGHLLFGELQRGSGSFVLFLKDGKLKLSLFQAGQSPRNVTAGAGLNDGQWHSVSFSAKWSHMNVVVDDDTAVQPLVAVLIDSGDTYYFGGCLGNSSGSGCKSPLGGFQGCLRLITIGDKAVDPILVQQGALGSFRDLQIDSCGITDRCLPSYCEHGGECSQSWDTFSCDCLGTGYTGETCHSSLYEQSCEAHKHRGNPSGLYYIDADGSGPLGPFLVYCNMTDSAWTVVRHGGPDAVTLRGAPSGHPLSAVSFAYAAGAGQLRAAVNLAERCEQRLALRCGTARRPDSRDGTPLSWWVGRTNETHTSWGGSLPDAQKCTCGLEGNCIDSQYYCNCDAGQNEWTSDTIVLSQKEHLPVTQIVMTDTGQPHSEADYTLGPLLCRGDKSFWNSASFNTETSYLHFPAFHGELTADVCFFFKTTVSSGVFMENLGITDFIRIELRAPTEVTFSFDVGNGPCEVTVQSPTPFNDNQWHHVRAERNVKGASLQVDQLPQKMQPAPADGHVRLQLNSQLFIEISAYFATGSSMTYHFQEHYTLSENSSSLVSSLHRDVTLTREMITLSFRTTRTPSLLLYVSSFYEEYLSVILANNGSLQIRYKLDRHQNPDAFTFDFKNMADGQLHQVKINREEAVVMVEVNQSAKKQVILSSGTEFNAVKSLILGKVLEAAGADPDTRRAATSGFTGCLSAVRFGCAAPLKAALRPSGPSRVTVRGHVAPMARCAAGAASGSPARELAPRLAGGAGRSGPVDEGEPLVNADRRDSAVIGGVIAVEIFILLCITAIAIRIYQQRKLRKENESKVSKKEEC

SEQ ID NO: 3174 - protein, 652 aa, Homo Sapiens
MASVAWAVLKVLLLLPTQTWSPVGAGNPPDCDSPLASALPRSSFSSSSELSSSHGPGFSRLNRRDGAGGWTPLVSNKYQWLQIDLGERMEVTAVATQGGYGSSDWVTSYLLMFSDGGRNWKQYRREESIWGFPGNTNADSVVHYRLQPPFEARFLRFLPLAWNPRGRIGMRIEVYGCAYKSEVVYFDGQSALLYTLDKKPLKPIRDVISLKFKAMQSNGILLHREGQHGNHITLELIKGKLVFFLNSGNAKLPSTIAPVTLTLGSLLDDQHWHSVLIELLDTQVNFTVDKHTHHFQAKGDSSNLDLNFEISFGGILSPGRSRAFTRKSFHGCLENLYYNGVDVTELAKKHKPQILMMGNVSFSCPQPQTVPVTFLSSRSYLALPGNSGEDKVSVTFQFRTWNRAGHLLFGELQRGSGSFVLFLKDGKLKLSLFQAGQSPRNVTAGAGLNDGQWHSVSFSAKWSHMNVVVDDDTAVQPLVAVLIDSGDTYYFGALYEQSCEAHKHRGNPSGLYYIDADGSGPLGPFLVYCNMTDSAWTVVRHGGPDAVTLRGAPSGHPLSAVSFAYAAGAGQLRAAVNLAERCEQRLALRCGTARRPDSRDGTPLSWWVGRTNETHTSWGGSLPDAQKCTCGLEGNCIDSQYYCNCDAGQNEW

SEQ ID NO: 3175 - protein, 966 aa, Homo Sapiens
MASVAWAVLKVLLLLPTQTWSPVGAGNPPDCDSPLASALPRSSFSSSSELSSSHGPGFSRLNRRDGAGGWTPLVSNKYQWLQIDLGERMEVTAVATQGGYGSSDWVTSYLLMFSDGGRNWKQYRREESIWGFPGNTNADSVVHYRLQPPFEARFLRFLPLAWNPRGRIGMRIEVYGCAYKSEVVYFDGQSALLYTLDKKPLKPIRDVISLKFKAMQSNGILLHREGQHGNHITLELIKGKLVFFLNSGNAKLPSTIAPVTLTLGSLLDDQHWHSVLIELLDTQVNFTVDKHTHHFQAKGDSSNLDLNFEISFGGILSPGRSRAFTRKSFHGCLENLYYNGVDVTELAKKHKPQILMMGNVSFSCPQPQTVPVTFLSSRSYLALPGNSGEDKVSVTFQFRTWNRAGHLLFGELQRGSGSFVLFLKDGKLKLSLFQAGQSPRNVTAGAGLNDGQWHSVSFSAKWSHMNVVVDDDTAVQPLVAVLIDSGDTYYFGALYEQSCEAHKHRGNPSGLYYIDADGSGPLGPFLVYCNMTDSAWTVVRHGGPDAVTLRGAPSGHPLSAVSFAYAAGAGQLRAAVNLAERCEQRLALRCGTARRPDSRDGTPLSWWVGRTNETHTSWGGSLPDAQKCTCGLEGNCIDSQYYCNCDAGQNEWTSDTIVLSQKEHLPVTQIVMTDTGQPHSEADYTLGPLLCRGDKSFWNSASFNTETSYLHFPAFHGELTADVCFFFKTTVSSGVFMENLGITDFIRIELRAPTEVTFSFDVGNGPCEVTVQSPTPFNDNQWHHVRAERNVKGASLQVDQLPQKMQPAPADGHVRLQLNSQLFIGGTATRQRGFLGCIRSLQLNGVALDLEERATVTPGVEPGCAGHCSTYGHLCRNGGRCREKRRGVTCDCAFSAYDGPFCSNEISAYFATGSSMTYHFQEHYTLSENSSSLVSSLHRDVTLTREMITLSFRTTRTPSLLLKFAD

SEQ ID NO: 3176 - protein, 180 aa, Homo Sapiens
  misc_feature (1)..(1): Xaa can be any naturally occurring amino acid
XRDVTLTREMITLSFRTTRTPSLLLYVSSFYEEYLSVILANNGSLQIRYKLDRHQNPDAFTFDFKNMADGQLHQVKINREEAVVMVEVNQSAKKQVILSSGTEFNAVKSLILGKVLGRSGPVDEGEPLVNADRRDSAVIGGVIAVEIFILLCITAIAIRIYQQRKLRKENESKVSKKEEC

SEQ ID NO: 3177 - protein, 167 aa, Homo Sapiens
  misc_feature (1)..(1): Xaa can be any naturally occurring amino acid
XSAAPGLTRTSDTIVLSQKEHLPVTQIVMTDTGQPHSEADYTLGPLLCRGDTRLLKVWRRESVIFEIFPSLFGRLRWEDGLSQGVQHKPGQDESFWNSASFNTETSYLHFPAFHGELTADVCFFFKTTVSSGVFMENLGITDFIRIELRGRLATLDKSQGTHYLAIK

SEQ ID NO: 3178 - protein, 116 aa, Homo Sapiens
MAINRFRLENDLEELALYQIQLLKDLRHTENEEDKVSSSSFRQRMLGNLLRPPYERPELPTCLYVIGLTGISGSGKSSIAQRLKGLGAFVIDSDHLGHRAYAPGGPAYQPVVEAFG

SEQ ID NO: 3179 - protein, 91 aa, Homo Sapiens
MAVFRSGLLVLTTPLASLAPRLASILTSAARLVNHTLYVHLQPGMSLEGPAQPQSSPVQATFEVLDFITHLYAGADVHRHLDVRILLTNIR

SEQ ID NO: 3180 - protein, 147 aa, Homo Sapiens
MAVFRSGLLVLTTPLASLAPRLASILTSAARLVNHTLYVHLQPGMSLEGPAQPQSSPVQATFEVLDFITHLYAGADVHRHLDVRILLTNIRTKSTFLPPLPTSVQNLAHPPEVVLTDFQTLDGSQYNPVKQQLVRYATSCYSCCPRL

SEQ ID NO: 3181 - protein, 219 aa, Homo Sapiens
MAVFRSGLLVLTTPLASLAPRLASILTSAARLVNHTLYVHLQPGMSLEGPAQPQSSPVQATFEVLDFITHLYAGADVHRHLDVRILLTNIRTKSTFLPPLPTSVQNLAHPPEVVLTDFQTLDGSQYNPVKQQLVRYATSCYSCCPRLASVLLYSDYGIGEVPVEPLDVPLPSTIRPASPVAGSPKQPVRGYYRGAVGGTFDRLHNAHKVLLSVACILAQ

SEQ ID NO: 3182 - protein, 564 aa, Homo Sapiens
MAVFRSGLLVLTTPLASLAPRLASILTSAARLVNHTLYVHLQPGMSLEGPAQPQSSPVQATFEVLDFITHLYAGADVHRHLDVRILLTNIRTKSTFLPPLPTSVQNLAHPPEVVLTDFQTLDGSQYNPVKQQLVRYATSCYSCCPRLASVLLYSDYGIGEVPVEPLDVPLPSTIRPASPVAGSPKQPVRGYYRGAVGGTFDRLHNAHKVLLSVACILAQEQLVVGVADKDLLKSKLLPELLQPYTERVEHLSEFLVDIKPSLTFDVIPLLDPYGPAGSDPSLEFLVVSEETYRGGMAINRFRLENDLEELALYQIQLLKDLRHTENEEDKVSSSSFRQRMLGNLLRPPYERPELPTCLYVIGLTGISGSGKSSIAQRLKGLGAFVIDSDHLGHRAYAPGGPAYQPVVEAFGTDILHKDGIINRKVLGSRVFGNKKQLKILTDIMWPIIAKLAREEMDRAVAEGKRVCVIDAAVLLEAGWQNLVHEVWTAVIPETEAVRRIVERDGLSEAAAQSRLQSQMSGQQLVEQSHVVLSTLWEPHITQRQVEKAWALLQKRIPKTHQALD

SEQ ID NO: 3183 - protein, 564 aa, Homo Sapiens; identical to SEQ ID NO: 3182

SEQ ID NO: 3184 - protein, 98 aa, Homo Sapiens
MRTPRLRAQPRGAVYQAPSPPPAPVGLGSMAVFRSGLLVLTTPLASLAPRLASILTSAARLVNHTLYVHLQPGMSLEGPAQPQSSPVQATFEVLDFIT

SEQ ID NO: 3185 - protein, 128 aa, Homo Sapiens
MRTPRLRAQPRGAVYQAPSPPPAPVGLGSMAVFRSGLLVLTTPLASLAPRLASILTSAARLVNHTLYVHLQPGMSLEGPAQPQSSPVQATFEVLDFITHLYAGADVHRHLDVRILLTNIRTKSTFLPP

SEQ ID NO: 3186 - protein, 593 aa, Homo Sapiens
MRTPRLRAQPRGAVYQAPSPPPAPVGLGSMAVFRSGLLVLTTPLASLAPRLASILTSAARLVNHTLYVHLQPGMSLEGPAQPQSSPVQATFEVLDFITHLYAGADVHRHLDVRILLTNIRTKSTFLPPLPTSVQNLAHPPEVVLTDFQTLDGSQYNPVKQQLVRYATSCYSCCPRLASVLLYSDYGIGEVPVEPLDVPLPSTIRPASPVAGSPKQPVRGYYRGAVGGTFDRLHNAHKVLLSVACILAQEQLVVGVADKDLLKSKLLPELLQPYTERVEHLSEFLVDIKPSLTFDVIPLLDPYGPAGSDPSLEFLVVSEETYRGGMAINRFRLENDLEELALYQIQLLKDLRHTENEEDKVSSSSFRQRMLGNLLRPPYERPELPTCLYVIGLTGISGSGKSSIAQRLKGLGAFVIDSDHLGHRAYAPGGPAYQPVVEAFGTDILHKDGIINRKVLGSRVFGNKKQLKILTDIMWPIIAKLAREEMDRAVAEGKRVCVIDAAVLLEAGWQNLVHEVWTAVIPETEAVRRIVERDGLSEAAAQSRLQSQMSGQQLVEQSHVVLSTLWEPHITQRQVEKAWALLQKRIPKTHQALD

SEQ ID NO: 3187 - protein, 96 aa, Homo Sapiens
MRTPRLRAQPRGAVYQAPSPPPAPVVQNLAHPPEVVLTDFQTLDGSQYNPVKQQLVRYATSCYSCCPRLASVLLYSDYGIGEVPVEPLDVPLPSTI

SEQ ID NO: 3188 - protein, 438 aa, Homo Sapiens
MLSRWSASFTVTKGKSSTQEATGQAVSTAHPPTGKRLKKTPEKKTGNKDCKADIAFLIDGSFNIGQRRFNLQKNFVGKVALMLGIGTEGPHVGLVQASEHPKIEFYLKNFTSAKDVLFAIKEVGFRGGNSNTGKALKHTAQKFFTVDAGVRKGIPKVVVVFIDGWPSDDIEEAGIVAREFGVNVFIVSVAKPIPEELGMVQDVTFVDKAVCRNNGFFSYHMPNWFGTTKYVKPLVQKLCTHEQMMCSKTCYNSVNIAFLIDGSSSVGDSNFRLMLEFVSNIAKTFEISDIGAKIAAVQFTYDQRTEFSFTDYSTKENVLAVIRNIRYMSGGTATGDAISFTVRNVFGPIRESPNKNFLVIVTDGQSYDDVQGPAAAAHDAGITIFSVGVAWAPLDDLKDMASKPKESHAFFTREFTGLEPIVSDVIRGICRDFLESQQ

SEQ ID NO: 3189 - protein, 193 aa, Homo Sapiens
MSAAWIPALGLAPIAITCFTRGLDIRKEKADVLCPGGCPLEEFSVYGNIVYASVSSICGAAVHRGVISNSGGPVRVYSLPGRENYSSVDANGIQSQMLSRWSASFTVTKGKSSTQEATGQAVSTAHPPTGKRLKKTPEKKTGNKDCKADIAFLIDGSFNIGQRRFNLQKNFVGKVALMLGIGTEGPHVGLVQA

SEQ ID NO: 3190 - protein, 80 aa, Homo Sapiens
MSAAWIPALGLGVCLLLLPGPAGSEGAAPIAITCFTRGLDIRKEKADVLCPGGCPLEEFSVYGNIVYASVSSICGAAVHR

SEQ ID NO: 3191 - protein, 513 aa, Homo Sapiens
MSAAWIPALGLGVCLLLLPGPAGSEGAAPIAITCFTRGLDIRKEKADVLCPGGCPLEEFSVYGNIVYASVSSICGAAVHRGVISNSGGPVRVYSLPGRENYSSVDANGIQSQMLSRWSASFTVTKGKSSTQEATGQAVSTAHPPTGKRLKKTPEKKTGNKDCKADIAFLIDGSFNIGQRRFNLQKNFVGKVALMLGIGTEGPHVGLVQASEHPKIEFYLKNFTSAKDVLFAIKEVGFRGGNSNTDVAERMSSTTVDSEERLLRGKALKHTAQKFFTVDAGVRKGIPKVVVVFIDGWPSDDIEEAGIVAREFGVNVFIVSVAKPIPEELGMVQDVTFVDKAVCRNNGFFSYHMPNWFGTTKYVKPLVQKLCTHEQMMCSKTCYNSVNIAFLIDGSSSVGDSNFRLMLEFVSNIAKTFEISDIGAKIAAVQFTYDQRTEFSFTDYSTKENVLAVIRNIRYMSGGTATGDAISFTVRNVFGPIRESPNKNFLVIVTDGQSYDDVQGPAAAAHDAAK

SEQ ID NO: 3192 - protein, 550 aa, Homo Sapiens
MSAAWIPALGLGVCLLLLPGPAGSEGAAPIAITCFTRGLDIRKEKADVLCPGGCPLEEFSVYGNIVYASVSSICGAAVHRGVISNSGGPVRVYSLPGRENYSSVDANGIQSQMLSRWSASFTVTKGKSSTQEATGQAVSTAHPPTGKRLKKTPEKKTGNKDCKADIAFLIDGSFNIGQRRFNLQKNFVGKVALMLGIGTEGPHVGLVQASEHPKIEFYLKNFTSAKDVLFAIKEVGFRGGNSNTGKALKHTAQKFFTVDAGVRKGIPKVVVVFIDGWPSDDIEEAGIVAREFGVNVFIVSVAKPIPEELGMVQDVTFVDKAVCRNNGFFSYHMPNWFGTTKYVKPLVQKLCTHEQMMCSKTCYNSVNIAFLIDGSSSVGDSNFRLMLEFVSNIAKTFEISDIGAKIAAVQFTYDQRTEFSFTDYSTKENVLAVIRNIRYMSGGTATGDAISFTVRNVFGPIRESPNKNFLVIVTDGQSYDDVQGPAAAAHDAGITIFSVGVAWAPLDDLKDMASKPKESHAFFTREFTGLEPIVSDVIRGICRDFLESQQ

SEQ ID NO: 3193 - protein, 494 aa, Homo Sapiens
MSAAWIPALGLGVCLLLLPGPAGSEGAAPIAITCFTRGLDIRKEKADVLCPGGCPLEEFSVYGNIVYASVSSICGAAVHRGVISNSGGPVRVYSLPGRENYSSVDANGIQSQMLSRWSASFTVTKGKSSTQEATGQAVSTAHPPTGKRLKKTPEKKTGNKDCKADIAFLIDGSFNIGQRRFNLQKNFVGKVALMLGIGTEGPHVGLVQASEHPKIEFYLKNFTSAKDVLFAIKEVGFRGGNSNTGKALKHTAQKFFTVDAGVRKGIPKVVVVFIDGWPSDDIEEAGIVAREFGVNVFIVSVAKPIPEELGMVQDVTFVDKAVCRNNGFFSYHMPNWFGTTKYVKPLVQKLCTHEQMMCSKTCYNSVNIAFLIDGSSSVGDSNFRLMLEFVSNIAKTFEISDIGAKIAAVQFTYDQRTEFSFTDYSTKENVLAVIRNIRYMSGGTATGDAISFTVRNVFGPIRESPNKNFLVIVTDGQSYDDVQGPAAAAHDAAK

SEQ ID NO: 3194 - protein, 550 aa, Homo Sapiens; identical to SEQ ID NO: 3192

SEQ ID NO: 3195 - protein, 550 aa, Homo Sapiens; identical to SEQ ID NO: 3192

SEQ ID NO: 3196 - protein, 615 aa, Homo Sapiens
MSAAWIPALGLGVCLLLLPGPAGSEGAGEWGSWGASRRSQGLSTSGYKRDSDPAPWASALPPEEEGAKVEPPRGAPALTPAADLLLLTCFSHAPIAITCFTRGLDIRKEKADVLCPGGCPLEEFSVYGNIVYASVSSICGAAVHRGVISNSGGPVRVYSLPGRENYSSVDANGIQSQMLSRWSASFTVTKGKSSTQEATGQAVSTAHPPTGKRLKKTPEKKTGNKDCKADIAFLIDGSFNIGQRRFNLQKNFVGKVALMLGIGTEGPHVGLVQASEHPKIEFYLKNFTSAKDVLFAIKEVGFRGGNSNTGKALKHTAQKFFTVDAGVRKGIPKVVVVFIDGWPSDDIEEAGIVAREFGVNVFIVSVAKPIPEELGMVQDVTFVDKAVCRNNGFFSYHMPNWFGTTKYVKPLVQKLCTHEQMMCSKTCYNSVNIAFLIDGSSSVGDSNFRLMLEFVSNIAKTFEISDIGAKIAAVQFTYDQRTEFSFTDYSTKENVLAVIRNIRYMSGGTATGDAISFTVRNVFGPIRESPNKNFLVIVTDGQSYDDVQGPAAAAHDAGITIFSVGVAWAPLDDLKDMASKPKESHAFFTREFTGLEPIVSDVIRGICRDFLESQQ

SEQ ID NO: 3197 - protein, 202 aa, Homo Sapiens
MSAAWIPALGLGVCLLLLPGPAGSEGAGKRLKKTPEKKTGNKDCKADIAFLIDGSFNIGQRRFNLQKNFVGKVALMLGIGTEGPHVGLVQASEHPKIEFYLKNFTSAKDVLFAIKEVGFRGGNSNTGKALKHTAQKFFTVDAGVRKGIPKVVVVFIDGWPSDDIEEAGIVAREFGVNVFIVSVAKPIPEELGMVQDVTFVDK

SEQ ID NO: 3198 - protein, 55 aa, Homo Sapiens
PIAITCFTRGLDIRKEKADVLCPGGCPLEEFSVYGNIVYASVSSICGAAVHRRQK

SEQ ID NO: 3199 - protein, 434 aa, Homo Sapiens
  misc_feature (1)..(1): Xaa can be any naturally occurring amino acid
XCKADIAFLIDGSFNIGQRRFNLQKNFVGKVALMLGIGTEGPHVGLVQASEHPKIEFYLKNFTSAKDVLFAIKEVGFRGGNSNTDITLEKYLFVMLKRSENQQTYLMNADVAERMSSTTVDSEERLLRGKALKHTAQKFFTVDAGVRKGIPKVVVVFIDGWPSDDIEEAGIVAREFGVNVFIVSVAKPIPEELGMVQDVTFVDKAVCRNNGFFSYHMPNWFGTTKYVKPLVQKLCTHEQMMCSKTCYNSVNIAFLIDGSSSVGDSNFRLMLEFVSNIAKTFEISDIGAKIAAVQFTYDQRTEFSFTDYSTKENVLAVIRNIRYMSGGTATGDAISFTVRNVFGPIRESPNKNFLVIVTDGQSYDDVQGPAAAAHDAGITIFSVGVAWAPLDDLKDMASKPKESHAFFTREFTGLEPIVSDVIRGICRDFLESQQ

SEQ ID NO: 3200 - protein, 828 aa, Homo Sapiens
MAEAALLLLPEAAAERDAREKLALWDRRPDTTAPLTDRQTDSVLELKAAAENLPVPAELPIEDLCSLTSQSLPIELTSVVPESTEDILLKGFTSLGMEEERIETAQQFFSWFAKLQTQMDQDEGTKYRQMRDYLSGFQEQCDAILNDVNSALQHLESLQKQYLFVSNKTGTLHEACEQLLKEQSELVDLAENIQQKLSYFNELETINTKLNSPTLSVNSDGFIPMLAKLDDCITYISSHPNFKDYPIYLLKFKQCLSKALHLMKTYTVNTLQTLTSQLLKRDPSSVPNADNAFTLFYVKFRAAAPKVRTLIEQIELRSEKIPEYQQLLNDIHQCYLDQRELLLGPSIACTVAELTSQNNRDHCALVRSGCAFMVHVCQDEHQLYNEFFTKPTSKLDELLEKLCVSLYDVFRPLIIHVIHLETLSELCGILKNEVLEDHVQNNAEQLGAFAAGVKQMLEDVQERLVYRTHIYIQTDITGYKPAPGDLAYPDKLVMMEQIAQSLKDEQKKVPSEASFSDVHLEEGESNSLTKSGSTESLNPRPQTTISPADLHGMWYPTVRRTLVCLSKLYRCIDRAVFQGLSQEALSACIQSLLGASESISKNKTQIDGQLFLIKHLLILREQIAPFHTEFTIKEISLDLKKTRDAAFKILNPMTVPRFFRLNSNNALIEFLLEGTPEIREHYLDSKKDVDRHLKSACEQFIQQQTKLFVEQLEEFMTKVSALKTMASQGGPKYTLSQQPWAQPAKVNDLAATAYKTIKTKLPVTLRSMSLYLSNKDTEFILFKPVRNNIQQVFQKFHALLKEEFSPEDIQIIACPSMEQLSLLLLVSK

SEQ ID NO: 3201 - protein, 444 aa, Homo Sapiens
MAEAALLLLPEAAAERDAREKLALWDRRPDTTAPLTDRQTDSVLELKAAAENLPVPAELPIEDLCSLTSQSLPIELTSVVPESTEDILLKGFTSLGMEEERIETAQQFFSWFAKLQTQMDQDEGTKYRQMRDYLSGFQEQCDAILNDVNSALQHLESLQKQYLFVSNKTGTLHEACEQLLKEQSELVDLAENIQQKLSYFNELETINTKLNSPTLSVNSDGFIPMLAKLDDCITYISSHPNFKDYPIYLLKFKQCLSKALHLMKTYTVNTLQTLTSQLLKRDPSSVPNADNAFTLFYVKFRAAAPKVRTLIEQIELRSEKIPEYQQLLNDIHQCYLDQRELLLGPSIACTVAELTSQNNRDHCALVRSGCAFMVHVCQDEHQLYNEFFTKPTSKLDELLEKLCVSLYDVFRPLIIHVIHLETLSELCGILKNEVLEDHVQNNGK

SEQ ID NO: 3202 - protein, 85 aa, Homo Sapiens
PEAAAERDAREKLALWDRRPDTTAPLTDRQTDSVLELKAAAENLPVPAEDMVPEVDLKSMKAQVEISLAQLSNSFIPWIIKVVCS

SEQ ID NO: 3203 - protein, 68 aa, Homo Sapiens
  misc_feature (1)..(1): Xaa can be any naturally occurring amino acid
XIDGQLFLIKHLLILREQIAPFHTEFTIKEISLDLKKTRGFSVKNNGQSGRPQVYSLTAALGTTSKGQ

SEQ ID NO: 3204 - protein, 51 aa, Homo Sapiens
MLPQIPFLLLVSLNLVHGVFYAERYQMPTGIKGPLPNTKTQFFIPYTIKSK

SEQ ID NO: 3205 - protein, 216 aa, Homo Sapiens
MLPQIPFLLLVSLNLVHGVFYAERYQMPTGIKGPLPNTKTQFFIPYTIKSKGIAVRGEQGTPGPPGPAGPRGHPGPSGPPGKPGYGSPGLQGEPGLPGPPGPSAVGKPGVPGLPGKPGERGPYGPKGDVGPAGLPGPRGPPGPPGIPGPAGISVPGKPGQQGPTGAPGPRGFPGEKGAPGVPGMNGQKGEMGYGAPGRPGERGLPGPQGPTGPSGP

SEQ ID NO: 3206 - protein, 680 aa, Homo Sapiens
MLPQIPFLLLVSLNLVHGVFYAERYQMPTGIKGPLPNTKTQFFIPYTIKSKGIAVRGEQGTPGPPGPAGPRGHPGPSGPPGKPGYGSPGLQGEPGLPGPPGPSAVGKPGVPGLPGKPGERGPYGPKGDVGPAGLPGPRGPPGPPGIPGPAGISVPGKPGQQGPTGAPGPRGFPGEKGAPGVPGMNGQKGEMGYGAPGRPGERGLPGPQGPTGPSGPPGVGKRGENGVPGQPGIKGDRGFPGEMGPIGPPGPQGPPGERGPEGIGKPGAAGAPGQPGIPGTKGLPGAPGIAGPPGPPGFGKPGLPGLKGERGPAGLPGGPGAKGEQGPAGLPGKPGLTGPPGNMGPQGPKGIPGSHGLPGPKGETGPAGPAGYPGAKGERGSPGSDGKPGYPGKPGLDGPKGNPGLPGPKGDPGVGGPPGLPGPVGPAGAKGMPGHNGEAGPRGAPGIPGTRGPIGPPGIPGFPGSKGDPGSPGPPGPAGIATKGLNGPTGPPGPPGPRGHSGEPGLPGPPGPPGPPGQAVMPEGFIKAGQRPSLSGTPLVSANQGVTGMPVSAFTVILSKAYPAIGTPIPFDKILYNRQQHYDPRTGIFTCQIPGIYYFSYHVHVKGTHVWVGLYKNGTPVMYTYDEYTKGYLDQASGSAIIDLTENDQVWLQLPNAESNGLYSSEYVHSSFSGFLVAPM

SEQ ID NO: 3207 - protein, 680 aa, Homo Sapiens; identical to SEQ ID NO: 3206

SEQ ID NO: 3208 - protein, 1767 aa, Homo Sapiens
MEPWSSRWKTKRWLWDFTVTTLALTFLFQAREVRGAAPVDVLKALDFHNSPEGISKTTGFCTNRKNSKGSDTAYRVSKQAQLSAPTKQLFPGGTFPEDFSILFTVKPKKGIQSFLLSIYNEHGIQQIGVEVGRSPVFLFEDHTGKPAPEDYPLFRTVNIADGKWHRVAISVEKKTVTMIVDCKKKTTKPLDRSERAIVDTNGITVFGTRILDEEVFEGDIQQFLITGDPKAAYDYCEHYSPDCDSSAPKAAQAQEPQIDEANIVDDFQEYNYGTMESYQTEAPRHVSGTNEPNPVEEIFTEEYLTGEDYDSQRKNSEDTLYENKEIDGRDSDLLVDGDLGEYDFYEYKEYEDKPTSPPNEEFGPGVPAETDITETSINGHGAYGEKGQKGEPAVVEPGMLVEGPPGPAGPAGIMGPPGLQGPTGPPGDPGDRGPPGRPGLPGADGLPGPPGTMLMLPFRYGGDGSKGPTISAQEAQAQAILQQARIALRGPPGPMGLTGRPGPVGGPGSSGAKGESGDPGPQGPRGVQGPPGPTGKPGKRGRPGADGGRGMPGEPGAKGDRGFDGLPGLPGDKGHRGERGPQGPPGPPGDDGMRGEDGEIGPRGLPGEAGPRGLLGPRGTPGAPGQPGMAGVDGPPGPKGNMGPQGEPGPPGQQGNPGPQGLPGPQGPIGPPGEKGPQGKPGLAGLPGADGPPGHPGKEGQSGEKGALGPPGPQGPIGYPGPRGVKGADGVRGLKGSKGEKGEDGFPGFKGDMGLKGDRGEVGQIGPRGEDGPEGPKGRAGPTGDPGPSGQAGEKGKLGVPGLPGYPGRQGPKGSTGFPGFPGANGEKGARGVAGKPGPRGQRGPTGPRGSRGARGPTGKPGPKGTSGGDGPPGPPGERGPQGPQGPVGFPGPKGPPGPPGKDGLPGHPGQRGETGFQGKTGPPGPGGVVGPQGPTGETGPIGERGHPGPPGPPGEQGLPGAAGKEGAKGDPGPQGISGKDGPAGLRGFPGERGLPGAQGAPGLKGGEGPQGPPGPVGSPGERGSAGTAGPIGLPGRPGPQGPPGPAGEKGAPGEKGPQGPAGRDGVQGPVGLPGPAGPAGSPGEDGDKGEIGEPGQKGSKGDKGENGPPGPPGLQGPVGAPGIAGGDGEPGPRGQQGMFGQKGDEGARGFPGPPGPIGLQGLPGPPGEKGENGDVGPMGPPGPPGPRGPQGPNGADGPQGPPGSVGSVGGVGEKGEPGEAGNPGPPGEAGVGGPKGERGEKGEAGPPGAAGPPGAKGPPGDDGPKGNPGPVGFPGDPGPPGEPGPAGQDGVGGDKGEDGDPGQPGPPGPSGEAGPPGPPGKRGPPGAAGAEGRQGEKGAKGEAGAEGPPGKTGPVGPQGPAGKPGPEGLRGIPGPVGEQGLPGAAGQDGPPGPMGPPGLPGLKGDPGSKGEKGHPGLIGLIGPPGEQGEKGDRGLPGTQGSPGAKGDGGIPGPAGPLGPPGPPGLPGPQGPKGNKGSTGPAGQKGDSGLPGPPGSPGPPGEVIQPLPILSSKKTRRHTEGMQADADDNILDYSDGMEEIFGSLNSLKQDIEHMKFPMGTQTNPARTCKDLQLSHPDFPDGEYWIDPNQGCSGDSFKVYCNFTSGGETCIYPDKKSEGVRISSWPKEKPGSWFSEFKRGKLLSYLDVEGNSINMVQMTFLKLLTASARQNFTYHCHQSAAWYDVSSGSYDKALRFLGSNDEEMSYDNNPFIKTLYDGCASRKGYEKTVIEINTPKIDQVPIVDVMINDFGDQNQKFGFEVGPVCFLG

SEQ ID NO: 3209 - protein, 1806 aa, Homo Sapiens
MEPWSSRWKTKRWLWDFTVTTLALTFLFQAREVRGAAPVDVLKALDFHNSPEGISKTTGFCTNRKNSKGSDTAYRVSKQAQLSAPTKQLFPGGTFPEDFSILFTVKPKKGIQSFLLSIYNEHGIQQIGVEVGRSPVFLFEDHTGKPAPEDYPLFRTVNIADGKWHRVAISVEKKTVTMIVDCKKKTTKPLDRSERAIVDTNGITVFGTRILDEEVFEGDIQQFLITGDPKAAYDYCEHYSPDCDSSAPKAAQAQEPQIDEYAPEDIIEYDYEYGEAEYKEAESVTEGPTVTEETIAQTEANIVDDFQEYNYGTMESYQTEAPRHVSGTNEPNPVEEIFTEEYLTGEDYDSQRKNSEDTLYENKEIDGRDSDLLVDGDLGEYDFYEYKEYEDKPTSPPNEEFGPGVPAETDITETSINGHGAYGEKGQKGEPAVVEPGMLVEGPPGPAGPAGIMGPPGLQGPTGPPGDPGDRGPPGRPGLPGADGLPGPPGTMLMLPFRYGGDGSKGPTISAQEAQAQAILQQARIALRGPPGPMGLTGRPGPVGGPGSSGAKGESGDPGPQGPRGVQGPPGPTGKPGKRGRPGADGGRGMPGEPGAKGDRGFDGLPGLPGDKGHRGERGPQGPPGPPGDDGMRGEDGEIGPRGLPGEAGPRGLLGPRGTPGAPGQPGMAGVDGPPGPKGNMGPQGEPGPPGQQGNPGPQGLPGPQGPIGPPGEKGPQGKPGLAGLPGADGPPGHPGKEGQSGEKGALGPPGPQGPIGYPGPRGVKGADGVRGLKGSKGEKGEDGFPGFKGDMGLKGDRGEVGQIGPRGEDGPEGPKGRAGPTGDPGPSGQAGEKGKLGVPGLPGYPGRQGPKGSTGFPGFPGANGEKGARGVAGKPGPRGQRGPTGPRGSRGARGPTGKPGPKGTSGGDGPPGPPGERGPQGPQGPVGFPGPKGPPGPPGKDGLPGHPGQRGETGFQGKTGPPGPGGVVGPQGPTGETGPIGERGHPGPPGPPGEQGLPGAAGKEGAKGDPGPQGISGKDGPAGLRGFPGERGLPGAQGAPGLKGGEGPQGPPGPVGSPGERGSAGTAGPIGLPGRPGPQGPPGPAGEKGAPGEKGPQGPAGRDGVQGPVGLPGPAGPAGSPGEDGDKGEIGEPGQKGSKGDKGENGPPGPPGLQGPVGAPGIAGGDGEPGPRGQQGMFGQKGDEGARGFPGPPGPIGLQGLPGPPGEKGENGDVGPMGPPGPPGPRGPQGPNGADGPQGPPGSVGSVGGVGEKGEPGEAGNPGPPGEAGVGGPKGERGEKGEAGPPGAAGPPGAKGPPGDDGPKGNPGPVGFPGDPGPPGEPGPAGQDGVGGDKGEDGDPGQPGPPGPSGEAGPPGPPGKRGPPGAAGAEGRQGEKGAKGEAGAEGPPGKTGPVGPQGPAGKPGPEGLRGIPGPVGEQGLPGAAGQDGPPGPMGPPGLPGLKGDPGSKGEKGHPGLIGLIGPPGEQGEKGDRGLPGTQGSPGAKGDGGIPGPAGPLGPPGPPGLPGPQGPKGNKGSTGPAGQKGDSGLPGPPGSPGPPGEVIQPLPILSSKKTRRHTEGMQADADDNILDYSDGMEEIFGSLNSLKQDIEHMKFPMGTQTNPARTCKDLQLSHPDFPDGEYWIDPNQGCSGDSFKVYCNFTSGGETCIYPDKKSEGVRISSWPKEKPGSWFSEFKRGKLLSYLDVEGNSINMVQMTFLKLLTASARQNFTYHCHQSAAWYDVSSGSYDKALRFLGSNDEEMSYDNNPFIKTLYDGCASRKGYEKTVIEINTPKIDQVPIVDVMINDFGDQNQKFGFEVGPVCFLG

SEQ ID NO: 3210 - protein, 1818 aa, Homo Sapiens
MEPWSSRWKTKRWLWDFTVTTLALTFLFQAREVRGAAPVDVLKALDFHNSPEGISKTTGFCTNRKNSKGSDTAYRVSKQAQLSAPTKQLFPGGTFPEDFSILFTVKPKKGIQSFLLSIYNEHGIQQIGVEVGRSPVFLFEDHTGKPAPEDYPLFRTVNIADGKWHRVAISVEKKTVTMIVDCKKKTTKPLDRSERAIVDTNGITVFGTRILDEEVFEGDIQQFLITGDPKAAYDYCEHYSPDCDSSAPKAAQAQEPQIDEKKKSNFKKKMRTVATKSKEKSKKFTPPKSEKFSSKKKKSYQASAKAKLGVKANIVDDFQEYNYGTMESYQTEAPRHVSGTNEPNPVEEIFTEEYLTGEDYDSQRKNSEDTLYENKEIDGRDSDLLVDGDLGEYDFYEYKEYEDKPTSPPNEEFGPGVPAETDITETSINGHGAYGEKGQKGEPAVVEPGMLVEGPPGPAGPAGIMGPPGLQGPTGPPGDPGDRGPPGRPGLPGADGLPGPPGTMLMLPFRYGGDGSKGPTISAQEAQAQAILQQARIALRGPPGPMGLTGRPGPVGGPGSSGAKGESGDPGPQGPRGVQGPPGPTGKPGKRGRPGADGGRGMPGEPGAKGDRGFDGLPGLPGDKGHRGERGPQGPPGPPGDDGMRGEDGEIGPRGLPGEAGPRGLLGPRGTPGAPGQPGMAGVDGPPGPKGNMGPQGEPGPPGQQGNPGPQGLPGPQGPIGPPGEKGPQGKPGLAGLPGADGPPGHPGKEGQSGEKGALGPPGPQGPIGYPGPRGVKGADGVRGLKGSKGEKGEDGFPGFKGDMGLKGDRGEVGQIGPRGEDGPEGPKGRAGPTGDPGPSGQAGEKGKLGVPGLPGYPGRQGPKGSTGFPGFPGANGEKGARGVAGKPGPRGQRGPTGPRGSRGARGPTGKPGPKGTSGGDGPPGPPGERGPQGPQGPVGFPGPKGPPGPPGKDGLPGHPGQRGETGFQGKTGPPGPGGVVGPQGPTGETGPIGERGHPGPPGPPGEQGLPGAAGKEGAKGDPGPQGISGKDGPAGLRGFPGERGLPGAQGAPGLKGGEGPQGPPGPVGSPGERGSAGTAGPIGLPGRPGPQGPPGPAGEKGAPGEKGPQGPAGRDGVQGPVGLPGPAGPAGSPGEDGDKGEIGEPGQKGSKGDKGENGPPGPPGLQGPVGAPGIAGGDGEPGPRGQQGMFGQKGDEGARGFPGPPGPIGLQGLPGPPGEKGENGDVGPMGPPGPPGPRGPQGPNGADGPQGPPGSVGSVGGVGEKGEPGEAGNPGPPGEAGVGGPKGERGEKGEAGPPGAAGPPGAKGPPGDDGPKGNPGPVGFPGDPGPPGEPGPAGQDGVGGDKGEDGDPGQPGPPGPSGEAGPPGPPGKRGPPGAAGAEGRQGEKGAKGEAGAEGPPGKTGPVGPQGPAGKPGPEGLRGIPGPVGEQGLPGAAGQDGPPGPMGPPGLPGLKGDPGSKGEKGHPGLIGLIGPPGEQGEKGDRGLPGTQGSPGAKGDGGIPGPAGPLGPPGPPGLPGPQGPKGNKGSTGPAGQKGDSGLPGPPGSPGPPGEVIQPLPILSSKKTRRHTEGMQADADDNILDYSDGMEEIFGSLNSLKQDIEHMKFPMGTQTNPARTCKDLQLSHPDFPDGEYWIDPNQGCSGDSFKVYCNFTSGGETCIYPDKKSEGVRISSWPKEKPGSWFSEFKRGKLLSYLDVEGNSINMVQMTFLKLLTASARQNFTYHCHQSAAWYDVSSGSYDKALRFLGSNDEEMSYDNNPFIKTLYDGCASRKGYEKTVIEINTPKIDQVPIVDVMINDFGDQNQKFGFEVGPVCFLG

SEQ ID NO: 3211 - protein, 780 aa, Homo Sapiens
MEPWSSRWKTKRWLWDFTVTTLALTFLFQAREVRGAAPVDVLKALDFHNSPEGISKTTGFCTNRKNSKGSDTAYRVSKQAQLSAPTKQLFPGGTFPEDFSILFTVKPKKGIQSFLLSIYNEHGIQQIGVEVGRSPVFLFEDHTGKPAPEDYPLFRTVNIADGKWHRVAISVEKKTVTMIVDCKKKTTKPLDRSERAIVDTNGITVFGTRILDEEVFEGDIQQFLITGDPKAAYDYCEHYSPDCDSSAPKAAQAQEPQIDEYAPEDIIEYDYEYGEAEYKEAESVTEGPTVTEETIAQTEKKKSNFKKKMRTVATKSKEKSKKFTPPKSEKFSSKKKKSYQASAKAKLGVKANIVDDFQEYNYGTMESYQTEAPRHVSGTNEPNPVEEIFTEEYLTGEDYDSQRKNSEDTLYENKEIDGRDSDLLVDGDLGEYDFYEYKEYEDKPTSPPNEEFGPGVPAETDITETSINGHGAYGEKGQKGEPAVVEPGMLVEGPPGPAGPAGIMGPPGLQGPTGPPGDPGDRGPPGRPGLPGADGLPGPPGTMLMLPFRYGGDGSKGPTISAQEAQAQAILQQARIALRGPPGPMGLTGRPGPVGGPGSSGAKGESGDPGPQGPRGVQGPPGPTGKPGKRGRPGADGGRGMPGEPGAKGDRGFDGLPGLPGDKGHRGERGPQGPPGPPGDDGMRGEDGEIGPRGLPGEAGPRGLLGPRGTPGAPGQPGMAGVDGPPGPKGNMGPQGEPGPPGQQGNPGPQGLPGPQGPIGPPGEKMCCNLSFGILIPLQK

SEQ ID NO: 3212 - protein, 570 aa, Homo Sapiens
MEPWSSRWKTKRWLWDFTVTTLALTFLFQAREVRGAAPVDVLKALDFHNSPEGISKTTGFCTNRKNSKGSDTAYRVSKQAQLSAPTKQLFPGGTFPEDFSILFTVKPKKGIQSFLLSIYNEHGIQQIGVEVGRSPVFLFEDHTGKPAPEDYPLFRTVNIADGKWHRVAISVEKKTVTMIVDCKKKTTKPLDRSERAIVDTNGITVFGTRILDEEVFEGDIQQFLITGDPKAAYDYCEHYSPDCDSSAPKAAQAQEPQIDEKKKSNFKKKMRTVATKSKEKSKKFTPPKSEKFSSKKKKSYQASAKAKLGVKANIVDDFQEYNYGTMESYQTEAPRHVSGTNEPNPVEEIFTEEYLTGEDYDSQRKNSEDTLYENKEIDGRDSDLLVDGDLGEYDFYEYKEYEDKPTSPPNEEFGPGVPAETDITETSINGHGAYGEKGQKGEPAVVEPGMLVEGPPGPAGPAGIMGPPGLQGPTGPPGDPGDRGPPGRPGLPGADGLPGPPGTMLMLPFRYGGDGSKGPTISAQEAQAQAILQQARIALRGPPGPMGLTGRPGPVGGPGSSGAKGESGDP

SEQ ID NO: 3213 - protein, 1690 aa, Homo Sapiens
MEPWSSRWKTKRWLWDFTVTTLALTFLFQAREVRGAAPVDVLKALDFHNSPEGISKTTGFCTNRKNSKGSDTAYRVSKQAQLSAPTKQLFPGGTFPEDFSILFTVKPKKGIQSFLLSIYNEHGIQQIGVEVGRSPVFLFEDHTGKPAPEDYPLFRTVNIADGKWHRVAISVEKKTVTMIVDCKKKTTKPLDRSERAIVDTNGITVFGTRILDEEVFEGDIQQFLITGDPKAAYDYCEHYSPDCDSSAPKAAQAQEPQIDEYAPEDIIEYDYEYGEAEYKEAESVTEGPTVTEETIAQTEINGHGAYGEKGQKGEPAVVEPGMLVEGPPGPAGPAGIMGPPGLQGPTGPPGDPGDRGPPGRPGLPGADGLPGPPGTMLMLPFRYGGDGSKGPTISAQEAQAQAILQQARIALRGPPGPMGLTGRPGPVGGPGSSGAKGESGDPGPQGPRGVQGPPGPTGKPGKRGRPGADGGRGMPGEPGAKGDRGFDGLPGLPGDKGHRGERGPQGPPGPPGDDGMRGEDGEIGPRGLPGEAGPRGLLGPRGTPGAPGQPGMAGVDGPPGPKGNMGPQGEPGPPGQQGNPGPQGLPGPQGPIGPPGEKGPQGKPGLAGLPGADGPPGHPGKEGQSGEKGALGPPGPQGPIGYPGPRGVKGADGVRGLKGSKGEKGEDGFPGFKGDMGLKGDRGEVGQIGPRGEDGPEGPKGRAGPTGDPGPSGQAGEKGKLGVPGLPGYPGRQGPKGSTGFPGFPGANGEKGARGVAGKPGPRGQRGPTGPRGSRGARGPTGKPGPKGTSGGDGPPGPPGERGPQGPQGPVGFPGPKGPPGPPGKDGLPGHPGQRGETGFQGKTGPPGPGGVVGPQGPTGETGPIGERGHPGPPGPPGEQGLPGAAGKEGAKGDPGPQGISGKDGPAGLRGFPGERGLPGAQGAPGLKGGEGPQGPPGPVGSPGERGSAGTAGPIGLPGRPGPQGPPGPAGEKGAPGEKGPQGPAGRDGVQGPVGLPGPAGPAGSPGEDGDKGEIGEPGQKGSKGDKGENGPPGPPGLQGPVGAPGIAGGDGEPGPRGQQGMFGQKGDEGARGFPGPPGPIGLQGLPGPPGEKGENGDVGPMGPPGPPGPRGPQGPNGADGPQGPPGSVGSVGGVGEKGEPGEAGNPGPPGEAGVGGPKGERGEKGEAGPPGAAGPPGAKGPPGDDGPKGNPGPVGFPGDPGPPGEPGPAGQDGVGGDKGEDGDPGQPGPPGPSGEAGPPGPPGKRGPPGAAGAEGRQGEKGAKGEAGAEGPPGKTGPVGPQGPAGKPGPEGLRGIPGPVGEQGLPGAAGQDGPPGPMGPPGLPGLKGDPGSKGEKGHPGLIGLIGPPGEQGEKGDRGLPGTQGSPGAKGDGGIPGPAGPLGPPGPPGLPGPQGPKGNKGSTGPAGQKGDSGLPGPPGSPGPPGEVIQPLPILSSKKTRRHTEGMQADADDNILDYSDGMEEIFGSLNSLKQDIEHMKFPMGTQTNPARTCKDLQLSHPDFPDGEYWIDPNQGCSGDSFKVYCNFTSGGETCIYPDKKSEGVRISSWPKEKPGSWFSEFKRGKLLSYLDVEGNSINMVQMTFLKLLTASARQNFTYHCHQSAAWYDVSSGSYDKALRFLGSNDEEMSYDNNPFIKTLYDGCASRKGYEKTVIEINTPKIDQVPIVDVMINDFGDQNQKFGFEVGPVCFLG

SEQ ID NO: 3214 - protein, 736 aa, Homo Sapiens
MEPWSSRWKTKRWLWDFTVTTLALTFLFQAREVRGAAPVDVLKALDFHNSPEGISKTTGFCTNRKNSKGSDTAYRVSKQAQLSAPTKQLFPGGTFPEDFSILFTVKPKKGIQSFLLSIYNEHGIQQIGVEVGRSPVFLFEDHTGKPAPEDYPLFRTVNIADGKWHRVAISVEKKTVTMIVDCKKKTTKPLDRSERAIVDTNGITVFGTRILDEEVFEGDIQQFLITGDPKAAYDYCEHYSPDCDSSAPKAAQAQEPQIDEYAPEDIIEYDYEYGEAEYKEAESVTEGPTVTEETIAQTEANIVDDFQEYNYGTMESYQTEAPRHVSGTNEPNPVEEIFTEEYLTGEDYDSQRKNSEDTLYENKEIDGRDSDLLVDGDLGEYDFYEYKEYEDKPTSPPNEEFGPGVPAETDITETSINGHGAYGEKGQKGEPAVVEPGMLVEGPPGPAGPAGIMGPPGLQGPTGPPGDPGDRGPPGRPGLPGADGLPGPPGTMLMLPFRYGGDGSKGPTISAQEAQAQAILQQARIALRGPPGPMGLTGRPGPVGGPGSSGAKGESGDPGPQGPRGVQGPPGPTGKPGKRGRPGADGGRGMPGEPGAKGDRGFDGLPGLPGDKGHRGERGPQGPPGPPGDDGMRGEDGEIGPRGLPGEAGPRGLLGPRGTPGAPGQPGMAGVDGPPGPKGNMGPQGEPGPPGQQGNPGPQGLPGPQGPIGPPGEKVSYSVVLVKPGEHVCFSNLRQV

SEQ ID NO: 3215 - protein, 729 aa, Homo Sapiens
MEPWSSRWKTKRWLWDFTVTTLALTFLFQAREVRGAAPVDVLKALDFHNSPEGISKTTGFCTNRKNSKGSDTAYRVSKQAQLSAPTKQLFPGGTFPEDFSILFTVKPKKGIQSFLLSIYNEHGIQQIGVEVGRSPVFLFEDHTGKPAPEDYPLFRTVNIADGKWHRVAISVEKKTVTMIVDCKKKTTKPLDRSERAIVDTNGITVFGTRILDEEVFEGDIQQFLITGDPKAAYDYCEHYSPDCDSSAPKAAQAQEPQIDEYAPEDIIEYDYEYGEAEYKEAESVTEGPTVTEETIAQTEANIVDDFQEYNYGTMESYQTEAPRHVSGTNEPNPVEEIFTEEYLTGEDYDSQRKNSEDTLYENKEIDGRDSDLLVDGDLGEYDFYEYKEYEDKPTSPPNEEFGPGVPAETDITETSINGHGAYGEKGQKGEPAVVEPGMLVEGPPGPAGPAGIMGPPGLQGPTGPPGDPGDRGPPGRPGLPGADGLPGPPGTMLMLPFRYGGDGSKGPTISAQEAQAQAILQQARIALRGPPGPMGLTGRPGPVGGPGSSGAKGESGDPGPQGPRGVQGPPGPTGKPGKRGRPGADGGRGMPGEPGAKGDRGFDGLPGLPGDKGHRGERGPQGPPGPPGDDGMRGEDGEIGPRGLPGEAGPRGLLGPRGTPGAPGQPGMAGVDGPPGPKGNMGPQGEPGPPGQQGNPGPQGLPGPQGPIGPPGEKMCCNLSFGILIPLQK

SEQ ID NO: 3216 - protein, 756 aa, Homo Sapiens
MEPWSSRWKTKRWLWDFTVTTLALTFLFQAREVRGAAPVDVLKALDFHNSPEGISKTTGFCTNRKNSKGSDTAYRVSKQAQLSAPTKQLFPGGTFPEDFSILFTVKPKKGIQSFLLSIYNEHGIQQIGVEVGRSPVFLFEDHTGKPAPEDYPLFRTVNIADGKWHRVAISVEKKTVTMIVDCKKKTTKPLDRSERAIVDTNGITVFGTRILDEEVFEGDIQQFLITGDPKAAYDYCEHYSPDCDSSAPKAAQAQEPQIDEYAPEDIIEYDYEYGEAEYKEAESVTEGPTVTEETIAQTEANIVDDFQEYNYGTMESYQTEAPRHVSGTNEPNPVEEIFTEEYLTGEDYDSQRKNSEDTLYENKEIDGRDSDLLVDGDLGEYDFYEYKEYEDKPTSPPNEEFGPGVPAETDITETSINGHGAYGEKGQKGEPAVVEPGMLVEGPPGPAGPAGIMGPPGLQGPTGPPGDPGDRGPPGRPGLPGADGLPGPPGTMLMLPFRYGGDGSKGPTISAQEAQAQAILQQARIALRGPPGPMGLTGRPGPVGGPGSSGAKGESGDPGPQGPRGVQGPPGPTGKPGKRGRPGADGGRGMPGEPGAKGDRGFDGLPGLPGDKGHRGERGPQGPPGPPGDDGMRGEDGEIGPRGLPGEAGPRGLLGPRGTPGAPGQPGMAGVDGPPGPKGNMGPQGEPGPPGQQGNPGPQGLPGPQGPIGPPGEKVSFSFSLFYKKVIKFACDKRFVGRHDERKVVKLSLPLYLIYE

SEQ ID NO: 3217 - protein, 694 aa, Homo Sapiens
  misc_feature (1)..(1): Xaa can be any naturally occurring amino acid
XPKAAYDYCEHYSPDCDSSAPKAAQAQEPQIDEYAPEDIIEYDYEYGEAEYKEAESVTEGPTVTEETIAQTEANIVDDFQEYNYGTMESYQTEAPRHVSGTNEPNPVEEIFTEEYLTGEDYDSQRKNSEDTLYENKEIDGRDSDLLVDGDLGEYDFYEYKEYEDKPTSPPNEEFGPGVPAETDITETSINGHGAYGEKGQKGEPAVVEPGMLVEGPPGPAGPAGIMGPPGLQGPTGPPGDPGDRGPPGRPGLPGADGLPGPPGTMLMLPFRYGGDGSKGPTISAQEAQAQAILQQARIALRGPPGPMGLTGRPGPVGGPGSSGAKGESGDPGPQGPRGVQGPPGPTGKPGKRGRPGADGGRGMPGEPGAKGDRGFDGLPGLPGDKGHRGERGPQGPPGPPGDDGMRGEDGEIGPRGLPGEAGPRGLLGPRGTPGAPGQPGMAGVDGPPGPKGNMGPQGEPGPPGQQGNPGPQGLPGPQGPIGPPGEKGPQGKPGLAGLPGADGPPGHPGKEGQSGEKGALGPPGPQGPIGYPGPRGVKGADGVRGLKGSKGEKGEDGFPGFKGDMGLKGDRGEVGQIGPRGEDGPEGPKGRAGPTGDPGPSGQAGEKGKLGVPGLPGYPGRQGPKDFRCHWFHWIPWVSRCQWRERCTGSSWQTRPSGSAWSNGSSRFKRCKRSHWETWAKGHFRWRWPSWPSR

SEQ ID NO: 3218 - protein, 200 aa, Homo Sapiens
YRVSKQAQLSAPTKQLFPGGTFPEDFSILFTVKPKKGIQSFLLSIYNEHGIQQIGVEVGRSPVFLFEDHTGKPAPEDYPLFRTVNIADGKWHRVAISVEKKTVTMIVDCKKKTTKPLDRSERAIVDTNGITVFGTRILDEEVFEGDIQQFLITGDPKAAYDYCEHYSPDCDSSAPKAAQAQEPQIDEVRSTRPEKVFVFQ

SEQ ID NO: 3219 - protein, 1736 aa, Homo Sapiens
MERCSRCHRLLLLLPLVLGLSAAPGWAGAPPVDVLRALRFPSLPDGVRRAKGICPADVAYRVARPAQLSAPTRQLFPGGFPKDFSLLTVVRTRPGLQAPLLTLYSAQGVRQLGLELGRPVRFLYEDQTGRPQPPSQPVFRGLSLADGKWHRVAVAVKGQSVTLIVDCKKRVTRPLPRSARPVLDTHGVIIFGARILDEEVFEGDVQELAIVPGVQAAYESCEQKELECEGGQRERPQNQQPHRAQRSPQQQPSRLHRPQNQEPQSQPTESLYYDYEPPYYDVMTTGTTPDYQDPTPGEEEEILESSLLPPLEEEQTDLQVPPTADRFQAEEYGEGGTDPPEGPYDYTYGYGDDYREETELGPALSAETAHSGAAAHGPRGLKGEKGEPAVLEPGMLVEGPPGPEGPAGLIGPPGIQGNPGPVGDPGERGPPGRAGLPGSDGAPGPPGTSLMLPFRFGSGGGDKGPVVAAQEAQAQAILQQARLALRGPPGPMGYTGRPGPLGQPGSPGLKGESGDLGPQGPRGPQGLTGPPGKAGRRGRAGADGARGMPGDPGVKGDRGFDGLPGLPGEKGHRGDTGAQGLPGPPGEDGERGDDGEIGPRGLPGESGPRGLLGPKGPPGIPGPPGVRGMDGPQGPKGSLGPQGEPGPPGQQGTPGTQGLPGPQGAIGPHGEKGPQGKPGLPGMPGSDGPPGHPGKEGPPGTKGNQGPSGPQGPLGYPGPRGVKGVDGIRGLKGHKGEKGEDGFPGFKGDIGVKGDRGEVGVPGSRGEDGPEGPKGRTGPTGDPGPPGLMGEKGKLGVPGLPGYPGRQGPKGSLGFPGFPGASGEKGARGLSGKSGPRGERGPTGPRGQRGPRGATGKSGAKGTSGGDGPHGPPGERGLPGPQGPNGFPGPKGPPGPPGKDGLPGHPGQRGEVGFQGKTGPPGPPGVVGPQGAAGETGPMGERGHPGPPGPPGEQGLPGTAGKEGTKGDPGPPGAPGKDGPAGLRGFPGERGLPGTAGGPGLKGNEGPSGPPGPAGSPGERGAAGSGGPIGPPGRPGPQGPPGAAGEKGVPGEKGPIGPTGRDGVQGPVGLPGPAGPPGVAGEDGDKGEVGDPGQKGTKGNKGEHGPPGPPGPIGPVGQPGAAGADGEPGARGPQGHFGAKGDEGTRGFNGPPGPIGLQGLPGPSGEKGETGDVGPMGPPGPPGPRGPAGPNGADGPQGPPGGVGNLGPPGEKGEPGESGSPGIQGEPGVKGPRGERGEKGESGQPGEPGPPGPKGPTGDDGPKGNPGPVGFPGDPGPPGEGGPRGQDGAKGDRGEDGEPGQPGSPGPTGENGPPGPLGKRGPAGSPGSEGRQGGKGAKGDPGAIGAPGKTGPVGPAGPAGKPGPDGLRGLPGSVGQQGRPGATGQAGPPGPVGPPGLPGLRGDAGAKGEKGHPGLIGLIGPPGEQGEKGDRGLPGPQGSPGQKGEMGIPGASGPIGPGGPPGLPGPAGPKGAKGATGPGGPKGEKGVQGPPGHPGPPGEVIQPLPIQMPKKTRRSVDGSRLMQEDEAIPTGGAPGSPGGLEEIFGSLDSLREEIEQMRRPTGTQDSPARTCQDLKLCHPELPDGEYWVDPNQGCARDAFRVFCNFTAGGETCVTPRDDVTQFSYVDSEGSPVGVVQLTFLRLLSVSAHQDVSYPCSGAARDGPLRLRGANEDELSPETSPYVKEFRDGCQTQQGRTVLEVRTPVLEQLPVLDASFSDLGAPPRRGGVLLGPVCFMG

SEQ ID NO: 3220 - protein, 1629 aa, Homo Sapiens
MERCSRCHRLLLLLPLVLGLSAAPGWAGAPPVDVLRALRFPSLPDGVRRAKGICPADVAYRVARPAQLSAPTRQLFPGGFPKDFSLLTVVRTRPGLQAPLLTLYSAQGVRQLGLELGRPVRFLYEDQTGRPQPPSQPVFRGLSLADGKWHRVAVAVKGQSVTLIVDCKKRVTRPLPRSARPVLDTHGVIIFGARILDEEVFEGDVQELAIVPGVQAAYESCEQKELECEGGQRERPQNQQPHRAQRSPQQQPSRLHRPQNQEPQSQAAHGPRGLKGEKGEPAVLEPGMLVEGPPGPEGPAGLIGPPGIQGNPGPVGDPGERGPPGRAGLPGSDGAPGPPGTSLMLPFRFGSGGGDKGPVVAAQEAQAQAILQQARLALRGPPGPMGYTGRPGPLGQPGSPGLKGESGDLGPQGPRGPQGLTGPPGKAGRRGRAGADGARGMPGDPGVKGDRGFDGLPGLPGEKGHRGDTGAQGLPGPPGEDGERGDDGEIGPRGLPGESGPRGLLGPKGPPGIPGPPGVRGMDGPQGPKGSLGPQGEPGPPGQQGTPGTQGLPGPQGAIGPHGEKGPQGKPGLPGMPGSDGPPGHPGKEGPPGTKGNQGPSGPQGPLGYPGPRGVKGVDGIRGLKGHKGEKGEDGFPGFKGDIGVKGDRGEVGVPGSRGEDGPEGPKGRTGPTGDPGPPGLMGEKGKLGVPGLPGYPGRQGPKGSLGFPGFPGASGEKGARGLSGKSGPRGERGPTGPRGQRGPRGATGKSGAKGTSGGDGPHGPPGERGLPGPQGPNGFPGPKGPPGPPGKDGLPGHPGQRGEVGFQGKTGPPGPPGVVGPQGAAGETGPMGERGHPGPPGPPGEQGLPGTAGKEGTKGDPGPPGAPGKDGPAGLRGFPGERGLPGTAGGPGLKGNEGPSGPPGPAGSPGERGAAGSGGPIGPPGRPGPQGPPGAAGEKGVPGEKGPIGPTGRDGVQGPVGLPGPAGPPGVAGEDGDKGEVGDPGQKGTKGNKGEHGPPGPPGPIGPVGQPGAAGADGEPGARGPQGHFGAKGDEGTRGFNGPPGPIGLQGLPGPSGEKGETGDVGPMGPPGPPGPRGPAGPNGADGPQGPPGGVGNLGPPGEKGEPGESGSPGIQGEPGVKGPRGERGEKGESGQPGEPGPPGPKGPTGDDGPKGNPGPVGFPGDPGPPGEGGPRGQDGAKGDRGEDGEPGQPGSPGPTGENGPPGPLGKRGPAGSPGSEGRQGGKGAKGDPGAIGAPGKTGPVGPAGPAGKPGPDGLRGLPGSVGQQGRPGATGQAGPPGPVGPPGLPGLRGDAGAKGEKGHPGLIGLIGPPGEQGEKGDRGLPGPQGSPGQKGEMGIPGASGPIGPGGPPGLPGPAGPKGAKGATGPGGPKGEKGVQGPPGHPGPPGEVIQPLPIQMPKKTRRSVDGSRLMQEDEAIPTGGAPGSPGGLEEIFGSLDSLREEIEQMRRPTGTQDSPARTCQDLKLCHPELPDGEYWVDPNQGCARDAFRVFCNFTAGGETCVTPRDDVTQFSYVDSEGSPVGVVQLTFLRLLSVSAHQDVSYPCSGAARDGPLRLRGANEDELSPETSPYVKEFRDGCQTQQGRTVLEVRTPVLEQLPVLDASFSDLGAPPRRGGVLLGPVCFMG

SEQ ID NO: 3221 - protein, 290 aa, Homo Sapiens
MERCSRCHRLLLLLPLVLGLSAAPGWAGAPPVDVLRALRFPSLPDGVRRAKGICPADVAYRVARPAQLSAPTRQLFPGGFPKDFSLLTVVRTRPGLQAPLLTLYSAQGVRQLGLELGRPVRFLYEDQTGRPQPPSQPVFRGLSLADGKWHRVAVAVKGQSVTLIVDCKKRVTRPLPRSARPVLDTHGVIIFGARILDEEVFEGDVQELAIVPGVQAAYESCEQKELECEGGQRERPQNQQPHRAQRSPQQQPSRLHRPQNQEPQSQVRELGEPPSAAHPREGRHPGISPP

SEQ ID NO: 3222 - protein, 1650 aa, Homo Sapiens
MERCSRCHRLLLLLPLVLGLSAAPGWAGAPPVDVLRALRFPSLPDGVRRAKGICPADVAYRVARPAQLSAPTRQLFPGGFPKDFSLLTVVRTRPGLQAPLLTLYSAQGVRQLGLELGRPVRFLYEDQTGRPQPPSQPVFRGLSLADGKWHRVAVAVKGQSVTLIVDCKKRVTRPLPRSARPVLDTHGVIIFGARILDEEVFEGDVQELAIVPGVQAAYESCEQKELECEGGQRERPQNQQPHRAQRSPQQQPSRLHRPQNQEPQSQDPTPGEEEEILESSLLPPLEEAAHGPRGLKGEKGEPAVLEPGMLVEGPPGPEGPAGLIGPPGIQGNPGPVGDPGERGPPGRAGLPGSDGAPGPPGTSLMLPFRFGSGGGDKGPVVAAQEAQAQAILQQARLALRGPPGPMGYTGRPGPLGQPGSPGLKGESGDLGPQGPRGPQGLTGPPGKAGRRGRAGADGARGMPGDPGVKGDRGFDGLPGLPGEKGHRGDTGAQGLPGPPGEDGERGDDGEIGPRGLPGESGPRGLLGPKGPPGIPGPPGVRGMDGPQGPKGSLGPQGEPGPPGQQGTPGTQGLPGPQGAIGPHGEKGPQGKPGLPGMPGSDGPPGHPGKEGPPGTKGNQGPSGPQGPLGYPGPRGVKGVDGIRGLKGHKGEKGEDGFPGFKGDIGVKGDRGEVGVPGSRGEDGPEGPKGRTGPTGDPGPPGLMGEKGKLGVPGLPGYPGRQGPKGSLGFPGFPGASGEKGARGLSGKSGPRGERGPTGPRGQRGPRGATGKSGAKGTSGGDGPHGPPGERGLPGPQGPNGFPGPKGPPGPPGKDGLPGHPGQRGEVGFQGKTGPPGPPGVVGPQGAAGETGPMGERGHPGPPGPPGEQGLPGTAGKEGTKGDPGPPGAPGKDGPAGLRGFPGERGLPGTAGGPGLKGNEGPSGPPGPAGSPGERGAAGSGGPIGPPGRPGPQGPPGAAGEKGVPGEKGPIGPTGRDGVQGPVGLPGPAGPPGVAGEDGDKGEVGDPGQKGTKGNKGEHGPPGPPGPIGPVGQPGAAGADGEPGARGPQGHFGAKGDEGTRGFNGPPGPIGLQGLPGPSGEKGETGDVGPMGPPGPPGPRGPAGPNGADGPQGPPGGVGNLGPPGEKGEPGESGSPGIQGEPGVKGPRGERGEKGESGQPGEPGPPGPKGPTGDDGPKGNPGPVGFPGDPGPPGEGGPRGQDGAKGDRGEDGEPGQPGSPGPTGENGPPGPLGKRGPAGSPGSEGRQGGKGAKGDPGAIGAPGKTGPVGPAGPAGKPGPDGLRGLPGSVGQQGRPGATGQAGPPGPVGPPGLPGLRGDAGAKGEKGHPGLIGLIGPPGEQGEKGDRGLPGPQGSPGQKGEMGIPGASGPIGPGGPPGLPGPAGPKGAKGATGPGGPKGEKGVQGPPGHPGPPGEVIQPLPIQMPKKTRRSVDGSRLMQEDEAIPTGGAPGSPGGLEEIFGSLDSLREEIEQMRRPTGTQDSPARTCQDLKLCHPELPDGEYWVDPNQGCARDAFRVFCNFTAGGETCVTPRDDVTQFSYVDSEGSPVGVVQLTFLRLLSVSAHQDVSYPCSGAARDGPLRLRGANEDELSPETSPYVKEFRDGCQTQQGRTVLEVRTPVLEQLPVLDASFSDLGAPPRRGGVLLGPVCFMG

SEQ ID NO: 3223 - protein, 624 aa, Homo Sapiens
MERCSRCHRLLLLLPLVLGLSAAPGWAGAPPVDVLRALRFPSLPDGVRRAKGICPADVAYRVARPAQLSAPTRQLFPGGFPKDFSLLTVVRTRPGLQAPLLTLYSAQGVRQLGLELGRPVRFLYEDQTGRPQPPSQPVFRGLSLADGKWHRVAVAVKGQSVTLIVDCKKRVTRPLPRSARPVLDTHGVIIFGARILDEEVFEGDVQELAIVPGVQAAYESCEQKELECEGGQRERPQNQQPHRAQRSPQQQPSRLHRPQNQEPQSQPTESLYYDYEPPYYDVMTTGTTPDYQDPTPGEEEEILESSLLPPLEEEQTDLQVPPTADRFQAEEYGEGGTDPPEGPYDYTYGYGDDYREETELGPALSAETAHSGAAAHGPRGLKGEKGEPAVLEPGMLVEGPPGPEGPAGLIGPPGIQGNPGPVGDPGERGPPGRAGLPGSDGAPGPPGTSLMLPFRFGSGGGDKGPVVAAQEAQAQAILQQARLALRGPPGPMGYTGRPGPLGQPGSPGLKGESGDLGPQGPRGPQGLTGPPGKAGRRGRAGADGARGMPGDPGVKGDRGFDGLPGLPGEKGHRGDTGAQGLPGPPGEDGERGDDGEIGPRGLPGESGPRGLLGPKGPPGIPGPP

SEQ ID NO: 3224 - protein, 1874 aa, Homo Sapiens
MECLTRAEADIVLLVDGSWSIGRANFRTVRSFISRIVEVFDIGPKRVQIALAQYSGDPRTEWQLNAHRDKKSLLQAVANLPYKGGNTLTGMALNFIRQQNFRTQAGMRPRARKIGVLITDGKSQDDVEAPSKKLKDEGVELFAIGIKNADEVELKMIATDPDDTHAYNVADFESLSRIVDDLTINLCNSVKGPGDLEAPSNLVISERTHRSFRVSWTPPSDSVDRYKVEYYPVSGGKRQEFYVSRMETSTVLKDLKPETEYVVNVYSVVEDEYSEPLKGTEKTLPVPVVSLNIYDVGPTTMHVQWQPVGGATGYILSYKPVKDTEPTRPKEVRLGPTVNDMQLTDLVPNTEYAVTVQAVLHDLTSEPVTVREVTLPLPRPQDLKLRDVTHSTMNVFWEPVPGKVRKYIVRYKTPEEDVKEVEVDRSETSTSLKDLFSQTLYTVSVSAVHDEGESPPVTAQETTRPVPAPTNLKITEVTSEGFRGTWDHGASDVSLYRITWAPFGSSDKMETILNGDENTLVFENLNPNTIYEVSITAIYPDESESDDLIGSERTLPILTTQAPKSGPRNLQVYNATSNSLTVKWDPASGRVQKYRITYQPSTGEGNEQTTTIGGRQNSVVLQKLKPDTPYTITVSSLYPDGEGGRMTGRGKTKPLNTVRNLRVYDPSTSTLNVRWDHAEGNPRQYKLFYAPAAGGPEELVPIPGNTNYAILRNLQPDTSYTVTVVPVYTEGDGGRTSDTGRTLMRGLARNVQVYNPTPNSLDVRWDPAPGPVLQYRVVYSPVDGTRPSESIVVPGNTRMVHLERLIPDTLYSVNLVALYSDGEGNPSPAQGRTLPRSGPRNLRVFGETTNSLSVAWDHADGPVQQYRIIYSPTVGDPIDEYTTVPGRRNNVILQPLQPDTPYKITVIAVYEDGDGGHLTGNGRTVGLLPPQNIHISDEWYTRFRVSWDPSPSPVLGYKIVYKPVGSNEPMEAFVGEMTSYTLHNLNPSTTYDVNVYAQYDSGLSVPLTDQGTTLYLNVTDLKTYQIGWDTFCVKWSPHRAATSYRLKLSPADGTRGQEITVRGSETSHCFTGLSPDTDYGVTVFVQTPNLEGPGVSVKEHTTVKPTEAPTEPPTPPPPPTIPPARDVCKGAKADIVFLTDASWSIGDDNFNKVVKFIFNTVGGFDEISPAGIQVSFVQYSDEVKSEFKLNTYNDKALALGALQNIRYRGGNTRTGKALTFIKEKVLTWESGMRKNVPKVLVVVTDGRSQDEVKKAALVIQHSRFSVFVVGVADVDYNELANIASKPSERHVFIVDDFESFEKIEDNLITFVCETATSSCPLIYLDGYTSPGFKMLEAYNLTEKNFASVQGVSLESGSFPSYSAYRIQKNAFVNQPTADLHPNGLPPSYTIILLFRLLPETPSDPFAIWQITDRDYKPQVGVIADPSSKTLSFFNKDTRGEVQTVTFDTEEVKTLFYGSFHKVHIVVTSKSVKIYIDCYEIIEKDIKEAGNITTDGYEILGKLLKGERKSAAFQIQSFDIVCSPVWTSRDRCCDIPSRRDEGKCPAFPNSCTCTQDSVGPPGPPGPAGGPGAKGPRGERGISGAIGPPGPRGDIGPPGPQGPPGPQGPNGLSIPGEQGRQGMKGDAGEPGLPGRTGTPGLPGPPGPMGPPGDRGFTGKDGAMGPRGPPGPPGSPGSPGVTGPSGKPGKPGDHGRPGPSGLKGEKGDRGDIASQNMMRAVARQVCEQLISGQMNRFNQMLNQIPNDYQSSRNQPGPPGPPGPPGSAGARGEPGPGGRPGFPGTPGMQGPPGERGLPGEKGERGTGSSGPRGLPGPPGPQGESRTGPPGSTGSRGPPGPPGRPGNSGIRGPPGPPGYCDSSQCASIPYNGQGYPGSG

SEQ ID NO: 3225 - protein, 1899 aa, Homo Sapiens
MRSRLPPALAALGAALLLSSIEAEGMECLTRAEADIVLLVDGSWSIGRANFRTVRSFISRIVEVFDIGPKRVQIALAQYSGDPRTEWQLNAHRDKKSLLQAVANLPYKGGNTLTGMALNFIRQQNFRTQAGMRPRARKIGVLITDGKSQDDVEAPSKKLKDEGVELFAIGIKNADEVELKMIATDPDDTHAYNVADFESLSRIVDDLTINLCNSVKGPGDLEAPSNLVISERTHRSFRVSWTPPSDSVDRYKVEYYPVSGGKRQEFYVSRMETSTVLKDLKPETEYVVNVYSVVEDEYSEPLKGTEKTLPVPVVSLNIYDVGPTTMHVQWQPVGGATGYILSYKPVKDTEPTRPKEVRLGPTVNDMQLTDLVPNTEYAVTVQAVLHDLTSEPVTVREVTLPLPRPQDLKLRDVTHSTMNVFWEPVPGKVRKYIVRYKTPEEDVKEVEVDRSETSTSLKDLFSQTLYTVSVSAVHDEGESPPVTAQETTRPVPAPTNLKITEVTSEGFRGTWDHGASDVSLYRITWAPFGSSDKMETILNGDENTLVFENLNPNTIYEVSITAIYPDESESDDLIGSERTLPILTTQAPKSGPRNLQVYNATSNSLTVKWDPASGRVQKYRITYQPSTGEGNEQTTTIGGRQNSVVLQKLKPDTPYTITVSSLYPDGEGGRMTGRGKTKPLNTVRNLRVYDPSTSTLNVRWDHAEGNPRQYKLFYAPAAGGPEELVPIPGNTNYAILRNLQPDTSYTVTVVPVYTEGDGGRTSDTGRTLMRGLARNVQVYNPTPNSLDVRWDPAPGPVLQYRVVYSPVDGTRPSESIVVPGNTRMVHLERLIPDTLYSVNLVALYSDGEGNPSPAQGRTLPRSGPRNLRVFGETTNSLSVAWDHADGPVQQYRIIYSPTVGDPIDEYTTVPGRRNNVILQPLQPDTPYKITVIAVYEDGDGGHLTGNGRTVGLLPPQNIHISDEWYTRFRVSWDPSPSPVLGYKIVYKPVGSNEPMEAFVGEMTSYTLHNLNPSTTYDVNVYAQYDSGLSVPLTDQGTTLYLNVTDLKTYQIGWDTFCVKWSPHRAATSYRLKLSPADGTRGQEITVRGSETSHCFTGLSPDTDYGVTVFVQTPNLEGPGVSVKEHTTVKPTEAPTEPPTPPPPPTIPPARDVCKGAKADIVFLTDASWSIGDDNFNKVVKFIFNTVGGFDEISPAGIQVSFVQYSDEVKSEFKLNTYNDKALALGALQNIRYRGGNTRTGKALTFIKEKVLTWESGMRKNVPKVLVVVTDGRSQDEVKKAALVIQQSGFSVFVVGVADVDYNELANIASKPSERHVFIVDDFESFEKIEDNLITFVCETATSSCPLIYLDGYTSPGFKMLEAYNLTEKNFASVQGVSLESGSFPSYSAYRIQKNAFVNQPTADLHPNGLPPSYTIILLFRLLPETPSDPFAIWQITDRDYKPQVGVIADPSSKTLSFFNKDTRGEVQTVTFDTEEVKTLFYGSFHKVHIVVTSKSVKIYIDCYEIIEKDIKEAGNITTDGYEILGKLLKGERKSAAFQIQSFDIVCSPVWTSRDRCCDIPSRRDEGKCPAFPNSCTCTQDSVGPPGPPGPAGGPGAKGPRGERGISGAIGPPGPRGDIGPPGPQGPPGPQGPNGLSIPGEQGRQGMKGDAGEPGLPGRTGTPGLPGPPGPMGPPGDRGFTGKDGAMGPRGPPGPPGSPGSPGVTGPSGKPGKPGDHGRPGPSGLKGEKGDRGDIASQNMMRAVARQVCEQLISGQMNRFNQMLNQIPNDYQSSRNQPGPPGPPGPPGSAGARGEPGPGGRPGFPGTPGMQGPPGERGLPGEKGERGTGSSGPRGLPGPPGPQGESRTGPPGSTGSRGPPGPPGRPGNSGIRGPPGPPGYCDSSQCASIPYNGQGYPGSG

SEQ ID NO: 3226 - protein, 3063 aa, Homo Sapiens
MRSRLPPALAALGAALLLSSIEAEVDPPSDLNFKIIDENTVHMSWAKPVDPIVGYRITVDPTTDGPTKEFTLSASTTETLLSELVPETEYVVTITSYDEVEESVPVIGQLTIQTGSSTKPVEKKPGKTEIQKCSVSAWTDLVFLVDGSWSVGRNNFKYILDFIAALVSAFDIGEEKTRVGVVQYSSDTRTEFNLNQYYQRDELLAAIKKIPYKGGNTMTGDAIDYLVKNTFTESAGARVGFPKVAIIITDGKSQDEVEIPARELRNVGVEVFSLGIKAADAKELKQIASTPSLNHVFNVANFDAIVDIQNEIISQVCSGVDEQLGELVSGEEVVEPPSNLIAMEVSSKYVKLNWNPSPSPVTGYKVILTPMTAGSRQHALSVGPQTTTLSVRDLSADTEYQISVSAMKGMTSSEPISIMEKTQPMKVQVECSRGVDIKADIVFLVDGSYSIGIANFVKVRAFLEVLVKSFEISPNRVQISLVQYSRDPHTEFTLKKFTKVEDIIEAINTFPYRGGSTNTGKAMTYVREKIFVPSKGSRSNVPKVMILITDGKSSDAFRDPAIKLRNSDVEIFAVGVKDAVRSELEAIASPPAETHVFTVEDFDAFQRISFELTQSICLRIEQELAAIKKKAYVPPKDLSFSEVTSYGFKTNWSPAGENVFSYHITYKEAAGDDEVTVVEPASSTSVVLSSLKPETLYLVNVTAEYEDGFSIPLAGEETTEEVKGAPRNLKVTDETTDSFKITWTQAPGRVLRYRIIYRPVAGGESREVTTPPNQRRRTLENLIPDTKYEVSVIPEYFSGPGTPLTGNAATEEVRGNPRDLRVSDPTTSTMKLSWSGAPGKVKQYLVTYTPVAGGETQEVTVRGDTTNTVLQGLKEGTQYALSVTALYASGAGDALFGEGTTLEERGSPQDLVTKDITDTSIGAYWTSAPGMVRGYRVSWKSLYDDVDTGEKNLPEDAIHTMIENLQPETKYRISVFATYSSGEGEPLTGDATTELSQDSKTLKVDEETENTMRVTWKPAPGKVVNYRVVYRPHGRGKQMVAKVPPTVTSTVLKRLQPQTTYDITVLPIYKMGEGKLRQGSGTTASRFKSPRNLKTSDPTMSSFRVTWEPAPGEVKGYKVTFHPTGDDRRLGELVVGPYDNTVVLEELRAGTTYKVNVFGMFDGGESSPLVGQEMTTLSDTTVMPILSSGMECLTRAEADIVLLVDGSWSIGRANFRTVRSFISRIVEVFDIGPKRVQIALAQYSGDPRTEWQLNAHRDKKSLLQAVANLPYKGGNTLTGMALNFIRQQNFRTQAGMRPRARKIGVLITDGKSQDDVEAPSKKLKDEGVELFAIGIKNADEVELKMIATDPDDTHAYNVADFESLSRIVDDLTINLCNSVKGPGDLEAPSNLVISERTHRSFRVSWTPPSDSVDRYKVEYYPVSGGKRQEFYVSRMETSTVLKDLKPETEYVVNVYSVVEDEYSEPLKGTEKTLPVPVVSLNIYDVGPTTMHVQWQPVGGATGYILSYKPVKDTEPTRPKEVRLGPTVNDMQLTDLVPNTEYAVTVQAVLHDLTSEPVTVREVTLPLPRPQDLKLRDVTHSTMNVFWEPVPGKVRKYIVRYKTPEEDVKEVEVDRSETSTSLKDLFSQTLYTVSVSAVHDEGESPPVTAQETTRPVPAPTNLKITEVTSEGFRGTWDHGASDVSLYRITWAPFGSSDKMETILNGDENTLVFENLNPNTIYEVSITAIYPDESESDDLIGSERTLPILTTQAPKSGPRNLQVYNATSNSLTVKWDPASGRVQKYRITYQPSTGEGNEQTTTIGGRQNSVVLQKLKPDTPYTITVSSLYPDGEGGRMTGRGKTKPLNTVRNLRVYDPSTSTLNVRWDHAEGNPRQYKLFYAPAAGGPEELVPIPGNTNYAILRNLQPDTSYTVTVVPVYTEGDGGRTSDTGRTLMRGLARNVQVYNPTPNSLDVRWDPAPGPVLQYRVVYSPVDGTRPSESIVVPGNTRMVHLERLIPDTLYSVNLVALYSDGEGNPSPAQGRTLPRSGPRNLRVFGETTNSLSVAWDHADGPVQQYRIIYSPTVGDPIDEYTTVPGRRNNVILQPLQPDTPYKITVIAVYEDGDGGHLTGNGRTVGLLPPQNIHISDEWYTRFRVSWDPSPSPVLGYKIVYKPVGSNEPMEAFVGEMTSYTLHNLNPSTTYDVNVYAQYDSGLSVPLTDQGTTLYLNVTDLKTYQIGWDTFCVKWSPHRAATSYRLKLSPADGTRGQEITVRGSETSHCFTGLSPDTDYGVTVFVQTPNLEGPGVSVKEHTTVKPTEAPTEPPTPPPPPTIPPARDVCKGAKADIVFLTDASWSIGDDNFNKVVKFIFNTVGGFDEISPAGIQVSFVQYSDEVKSEFKLNTYNDKALALGALQNIRYRGGNTRTGKALTFIKEKVLTWESGMRKNVPKVLVVVTDGRSQDEVKKAALVIQQSGFSVFVVGVADVDYNELANIASKPSERHVFIVDDFESFEKIEDNLITFVCETATSSCPLIYLDGYTSPGFKMLEAYNLTEKNFASVQGVSLESGSFPSYSAYRIQKNAFVNQPTADLHPNGLPPSYTIILLFRLLPETPSDPFAIWQITDRDYKPQVGVIADPSSKTLSFFNKDTRGEVQTVTFDTEEVKTLFYGSFHKVHIVVTSKSVKIYIDCYEIIEKDIKEAGNITTDGYEILGKLLKGERKSAAFQIQSFDIVCSPVWTSRDRCCDIPSRRDEGKCPAFPNSCTCTQDSVGPPGPPGPAGGPGAKGPRGERGISGAIGPPGPRGDIGPPGPQGPPGPQGPNGLSIPGEQGRQGMKGDAGEPGLPGRTGTPGLPGPPGPMGPPGDRGFTGKDGAMGPRGPPGPPGSPGSPGVTGPSGKPGKPGDHGRPGPSGLKGEKGDRGDIASQNMMRAVARQVCEQLISGQMNRFNQMLNQIPNDYQSSRNQPGPPGPPGPPGSAGARGEPGPGGRPGFPGTPGMQGPPGERGLPGEKGERGTGSSGPRGLPGPPGPQGESRTGPPGSTGSRGPPGPPGRPGNSGIRGPPGPPGYCDSSQCASIPYNGQGYPGSG

SEQ ID NO: 3227 - protein, 3062 aa, Homo Sapiens
MRSRLPPALAALGAALLLSSIEAEVDPPSDLNFKIIDENTVHMSWAKPVDPIVGYRITVDPTTDGPTKEFTLSASTTETLLSELVPETEYVVTITSYDEVEESVPVIGQLTIQTGSSTKPVEKKPGKTEIQKCSVSAWTDLVFLVDGSWSVGRNNFKYILDFIAALVSAFDIGEEKTRVGVVQYSSDTRTEFNLNQYYQRDELLAAIKKIPYKGGNTMTGDAIDYLVKNTFTESAGARVGFPKVAIIITDGKSQDEVEIPARELRNVGVEVFSLGIKAADAKELKQIASTPSLNHVFNVANFDAIVDIQNEIISQVCSGVDEQLGELVSGEEVVEPPSNLIAMEVSSKYVKLNWNPSPSPVTGYKVILTPMTAGSRQHALSVGPQTTTLSVRDLSADTEYQISVSAMKGMTSSEPISIMEKTQPMKVQVECSRGVDIKADIVFLVDGSYSIGIANFVKVRAFLEVLVKSFEISPNRVQISLVQYSRDPHTEFTLKKFTKVEDIIEAINTFPYRGGSTNTGKAMTYVREKIFVPSKGSRSNVPKVMILITDGKSSDAFRDPAIKLRNSDVEIFAVGVKDAVRSELEAIASPPAETHVFTVEDFDAFQRISFELTQSICLRIEQELAAIKKKAYVPPKDLSFSEVTSYGFKTNWSPAGENVFSYHITYKEAAGDDEVTVVEPASSTSVVLSSLKPETLYLVNVTAEYEDGFSIPLAGEETTEEVKGAPRNLKVTDETTDSFKITWTQAPGRVLRYRIIYRPVAGGESREVTTPPNQRRRTLENLIPDTKYEVSVIPEYFSGPGTPLTGNAATEEVRGNPRDLRVSDPTTSTMKLSWSGAPGKVKQYLVTYTPVAGGETQEVTVRGDTTNTVLQGLKEGTQYALSVTALYASGAGDALFGEGTTLEERGSPQDLVTKDITDTSIGAYWTSAPGMVRGYRVSWKSLYDDVDTGEKNLPEDAIHTMIENLQPETKYRISVFATYSSGEGEPLTGDATTELSQDSKTLKVDEETENTMRVTWKPAPGKVVNYRVVYRPHGRGKQMVAKVPPTVTSTVLKRLQPQTTYDITVLPIYKMGEGKLRQGSGTTASRFKSPRNLKTSDPTMSSFRVTWEPAPGEVKGYKVTFHPTGDDRRLGELVVGPYDNTVVLEELRAGTTYKVNVFGMFDGGESSPLVGQEMTTLSDTTVMPILSSGMECLTRAEADIVLLVDGSWSIGRANFRTVRSFISRIVEVFDIGPKRVQIALAQYSGDPRTEWQLNAHRDKKSLLQAVANLPYKGGNTLTGMALNFIRQQNFRTQAGMRPRARKIGVLITDGKSQDDVEAPSKKLKDEGVELFAIGIKNADEVELKMIATDPDDTHAYNVADFESLSRIVDDLTINLCNSVKGPGDLEAPSNLVISERTHRSFRVSWTPPSDSVDRYKVEYYPVSGGKRQEFYVSRMETSTVLKDLKPETEYVVNVYSVVEDEYSEPLKGTEKTLPVPVVSLNIYDVGPTTMHVQWQPVGGATGYILSYKPVKDTEPTRPKEVRLGPTVNDMQLTDLVPNTEYAVTVQAVLHDLTSEPVTVREVTLPLPRPQDLKLRDVTHSTMNVFWEPVPGKVRKYIVRYKTPEEDVKEVEVDRSETSTSLKDLFSQTLYTVSVSAVHDEGESPPVTAQETTRPVPAPTNLKITEVTSEGFRGTWDHGASDVSLYRITWAPFGSSDKMETILNGDENTLVFENLNPNTIYEVSITAIYPDESESDDLIGSERTLPILTTQAPKSGPRNLQVYNATSNSLTVKWDPASGRVQKYRITYQPSTGEGNEQTTTIGGRQNSVVLQKLKPDTPYTITVSSLYPDGEGGRMTGRGKTKPLNTVRNLRVYDPSTSTLNVRWDHAEGNPRQYKLFYAPAAGGPEELVPIPGNTNYAILRNLQPDTSYTVTVVPVYTEGDGGRTSDTGRTLMRGLARNVQVYNPTPNSLDVRWDPAPGPVLQYRVVYSPVDGTRPSESIVVPGNTRMVHLERLIPDTLYSVNLVALYSDGEGNPSPAQGRTLPRSGPRNLRVFGETTNSLSVAWDHADGPVQQYRIIYSPTVGDPIDEYTTVPGRRNNVILQPLQPDTPYKITVIAVYEDGDGGHLTGNGRTVGLLPPQNIHISDEWYTRFRVSWDPSPSPVLGYKIVYKPVGSNEPMEAFVGEMTSYTLHNLNPSTTYDVNVYAQYDSGLSVPLTDQGTTLYLNVTDLKTYQIGWDTFCVKWSPHRAATSYRLKLSPADGTRGQEITVRGSETSHCFTGLSPDTDYGVTVFVQTPNLEGPGVSVKEHTTVKPTEAPTEPPTPPPPPTIPPARDVCKGAKADIVFLTDASWSIGDDNFNKVVKFIFNTVGGFDEISPAGIQVSFVQYSDEVKSEFKLNTYNDKALALGALQNIRYRGGNTRTGKALTFIKEKVLTWESGMRKNVPKVLVVVTDGRSQDEVKKAALVIQQSGFSVFVVGVADVDYNELANIASKPSERHVFIVDDFESFEKIEDNLITFVCETATSSCPLIYLDGYTSPGFKMLEAYNLTEKNFASVQGVSLESGSFPSYSAYRIQKNAFVNQPTADLHPNGLPPSYTIILLFRLLPETPSDPFAIWQITDRDYKPQVGVIADPSSKTLSFFNKDTRGEVQTVTFDTEEVKTLFYGSFHKVHIVVTSKSVKIYIDCYEIIEKDIKEAGNITTDGYEILGKLLKGERKSAAFQIQSFDIVCSPVWTSRDRCCDIPSRRDEGKCPAFPNSCTCTQDSVGPPGPPGPAGGPGAKGPRGERGISGAIGPPGPRGDIGPPGPQGPPGPQGPNGLSIPGEQGRQGMKGDAGEPGLPGRTGTPGLPGPPGPMGPPGDRGFTGKDGAMGPRGPPGPGSPGVTGPSGKPGKPGDHGRPGPSGLKGEKGDRGDIASQNMMRAVARQVCEQLISGQMNRFNQMLNQIPNDYQSSRNQPGPPGPPGPPGSAGARGEPGPGGRPGFPGTPGMQGPPGERGLPGEKGERGTGSSGPRGLPGPPGPQGESRTGPPGSTGSRGPPGPPGRPGNSGIRGPPGPPGYCDSSQCASIPYNGQGYPGTLLPL

SEQ ID NO: 3228 - protein, 2987 aa, Homo Sapiens
MRSRLPPALAALGAALLLSSIEAEVDPPSDLNFKIIDENTVHMSWAKPVDPIVGYRITVDPTTDGPTKEFTLSASTTETLLSELVPETEYVVTITSYDEVEESVPVIGQLTIQTGSSTKPVEKKPGKTEIQKCSVSAWTDLVFLVDGSWSVGRNNFKYILDFIAALVSAFDIGEEKTRVGVVQYSSDTRTEFNLNQYYQRDELLAAIKKIPYKGGNTMTGDAIDYLVKNTFTESAGARVGFPKVAIIITDGKSQDEVEIPARELRNVGVEVFSLGIKAADAKELKQIASTPSLNHVFNVANFDAIVDIQNEIISQVCSGVDEQLGELVSGEEVVEPPSNLIAMEVSSKYVKLNWNPSPSPVTGYKVILTPMTAGSRQHALSVGPQTTTLSVRDLSADTEYQISVSAMKGMTSSEPISIMEKTQPMKVQVECSRGVDIKADIVFLVDGSYSIGIANFVKVRAFLEVLVKSFEISPNRVQISLVQYSRDPHTEFTLKKFTKVEDIIEAINTFPYRGGSTNTGKAMTYVREKIFVPSKGSRSNVPKVMILITDGKSSDAFRDPAIKLRNSDVEIFAVGVKDAVRSELEAIASPPAETHVFTVEDFDAFQRISFELTQSICLRIEQELAAIKKKAYVPPKDLSFSEVTSYGFKTNWSPAGENVFSYHITYKEAAGDDEVTVVEPASSTSVVLSSLKPETLYLVNVTAEYEDGFSIPLAGEETTEEVKGAPRNLKVTDETTDSFKITWTQAPGRVLRYRIIYRPVAGGESREVTTPPNQRRRTLENLIPDTKYEVSVIPEYFSGPGTPLTGNAATEEVRGNPRDLRVSDPTTSTMKLSWSGAPGKVKQYLVTYTPVAGGETQEVTVRGDTTNTVLQGLKEGTQYALSVTALYASGAGDALFGEGTTLEERGSPQDLVTKDITDTSIGAYWTSAPGMVRGYRVSWKSLYDDVDTGEKNLPEDAIHTMIENLQPETKYRISVFATYSSGEGEPLTGDATTELSQDSKTLKVDEETENTMRVTWKPAPGKVVNYRVVYRPHGRGKQMVAKVPPTVTSTVLKRLQPQTTYDITVLPIYKMGEGKLRQGSGTTASRFKSPRNLKTSDPTMSSFRVTWEPAPGEVKGYKVTFHPTGDDRRLGELVVGPYDNTVVLEELRAGTTYKVNVFGMFDGGESSPLVGQEMTTLSDTTVMPILSSGMECLTRAEADIVLLVDGSWSIGRANFRTVRSFISRIVEVFDIGPKRVQIALAQYSGDPRTEWQLNAHRDKKSLLQAVANLPYKGGNTLTGMALNFIRQQNFRTQAGMRPRARKIGVLITDGKSQDDVEAPSKKLKDEGVELFAIGIKNADEVELKMIATDPDDTHAYNVADFESLSRIVDDLTINLCNSVKGPGDLEAPSNLVISERTHRSFRVSWTPPSDSVDRYKVEYYPVSGGKRQEFYVSRMETSTVLKDLKPETEYVVNVYSVVEDEYSEPLKGTEKTLPVPVVSLNIYDVGPTTMHVQWQPVGGATGYILSYKPVKDTEPTRPKEVRLGPTVNDMQLTDLVPNTEYAVTVQAVLHDLTSEPVTVREVTLPLPRPQDLKLRDVTHSTMNVFWEPVPGKVRKYIVRYKTPEEDVKEVEVDRSETSTSLKDLFSQTLYTVSVSAVHDEGESPPVTAQETTRPVPAPTNLKITEVTSEGFRGTWDHGASDVSLYRITWAPFGSSDKMETILNGDENTLVFENLNPNTIYEVSITAIYPDESESDDLIGSERTLPILTTQAPKSGPRNLQVYNATSNSLTVKWDPASGRVQKYRITYQPSTGEGNEQTTTIGGRQNSVVLQKLKPDTPYTITVSSLYPDGEGGRMTGRGKTKPLNTVRNLRVYDPSTSTLNVRWDHAEGNPRQYKLFYAPAAGGPEELVPIPGNTNYAILRNLQPDTSYTVTVVPVYTEGDGGRTSDTGRTLMRGLARNVQVYNPTPNSLDVRWDPAPGPVLQYRVVYSPVDGTRPSESIVVPGNTRMVHLERLIPDTLYSVNLVALYSDGEGNPSPAQGRTLPRSGPRNLRVFGETTNSLSVAWDHADGPVQQYRIIYSPTVGDPIDEYTTVPGRRNNVILQPLQPDTPYKITVIAVYEDGDGGHLTGNGRTVGLLPPQNIHISDEWYTRFRVSWDPSPSPVLGYKIVYKPVGSNEPMEAFVGEMTSYTLHNLNPSTTYDVNVYAQYDSGLSVPLTDQGTTLYLNVTDLKTYQIGWDTFCVKWSPHRAATSYRLKLSPADGTRGQEITVRGSETSHCFTGLSPDTDYGVTVFVQTPNLEGPGVSVKEHTTVKPTEAPTEPPTPPPPPTIPPARDVCKGAKADIVFLTDASWSIGDDNFNKVVKFIFNTVGGFDEISPAGIQVSFVQYSDEVKSEFKLNTYNDKALALGALQNIRYRGGNTRTGKALTFIKEKVLTWESGMRKNVPKVLVVVTDGRSQDEVKKAALVIQQSGFSVFVVGVADVDYNELANIASKPSERHVFIVDDFESFEKIEDNLITFVCETATSSCPLIYLDGYTSPGFKMLEAYNLTEKNFASVQGVSLESGSFPSYSAYRIQKNAFVNQPTADLHPNGLPPSYTIILLFRLLPETPSDPFAIWQITDRDYKPQVGVIADPSSKTLSFFNKDTRGEVQTVTFDTEEVKTLFYGSFHKRDEGKCPAFPNSCTCTQDSVGPPGPPGPAGGPGAKGPRGERGISGAIGPPGPRGDIGPPGPQGPPGPQGPNGLSIPGEQGRQGMKGDAGEPGLPGRTGTPGLPGPPGPMGPPGDRGFTGKDGAMGPRGPPGPPGSPGSPGVTGPSGKPGKPGDHGRPGPSGLKGEKGDRGDIASQNMMRAVARQVCEQLISGQMNRFNQMLNQIPNDYQSSRNQPGPPGPPGPPGSAGARGEPGPGGRPGFPGTPGMQGPPGERGLPGEKGERGTGSSGPRGLPGPPGPQGESRTGPPGSTGSRGPPGPPGRPGNSGIRGPPGPPGYCDSSQCASIPYNGQGYPGSG

SEQ ID NO: 3229 - protein, 207 aa, Homo Sapiens
VIQQSGFSVFVVGVADVDYNELANIASKPSERHVFIVDDFESFEKIEDNLITFVCETATSSCPLIYLDGYTSPGFKMLEAYNLTEKNFASVQGVSLESGSFPSYSAYRIQKNAFVNQPTADLHPNGLPPSYTIILLFRLLPETPSDPFAIWQITDRDYKPQVGVIADPSSKTLSFFNKDTRGEVQTVTFDTEEVKTLFYGSFHKVKT

SEQ ID NO: 3230 - protein, 756 aa, Homo Sapiens
VSFVQYSDEVKSEFKLNTYNDKALALGALQNIRYRGGNTRTGKALTFIKEKVLTWESGMRKNVPKVLVVVTDGRSQDEVKKAALVIQQSGFSVFVVGVADVDYNELANIASKPSERHVFIVDDFESFEKIEDNLITFVCETATSSCPLIYLDGYTSPGFKMLEAYNLTEKNFASVQGVSLESGSFPSYSAYRIQKNAFVNQPTADLHPNGLPPSYTIILLFRLLPETPSDPFAIWQITDRDYKPQVGVIADPSSKTLSFFNKDTRGEVQTVTFDTEEVKTLFYGSFHKVHIVVTSKSVKIYIDCYEIIEKDIKEAGNITTDGYEILGKLLKGERKSAAFQIQSFDIVCSPVWTSRDRCCDIPSRRDEGKCPAFPNSCTCTQDSVGPPGPPGPAGGPGAKGPRGERGISGAIGPPGPRGDIGPPGPQGPPGPQGPNGLSIPGEQGRQGMKGDAGEPGLPGRTGTPGLPGPPGPMGPPGDRGFTGKDGAMGPRGPPGPPGSPGSPGVTGPSGKPGKPGDHGRPGPSGLKGEKGDRGDIASQNMMRAVARQVCEQLISGQMNRFNQMLNQIPNDYQSSRNQPGPPGPPGPPGSAGARGEPGPGGRPGFPGTPGMQGPPGERGLPGEKGERGTGSSGPRGLPGPPGPQGESRTGPPGSTGSRGPPGPPGRPGNSGIRGPPGPPGYCDSSQCASIPYNGQGYPEPYVPEGGAYLPEREPFIVPVEPERTAEYEDYGADEPAEEPPEPHRRWRRALPHGPGQ

SEQ ID NO: 3231 - protein, 638 aa, Homo Sapiens
  misc_feature (1)..(1): Xaa can be any naturally occurring amino acid
XKSLLQAVANLPYKGGNTLTGMALNFIRQQNFRTQAGMRPRARKIGVLITDGKSQDDVEAPSKKLKDEGVELFAIGIKNADEVELKMIATDPDDTHAYNVADFESLSRIVDDLTINLCNSVKGPGDLEAPSNLVISERTHRSFRVSWTPPSDSVDRYKVEYYPVSGGKRQEFYVSRMETSTVLKDLKPETEYVVNVYSVVEDEYSEPLKGTEKTLPVPVVSLNIYDVGPTTMHVQWQPVGGATGYILSYKPVKDTEPTRPKEVRLGPTVNDMQLTDLVPNTEYAVTVQAVLHDLTSEPVTVREVTLPLPRPQDLKLRDVTHSTMNVFWEPVPGKVRKYIVRYKTPEEDVKEVEVDRSETSTSLKDLFSQTLYTVSVSAVHDEGESPPVTAQETTRPVPAPTNLKITEVTSEGFRGTWDHGASDVSLYRITWAPFGSSDKMETILNGDENTLVFENLNPNTIYEVSITAIYPDESESDDLIGSERTPPKSGPRNLQVYNATSNSLTVKWDPASGRVQKYRITYQPSTGEGNEQTTTIGGRQNSVVLQKLKPDTPYTITVSSLYPDGEGGRMTGRGKTKPLNTVRNLRVYDPSTSTLNVRWDHAEGNPRQYKLFYAPAAGGPEELVPIPGNTNYAILRNL

SEQ ID NO: 3232 - protein, 843 aa, Homo Sapiens
FDVGSEKTRIGLAQYSGDPRIEWHLNAFSTKDEVIEAVRNLPYKGGNTLTGLALNYIFENSFKPEAGSRTGVSKIGILITDGKSQDDIIPPSRNLRESGVELFAIGVKNADVNELQEIASEPDSTHVYNVAEFDLMHTVVESLTRTLCSRVEEQDREIKASAHAITGPPTELITSEVTARSFMVNWTHAPGNVEKYRVVYYPTRGGKPDEVVVDGTVSSTVLKNLMSLTEYQIAVFAIYAHTASEGLRGTETTLALPMASDLLLYDVTENSMRVKWDAVPGASGYLILYAPLTEGLAGDEKEMKIGETHTDIELSGLLPNTEYTVTVYAMFGEEASDPVTGQETTLALSPPRNLRISNVGSNSARLTWDPTSRQINGYRIVYNNADGTEINEVEVDPITTFPLKGLTPLTEYTIAIFSIYDEGQSEPLTGVFTTEEVPAQQYLEIDEVTTDSFRVTWHPLSADEGLHKLMWIPVYGGKTEEVVLKEEQDSHVIEGLEPGTEYEVSLLAVLDDGSESEVVTAVGTTLDSFWTEPATTIVPTTSVTSVFQTGIRNLVVGDETTSSLRVKWDISDSDVQQFRVTYMTAQGDPEEEVIGTVMVPGSQNNLLLKPLLPDTEYKVTVTPIYTDGEGVSVSAPGKTLPSSGPQNLRVSEEWYNRLRITWDPPSSPVKGYRIVYKPVSVPGPTLETFVGADINTILITNLLSGMDYNVKIFASQASGFSDALTGMVKTLFLGVTNLQAKHVEMTSLCAHWQVHRHATAYRVVIESLQDRQKQESTVGGGTTRHCFYGLQPDSEYKISVYTKLQEIEGPSVSIMEKTQSLPTRPPTFPPTIPPAKEGKRIIE

SEQ ID NO: 3233 - protein, 149 aa, Homo Sapiens
GPPGEPGRPGSPGAPGEQGPPGTPGFPGNAGVPGTPGERGLTGIKGEKGNPGVGTQGPRGPPGPAGPSGESRPGSPGPPGSPGPRGPPGHLGVPGPQGPSGQPGYCDPSSCSAYGVRGWMGIFLLDHPTLPSSPDHLPSLLFPGDGLLT

SEQ ID NO: 3234 - protein, 757 aa, Homo Sapiens [sequence omitted]

SEQ ID NO: 3235 - protein, 1796 aa, Homo Sapiens
MKIFQRKMRYWLLPPFLAIVYFCTIVQGQVAPPTRLRYNVISHDSIQISWKAPRGKFGGYKLLVTPTSGGKTNQLNLQNTATKAIIQGLMPDQNYTVQIIAYNKDKESKPAQGQFRIKDLEKRKDPKPRVKVVDRGNGSRPSSPEEVKFVCQTPAIADIVILVDGSWSIGRFNFRLVRHFLENLVTAFDVGSEKTRIGLAQYSGDPRIEWHLNAFSTKDEVIEAVRNLPYKGGNTLTGLALNYIFENSFKPEAGSRTGVSKIGILITDGKSQDDIIPPSRNLRESGVELFAIGVKNADVNELQEIASEPDSTHVYNVAEFDLMHTVVESLTRTLCSRVEEQDREIKASAHAITGPPTELITSEVTARSFMVNWTHAPGNVEKYRVVYYPTRGGKPDEVVVDGTVSSTVLKNLMSLTEYQIAVFAIYAHTASEGLRGTETTLALPMASDLLLYDVTENSMRVKWDAVPGASGYLILYAPLTEGLAGDEKEMKIGETHTDIELSGLLPNTEYTVTVYAMFGEEASDPVTGQETTLALSPPRNLRISNVGSNSARLTWDPTSRQINGYRIVYNNADGTEINEVEVDPITTFPLKGLTPLTEYTIAIFSIYDEGQSEPLTGVFTTEEVPAQQYLEIDEVTTDSFRVTWHPLSADEGLHKLMWIPVYGGKTEEVVLKEEQDSHVIEGLEPGTEYEVSLLAVLDDGSESEVVTAVGTTLDSFWTEPATTIVPTTSVTSVFQTGIRNLVVGDETTSSLRVKWDISDSDVQQFRVTYMTAQGDPEEEVIGTVMVPGSQNNLLLKPLLPDTEYKVTVTPIYTDGEGVSVSAPGKTLPSSGPQNLRVSEEWYNRLRITWDPPSSPVKGYRIVYKPVSVPGPTLETFVGADINTILITNLLSGMDYNVKIFASQASGFSDALTGMVKTLFLGVTNLQAKHVEMTSLCAHWQVHRHATAYRVVIESLQDRQKQESTVGGGTTRHCFYGLQPDSEYKISVYTKLQEIEGPSVSIMEKTQSLPTRPPTFPPTIPPAKEVCKAAKADLVFMVDGSWSIGDENFNKIISFLYSTVGALNKIGTDGTQVAMVQFTDDPRTEFKLNAYKTKETLLDAIKHISYKGGNTKTGKAIKYVRDTLFTAESGTRRGIPKVIVVITDGRSQDDVNKISREMQLDGYSIFAIGVADADYSELVSIGSKPSARHVFFVDDFDAFKKIEDELITFVCETASATCPVVHKDGIDLAGFKMMEMFGLVEKDFSSVEGVSMEPGTFNVFPCYQLHKDALVSQPTRYLHPEGLPSDYTISFLFRILPDTPQEPFALWEILNKNSDPLVGVILDNGGKTLTYFNYDQSGDFQTVTFEGPEIRKIFYGSFHKLHIVVSETLVKVVIDCKQVGEKAMNASANITSDGVEVLGKMVRSRGPGGNSAPFQLQMFDIVCSTSWANTDKCCELPGLRDDESCPDLPHSCSCSETNEVALGPAGPPGGPGLRGPKGQQGEPGPKGPDGPRGEIGLPGPQGPPGPQGPSGLSIQGMPGMPGEKGEKGDTGLPGPQGIPGGVGSPGRDGSPGQRGLPGKDGSSGPPGPPGPIGIPGTPGVPGITGSMGPQGALGPPGVPGAKGERGERGDLQSQAMVRSVARQVCEQLIQSHMARYTAILNQIPSHSSSIRTVQGPPGEPGRPGSPGAPGEQGPPGTPGFPGNAGVPGTPGERGLTGIKGEKGNPGVGTQGPRGPPGPAGPSGESRPGSPGPPGSPGPRGPPGHLGVPGPQGPSGQPGYCDPSSCSAYGVRAPHPDQPEFTPVQDELEAMELWGPGV

SEQ ID NO: 3236 - protein, 1780 aa, Homo Sapiens
MKIFQRKMRYWLLPPFLAIVYFCTIVQGQVAPPTRLRYNVISHDSIQISWKAPRGKFGGYKLLVTPTSGGKTNQLNLQNTATKAIIQGLMPDQNYTVQIIAYNKDKESKPAQGQFRIKDLEKRKDPKPRVKVVDRGNGSRPSSPEEVKFVCQTPAIADIVILVDGSWSIGRFNFRLVRHFLENLVTAFDVGSEKTRIGLAQYSGDPRIEWHLNAFSTKDEVIEAVRNLPYKGGNTLTGLALNYIFENSFKPEAGSRTGVSKIGILITDGKSQDDIIPPSRNLRESGVELFAIGVKNADVNELQEIASEPDSTHVYNVAEFDLMHTVVESLTRTLCSRVEEQDREIKASAHAITGPPTELITSEVTARSFMVNWTHAPGNVEKYRVVYYPTRGGKPDEVVVDGTVSSTVLKNLMSLTEYQIAVFAIYAHTASEGLRGTETTLALPMASDLLLYDVTENSMRVKWDAVPGASGYLILYAPLTEGLAGDEKEMKIGETHTDIELSGLLPNTEYTVTVYAMFGEEASDPVTGQETTLALSPPRNLRISNVGSNSARLTWDPTSRQINGYRIVYNNADGTEINEVEVDPITTFPLKGLTPLTEYTIAIFSIYDEGQSEPLTGVFTTEEVPAQQYLEIDEVTTDSFRVTWHPLSADEGLHKLMWIPVYGGKTEEVVLKEEQDSHVIEGLEPGTEYEVSLLAVLDDGSESEVVTAVGTTLDSFWTEPATTIVPTTSVTSVFQTGIRNLVVGDETTSSLRVKWDISDSDVQQFRVTYMTAQGDPEEEVIGTVMVPGSQNNLLLKPLLPDTEYKVTVTPIYTDGEGVSVSAPGKTLPSSGPQNLRVSEEWYNRLRITWDPPSSPVKGYRIVYKPVSVPGPTLETFVGADINTILITNLLSGMDYNVKIFASQASGFSDALTGMVKTLFLGVTNLQAKHVEMTSLCAHWQVHRHATAYRVVIESLQDRQKQESTVGGGTTRHCFYGLQPDSEYKISVYTKLQEIEGPSVSIMEKTQSLPTRPPTFPPTIPPAKEVCKAAKADLVFMVDGSWSIGDENFNKIISFLYSTVGALNKIGTDGTQVAMVQFTDDPRTEFKLNAYKTKETLLDAIKHISYKGGNTKTGKAIKYVRDTLFTAESGTRRGIPKVIVVITDGRSQDDVNKISREMQLDGYSIFAIGVADADYSELVSIGSKPSARHVFFVDDFDAFKKIEDELITFVCETASATCPVVHKDGIDLAGFKMMEMFGLVEKDFSSVEGVSMEPGTFNVFPCYQLHKDALVSQPTRYLHPEGLPSDYTISFLFRILPDTPQEPFALWEILNKNSDPLVGVILDNGGKTLTYFNYDQSGDFQTVTFEGPEIRKIFYGSFHKLHIVVSETLVKVVIDCKQVGEKAMNASANITSDGVEVLGKMVRSRGPGGNSAPFQLQMFDIVCSTSWANTDKCCELPGLRDDESCPDLPHSCSCSETNEVALGPAGPPGGPGLRGPKGQQGEPGPKGPDGPRGEIGLPGPQGPPGPQGPSGLSIQGMPGMPGEKGEKGDTGLPGPQGIPGGVGSPGRDGSPGQRGLPGKDGSSGPPGPPGPIGIPGTPGVPGITGSMGPQGALGPPGVPGAKGERGERGDLQSQAMVRSVARQVCEQLIQSHMARYTAILNQIPSHSSSIRTVQGPPGEPGRPGSPGAPGEQGPPGTPGFPGNAGVPGTPGERGLTGIKGEKGNPGVGTQGPRGPPGPAGPSGESRPGSPGPPGSPGPRGPPGHLGVPGPQGPSGQPGYCDPSSCSAYGVRDLIPYNDYQH

SEQ ID NO: 3237 - protein, 534 aa, Homo Sapiens
MKIFQRKMRYWLLPPFLAIVYFCTIVQGQVAPPTRLRYNVISHDSIQISWKAPRGKFGGYKLLVTPTSGGKTNQLNLQNTATKAIIQGLMPDQNYTVQIIAYNKDKESKPAQGQFRIKDLEKRKDPKPRVKVVDRGNGSRPSSPEEVKFVCQTPAIADIVILVDGSWSIGRFNFRLVRHFLENLVTAFDVGSEKTRIGLAQYSGDPRIEWHLNAFSTKDEVIEAVRNLPYKGGNTLTGLALNYIFENSFKPEAGSRTGVSKIGILITDGKSQDDIIPPSRNLRESGVELFAIGVKNADVNELQEIASEPDSTHVYNVAEFDLMHTVVESLTRTLCSRVEEQDREIKASAHAITGPPTELITSEVTARSFMVNWTHAPGNVEKYRVVYYPTRGGKPDEVVVDGTVSSTVLKNLMSLTEYQIAVFAIYAHTASEGLRGTETTLALPMASDLLLYDVTENSMRVKWDAVPGASGYLILYAPLTEGLAGDEKEMKIGETHTDIELSGLLPNTEYTVTVYAMFGEEASDPVTGQETTSP

SEQ ID NO: 3238 - protein, 534 aa, Homo Sapiens; identical to SEQ ID NO: 3237

SEQ ID NO: 3239 - protein, 337 aa, Homo Sapiens
  misc_feature (1)..(1): Xaa can be any naturally occurring amino acid
XVCQTPAIADIVILVDGSWSIGRFNFRLVRHFLENLVTAFDVGSEKTRIGVKNADVNELQEIASEPDSTHVYNVAEFDLMHTVVESLTRTLCSRVEEQDREIKASAHAITGPPTELITSEVTARSFMVNWTHAPGNVEKYRVVYYPTRGGKPDEVVVDGTVSSTVLKNLMSLTEYQIAVFAIYAHTASEGLRGTETTLALPMASDLLLYDVTENSMRVKWDAVPGASGYLILYAPLTEGLAGDEKEMKIGETHTDIELSGLLPNTEYTVTVYAMFGEEASDPVTGQETTLALSPPRNLRISNVGSNSARLTWDPTSRQINGYRIVYNNADGTEINEV

SEQ ID NO: 3240 - protein, 1388 aa, Homo Sapiens
MAPRRNNGQCWCLLMLLSVSTPLPAVTQTRGATETASQGHLDLTQLIGVPLPSSVSFVTGYGGFPAYSFGPGANVGRPARTLIPSTFFRDFAISVVVKPSSTRGGVLFAITDAFQKVIYLGLRLSGVEDGHQRIILYYTEPGSHVSQEAAAFSVPVMTHRWNRFAMIVQGEEVTLLVNCEEHSRIPFQRSSQALAFESSAGIFMGNAGATGLERFTGSLQQLTVHPDPRTPEELCDPEESSASGETSGLQEADGVAEILEAVTYTQASPKEAKVEPINTPPTPSSPFEDMELSGEPVPEGTLETTNMSIIQHSSPKQGSGEILNDTLEGVHSVDGDPITDSGSGAGAFLDIAEEKNLAATAAGLAEVPISTAGEAEASSVPTGGPTLSMSTENPEEGVTPGPDNEERLAATAAGEAEALASMPGEVEASGVAPGELDLSMSAQSLGEEATVGPSSEDSLTTAAAATEVSLSTFEDEEASGVPTDGLAPLTATMAPERAVTSGPGDEEDLAAATTEEPLITAGGEESGSPPPDGPPLPLPTVAPERWITPAQREHVGMKGQAGPKGEKGDAGEELPGPPEPSGPVGPTAGAEAEGSGLGWGSDVGSGSGDLVGSEQLLRGPPGPPGPPGLPGIPGKPGTDVFMGPPGSPGEDGPAGEPGPPGPEGQPGVDGATGLPGMKGEKGARGPNGSVGEKGDPGNRGLPGPPGKKGQAGPPGVMGPPGPPGPPGPPGPGCTMGLGFEDTEGSGSTQLLNEPKLSRPTAAIGLKGEKGDRGPKGERGMDGASIVGPPGPRGPPGHIKVLSNSLINITHGFMNFSDIPELVGPPGPDGLPGLPGFPGPRGPKGDTGLPGFPGLKGEQGEKGEPGAILTEDIPLERLMGKKGEPGMHGAPGPMGPKGPPGHKGEFGLPGRPGRPGLNGLKGTKGDPGVIMQGPPGLPGPPGPPGPPGAVINIKGAIFPIPVRPHCKMPVDTAHPGSPELITFHGVKGEKGSWGLPGSKGEKGDQGAQGPPGPPLDLAYLRHFLNNLKGENGDKGFKGEKGEKGDINGSFLMSGPPGLPGNPGPAGQKGETVVGPQGPPGAPGLPGPPGFGRPGDPGPPGPPGPPGPPAILGAAVALPGPPGPPGQPGLPGSRNLVTAFSNMDDMLQKAHLVIEGTFIYLRDSTEFFIRVRDGWKKLQLGELIPIPADSPPPPALSSNPHQLLPPPNPISSANYEKPALHLAALNMPFSGDIRADFQCFKQARAAGLLSTYRAFLSSHLQDLSTIVRKAERYSLPIVNLKGQVLFNNWDSIFSGHGGQFNMHIPIYSFDGRDIMTDPSWPQKVIWHGSSPHGVRLVDNYCEAWRTADTAVTGLASPLSTGKILDQKAYSCANRLIVLCIENSFMTDARK

SEQ ID NO: 3241 - protein, 1374 aa, Homo Sapiens
MLLSVSTPLPAVTQTRGATETASQGHLDLTQLIGVPLPSSVSFVTGYGGFPAYSFGPGANVGRPARTLIPSTFFRDFAISVVVKPSSTRGGVLFAITDAFQKVIYLGLRLSGVEDGHQRIILYYTEPGSHVSQEAAAFSVPVMTHRWNRFAMIVQGEEVTLLVNCEEHSRIPFQRSSQALAFESSAGIFMGNAGATGLERFTGSLQQLTVHPDPRTPEELCDPEESSASGETSGLQEADGVAEILEAVTYTQASPKEAKVEPINTPPTPSSPFEDMELSGEPVPEGTLETTNMSIIQHSSPKQGKGAILNDTLEGVHSVDGDPITDSGSGAGAFLDIAEEKNLAATAAGLAEVPISTAGEAEASSVPTGGPTLSMSTENPEEGVTPGPDNEERLAATAAGEAEALASMPGEVEASGVAPGELDLSMSAQSLGEEATVGPSSEDSLTTAAAATEVSLSTFEDEEASGVPTDGLAPLTATMAPERAVTSGPGDEEDLAAATTEEPLITAGGEESGSPPPDGPPLPLPTVAPERWITPAQREHVGMKGQAGPKGEKGDAGEELPGPPEPSGPVGPTAGAEAEGSGLGWGSDVGSGSGDLVGSEQLLRGPPGPPGPPGLPGIPGKPGTDVFMGPPGSPGEDGPAGEPGPPGPEGQPGVDGATGLPGMKGEKGARGPNGSVGEKGDPGNRGLPGPPGKKGQAGPPGVMGPPGPPGPPGPPGPGCTMGLGFEDTEGSGSTQLLNEPKLSRPTAAIGLKGEKGDRGPKGERGMDGASIVGPPGPRGPPGHIKVLSNSLINITHGFMNFSDIPELVGPPGPDGLPGLPGFPGPRGPKGDTGLPGFPGLKGEQGEKGEPGAILTEDIPLERLMGKKGEPGMHGAPGPMGPKGPPGHKGEFGLPGRPGRPGLNGLKGTKGDPGVIMQGPPGLPGPPGPPGPPGAVINIKGAIFPIPVRPHCKMPVDTAHPGSPELITFHGVKGEKGSWGLPGSKGEKGDQGAQGPPGPPLDLAYLRHFLNNLKGENGDKGFKGEKGEKGDINGSFLMSGPPGLPGNPGPAGQKGETVVGPQGPPGAPGLPGPPGFGRPGDPGPPGPPGPPGPPAILGAAVALPGPPGPPGQPGLPGSRNLVTAFSNMDDMLQKAHLVIEGTFIYLRDSTEFFIRVRDGWKKLQLGELIPIPADSPPPPALSSNPHQLLPPPNPISSANYEKPALHLAALNMPFSGDIRADFQCFKQARAAGLLSTYRAFLSSHLQDLSTIVRKAERYSLPIVNLKGQVLFNNWDSIFSGHGGQFNMHIPIYSFDGRDIMTDPSWPQKVIWHGSSPHGVRLVDNYCEAWRTADTAVTGLASPLSTGKILDQKAYSCANRLIVLCIENSFMTDARK

SEQ ID NO: 3242 - protein, 235 aa, Homo Sapiens
GEPGPPGRGVQGPQGEPGAPGLPGIQGLPGPRGPPGPTGEKGAQGSPGVKGATGPVGPPGASVSGPPGRDGQQGQTGLRGTPGEKGPRGEKGEPGECSCPSQGDLIFSGMPGPPGIPGPPGPPGVPGLQGVPGNNGLPGQPGLTAELGSLPIEQHLLKSICGDCVQGQRAHPGYLVEKGEKGDQGIPGVPGLDNCAQCFLSLERPRAEEARGDNSEGDPGCVGSPGLPGPPGLPG

SEQ ID NO: 3243 - protein, 224 aa, Homo Sapiens
GPPGSEGLPGPPGPAGPRGERGPQGNSGEKGDQGFQGQPGFPGPPGPPGFPGKVGSPGPPGPQAEKGPAGLDGLDGKDGKPGLRGDPGPAGPPGLMGPPGFKGKTGHPGLPGPKGDCGKPGPPGSTGRPGAEGEPGAMGPQGRPGPPGHVGPPGPPGQPGPAGISAVGLKGDRGATGERGLAGLPGQPGPPGHPGPPGEPGTDGAAGKEGPPGKQGFYGPPGPK

SEQ ID NO: 3244 - protein, 308 aa, Homo Sapiens
KVYTRCFCLEEPQNSEVDAQLTGRISQKAERGAKVHQETAADECPPCVHGARDSNGGKGERGLPGPPGSKGEKGARGNDCVRISPDAPLQCAEGPKGEKGESGALGPSGLPGSTGEKGQKGEKGDGGIKGVPGKPGRDGRPGEICVIGPKGQKGDPGFVGPEGLAGEPGPPGLPGPPGIGLPGTPGDPGGPPGPKGDKGSSGIPGKEGPGGKPGKPGVKGEKGDPCEVCPTLPEGFQNFVGLPGKPGPKGEPGDPVPARGDPGIQGIKGEKGEPCLSCSSVVGAQHLVSSTGASGDVGSPGFGLPGLP

SEQ ID NO: 3245 - protein, 1604 aa, Homo Sapiens
MWVSWAPGLWLLGLWATFGHGANTGAQCPPSQQEGLKLEHSSSLPANVTGFNLIHRLSLMKTSAIKKIRNPKGPLILRLGAAPVTQPTRRVFPRGLPEEFALVLTLLLKKHTHQKTWYLFQVTDANGYPQISLEVNSQERSLELRAQGQDGDFVSCIFPVPQLFDLRWHKLMLSVAGRVASVHVDCSSASSQPLGPRRPMRPVGHVFLGLDAEQGKPVSFDLQQVHIYCDPELVLEEGCCEILPAGCPPETSKARRDTQSNELIEINPQSEGKVYTRCFCLEEPQNSEVDAQLTGRISQKAERGAKVHQETAADECPPCVHGARDSNVTLAPSGPKGGKGERGLPGPPGSKGEKGARGNDCVRISPDAPLQCAEGPKGEKGESGALGPSGLPGSTGEKGQKGEKGDGGIKGVPGKPGRDGRPGEICVIGPKGQKGDPGFVGPEGLAGEPGPPGLPGPPGIGLPGTPGDPGGPPGPKGDKGSSGIPGKEGPGGKPGKPGVKGEKGDPCEVCPTLPEGFQNFVGLPGKPGPKGEPGDPVPARGDPGIQGIKGEKGEPCLSCSSVVGAQHLVSSTGASGDVGSPGFGLPGLPGRAGVPGLKGEKGNFGEAGPAGSPGPPGPVGPAGIKGAKGEPCEPCPALSNLQDGDVRVVALPGPSGEKGEPGPPGFGLPGKQGKAGERGLKGQKGDAGNPGDPGTPGTTGRPGLSGEPGVQGPAGPKGEKGDGCTACPSLQGTVTDMAGRPGQPGPKGEQGPEGVGRPGKPGQPGLPGVQGPPGLKGVQGEPGPPGRGVQGPQGEPGAPGLPGIQGLPGPRGPPGPTGEKGAQGSPGVKGATGPVGPPGASVSGPPGRDGQQGQTGLRGTPGEKGPRGEKGEPGECSCPSQGDLIFSGMPGAPGLWMGSSWQPGPQGPPGIPGPPGPPGVPGLQGVPGNNGLPGQPGLTAELGSLPIEQHLLKSICGDCVQGQRAHPGYLVEKGEKGDQGIPGVPGLDNCAQCFLSLERPRAEEARGDNSEGDPGCVGSPGLPGPPGLPGQRGEEGPPGMRGSPGPPGPIGPPGFPGAVGSPGLPGLQGERGLTGLTGDKGEPGPPGQPGYPGATGPPGLPGIKGERGYTGSAGEKGEPGPPGSEGLPGPPGPAGPRGERGPQGNSGEKGDQGFQGQPGFPGPPGPPGFPGKVGSPGPPGPQAEKGSEGIRGPSGLPGSPGPPGPPGIQGPAGLDGLDGKDGKPGLRGDPGPAGPPGLMGPPGFKGKTGHPGLPGPKGDCGKPGPPGSTGRPGAEGEPGAMGPQGRPGPPGHVGPPGPPGQPGPAGISAVGLKGDRGATGERGLAGLPGQPGPPGHPGPPGEPGTDGAAGKEGPPGKQGFYGPPGPKGDPGAAGQKGQAGEKGRAGMPGGPGKSGSMGPVGPPGPAGERGHPGAPGPSGSPGLPGVPGSMGDMVNYDEIKRFIRQEIIKMFDERMAYYTSRMQFPMEMAAAPGRPGPPGKDGAPGRPGAPGSPGLPGQIGREGRQGLPGVRGLPGTKGEKGDIGIGIAGENGLPGPPGPQGPPGYGKMGATGPMGQQGIPGIPGPPGPMGQPGKAGHCNPSDCFGAMPMEQQYPPMKTMKGPFG

SEQ ID NO: 3246 - protein, 966 aa, Homo Sapiens
MWVSWAPGLWLLGLWATFGHGANTGAQCPPSQQEGLKLEHSSSLPANVTGFNLIHRLSLMKTSAIKKIRNPKGPLILRLGAAPVTQPTRRVFPRGLPEEFALVLTLLLKKHTHQKTWYLFQVTDANGYPQISLEVNSQERSLELRAQGQDGDFVSCIFPVPQLFDLRWHKLMLSVAGRVASVHVDCSSASSQPLGPRRPMRPVGHVFLGLDAEQGKPVSFDLQQVHIYCDPELVLEEGCCEILPAGCPPETSKARRDTQSNELIEINPQSEGKVYTRCFCLEEPQNSEVDAQLTGRISQKAERGAKVHQETAADECPPCVHGARDSNVTLAPSGPKGGKGERGLPGPPGSKGEKGARGNDCVRISPDAPLQCAEGPKGEKGESGALGPSGLPGSTGEKGQKGEKGDGGIKGVPGKPGRDGRPGEICVIGPKGQKGDPGFVGPEGLAGEPGPPGLPGPPGIGLPGTPGDPGGPPGPKGDKGSSGIPGKEGPGGKPGKPGVKGEKGDPCEVCPTLPEGFQNFVGLPGKPGPKGEPGDPVPARGDPGIQGIKGEKGEPCLSCSSVVGAQHLVSSTGASGDVGSPGFGLPGLPGRAGVPGLKGEKGNFGEAGPAGSPGPPGPVGPAGIKGAKGEPCEPCPALSNLQDGDVRVVALPGPSGEKGEPGPPGFGLPGKQGKAGERGLKGQKGDAGNPGDPGTPGTTGRPGLSGEPGVQGPAGPKGEKGDGCTACPSLQGTVTDMAGRPGQPGPKGEQGPEGVGRPGKPGQPGLPGVQGPPGLKGVQGEPGPPGRGVQGPQGEPGAPGLPGIQGLPGPRGPPGPTGEKGAQGSPGVKGATGPVGPPGASVSGPPGRDGQQGQTGLRGTPGEKGPRGEKGEPGECSCPSQGDLIFSGMPGPPGIPGPPGPPGVPGLQVKGEKRMRSLGGRAHGSGWLLPAGPQGCCSPTPKTQTCHFSLLCLPASQGGKEGPLSL

SEQ ID NO: 3247 - protein, 687 aa, Homo Sapiens
GEVGADGVPGFPGLPGREGIAGPQGPKGDRGSRGEKGDPGKDGVGQPGLPGPPGPPGPVVYVSEQDGSVLSVPGPEGRPGFAGFPGPAGPKGNLGSKGERGSPGPKGEKGEPGSIFSPDGGALGPAQKGAKGEPGFRGPPGPYGRPGYKGEIGFPGRPGRPGMNGLKGEKGEPGDASLGFGMRGMPGPPGPPGPPGPPGTPVYDSNVFAESSRPGPPGLPGNQGPPGPKGAKGEVGPPGPPGQFPFDFLQLEAEMKGEKGDRGDAGQKGERGEPGGGGFFGSSLPGPPGPPGPPGPRGYPGIPGPKGESIRGQPGPPGPQGPPGIGYEGRQGPPGPPGPPGPPSFPGPHRQTISVPGPPGPPGPPGPPGTMGASSGQVRLWATRQAMLGQVHEVPEGWLIFVAEQEELYVRVQNGFRKVQLEARTPLPRGTDNEVAALQPPVVQLHDSNPYPRREHPHPTARPWRADDILASPPRLPEPQPYPGAPHHSSYVHLRPARPTSPPAHSHRDFQPVLHLVALNSPLSGGMRGIRGADFQCFQQARAVGLAGTFRAFLSSRLQDLYSIVRRADRAAVPIVNLKDELLFPSWEALFSGSEGPLKPGARIFSFDGKDVLRHPTWPQKSVWHGSDPNGRRLTESYCETWRTEAPSATGQASSLLGGRLLGQSAASCHHAYIVLCIENSFMTASK

SEQ ID NO: 3248 - protein, 1339 aa, Homo Sapiens
MAPRCPWPWPRRRRLLDVLAPLVLLLGVRAASAEPERISEEVGLLQLLGDPPPQQVTQTDDPDVGLAYVFGPDANSGQVARYHFPSLFFRDFSLLFHIRPATEGPGVLFAITDSAQAMVLLGVKLSGVQDGHQDISLLYTEPGAGQTHTAASFRLPAFVGQWTHLALSVAGGFVALYVDCEEFQRMPLARSSRGLELEPGAGLFVAQAGGADPDKFQGVIAELKVRRDPQVSPMHCLDEEGDDSDGASGDSGSGLGDARELLREETGAALKPRLPAPPPVTTPPLAGGSSTEDSRSEEVEEQTTVASLGAQTLPGSDSVSTWDGSVRTPGGRVKEGGLKGQKGEPGVPGPPGRAGPPGSPCLPGPPGLPCPVSPLGPAGPALQTVPGPQGPPGPPGRDGTPGRDGEPGDPGEDGKPGDTGPQGFPGTPGDVGPKGDKGDPGVGERGPPGPQGPPGPPGPSFRHDKLTFIDMEGSGFGGDLEALRGPRGFPGPPGPPGVPGLPGEPGRFGVNSSDVPGPAGLPGVPGREGPPGFPGLPGPPGPPGREGPPGRTGQKGSLGEAGAPGHKGSKGAPGPAGARGESGLAGAPGPAGPPGPPGPPGPPGPGLPAGFDDMEGSGGPFWSTARSADGPQGPPGLPGLKGDPGVPGLPGAKGEVGADGVPGFPGLPGREGIAGPQGPKGDRGSRGEKGDPGKDGVGQPGLPGPPGPPGPVVYVSEQDGSVLSVPGPEGRPGFAGFPGPAGPKGNLGSKGERGSPGPKGEKGEPGSIFSPDGGALGPAQKGAKGEPGFRGPPGPYGRPGYKGEIGFPGRPGRPGMNGLKGEKGEPGDASLGFGMRGMPGPPGPPGPPGPPGTPVYDSNVFAESSRPGPPGLPGNQGPPGPKGAKGEVGPPGPPGQFPFDFLQLEAEMKGEKGDRGDAGQKGERGEPGGGGFFGSSLPGPPGPPGPPGPRGYPGIPGPKGESIRGQPGPPGPQGPPGIGYEGRQGPPGPPGPPGPPSFPGPHRQTISVPGPPGPPGPPGPPGTMGASSGVRLWATRQAMLGQVHEVPEGWLIFVAEQEELYVRVQNGFRKVQLEARTPLPRGTDNEVAALQPPVVQLHDSNPYPRREHPHPTARPWRADDILASPPRLPEPQPYPGAPHHSSYVHLRPARPTSPPAHSHRDFQPVLHLVALNSPLSGGMRGIRGADFQCFQQARAVGLAGTFRAFLSSRLQDLYSIVRRADRAAVPIVNLKDELLFPSWEALFSGSEGPLKPGARIFSFDGKDVLRHPTWPQKSVWHGSDPNGRRLTESYCETWRTEAPSATGQASSLLGGRLLGQSAASCHHAYIVLCIENSFMTASK

SEQ ID NO: 3249 - protein, 1519 aa, Homo Sapiens
MAPYPCGCHILLLLFCCLAAARANLLNLNWLWFNNEDTSHAATTIPEPQGPLPVQPTADTTTHVTPRNGSTEPATAPGSPEPPSELLEDGQDTPTSAESPDAPEENIAGVGAEILNVAKGIRSFVQLWNDTVPTESLARAETLVLETPVGPLALAGPSSTPQENGTTLWPSRGIPSSPGAHTTEAGTLPAPTPSPPSLGRPWAPLTGPSVPPPSSERISEEVGLLQLLGDPPPQQVTQTDDPDVGLAYVFGPDANSGQVARYHFPSLFFRDFSLLFHIRPATEGPGVLFAITDSAQAMVLLGVKLSGVQDGHQDISLLYTEPGAGQTHTAASFRLPAFVGQWTHLALSVAGGFVALYVDCEEFQRMPLARSSRGLELEPGAGLFVAQAGGADPDKFQGVIAELKVRRDPQVSPMHCLDEEGDDSDGASGDSGSGLGDARELLREETGAALKPRLPAPPPVTTPPLAGGSSTEDSRSEEVEEQTTVASLGAQTLPGSDSVSTWDGSVRTPGGRVKEGGLKGQKGEPGVPGPPGRAGPPGSPCLPGPPGLPCPVSPLGPAGPALQTVPGPQGPPGPPGRDGTPGRDGEPGDPGEDGKPGDTGPQGFPGTPGDVGPKGDKGDPGVGERGPPGPQGPPGPPGPSFRHDKLTFIDMEGSGFGGDLEALRGPRGFPGPPGPPGVPGLPGEPGRFGVNSSDVPGPAGLPGVPGREGPPGFPGLPGPPGPPGREGPPGRTGQKGSLGEAGAPGHKGSKGAPGPAGARGESGLAGAPGPAGPPGPPGPPGPPGPGLPAGFDDMEGSGGPFWSTARSADGPQGPPGLPGLKGDPGVPGLPGAKGEVGADGVPGFPGLPGREGIAGPQGPKGDRGSRGEKGDPGKDGVGQPGLPGPPGPPGPVVYVSEQDGSVLSVPGPEGRPGFAGFPGPAGPKGNLGSKGERGSPGPKGEKGEPGSIFSPDGGALGPAQKGAKGEPGFRGPPGPYGRPGYKGEIGFPGRPGRPGMNGLKGEKGEPGDASLGFGMRGMPGPPGPPGPPGPPGTPVYDSNVFAESSRPGPPGLPGNQGPPGPKGAKGEVGPPGPPGQFPFDFLQLEAEMKGEKGDRGDAGQKGERGEPGGGGFFGSSLPGPPGPPGPPGPRGYPGIPGPKGESIRGQPGPPGPQGPPGIGYEGRQGPPGPPGPPGPPSFPGPHRQTISVPGPPGPPGPPGPPGTMGASSGVRLWATRQAMLGQVHEVPEGWLIFVAEQEELYVRVQNGFRKVQLEARTPLPRGTDNEVAALQPPVVQLHDSNPYPRREHPHPTARPWRADDILASPPRLPEPQPYPGAPHHSSYVHLRPARPTSPPAHSHRDFQPVLHLVALNSPLSGGMRGIRGADFQCFQQARAVGLAGTFRAFLSSRLQDLYSIVRRADRAAVPIVNLKDELLFPSWEALFSGSEGPLKPGARIFSFDGKDVLRHPTWPQKSVWHGSDPNGRRLTESYCETWRTEAPSATGQASSLLGGRLLGQSAASCHHAYIVLCIENSFMTASK

SEQ ID NO: 3250 - protein, 1754 aa, Homo Sapiens
MAPYPCGCHILLLLFCCLAAARANLLNLNWLWFNNEDTSHAATTIPEPQGPLPVQPTADTTTHVTPRNGSTEPATAPGSPEPPSELLEDGQDTPTSAESPDAPEENIAGVGAEILNVAKGIRSFVQLWNDTVPTESLARAETLVLETPVGPLALAGPSSTPQENGTTLWPSRGIPSSPGAHTTEAGTLPAPTPSPPSLGRPWAPLTGPSVPPPSSGRASLSSLLGGAPPWGSLQDPDSQGLSPAAAAPSQQLQRPDVRLRTPLLHPLVMGSLGKHAAPSAFSSGLPGALSQVAVTTLTRDSGAWVSHVANSVGPGLANNSALLGADPEAPAGRCLPLPPSLPVCGHLGISRFWLPNHLHHESGEQVRAGARAWGGLLQTHCHPFLAWFFCLLLVPPCGSVPPPAPPPCCQFCEALQDACWSRLGGGRLPVACASLPTQEDGYCVLIGPAAERISEEVGLLQLLGDPPPQQVTQTDDPDVGLAYVFGPDANSGQVARYHFPSLFFRDFSLLFHIRPATEGPGVLFAITDSAQAMVLLGVKLSGVQDGHQDISLLYTEPGAGQTHTAASFRLPAFVGQWTHLALSVAGGFVALYVDCEEFQRMPLARSSRGLELEPGAGLFVAQAGGADPDKFQGVIAELKVRRDPQVSPMHCLDEEGDDSDGASGDSGSGLGDARELLREETGAALKPRLPAPPPVTTPPLAGGSSTEDSRSEEVEEQTTVASLGAQTLPGSDSVSTWDGSVRTPGGRVKEGGLKGQKGEPGVPGPPGRAGPPGSPCLPGPPGLPCPVSPLGPAGPALQTVPGPQGPPGPPGRDGTPGRDGEPGDPGEDGKPGDTGPQGFPGTPGDVGPKGDKGDPGVGERGPPGPQGPPGPPGPSFRHDKLTFIDMEGSGFGGDLEALRGPRGFPGPPGPPGVPGLPGEPGRFGVNSSDVPGPAGLPGVPGREGPPGFPGLPGPPGPPGREGPPGRTGQKGSLGEAGAPGHKGSKGAPGPAGARGESGLAGAPGPAGPPGPPGPPGPPGPGLPAGFDDMEGSGGPFWSTARSADGPQGPPGLPGLKGDPGVPGLPGAKGEVGADGVPGFPGLPGREGIAGPQGPKGDRGSRGEKGDPGKDGVGQPGLPGPPGPPGPVVYVSEQDGSVLSVPGPEGRPGFAGFPGPAGPKGNLGSKGERGSPGPKGEKGEPGSIFSPDGGALGPAQKGAKGEPGFRGPPGPYGRPGYKGEIGFPGRPGRPGMNGLKGEKGEPGDASLGFGMRGMPGPPGPPGPPGPPGTPVYDSNVFAESSRPGPPGLPGNQGPPGPKGAKGEVGPPGPPGQFPFDFLQLEAEMKGEKGDRGDAGQKGERGEPGGGGFFGSSLPGPPGPPGPPGPRGYPGIPGPKGESIRGQPGPPGPQGPPGIGYEGRQGPPGPPGPPGPPSFPGPHRQTISVPGPPGPPGPPGPPGTMGASSGVRLWATRQAMLGQVHEVPEGWLIFVAEQEELYVRVQNGFRKVQLEARTPLPRGTDNEVAALQPPVVQLHDSNPYPRREHPHPTARPWRADDILASPPRLPEPQPYPGAPHHSSYVHLRPARPTSPPAHSHRDFQPVLHLVALNSPLSGGMRGIRGADFQCFQQARAVGLAGTFRAFLSSRLQDLYSIVRRADRAAVPIVNLKDELLFPSWEALFSGSEGPLKPGARIFSFDGKDVLRHPTWPQKSVWHGSDPNGRRLTESYCETWRTEAPSATGQASSLLGGRLLGQSAASCHHAYIVLCIENSFMTASK

SEQ ID NO: 3251 - protein, 280 aa, Homo Sapiens
  misc_feature (1)..(1): Xaa can be any naturally occurring amino acid
XISVPGPPGPPGPPGPPGTMGASSGVRLWATRQAMLGQVHEVPEGWLIFVAEQEELYVRVQNGFRKVQDNEVAALQPPVVQLHDSNPYPRREHPHPTARPWRADDILASPPRLPEPQPYPGAPHHSSYVHLRPARPTSPPAHSHRDFQPVLHLVALNSPLSGGMRGIRGADFQCFQQARAVGLAGTFRAFLSSRLQDLYSIVRRADRAAVPIVNLKDELLFPSWEALFSGSEGPLKPGARIFSFDGKDVLRHPTWPQKSVWHGSDPNGRRLTESYCETWR

SEQ ID NO: 3252 - protein, 36 aa, Homo Sapiens
GPPGIQGIHQTLGGYYNKDNKGNDEHEAGGLKGDKV

SEQ ID NO: 3253 - protein, 1142 aa, Homo Sapiens
MRLTGPWKLWLWMSIFLLPASTSVTVRDKTEESCPILRIEGHQLTYDNINKLEVSGFDLGDSFSLRRAFCESDKTCFKLGSALLIRDTIKIFPKGLPEEYSVAAMFRVRRNAKKERWFLWQVLNQQNIPQISIVVDGGKKVVEFMFQATEGDVLNYIFRNRELRPLFDRQWHKLGISIQSQVISLYMDCNLIARRQTDEKDTVDFHGRTVIATRASDGKPVDIELHQLKIYCSANLIAQETCCEISDTKCPEQDGFGNIASSWVTAHASKMSSYLPAKQELKDQCQCIPNKGEAGLPGAPGSPGQKGHKGEPGENGLHGAPGFPGQKGEQGFEGSKGETGEKGEQGEKGDPALAGLNGENGLKGDLGPHGPPGPKGEKGDTGPPGPPALPGSLGIQGPQGPPGKEGQRGRRGKTGPPGKPGPPGPPGPPGIQGIHQTLGGYYNKDNKGNDEHEAGGLKGDKGETGLPGFPGSVGPKGQKGEPGEPFTKGEKGDRGEPGVIGSQGVKGEPGDPGPPGLIGSPGLKGQQGSAGSMGPRGPPGDVGLPGEHGIPGKQGIKGEKGDPGGIIGPPGLPGPKGEAGPPGKSLPGEPGLDGNPGAPGPRGPKGERGLPGVHGSPGDIGPQGIGIPGRTGAQGPAGEPGIQGPRGLPGLPGTPGTPGNDGVPGRDGKPGLPGPPGDPIALPLLGDIGALLKNFCGNCQASVPGLKSNKGEEGGAGEPGKYDSMARKGDIGPRGPPGIPGREGPKGSKGERGYPGIPGEKGDEGLQGIPGIPGAPGPTGPPGLMGRTGHPGPTGAKGEKGSDGPPGKPGPPGPPGIPFNERNGMSSLYKIKGGVNVPSYPGPPGPPGPKGDPGPVGEPGAMGLPGLEGFPGVKGDRGPAGPPGIAGMSGKPGAPGPPGVPGEPGERGPVGDIGFPGPEGPSGKPGINGKDGIPGAQGIMGKPGDRGPKGERGDQGIPGDRGSQGERGKPGLTGMKGAIGPMGPPGNKGSMGSPGHQGPPGSPGIPGIPADAVSFEEIKKYINQEVLRIFEERMAVFLSQLKLPAAMLAAQAYGRPGPPGKDGLPGPPGDPGPQGYRGQKGERGEPGIGLPGSPGLPGTSALGLPGSPGAPGPQGPPGPSGRCNPEDCLYPVSHAHQRTGGN

SEQ ID NO: 3254 - protein, 60 aa, Homo Sapiens
MRLTGPWKLWLWMSIFLLPASTSVTVRDKTGIQANSLPNHQMLFIAFKSLKQILLRLKRP

SEQ ID NO: 3255 - protein, 1464 aa, Homo Sapiens
MFSFVDLRLLLLLAATALLTHGQEEGQVEGQDEDIPPITCVQNGLRYHDRDVWKPEPCRICVCDNGKVLCDDVICDETKNCPGAEVPEGECCPVCPDGSESPTDQETTGVEGPKGDTGPRGPRGPAGPPGRDGIPGQPGLPGPPGPPGPPGPPGLGGNFAPQLSYGYDEKSTGGISVPGPMGPSGPRGLPGPPGAPGPQGFQGPPGEPGEPGASGPMGPRGPPGPPGKNGDDGEAGKPGRPGERGPPGPQGARGLPGTAGLPGMKGHRGFSGLDGAKGDAGPAGPKGEPGSPGENGAPGQMGPRGLPGERGRPGAPGPAGARGNDGATGAAGPPGPTGPAGPPGFPGAVGAKGEAGPQGPRGSEGPQGVRGEPGPPGPAGAAGPAGNPGADGQPGAKGANGAPGIAGAPGFPGARGPSGPQGPGGPPGPKGNSGEPGAPGSKGDTGAKGEPGPVGVQGPPGPAGEEGKRGARGEPGPTGLPGPPGERGGPGSRGFPGADGVAGPKGPAGERGSPGPAGPKGSPGEAGRPGEAGLPGAKGLTGSPGSPGPDGKTGPPGPAGQDGRPGPPGPPGARGQAGVMGFPGPKGAAGEPGKAGERGVPGPPGAVGPAGKDGEAGAQGPPGPAGPAGERGEQGPAGSPGFQGLPGPAGPPGEAGKPGEQGVPGDLGAPGPSGARGERGFPGERGVQGPPGPAGPRGANGAPGNDGAKGDAGAPGAPGSQGAPGLQGMPGERGAAGLPGPKGDRGDAGPKGADGSPGKDGVRGLTGPIGPPGPAGAPGDKGESGPSGPAGPTGARGAPGDRGEPGPPGPAGFAGPPGADGQPGAKGEPGDAGAKGDAGPPGPAGPAGPPGPIGNVGAPGAKGARGSAGPPGATGFPGAAGRVGPPGPSGNAGPPGPPGPAGKEGGKGPRGETGPAGRPGEVGPPGPPGPAGEKGSPGADGPAGAPGTPGPQGIAGQRGVVGLPGQRGERGFPGLPGPSGEPGKQGPSGASGERGPPGPMGPPGLAGPPGESGREGAPGAEGSPGRDGSPGAKGDRGETGPAGPPGAPGAPGAPGPVGPAGKSGDRGETGPAGPAGPVGPVGARGPAGPQGPRGDKGETGEQGDRGIKGHRGFSGLQGPPGPPGSPGEQGPSGASGPAGPRGPPGSAGAPGKDGLNGLPGPIGPPGPRGRTGDAGPVGPPGPPGPPGPPGPPSAGFDFSFLPQPPQEKAHDGGRYYRADDANVVRDRDLEVDTTLKSLSQQIENIRSPEGSRKNPARTCRDLKMCHSDWKSGEYWIDPNQGCNLDAIKVFCNMETGETCVYPTQPSVAQKNWYISKNPKDKRHVWFGESMTDGFQFEYGGQGSDPADVAIQLTFLRLMSTEASQNITYHCKNSVAYMDQQTGNLKKALLLQGSNEIEIRAEGNSRFTYSVTVDGCTSHTGAWGKTVIEYKTTKTSRLPIIDVAPLDVGAPDQEFGFDVGPVCFL

SEQ ID NO: 3256 - protein, 154 aa, Homo Sapiens
MRSRRAFKDLRKEERGEGREVKNPSVPLRPGGKVVKLGVAVTTDNAPLPPVPVPPITCVQNGLRYHDRDVWKPEPCRICVCDNGKVLCDDVICDETKNCPGAEVPEGECCPVCPDGSESPTDQETTGVEGPKGDTGPRGPRGPAGPPGRDGIPG

SEQ ID NO: 3257 - protein, 1364 aa, Homo Sapiens
MLSFVDTRTLLLLAVTLCLATCQFFETVRKGPAGDRGPRGERGPPGPPGRDGEDGPTGPPGPPGPPGPPGLGGNFAAQYDGKGVGLGPGPMGLMGPRGPPGAAGAPGPQGFQGPAGEPGEPGQTGPAGARGPAGPPGKAGEDGHPGKPGRPGERGVVGPQGARGFPGTPGLPGFKGIRGHNGLDGLKGQPGAPGVKGEPGAPGENGTPGQTGARGLPGERGRVGAPGPAGARGSDGSVGPVGPAGPIGSAGPPGFPGAPGPKGEIGAVGNAGPAGPAGPRGEVGLPGLSGPVGPPGNPGANGLTGAKGAAGLPGVAGAPGLPGPRGIPGPVGAAGATGARGLVGEPGPAGSKGESGNKGEPGSAGPQGPPGPSGEEGKRGPNGEAGSAGPPGPPGLRGSPGSRGLPGADGRAGVMGPPGSRGASGPAGVRGPNGDAGRPGEPGLMGPRGLPGSPGNIGPAGKEGPVGLPGIDGRPGPIGPAGARGEPGNIGFPGPKGPTGDPGKNGDKGHAGLAGARGAPGPDGNNGAQGPPGPQGVQGGKGEQGPPGPPGFQGLPGPSGPAGEVGKPGERGLHGEFGLPGPAGPRGERGPPGESGAAGPTGPIGSRGPSGPPGPDGNKGEPGVVGAVGTAGPSGPSGLPGERGAAGIPGGKGEKGEPGLRGEIGNPGRDGARGAPGAVGAPGPAGATGDRGEAGAAGPAGPAGPRGSPGERGEVGPAGPNGFAGPAGAAGQPGAKGERGAKGPKGENGVVGPTGPVGAAGPAGPNGPPGPAGSRGDGGPPGMTGFPGAAGRTGPPGPSGISGPPGPPGPAGKEGLRGPRGDQGPVGRTGEVGAVGPPGFAGEKGPSGEAGTAGPPGTPGPQGLLGAPGILGLPGSRGERGLPGVAGAVGEPGPLGIAGPPGARGPPGAVGSPGVNGAPGEAGRDGNPGNDGPPGRDGQPGHKGERGYPGNIGPVGAAGAPGPHGPVGPAGKHGNRGETGPSGPVGPAGAVGPRGPSGPQGIRGDKGEPGEKGPRGLPGLKGHNGLQGLPGIAGHHGDQGAPGSVGPAGPRGPAGPSGPAGKDGRTGHPGTVGPAGIRGPQGHQGPAGPPGPPGPPGPPGVSGGGYDFGYDGDFYRADQPRSAPSLRPKDYEVDATLKSLNNQIETLLTPEGSRKNPARTCRDLRLSHPEWSSGYYWIDPNQGCTMDAIKVYCDFSTGETCIRAQPENIPAKNWYRSSKDKKHVWLGETINAGSQFEYNVEGVTSKEMATQLAFMRLLANYASQNITYHCKNSIAYMDEETGNLKKAVILQGSNDVELVAEGNSRFTYTVLVDGCSKKTNEWGKTIIEYKTNKPSRLPFLDIAPLDIGGADQEFFVDIGPVCFK

SEQ ID NO: 3258 - protein, 1366 aa, Homo Sapiens
MLSFVDTRTLLLLAVTLCLATCQSLQEETVRKGPAGDRGPRGERGPPGPPGRDGEDGPTGPPGPPGPPGPPGLGGNFAAQYDGKGVGLGPGPMGLMGPRGPPGAAGAPGPQGFQGPAGEPGEPGQTGPAGARGPAGPPGKAGEDGHPGKPGRPGERGVVGPQGARGFPGTPGLPGFKGIRGHNGLDGLKGQPGAPGVKGEPGAPGENGTPGQTGARGLPGERGRVGAPGPAGARGSDGSVGPVGPAGPIGSAGPPGFPGAPGPKGEIGAVGNAGPAGPAGPRGEVGLPGLSGPVGPPGNPGANGLTGAKGAAGLPGVAGAPGLPGPRGIPGPVGAAGATGARGLVGEPGPAGSKGESGNKGEPGSAGPQGPPGPSGEEGKRGPNGEAGSAGPPGPPGLRGSPGSRGLPGADGRAGVMGPPGSRGASGPAGVRGPNGDAGRPGEPGLMGPRGLPGSPGNIGPAGKEGPVGLPGIDGRPGPIGPAGARGEPGNIGFPGPKGPTGDPGKNGDKGHAGLAGARGAPGPDGNNGAQGPPGPQGVQGGKGEQGPPGPPGFQGLPGPSGPAGEVGKPGERGLHGEFGLPGPAGPRGERGPPGESGAAGPTGPIGSRGPSGPPGPDGNKGEPGVVGAVGTAGPSGPSGLPGERGAAGIPGGKGEKGEPGLRGEIGNPGRDGARGAPGAVGAPGPAGATGDRGEAGAAGPAGPAGPRGSPGERGEVGPAGPNGFAGPAGAAGQPGAKGERGAKGPKGENGVVGPTGPVGAAGPAGPNGPPGPAGSRGDGGPPGMTGFPGAAGRTGPPGPSGISGPPGPPGPAGKEGLRGPRGDQGPVGRTGEVGAVGPPGFAGEKGPSGEAGTAGPPGTPGPQGLLGAPGILGLPGSRGERGLPGVAGAVGEPGPLGIAGPPGARGPPGAVGSPGVNGAPGEAGRDGNPGNDGPPGRDGQPGHKGERGYPGNIGPVGAAGAPGPHGPVGPAGKHGNRGETGPSGPVGPAGAVGPRGPSGPQGIRGDKGEPGEKGPRGLPGLKGHNGLQGLPGIAGHHGDQGAPGSVGPAGPRGPAGPSGPAGKDGRTGHPGTVGPAGIRGPQGHQGPAGPPGPPGPPGPPGVSGGGYDFGYDGDFYRADQPRSAPSLRPKDYEVDATLKSLNNQIETLLTPEGSRKNPARTCRDLRLSHPEWSSGYYWIDPNQGCTMDAIKVYCDFSTGETCIRAQPENIPAKNWYRSSKDKKHVWLGETINAGSQFEYNVEGVTSKEMATQLAFMRLLANYASQNITYHCKNSIAYMDEETGNLKKAVILQGSNDVELVAEGNSRFTYTVLVDGCSKKTNEWGKTIIEYKTNKPSRLPFLDIAPLDIGGADQEFFVDIGPVCFK

SEQ ID NO: 3259 - protein, 401 aa, Homo Sapiens
EHTIVFLVRLLPETPREAFALWQMTAEDFQPLLGVLLDAGKKSLTYFHRDPRAALQEATFDPQEVRKIFFGSFHKVHVAVGRSKVRLYVDCRKVAERPLGEMGSPPAAGFVTLGRLAKARGPRSSSAAFQLQMLQIVCSDTWADEDRCCELPASRDGETCPAFVSACSCSSETPGPPGPQGPPGLPGRNGTPGEQGFPGPRGEPGPPGQMGPEGPGGQQGSPGTQGRAVQGPVGPPGVKGEKGDHGLPGLQGHPGHQGIPGRVGLQGPKGMRGLEGTAGLPGPPGPRGFQGMAGARGTSGERGPPGTVGPTGLPGPKGERGEKGEPQSLATLYQLVSQACESAIQTHVSKFDSFHENTRPPMPILEQKLEPGTEPLGSPGTRSKALVPGEWGRGGRHLEGR

SEQ ID NO: 3260 - protein, 250 aa, Homo Sapiens
ERPLGEMGSPPAAGFVTLGRLAKARGPRSSSAAFQLQMLQIVCSDTWADEDRCCELPASRDGETCPAFVSACSCSSETPGPPGPQGPPGPPGVKGEKGDHGLPGLQGHPGHQGIPGRVGLQGPKGMRGLEGTAGLPGPPGPRGFQGMAGARGTSGERGPPGTVGPTGLPGPKGERGEKGEPQSLATLYQLVSQACESAIQTHVSKFDSFHENTRPPMPILEQKLEPGTEPLGSPGTRSKALVPGEWGRGG

SEQ ID NO: 3261 - protein, 1284 aa, Homo Sapiens
MSSGDPAHLGLCLWLWLGATLGREQVQASGLLRLAVLPEDRLQMKWRESEGSGLGYLVQVKPMAGDSEQEVILTTKTPKATVGGLSPSKGYTLQIFELTGSGRFLLARREFVIEDLKSSSLDRSSQRPLGSGAPEPTPSHTGSPDPEQASEPQVAFTPSQDPRTPAGPQFRCLPPVPADMVFLVDGSWSIGHSHFQQVKDFLASVIAPFEIGPDKVQVGLTQYSGDAQTEWDLNSLSTKEQVLAAVRRLRYKGGNTFTGLALTHVLGQNLQPAAGLRPEAAKVVILVTDGKSQDDVHTAARVLKDLGVNVFAVGVKNADEAELRLLASPPRDITVHSVLDFLQLGALAGLLSRLICQRLQGGSPRQGPAAAPALDTLPAPTSLVLSQVTSSSIRLSWTPAPRHPLKYLIVWRASRGGTPREVVVEGPAASTELHNLASRTEYLVSVFPIYEGGVGEGLRGLVTTAPLPPPRALTLAAVTPRTVHLTWQPSAGATHYLVRCSPASPKGEEEEREVQVGRPEVLLDGLEPGRDYEVSVQSLRGPEGSEARGIRARTPTLAPPRHLGFSDVSHDAARVFWEGAPRPVRLVRVTYVSSEGGHSGQTEAPGNATSATLGPLSSSTTYTVRVTCLYPGGGSSTLTGRVTTKKAPSPSQLSMTELPGDAVQLAWVAAAPSGVLVYQITWTPLGEGKAHEISVPGNLGTAVLPGLGRHTEYDVTILAYYRDGARSDPVSLRYTPSTVSRSPPSNLALASETPDSLQVSWTPPLGRVLHYWLTYAPASGLGPEKSVSVPGARSHVTLPDLQAATKYRVLVSAIYAAGRSEAVSATGQTACPALRPDGSLPGFDLMVAFSLVEKAYASIRGVAMEPSAFGGTPTFTLFKDAQLTRRVSDVYPAPLPPEHTIVFLVRLLPETPREAFALWQMTAEDFQPLLGVLLDAGKKSLTYFHRDPRAALQEATFDPQEVRKIFFGSFHKVHVAVGRSKVRLYVDCRKVAERPLGEMGSPPAAGFVTLGRLAKARGPRSSSAAFQLQMLQIVCSDTWADEDRCCELPASRDGETCPAFVSACSCSSETPGPPGPQGPPGLPGRNGTPGEQGFPGPRGPPGVKGEKGDHGLPGLQGHPGHQGIPGRVGLQGPKGMRGLEGTAGLPGPPGPRGFQGMAGARGTSGERGPPGTVGPTGLPGPKGERGEKGEPQSLATLYQLVSQASHVSKFDSFHENTRPPMPILEQKLEPGTEPLGSPGTRSKALVPGEWGRGGRHLEGRGEPGAVGQMGSPGQQGASTQGLWE

SEQ ID NO: 3262 - protein, 1297 aa, Homo Sapiens
MSSGDPAHLGLCLWLWLGATLGREQVQASGLLRLAVLPEDRLQMKWRESEGSGLGYLVQVKPMAGDSEQEVILTTKTPKATVGGLSPSKGYTLQIFELTGSGRFLLARREFVIEDLKSSSLDRSSQRPLGSGAPEPTPSHTGSPDPEQASEPQVAFTPSQDPRTPGGSEWRETGPQFRCLPPVPADMVFLVDGSWSIGHSHFQQVKDFLASVIAPFEIGPDKVQVGLTQYSGDAQTEWDLNSLSTKEQVLAAVRRLRYKGGNTFTGLALTHVLGQNLQPAAGLRPEAAKVVILVTDGKSQDDVHTAARVLKDLGVNVFAVGVKNADEAELRLLASPPRDITVHSVLDFLQLGALAGLLSRLICQRLQGGSPRQGPAAAPALDTLPAPTSLVLSQVTSSSIRLSWTPAPRHPLKYLIVWRASRGGTPREVVVEGPAASTELHNLASRTEYLVSVFPIYEGGVGEGLRGLVTTAPLPPPRALTLAAVTPRTVHLTWQPSAGATHYLVRCSPASPKGEEEEREVQVGRPEVLLDGLEPGRDYEVSVQSLRGPEGSEARGIRARTPTLAPPRHLGFSDVSHDAARVFWEGAPRPVRLVRVTYVSSEGGHSGQTEAPGNATSATLGPLSSSTTYTVRVTCLYPGGGSSTLTGRVTTKKAPSPSQLSMTELPGDAVQLAWVAAAPSGVLVYQITWTPLGEGKAHEISVPGNLGTAVLPGLGRHTEYDVTILAYYRDGARSDPVSLRYTPSTVSRSPPSNLALASETPDSLQVSWTPPLGRVLHYWLTYAPASGLGPEKSVSVPGARSHVTLPDLQAATKYRVLVSAIYAAGRSEAVSATGQTACPALRPDGSLPGFDLMVAFSLVEKAYASIRGVAMEPSAFGGTPTFTLFKDAQLTRRVSDVYPAPLPPEHTIVFLVRLLPETPREAFALWQMTAEDFQPLLGVLLDAGKKSLTYFHRDPRAALQEATFDPQEVRKIFFGSFHKVHVAVGRSKVRLYVDCRKVAERPLGEMGSPPAAGFVTLGRLAKARGPRSSSAAFQLQMLQIVCSDTWADEDRCCELPASRDGETCPAFVSACSCSSETPGPPGPQGPPGLPGRNGTPGEQGFPGPRGPPGVKGEKGDHGLPGLQGHPGHQGIPGRVGLQGPKGMRGLEGTAGLPGPPGPRGFQGMAGARGTSGERGPPGTVGPTGLPGPKGERGEKGEPQSLATLYQLVSQACESAIQTHVSKFDSFHENTRPPMPILEQKLEPGTEPLGSPGTRSKALVPGEWGRGGRHLEGRGEPGAVGQMGSPGQQGASTQGLWE

SEQ ID NO: 3263 - protein, 79 aa, Homo Sapiens
AKGDKGSPGFYGKKGAKGEKGNAGFPGLPGPAGEPGRHGKDGLMGSPGFKGEAGSPGAPGQDGTRGEPTCAYEFSHVKE

SEQ ID NO: 3264 - protein, 136 aa, Homo Sapiens
MAHYITFLCMVLVLLLQNSVLAEDGEVRSSCRTAPTDLVFILDGSYSVGPENFEIVKKWLVNITKNFDIGPKFIQVGVVQYSDYPVLEIPLGSYDSGEHLTAAVESILYLGGNTKTGKAIQFALDYLFAKSSRFLT

SEQ ID NO: 3265 - protein, 957 aa, Homo Sapiens
MAHYITFLCMVLVLLLQNSVLAEDGEVRSSCRTAPTDLVFILDGSYSVGPENFEIVKKWLVNITKNFDIGPKFIQVGVVQYSDYPVLEIPLGSYDSGEHLTAAVESILYLGGNTKTGKAIQFALDYLFAKSSRFLTKIAVVLTDGKSQDDVKDAAQAARDSKITLFAIGVGSETEDAELRAIANKPSSTYVFYVEDYIAISKIREVMKQKLCEESVCPTRIPVAARDERGFDILLGLDVNKKVKKRIQLSPKKIKGYEVTSKVDLSELTSNVFPEGLPPSYVFVSTQRFKVKKIWDLWRILTIDGRPQIAVTLNGVDKILLFTTTSVINGSQVVTFANPQVKTLFDEGWHQIRLLVTEQDVTLYIDDQQIENKPLHPVLGILINGQTQIGKYSGKEETVQFDVQKLRIYCDPEQNNRETACEIPGFNGECLNGPSDVGSTPAPCICPPGKPGLQGPKGDPGLPGNPGYPGQPGQDGKPGYQGIAGTPGVPGSPGIQGARGLPGYKGEPGRDGDKGDRGLPGFPGLHGMPGSKGEMGAKGDKGSPGFYGKKGAKGEKGNAGFPGLPGPAGEPGRHGKDGLMGSPGFKGEAGSPGAPGQDGTRGEPGIPGFPGNRGLMGQKGEIGPPGQQGKKGAPGMPGLMGSNGSPGQPGTPGSKGSKGEPGIQGMPGASGLKGEPGATGSPGEPGYMGLPGIQGKKGDKGNQGEKGIQGQKGENGRQGIPGQQGIQGHHGAKGERGEKGEPGVRGAIGSKGESGVDGLMGPAGPKGQPGDPGPQGPPGLDGKPGREFSEQFIRQVCTDVIRAQLPVLLQSGRIRNCDHCLSQHGSPGIPGPPGPIGPEGPRGLPGLPGRDGVPGLVGVPGRPGVRGLKGLPGRNGEKGSQGFGYPGEQGPPGPPGPEGPPGISKEGPPGDPGLPGKDGDHGKPGIQGQPGPPGICDPSLCFSVIARRDPFRKGPNY

SEQ ID NO: 3266 - protein, 954 aa, Homo Sapiens
MAHYITFLCMVLVLLLQNSVLAEDGEVRSSCRTAPTDLVFILDGSYSVGPENFEIVKKWLVNITKNFDIGPKFIQVGVVQYSDYPVLEIPLGSYDSGEHLTAAVESILYLGGNTKTGKAIQFALDYLFAKSSRFLTKIAVVLTDGKSQDDVKDAAQAARDSKITLFAIGVGSETEDAELRAIANKPSSTYVFYVEDYIAISKIREVMKQKLCEESVCPTRIPVAARDERGFDILLGLDVNKKVKKRIQLSPKKIKGYEVTSKVDLSELTSNVFPEGLPPSYVFVSTQRFKVKKIWDLWRILTIDGRPQIAVTLNGVDKILLFTTTSVINGSQVVTFANPQVKTLFDEGWHQIRLLVTEQDVTLYIDDQQIENKPLHPVLGILINGQTQIGKYSGKEETVQFDVQKLRIYCDPEQNNRETACEIPGFCLNGPSDVGSTPAPCICPPGKPGLQGPKGDPGLPGNPGYPGQPGQDGKPGYQGIAGTPGVPGSPGIQGARGLPGYKGEPGRDGDKGDRGLPGFPGLHGMPGSKGEMGAKGDKGSPGFYGKKGAKGEKGNAGFPGLPGPAGEPGRHGKDGLMGSPGFKGEAGSPGAPGQDGTRGEPGIPGFPGNRGLMGQKGEIGPPGQQGKKGAPGMPGLMGSNGSPGQPGTPGSKGSKGEPGIQGMPGASGLKGEPGATGSPGEPGYMGLPGIQGKKGDKGNQGEKGIQGQKGENGRQGIPGQQGIQGHHGAKGERGEKGEPGVRGAIGSKGESGVDGLMGPAGPKGQPGDPGPQGPPGLDGKPGREFSEQFIRQVCTDVIRAQLPVLLQSGRIRNCDHCLSQHGSPGIPGPPGPIGPEGPRGLPGLPGRDGVPGLVGVPGRPGVRGLKGLPGRNGEKGSQGFGYPGEQGPPGPPGPEGPPGISKEGPPGDPGLPGKDGDHGKPGIQGQPGPPGICDPSLCFSVIARRDPFRKGPNY

SEQ ID NO: 3267 - protein, 956 aa, Homo Sapiens [sequence omitted]

SEQ ID NO: 3268 - protein, 125 aa, Homo Sapiens
  misc_feature (1)..(1): Xaa can be any naturally occurring amino acid
XRETACEIPGFNGECLNGPSDVGSTPAPCICPPGKPGLQGPKGYQGIAGTPGVPGSPGIQGARGLPGYKGEPGRDGDKGDRGLPGFPGLHGMPGSKGEMGAKGDKGSPGFYGKKGSIDHTTKYSY

SEQ ID NO: 3269 - protein, 65 aa, Homo Sapiens
GEPGELGEPGLPGEVGMRGPQGPPGLPGPPGRVGAPVSEGTCLGRGSTPSPGIKNQVLASSSTCI

SEQ ID NO: 3270 - protein, 1626 aa, Homo Sapiens
MAGLRGNAVAGLLWMLLLWSGGGGCQAQRAGCKSVHYDLVFLLDTSSSVGKEDFEKVRQWVANLVDTFEVGPDRTRVGVVRYSDRPTTAFELGLFGSQEEVKAAARRLAYHGGNTNTGDALRYITARSFSPHAGGRPRDRAYKQVAILLTDGRSQDLVLDAAAAAHRAGIRIFAVGVGEALKEELEEIASEPKSAHVFHVSDFNAIDKIRGKLRRRLCENVLCPSVRVEGDRFKHTNGGTKEITGFDLMDLFSVKEILGKRENGAQSSYVRMGSFPVVQSTEDVFPQGLPDEYAFVTTFRFRKTSRKEDWYIWQVIDQYSIPQVSIRLDGENKAVEYNAVGAMKDAVRVVFRGSRVNDLFDRDWHKMALSIQAQNVSLHIDCALVQTLPIEERENIDIQGKTVIGKRLYDSVPIDFDLQRIVIYCDSRHAELETCCDIPSGPCQVTVVTEPPPPPPPQRPPTPGSEQIGFLKTINCSCPAGEKGEMGVAGPMGLPGPKGDIGAIGPVGAPGPKGEKGDVGIGPFGQGEKGEKGSLGLPGPPGRDGSKGMRGEPGELGEPGLPGEVGMRGPQGPPGLPGPPGRVGAPGLQGERGEKGTRGEKGERGLDGFPGKPGDTGQQGRPGPSGVAGPQGEKGDVGPAGPPGVPGSVVQQEGLKGEQGAPGPRGHQGAPGPPGARGPIGPEGRDGPPGLQGLRGKKGDMGPPGIPGLLGLQGPPGPPGVPGPPGPGGSPGLPGEIGFPGKPGPPGPTGPPGKDGPNGPPGPPGTKGEPGERGEDGLPGKPGLRGEIGEQGLAGRPGEKGEAGLPGAPGFPGVRGEKGDQGEKGELGLPGLKGDRGEKGEAGPAGPPGLPGTTSLFTPHPRMPGEQGPKGEKGDPGLPGEPGLQGRPGELGPQGPTGPPGAKGQEGAHGAPGAAGNPGAPGHVGAPGPSGPPGSVGAPGLRGTPGKDGERGEKGAAGEEGSPGPVGPRGDPGAPGLPGPPGKGKDGEPGLRGSPGLPGPLGTKAACGKVRGSENCALGGQCVKGDRGAPGIPGSPGSRGDPGIGVAGPPGPSGPPGDKGSPGSRGLPGFPGPQGPAGRDGAPGNPGERGPPGKPGLSSLLSPGDINLLAKDVCNDCPPGPPGLPGLPGFKGDKGVPGKPGREGTEGKKGEAGPPGLPGPPGIAGPQGSQGERGADGEVGQKGDQGHPGVPGFMGPPGNPGPPGADGIAGAAGPPGIQGSPGKEGPPGPQGPSGLPGIPGEEGKEGRDGKPGPPGEPGKAGEPGLPGPEGARGPPGFKGHTGDSGAPGPRGESGAMGLPGQEGLPGKDGDTGPTGPQGPQGPRGPPGKNGSPGSPGEPGPSGTPGQKGSKGENGSPGLPGFLGPRGPPGEPGEKGVPGKEGVPGKPGEPGFKGERGDPGIKGDKGPPGGKGQPGDPGIPGHKGHTGLMGPQGLPGENGPVGPPGPPGQPGFPGLRGESPSMETLRRLIQEELGKQLETRLAYLLAQMPPAYMKSSQGRPGPPGPPGKDGLPGRAGPMGEPGRPGQGGLEGPSGPIGPKGERGAKGDPGAPGVGLRGEMGPPGIPGQPGEPGYAKDGLPGIPGPQGETGPAGHPGLPGPPGPPGQCDPSQCAYFASLAARPGNVKGP

SEQ ID NO: 3271 - protein, 1319 aa, Homo Sapiens
MAGLRGNAVAGLLWMLLLWSGGGGCQAQRAGCKSVHYDLVFLLDTSSSVGKEDFEKVRQWVANLVDTFEVGPDRTRVGVVRYSDRPTTAFELGLFGSQEEVKAAARRLAYHGGNTNTGDALRYITARSFSPHAGGRPRDRAYKQVAILLTDGRSQDLVLDAAAAAHRAGIRIFAVGVGEALKEELEEIASEPKSAHVFHVSDFNAIDKIRGKLRRRLCENVLCPSVRVEGDRFKHTNGGTKEITGFDLMDLFSVKEILGKRENGAQSSYVRMGSFPVVQSTEDVFPQGLPDEYAFVTTFRFRKTSRKEDWYIWQVIDQYSIPQVSIRLDGENKAVEYNAVAGPQGEKGDVGPAGPPGVPGSVVQQEGLKGEQGAPGPRGHQGAPGPPGARGPIGPEGRDGPPGLQGLRGKKGDMGPPGIPGLLGLQGPPGPPGVPGPPGPGGSPGLPGEIGFPGKPGPPGPTGPPGKDGPNGPPGPPGTKGEPGERGEDGLPGKPGLRGEIGEQGLAGRPGEKGEAGLPGAPGFPGVRGEKGDQGEKGELGLPGLKGDRGEKGEAGPAGPPGLPGTTSLFTPHPRMPGEQGPKGEKGDPGLPGEPGLQGRPGELGPQGPTGPPGAKGQEGAHGAPGAAGNPGAPGHVGAPGPSGPPGSVGAPGLRGTPGKDGERGEKGAAGEEGSPGPVGPRGDPGAPGLPGPPGKGKDGEPGLRGSPGLPGPLGTKGDRGAPGIPGSPGSRGDPGIGVAGPPGPSGPPGDKGSPGSRGLPGFPGPQGPAGRDGAPGNPGERGPPGKPGLSSLLSPGDINLLAKDVCNDCPPGPPGLPGLPGFKGDKGVPGKPGREGTEGKKGEAGPPGLPGPPGIAGPQGSQGERGADGEVGQKGDQGHPGVPGFMGPPGNPGPPGADGIAGAAGPPGIQGSPGKEGPPGPQGPSGLPGIPGEEGKEGRDGKPGPPGEPGKAGEPGLPGPEGARGPPGFKGHTGDSGAPGPRGESGAMGLPGQEGLPGKDGDTGPTGPQGPQGPRGPPGKNGSPGSPGEPGPSGTPGQKGSKGENGSPGLPGFLGPRGPPGEPGEKGVPGKEGVPGKPGEPGFKGERGDPGIKGDKGPPGGKGQPGDPGIPGHKGHTGLMGPQGLPGENGPVGPPGPPGQPGFPGLRGESPSMETLRRLIQEELGKQLETRLAYLLAQMPPAYMKSSQGRPGPPGPPGKDGLPGRAGPMGEPGRPGQGGLEGPSGPIGPKGERGAKGDPGAPGVGLRGEMGPPGIPGQPGEPGYAKDGLPGIPGPQGETGPAGHPGLPGPPGPPGQCDPSQCAYFASLAARPGNVKGP

SEQ ID NO: 3272 - protein, 81 aa, Homo Sapiens
MHLRAHRTRRGKVSPTAKTKSLLHFIVLCVAGVVVHAQEQGIDILHQLGLGGKDVRHSSPATAVPSASTPLPQGVHLTESG

SEQ ID NO: 3273 - protein, 1714 aa, Homo Sapiens
MHLRAHRTRRGKVSPTAKTKSLLHFIVLCVAGVVVHAQEQGIDILHQLGLGGKDVRHSSPATAVPSASTPLPQGVHLTESGVIFKNDAYIETPFVKILPVNLGQPFTILTGLQSHRVNNAFLFSIRNKNRLQLGVQLLPKKLVVHIRGKQPAVFNYSVHDEQWHSFAITIRNQSVSMFVECGKKYFSTETIPEVQTFDSNSVFTLGSMNNNSIHFEGIVCQLDIIPSAEASADYCRYVKQQCRQADKYQPETSIPCTTLIPTKIPEHSPPPKLFAEKVLSEDTFTEGKSIPNIIKNDSETVYKRQEHQISRSQLSSLQSGNVSAVDLTNHGIQAKEMITEEDTQTNFSLSVTTHRISEAKMNTKEKFSSLLNMSDNITQHDDRVTGLSLFKKMPSILPQIKQDTITNLKKAITANLHTNELMEMQPILNTSLHRVTNEPSVDNHLDLRKEGEFYPDATYPIENSYETELYDYYYYEDLNTMLEMEYLRGPKGDTGPPGPPGPAGIPGPSGKRGPRGIPGPHGNPGLPGLPGPKGPKGDPGFSPGQPVPGEKGDQGLSGLMGPPGMQGDKGLKGHPGLPGLPGEQGIPGFAGNIGSPGYPGRQGLAGPEGNPGPKGAQGFIGSPGEAGQLGPEGERGIPGIRGKKGFKGRQGFPGDFGDRGPAGLDGSPGLVGGTGPPGFPGLRGSVGPVGPIGPAGIPGPMGLSGNKGLPGIKGDKGEQGTAGELGEPGYPGDKGAVGLPGPPGMRGKSGPSGQTGDPGLQGPSGPPGPEGFPGDIGIPGQNGPEGPKGLLGNRGPPGPPGLKGTQGEEGPIGAFGELGPRGKPGQKGYAGEPGPEGLKGEVGDQGNIGKIGETGPVGLPGEVGMTGSIGEKGERGSPGPLGPQGEKGVMGYPGPPGVPGPIGPLGLPGHVGARGPPGSQGPKGQRGSRGPDGLLGEQGIQGAKGEKGDQGKRGPHGLIGKTGNPGERGFQGKPGLQGLPGSTGDRGLPGEPGLRGLQGDVGPPGEMGMEGPPGTEGESGLQGEPGAKGDVGTAGSVGGTGEPGLRGEPGAPGEEGLQGKDGLKGVPGGRGLPGEDGEKGEMGLPGIIGPLGRSGQTGLPGPEGIVGIPGQRGRPGKKGDKGQIGPTGEVGSRGPPGKIGKSGPKGARGTRGAVGHLGLMGPDGEPGIPGYRGHQGQPGPSGLPGPKGEKGYPGEDSTVLGPPGPRGEPGPVGDQGERGEPGAEGYKGHVGVPGLRGATGQQGPPGEPGDQGEQGLKGERGSEGNKGKKGAPGPSGKPGIPGLQGLLGPKGIQGYHGADGISGNPGKIGPPGKQGLPGIRGGPGRTGLAGAPGPPGVKGSSGLPGSPGIQGPKGEQGLPGQPGIQGKRGHRGAQGDQGPCGDPGLKGQPGEYGVQGLTGFQGFPGPKGPEGDAGIVGISGPKGPIGHRGNTGPLGREGIIGPTGRTGPRGEKGFRGETGPQGPRGQPGPPGPPGAPGPRKQMDINAAIQALIESNTALQMESYQNTEVTLIDHSEEIFKTLNYLSNLLHSIKNPLGTRDNPARICKDLLNCEQKVSDGKYWIDPNLGCPSDAIEVFCNFSAGGQTCLPPVSVTKLEFGVGKVQMNFLHLLSSEATHIITIHCLNTPRWTSTQTSGPGLPIGFKGWNGQIFKVNTLLEPKVLSDDCKIQDGSWHKATFLFHTQEPNQLPVIEVQKLPHLKTERKYYIDSSSVCFL

SEQ ID NO: 3274 - protein, 890 aa, Homo Sapiens
MHLRAHRTRRGKVSPTAKTKSLLHFIVLCVAGVVVHAQEQGIDILHQLGLGGKDVRHSSPATAVPSASTPLPQGVHLTESGVIFKNDAYIETPFVKILPVNLGQPFTILTGLQSHRVNNAFLFSIRNKNRLQLGVQLLPKKLVVHIRGKQPAVFNYSVHDEQWHSFAITIRNQSVSMFVECGKKYFSTETIPEVQTFDSNSVFTLGSMNNNSIHFEGIVCQLDIIPSAEASADYCRYVKQQCRQADKYQPETSIPCTTLIPTKIPEHSPPPKLFAEKVLSEDTFTEGKSIPNIIKNDSETVYKRQEHQISRSQLSSLQSGNVSAVDLTNHGIQAKEMITEEDTQTNFSLSVTTHRISEAKMNTKEKFSSLLNMSDNITQHDDRVTGLSLFKKMPSILPQIKQDTITNLKKAITANLHTNELMEMQPILNTSLHRVTNEPSVDNHLDLRKEGEFYPDATYPIENSYETELYDYYYYEDLNTMLEMEYLRGPKGDTGPPGPPGPAGIPGPSGKRGPRGIPGPHGNPGLPGLPGPKGPKGDPGFSPGQPVPGEKGDQGLSGLMGPPGMQGDKGLKGHPGLPGLPGEQGIPGFAGNIGSPGYPGRQGLAGPEGNPGPKGAQGFIGSPGEAGQLGPEGERGIPGIRGKKGFKGRQGFPGDFGDRGPAGLDGSPGLVGGTGPPGFPGLRGSVGPVGPIGPAGIPGPMGLSGNKGLPGIKGDKGEQGTAGELGEPGYPGDKGAVGLPGPPGMRGKSGPSGQTGDPGLQGPSGPPGPEGFPGDIGIPGQNGPEGPKGLLGNRGPPGPPGLKGTQGEEGPIGAFGELGPRGKPGQKGYAGEPGPEGLKGEVGDQGNIGKIGETMESCSVTQAGAQWHDLGSLHPLPPGFKRFSCLSLPG

SEQ ID NO: 3275 - protein, 166 aa, Homo Sapiens
  misc_feature (1)..(1): Xaa can be any naturally occurring amino acid
XIKNPLGTRDNPARICKDLLNCEQKVSDGKYWIDPNLGCPSDAIEVFCNFSAGGQTCLPPVSVTKAFTIITPEIEEGRILPFLGNHEPLIKSSMIVLLPKYPHHHPHSSGSWHRIIIEGKKMGLCELCRGNRSSGEADSSCFHDQITSLISLIHKLNPRKTREVLG

SEQ ID NO: 3276 - protein, 439 aa, Homo Sapiens
MKLALLLPWACCCLCGSALATGFLYPFSAAALQQHGYPEPGAGSPGSGYASRRHWCHHTVTRTVSCQVQNGSETVVQRVYQSCRWPGPCANLVRTLIRPTYRVSYRTVTVLEWRCCPGFTGSNCDEECMNCTRLSDMSERLTTLEAKVLLLEAAERPSSPDNDLPAPESTPPTWNEDFLPDAIPLAHPVPRQRRPTGPAGPPGQTGPPGPAGPPGSKGDRGQTGEKGPAGPPGLLGPPGPRGLPGEMGRPGPPGPPGPAGNPGPSPNSPQGALYSLQPPTDKDNGDSRLASAIVDTVLAGVPGPRGPPGPPGPPGPRGPPGPPGTPGSQGLAGERGTVGPSGEPGVKGEEGEKAATAEGEGVQQLREALKILAERVLILEHMIGIHDPLASPEGGSGQDAALRANLKMKRGGAQPDGVLAALLGPDPGQKSVDQASSRK

SEQ ID NO: 3277 - protein, 441 aa, Homo Sapiens
MKLALLLPWACCCLCGSALATGFLYPFSAAALQQHGYPEPGAGSPGSGYASRRHWCHHTVTRTVSCQVQNGSETVVQRVYQSCRWPGPCANLVSYRTLIRPTYRVSYRTVTVLEWRCCPGFTGSNCDEECMNCTRLSDMSERLTTLEAKVLLLEAAERPSSPDNDLPAPESTPPTWNEDFLPDAIPLAHPVPRQRRPTGPAGPPGQTGPPGPAGPPGSKGDRGQTGEKGPAGPPGLLGPPGPRGLPGEMGRPGPPGPPGPAGNPGPSPNSPQGALYSLQPPTDKDNGDSRLASAIVDTVLAGVPGPRGPPGPPGPPGPRGPPGPPGTPGSQGLAGERGTVGPSGEPGVKGEEGEKAATAEGEGVQQLREALKILAERVLILEHMIGIHDPLASPEGGSGQDAALRANLKMKRGGAQPDGVLAALLGPDPGQKSVDQASSRK

SEQ ID NO: 3278 - protein, 714 aa, Homo Sapiens
LSWTKAGSPAPPGVIPFQSGFIFTQRARLQAPTGTVIPAALGTELALVLSLCSHRVNHAFLFAVRSQKRKLQLGLQFLPGKTVVHLGSRRSVAFDLDMHDGRWHHLALELRGRTVTLVTACGQRRVPVLLPFHRDPALDPGGSFLFGKMNPHAVQFEGALCQFSIYPVTQVAHNYCTHLRKQCGQADTYQSPLGPLFSQDSGRPFTFQSDLALLGLENLTTATPALGSLPAGRGPRGTVAPATPTKPQRTSPTNPHQHMAVGGPAQTPLLPAKLSASNALDPMLPASVGGSTRTPRPAAAQPSQKITATKIPKSLPTKPSAPSTSIVPIKSPHPTQKTAPSSFTKSALPTQKQVPPTSRPVPARVSRPAEKPIQRNPGMPRPPPPSTRPLPPTTSSSKKPIPTLARTEAKITSHASKPASARTSTHKPPPFTALSSSPAPTPGSTRSTRPPATMVPPTSGTSTPRTAPAVPTPGSAPTGSKKPIGSEASKKAGPKSSPRKPVPLRPGKAARDVPLSDLTTRPSPRQPQPSQQTTPALVLAPAQFLSSSPRPTSSGYSIFHLAGSTPFPLLMGPPGPKGDCGLPGPPGLPGLPGIPGARGPRGPPGPYGNPGLPGPPGAKGDMGLPGLSGNPGPPGRKGLPGPVGDPGPKGSRGYIGLPGLFGLPGSDGERGLPGVPGKRGKMGMPVLLPQSSEARGGNSMPSEGALAGRHGSHL

SEQ ID NO: 3279 - protein, 1860 aa, Homo Sapiens
MGAGSARGARGTAAAAAARGGGFLFSWILVSFACHLASTQGAPEDVDILQRLGLSWTKAGSPAPPGVIPFQSGFIFTQRARLQAPTGTVIPAALGTELALVLSLCSHRVNHAFLFAVRSQKRKLQLGLQFLPGKTVVHLGSRRSVAFDLDMHDGRWHHLALELRGRTVTLVTACGQRRVPVLLPFHRDPALDPGGSFLFGKMNPHAVQFEGALCQFSIYPVTQVAHNYCTHLRKQCGQADTYQSPLGPLFSQDSGRPFTFQSDLALLGLENLTTATPALGSLPAGRGPRGTVAPATPTKPQRTSPTNPHQHMAVGGPAQTPLLPAKLSASNALDPMLPASVGGSTRTPRPAAAQPSQKITATKIPKSLPTKPSAPSTSIVPIKSPHPTQKTAPSSFTKSALPTQKQVPPTSRPVPARVSRPAEKPIQRNPGMPRPPPPSTRPLPPTTSSSKKPIPTLARTEAKITSHASKPASARTSTHKPPPFTALSSSPAPTPGSTRSTRPPATMVPPTSGTSTPRTAPAVPTPGSAPTGSKKPIGSEASKKAGPKSSPRKPVPLRPGKAARDVPLSDLTTRPSPRQPQPSQQTTPALVLAPAQFLSSSPRPTSSGYSIFHLAGSTPFPLLMGPPGPKGDCGLPGPPGLPGLPGIPGARGPRGPPGPYGNPGLPGPPGAKGQKGDPGLSPGKAHDGAKGDMGLPGLSGNPGPPGRKGHKGYPGPAGHPGEQGQPGPEGSPGAKGYPGRQGLPGPVGDPGPKGSRGYIGLPGLFGLPGSDGERGLPGVPGKRGKMGMPGFPGVFGERGPPGLDGNPGELGLPGPPGVPGLIGDLGVLGPIGYPGPKGMKGLMGSVGEPGLKGDKGEQGVPGVSGDPGFQGDKGSQGLPGFPGARGKPGPLGKVGDKGSIGFPGPPGPEGFPGDIGPPGDNGPEGMKGKPGARGLPGPRGQLGPEGDEGPMGPPGAPGLEGQPGRKGFPGRPGLDGVKGEPGDPGRPGPVGEQGFMGFIGLVGEPGIVGEKGDRGMMGPPGVPGPKGSMGHPGMPGGMGTPGEPGPQGPPGSRGPPGMRGAKGRRGPRGPDGPAGEQGSRGLKGPPGPQGRPGRPGQQGVAGERGHLGSRGFPGIPGPSGPPGTKGLPGEPGPQGPQGPIGPPGEMGPKGPPGAVGEPGLPGEAGMKGDLGPLGTPGEQGLIGQRGEPGLEGDSGPMGPDGLKGDRGDPGPDGEHGEKGQEGLMGEDGPPGPPGVTGVRGPEGKSGKQGEKGRTGAKGAKGYQGQLGEMGVPGDPGPPGTPGPKGSRGSLGPTGAPGRMGAQGEPGLAGYDGHKGIVGPLGPPGPKGEKGEQGEDGKAEGPPGPPGDRGPVGDRGDRGEPGDPGYPGQEGVQGLRGKPGQQGQPGHPGPRGWPGPKGSKGAEGPKGKQGKAGAPGRRGVQGLQGLPGPRGVVGRQGLEGIAGPDGLPGRDGQAGQQGEQGDDGDPGPMGPAGKRGNPGVAGLPGAQGPPGFKGESGLPGQLGPPGKRGTEGRTGLPGNQGEPGSKGQPGDSGEMGFPGMAGLFGPKGPPGDIGFKGIQGPRGPPGLMGKEGIVGPLGILGPSGLPGPKGDKGSRGDWGLQGPRGPPGPRGRPGPPGPPGGPIQLQQDDLGAAFQTWMDTSGALRPESYSYPDRLVLDQGGEIFKTLHYLSNLIQSIKTPLGTKENPARVCRDLMDCEQKMVDGTYWVDPNLGCSSDTIEVSCNFTHGGQTCLKPITASKVEFAISRVQMNFLHLLSSEVTQHITIHCLNMTVWQEGTGQTPAKQAVRFRAWNGQIFEAGGQFRPEVSMDGCKVQDGRWHQTLFTFRTQDPQQLPIISVDNLPPASSGKQYRLEVGPACFL

SEQ ID NO: 3280 - protein, 485 aa, Homo Sapiens
  misc_feature (1)..(1): Xaa can be any naturally occurring amino acid
XAAQPSQKITATKIPKSLPTKPSAPSTSIVPIKSPHPTQKTAPSSFTKSALPTQKQVPPTSRPVPARVSRPAEKPIQRNPGMPRPPPPSTRPLPPTTSSSKKPIPTLARTEAKITSHASKPASARTSTHKPPPFTALSSSPAPTPGSTRSTRPPATMVPPTSGTSTPRTAPAVPTPGSAPTGSKKPIGSEASKKAGPKSSPRKPVPLRPGKAARDVPLSDLTTRPSPRQPQPSQQTTPALVLAPAQFLSSSPRPTSSGYSIFHLAGSTPFPLLMGPPGPKGDCGLPGPPGLPGLPGIPGARGPRGPPGPYGNPGLPGPPGAKGDMGLPGLSGNPGPPGRKGHKGYPGPAGHPGEQGQPGPEGSPGAKGYPGRQGLPGPVGDPGPKGSRGYIGLPGLFGLPGSDGERGLPGVPGKRGKMGMPGFPGVFGERGPPGLDGNPGELGLPGPPGVPGLIGDLGVLGPIGYPGPKGMKGLMGSVGEPGLKG

SEQ ID NO: 3281 - protein, 80 aa, Homo Sapiens
ATTSSEATTTPRPLLSTPVDGAEDPRCLEALKPGNCGEYVVRWYYDKQVNSCARFWFSGCNGSGNRFNSEKECQETCIQG

SEQ ID NO: 3282 - protein, 142 aa, Homo Sapiens
FDSYLVQIFGSSSPQPGFGMSGEELSESTPEPQKEISESLSVTRDQDEDDKAPEPTWADDLPATTSSEATTTPRPLLSTPVDGAEDPRCLEALKPGNCGEYVVRWYYDKQVNSCARFWFSGCNGSGNRFNSEKECQETCIQG

SEQ ID NO: 3283 - protein, 130 aa, Homo Sapiens
GMPGTSIPGPPGPKGDRGGPGIPGFKGEPGLSIRGPKGVQGPRGPVGAPGLKGDGYPGVPGPRGLPGPPGPMGLRGVGDTGAKTLNTSHGLEDPSCPDCSFCHFSLAADIQPKWPALLQLIPASGTRQDG

SEQ ID NO: 3284 - protein, 67 aa, Homo Sapiens
KGNPGNAQKGEAGERGPGGIPGYKGDKQYSREDREVEHNNEKYVACLLPSPALLQQSSLTHHGTCSH

SEQ ID NO: 3285 - protein, 1125 aa, Homo Sapiens
MWNRYFVFYLLLLSAFTSQTVSGQRKKGPKSNLLARKSDVQGSICFIDIVFIVDSSESSKIALFDKQKDFVDSLSDKIFQLTPGRSLEYDIKLAALQFSSSVQIDPPFSSWKDLQTFKQKVKSMNLIGQGTFSYYAISNATRLLKREGRKDGVKVVLLMTDGIDHPKNPDVQSISEDARISGISFITIALSTVVNEAKLRLISGDSSSEPTLLLSDPTLVDKIQDRLDILFEKKCERKICECEKGDPGDPGPPGTHGNPGIKGERGPKGNPGNAQKGEAGERGPGGIPGYKGDKGERGECGKPGIKGDKGSPGPYGPKGPRGIQGITGPPGDPGPKGFQGNKGEPGPPGPYGSPGAPGIGQQGIKGERGQEGRPGAPGPIGVGEPGQPGPRGPEGVPGERGLPGEGFPGPKGEKGSEGPTGPQGLQGLSIKGEKGDIGPVGPQGPMGIPGIGSQGEQGIQGPIGPPGPQGPAGQGLPGSKGEVGQMGPTGPRGPVGIGVQGPKGEPGSIGLPGQPGVPGEDGAAGKKGEAGLPGARGPEGPPGKGQPGPKGDEGKKGSKGNQGQRGLPGPEGPKGEPGIMGPFGMPGTSIPGPPGPKGDRGGPGIPGFKGEPGLSIRGPKGVQGPRGPVGAPGLKGDGYPGVPGPRGLPGPPGPMGLRGVGDTGAKGEPGVRGPPGPSGPRGVGTQGPKGDTGQKGLPGPPGPPGYGSQGIKGEQGPQGFPGPKGTMGHGLPGQKGEHGERGDVGKKGDKGEIGEPGSPGKQGLQGPKGDLGLTKEEIIKLITEICGCGPKCKETPLELVFVIDSSESVGPENFQIIKNFVKTMADRVALDLATARIGIINYSHKVEKVANLKQFSSKDDFKLAVDNMQYLGEGTYTATALQAANDMFEDARPGVKKVALVITDGQTDSRDKEKLTEVVKNASDTNVEIFVIGVVKKNDPNFEIFHKEMNLIATDPEHVYQFDDFFTLQDTLKQKLFQKICEDFDSYLVQIFGSSSPQPGFGMSGEELSESTPEPQKEISESLSVTRDQDEDDKAPEPTWADDLPATTSSEATTTPRPLLSTPVDGAEDPRCLEALKPGNCGEYVVRWYYDKQVNSCARFWFSGCNGSGNRFNSEKECQETCIQG

SEQ ID NO: 3286 - protein, 1487 aa, Homo Sapiens
MIRLGAPQTLVLLTLLVAAVLRCQGQDVQEAGSCVQDGQRYNDKDVWKPEPCRICVCDTGTVLCDDIICEDVKDCLSPEIPFGECCPICPTDLATASGQPGPKGQKGEPGDIKDIVGPKGPPGPQGPAGEQGPRGDRGDKGEKGAPGPRGRDGEPGTPGNPGPPGPPGPPGPPGLGGNFAAQMAGGFDEKAGGAQLGVMQGPMGPMGPRGPPGPAGAPGPQGFQGNPGEPGEPGVSGPMGPRGPPGPPGKPGDDGEAGKPGKAGERGPPGPQGARGFPGTPGLPGVKGHRGYPGLDGAKGEAGAPGVKGESGSPGENGSPGPMGPRGLPGERGRTGPAGAAGARGNDGQPGPAGPPGPVGPAGGPGFPGAPGAKGEAGPTGARGPEGAQGPRGEPGTPGSPGPAGASGNPGTDGIPGAKGSAGAPGIAGAPGFPGPRGPPGPQGATGPLGPKGQTGEPGIAGFKGEQGPKGEPGPAGPQGAPGPAGEEGKRGARGEPGGVGPIGPPGERGAPGNRGFPGQDGLAGPKGAPGERGPSGLAGPKGANGDPGRPGEPGLPGARGLTGRPGDAGPQGKVGPSGAPGEDGRPGPPGPQGARGQPGVMGFPGPKGANGEPGKAGEKGLPGAPGLRGLPGKDGETGAAGPPGPAGPAGERGEQGAPGPSGFQGLPGPPGPPGEGGKPGDQGVPGEAGAPGLVGPRGERGFPGERGSPGAQGLQGPRGLPGTPGTDGPKGASGPAGPPGAQGPPGLQGMPGERGAAGIAGPKGDRGDVGEKGPEGAPGKDGGRGLTGPIGPPGPAGANGEKGEVGPPGPAGSAGARGAPGERGETGPPGPAGFAGPPGADGQPGAKGEQGEAGQKGDAGAPGPQGPSGAPGPQGPTGVTGPKGARGAQGPPGATGFPGAAGRVGPPGSNGNPGPPGPPGPSGKDGPKGARGDSGPPGRAGEPGLQGPAGPPGEKGEPGDDGPSGAEGPPGPQGLAGQRGIVGLPGQRGERGFPGLPGPSGEPGKQGAPGASGDRGPPGPVGPPGLTGPAGEPGREGSPGADGPPGRDGAAGVKGDRGETGAVGAPGAPGPPGSPGPAGPTGKQGDRGEAGAQGPMGPSGPAGARGIQGPQGPRGDKGEAGEPGERGLKGHRGFTGLQGLPGPPGPSGDQGASGPAGPSGPRGPPGPVGPSGKDGANGIPGPIGPPGPRGRSGETGPAGPPGNPGPPGPPGPPGPGIDMSAFAGLGPREKGPDPLQYMRADQAAGGLRQHDAEVDATLKSLNNQIESIRSPEGSRKNPARTCRDLKLCHPEWKSGDYWIDPNQGCTLDAMKVFCNMETGETCVYPNPANVPKKNWWSSKSKEKKHIWFGETINGGFHFSYGDDNLAPNTANVQMTFLRLLSTEGSQNITYHCKNSIAYLDEAAGNLKKALLIQGSNDVEIRAEGNSRFTYTALKDGCTKHTGKWGKTVIEYRSQKTSRLPIIDIAPMDIGGPEQEFGVDIGPVCFL

SEQ ID NO: 3287 - protein, 1418 aa, Homo Sapiens
MIRLGAPQTLVLLTLLVAAVLRCQGQDVRQPGPKGQKGEPGDIKDIVGPKGPPGPQGPAGEQGPRGDRGDKGEKGAPGPRGRDGEPGTPGNPGPPGPPGPPGPPGLGGNFAAQMAGGFDEKAGGAQLGVMQGPMGPMGPRGPPGPAGAPGPQGFQGNPGEPGEPGVSGPMGPRGPPGPPGKPGDDGEAGKPGKAGERGPPGPQGARGFPGTPGLPGVKGHRGYPGLDGAKGEAGAPGVKGESGSPGENGSPGPMGPRGLPGERGRTGPAGAAGARGNDGQPGPAGPPGPVGPAGGPGFPGAPGAKGEAGPTGARGPEGAQGPRGEPGTPGSPGPAGASGNPGTDGIPGAKGSAGAPGIAGAPGFPGPRGPPGPQGATGPLGPKGQTGEPGIAGFKGEQGPKGEPGPAGPQGAPGPAGEEGKRGARGEPGGVGPIGPPGERGAPGNRGFPGQDGLAGPKGAPGERGPSGLAGPKGANGDPGRPGEPGLPGARGLTGRPGDAGPQGKVGPSGAPGEDGRPGPPGPQGARGQPGVMGFPGPKGANGEPGKAGEKGLPGAPGLRGLPGKDGETGAAGPPGPAGPAGERGEQGAPGPSGFQGLPGPPGPPGEGGKPGDQGVPGEAGAPGLVGPRGERGFPGERGSPGAQGLQGPRGLPGTPGTDGPKGASGPAGPPGAQGPPGLQGMPGERGAAGIAGPKGDRGDVGEKGPEGAPGKDGGRGLTGPIGPPGPAGANGEKGEVGPPGPAGSAGARGAPGERGETGPPGPAGFAGPPGADGQPGAKGEQGEAGQKGDAGAPGPQGPSGAPGPQGPTGVTGPKGARGAQGPPGATGFPGAAGRVGPPGSNGNPGPPGPPGPSGKDGPKGARGDSGPPGRAGEPGLQGPAGPPGEKGEPGDDGPSGAEGPPGPQGLAGQRGIVGLPGQRGERGFPGLPGPSGEPGKQGAPGASGDRGPPGPVGPPGLTGPAGEPGREGSPGADGPPGRDGAAGVKGDRGETGAVGAPGAPGPPGSPGPAGPTGKQGDRGEAGAQGPMGPSGPAGARGIQGPQGPRGDKGEAGEPGERGLKGHRGFTGLQGLPGPPGPSGDQGASGPAGPSGPRGPPGPVGPSGKDGANGIPGPIGPPGPRGRSGETGPAGPPGNPGPPGPPGPPGPGIDMSAFAGLGPREKGPDPLQYMRADQAAGGLRQHDAEVDATLKSLNNQIESIRSPEGSRKNPARTCRDLKLCHPEWKSGDYWIDPNQGCTLDAMKVFCNMETGETCVYPNPANVPKKNWWSSKSKEKKHIWFGETINGGFHFSYGDDNLAPNTANVQMTFLRLLSTEGSQNITYHCKNSIAYLDEAAGNLKKALLIQGSNDVEIRAEGNSRFTYTALKDGCTKHTGKWGKTVIEYRSQKTSRLPIIDIAPMDIGGPEQEFGVDIGPVCFL

SEQ ID NO: 3288 - protein, 1466 aa, Homo Sapiens
MMSFVQKGSWLLLALLHPTIILAQQEAVEGGCSHLGQSYADRDVWKPEPCQICVCDSGSVLCDDIICDDQELDCPNPEIPFGECCAVCPQPPTAPTRPPNGQGPQGPKGDPGPPGIPGRNGDPGIPGQPGSPGSPGPPGICESCPTGPQNYSPQYDSYDVKSGVAVGGLAGYPGPAGPPGPPGPPGTSGHPGSPGSPGYQGPPGEPGQAGPSGPPGPPGAIGPSGPAGKDGESGRPGRPGERGLPGPPGIKGPAGIPGFPGMKGHRGFDGRNGEKGETGAPGLKGENGLPGENGAPGPMGPRGAPGERGRPGLPGAAGARGNDGARGSDGQPGPPGPPGTAGFPGSPGAKGEVGPAGSPGSNGAPGQRGEPGPQGHAGAQGPPGPPGINGSPGGKGEMGPAGIPGAPGLMGARGPPGPAGANGAPGLRGGAGEPGKNGAKGEPGPRGERGEAGIPGVPGAKGEDGKDGSPGEPGANGLPGAAGERGAPGFRGPAGPNGIPGEKGPAGERGAPGPAGPRGAAGEPGRDGVPGGPGMRGMPGSPGGPGSDGKPGPPGSQGESGRPGPPGPSGPRGQPGVMGFPGPKGNDGAPGKNGERGGPGGPGPQGPPGKNGETGPQGPPGPTGPGGDKGDTGPPGPQGLQGLPGTGGPPGENGKPGEPGPKGDAGAPGAPGGKGDAGAPGERGPPGLAGAPGLRGGAGPPGPEGGKGAAGPPGPPGAAGTPGLQGMPGERGGLGSPGPKGDKGEPGGPGADGVPGKDGPRGPTGPIGPPGPAGQPGDKGEGGAPGLPGIAGPRGSPGERGETGPPGPAGFPGAPGQNGEPGGKGERGAPGEKGEGGPPGVAGPPGGSGPAGPPGPQGVKGERGSPGGPGAAGFPGARGLPGPPGSNGNPGPPGPSGSPGKDGPPGPAGNTGAPGSPGVSGPKGDAGQPGEKGSPGAQGPPGAPGPLGIAGITGARGLAGPPGMPGPRGSPGPQGVKGESGKPGANGLSGERGPPGPQGLPGLAGTAGEPGRDGNPGSDGLPGRDGSPGGKGDRGENGSPGAPGAPGHPGPPGPVGPAGKSGDRGESGPAGPAGAPGPAGSRGAPGPQGPRGDKGETGERGAAGIKGHRGFPGNPGAPGSPGPAGQQGAIGSPGPAGPRGPVGPSGPPGKDGTSGHPGPIGPPGPRGNRGERGSEGSPGHPGQPGPPGPPGAPGPCCGGVGAAAIAGIGGEKAGGFAPYYGDEPMDFKINTDEIMTSLKSVNGQIESLISPDGSRKNPARNCRDLKFCHPELKSGEYWVDPNQGCKLDAIKVFCNMETGETCISANPLNVPRKHWWTDSSAEKKHVWFGESMDGGFQFSYGNPELPEDVLDVHLAFLRLLSSRASQNITYHCKNSIAYMDQASGNVKKALKLMGSNEGEFKAEGNSKFTYTVLEDGCTKHTGEWSKTVFEYRTRKAVRLPIVDIAPYDIGGPDQEFGVDVGPVCFL

SEQ ID NO: 3289 - protein, 1163 aa, Homo Sapiens
MMSFVQKGSWLLLALLHPTIILAQQEAVEGGCSHLGQSYADRDVWKPEPCQICVCDSGSVLCDDIICDDQELDCPNPEIPFGECCAVCPQPPTAPTRPPNGQGPQGPKGDPGPPGIPGRNGDPGIPGQPGSPGSPGPPGICESCPTGPQNYSPQYDSYDVKSGVAVGGLAGYPGPAGPPGPPGPPGTSGHPGSPGSPGYQGPPGEPGQAGPSGPPGPPGAIGPSGPAGKDGESGRPGRPGERGLPGPPGIKGPAGIPGFPGMKGHRGFDGRNGEKGETGAPGLKGENGLPGENGAPGPMGPRGAPGERGRPGLPGAAGARGNDGARGSDGQPGPPGPPGTAGFPGSPGAKGEVGPAGSPGSNGAPGQRGEPGPQGHAGAQGPPGPPGINGSPGGKGEMGPAGIPGAPGLMGARGPPGPAGANGAPGLRGGAGEPGKNGAKGEPGPRGERGEAGIPGVPGAKGEDGKDGSPGEPGANGLPGAAGERGAPGFRGPAGPNGIPGEKGPAGERGAPGPAGPRGAAGEPGRDGVPGGPGMRGMPGSPGGPGSDGKPGPPGSQGESGRPGPPGPSGPRGQPGVMGFPGPKGNDGAPGKNGERGGPGGPGPQGPPGKNGETGPQGPPGPTGPGGDKGDTGPPGPQGLQGLPGTGGPPGENGKPGEPGPKGDAGAPGAPGGKGDAGAPGERGPPGLAGAPGLRGGAGPPGPEGGKGAAGPPGPPGAAGTPGLQGMPGERGGLGSPGPKGDKGEPGGPGADGVPGKDGPRGPTGPIGPPGPAGQPGDKGEGGAPGLPGIAGPRGSPGERGETGPPGPAGFPGAPGQNGEPGGKGERGAPGEKGEGGPPGVAGPPGKDGTSGHPGPIGPPGPRGNRGERGSEGSPGHPGQPGPPGPPGAPGPCCGGVGAAAIAGIGGEKAGGFAPYYGDEPMDFKINTDEIMTSLKSVNGQIESLISPDGSRKNPARNCRDLKFCHPELKSGEYWVDPNQGCKLDAIKVFCNMETGETCISANPLNVPRKHWWTDSSAEKKHVWFGESMDGGFQFSYGNPELPEDVLDVHLAFLRLLSSRASQNITYHCKNSIAYMDQASGNVKKALKLMGSNEGEFKAEGNSKFTYTVLEDGCTKHTGEWSKTVFEYRTRKAVRLPIVDIAPYDIGGPDQEFGVDVGPVCFL

SEQ ID NO: 3290 - protein, 90 aa, Homo Sapiens
  misc_feature (1)..(1): Xaa can be any naturally occurring amino acid
XRGAPGERGRPGLPGAAGARGNDGARGSDGQPGPPGPPGTAGFPGSPGAKGPPGINGSPGGKGEMGPAGIPGAPGLMGARGPPGPAGANG

SEQ ID NO: 3291 - protein, 1669 aa, Homo Sapiens
MGPRLSVWLLLLPAALLLHEEHSRAAAKGGCAGSGCGKCDCHGVKGQKGERGLPGLQGVIGFPGMQGPEGPQGPPGQKGDTGEPGLPGTKGTRGPPGASGYPGNPGLPGIPGQDGPPGPPGIPGCNGTKGERGPLGPPGLPGFAGNPGPPGLPGMKGDPGEILGHVPGMLLKGERGFPGIPGTPGPPGLPGLQGPVGPPGFTGPPGPPGPPGPPGEKGQMGLSFQGPKGDKGDQGVSGPPGVPGQAQVQEKGDFATKGEKGQKGEPGFQGMPGVGEKGEPGKPGPRGKPGKDGDKGEKGSPGFPGEPGYPGLIGRQGPQGEKGEAGPPGPPGIVIGTGPLGEKGERGYPGTPGPRGEPGPKGFPGLPGQPGPPGLPVPGQAGAPGFPGERGEKGDRGFPGTSLPGPSGRDGLPGPPGSPGPPGQPGYTNGIVECQPGPPGDQGPPGIPGQPGFIGEIGEKGQKGESCLICDIDGYRGPPGPQGPPGEIGFPGQPGAKGDRGLPGRDGVAGVPGPQGTPGLIGQPGAKGEPGEFYFDLRLKGDKGDPGFPGQPGMPGRAGSPGRDGHPGLPGPKGSPGSVGLKGERGPPGGVGFPGSRGDTGPPGPPGYGPAGPIGDKGQAGFPGGPGSPGLPGPKGEPGKIVPLPGPPGAEGLPGSPGFPGPQGDRGFPGTPGRPGLPGEKGAVGQPGIGFPGPPGPKGVDGLPGDMGPPGTPGRPGFNGLPGNPGVQGQKGEPGVGLPGLKGLPGLPGIPGTPGEKGSIGVPGVPGEHGAIGPPGLQGIRGEPGPPGLPGSVGSPGVPGIGPPGARGPPGGQGPPGLSGPPGIKGEKGFPGFPGLDMPGPKGDKGAQGLPGITGQSGLPGLPGQQGAPGIPGFPGSKGEMGVMGTPGQPGSPGPVGAPGLPGEKGDHGFPGSSGPRGDPGLKGDKGDVGLPGKPGSMDKVDMGSMKGQKGDQGEKGQIGPIGEKGSRGDPGTPGVPGKDGQAGQPGQPGPKGDPGISGTPGAPGLPGPKGSVGGMGLPGTPGEKGVPGIPGPQGSPGLPGDKGAKGEKGQAGPPGIGIPGLRGEKGDQGIAGFPGSPGEKGEKGSIGIPGMPGSPGLKGSPGSVGYPGSPGLPGEKGDKGLPGLDGIPGVKGEAGLPGTPGPTGPAGQKGEPGSDGIPGSAGEKGEPGLPGRGFPGFPGAKGDKGSKGEVGFPGLAGSPGIPGSKGEQGFMGPPGPQGQPGLPGSPGHATEGPKGDRGPQGQPGLPGLPGPMGPPGLPGIDGVKGDKGNPGWPGAPGVPGPKGDPGFQGMPGIGGSPGITGSKGDMGPPGVPGFQGPKGLPGLQGIKGDQGDQGVPGAKGLPGPPGPPGPYDIIKGEPGLPGPEGPPGLKGLQGLPGPKGQQGVTGLVGIPGPPGIPGFDGAPGQKGEMGPAGPTGPRGFPGPPGPDGLPGSMGPPGTPSVDHGFLVTRHSQTIDDPQCPSGTKILYHGYSLLYVQGNERAHGQDLGTAGSCLRKFSTMPFLFCNINNVCNFASRNDYSYWLSTPEPMPMSMAPITGENIRPFISRCAVCEAPAMVMAVHSQTIQIPPCPSGWSSLWIGYSFVMHTSAGAEGSGQALASPGSCLEEFRSAPFIECHGRGTCNYYANAYSFWLATIERSEMFKKPTPSTLKAGELRTHVSRCQVCMRRT

SEQ ID NO: 3292 - protein, 519 aa, Homo Sapiens
MGPRLSVWLLLLPAALLLHEEHSRAAAKGGCAGSGCGKCDCHGVKGQKGERGLPGLQGVIGFPGMQGPEGPQGPPGQKGDTGEPGLPGTKGTRGPPGASGYPGNPGLPGIPGQDGPPGPPGIPGCNGTKGERGPLGPPGLPGFAGNPGPPGLPGMKGDPGEILGHVPGMLLKGERGFPGIPGTPGPPGLPGLQGPVGPPGFTGPPGPPGPPGPPGEKGQMGLSFQGPKGDKGDQGVSGPPGVPGQAQVQEKGDFATKGEKGQKGEPGFQGMPGVGEKGEPGKPGPRGKPGKDGDKGEKGSPGFPGEPGYPGLIGRQGPQGEKGEAGPPGPPGIVIGTGPLGEKGERGYPGTPGPRGEPGPKGFPGLPGQPGPPGLPVPGQAGAPGFPGERGEKGDRGFPGTSLPGPSGRDGLPGPPGSPGPPGQPGYTNGIVECQPGPPGDQGPPGIPGQPGFIGEIGEKGQKGESCLICDIDGYRGPPGPQGPPGEIGFPGQPGAKGDRGLPGRDGVAGVPLLFQIHK

SEQ ID NO: 3293 - protein, 223 aa, Homo Sapiens
MQGPEGPQGPPGQKGDTGEPGLPGTKGTRGPPGASGYPGNPGLPGIPGQDGPPGPPGIPGCNGTKGERGPLGPPGLPGFAGNPGPPGLPGMKGDPGEILGHVPGMLLKGERGFPGIPGTPGPPGLPGLQGPVGPPGFTGPPGPPGPPGPPGEKGQMGLSFQGPKGDKGDQGVSGPPGVPGQAQVQEKGDFATKGEKGQKGEPGFQGMPGVGEKGEPGKPGPRV

SEQ ID NO: 3294 - protein, 105 aa, Homo Sapiens
MGRDQRAVAGPALRRWLLLGTVTVGFLAQSVLAGVKKFDVPCGGRDCSGGCQCYPEKGGRGQPGPVGPQGYNGPPGLQGFPGLQGRKGDKGERGAPGVTGPKGDV

SEQ ID NO: 3295 - protein, 1712 aa, Homo Sapiens
MGRDQRAVAGPALRRWLLLGTVTVGFLAQSVLAGVKKFDVPCGGRDCSGGCQCYPEKGGRGQPGPVGPQGYNGPPGLQGFPGLQGRKGDKGERGAPGVTGPKGDVGARGVSGFPGADGIPGHPGQGGPRGRPGYDGCNGTQGDSGPQGPPGSEGFTGPPGPQGPKGQKGEPYALPKEERDRYRGEPGEPGLVGFQGPPGRPGHVGQMGPVGAPGRPGPPGPPGPKGQQGNRGLGFYGVKGEKGDVGQPGPNGIPSDTLHPIIAPTGVTFHPDQYKGEKGSEGEPGIRGISLKGEEGIMGFPGLRGYPGLSGEKGSPGQKGSRGLDGYQGPDGPRGPKGEAGDPGPPGLPAYSPHPSLAKGARGDPGFPGAQGEPGSQGEPGDPGLPGPPGLSIGDGDQRRGLPGEMGPKGFIGDPGIPALYGGPPGPDGKRGPPGPPGLPGPPGPDGFLFGLKGAKGRAGFPGLPGSPGARGPKGWKGDAGECRCTEGDEAIKGLPGLPGPKGFAGINGEPGRKGDRGDPGQHGLPGFPGLKGVPGNIGAPGPKGAKGDSRTITTKGERGQPGVPGVPGMKGDDGSPGRDGLDGFPGLPGPPGDGIKGPPGDPGYPGIPGTKGTPGEMGPPGLGLPGLKGQRGFPGDAGLPGPPGFLGPPGPAGTPGQIDCDTDVKRAVGGDRQEAIQPGCIGGPKGLPGLPGPPGPTGAKGLRGIPGFAGADGGPGPRGLPGDAGREGFPGPPGFIGPRGSKGAVGLPGPDGSPGPIGLPGPDGPPGERGLPGEVLGAQPGPRGDAGVPGQPGLKGLPGDRGPPGFRGSQGMPGMPGLKGQPGLPGPSGQPGLYGPPGLHGFPGAPGQEGPLGLPGIPGREGLPGDRGDPGDTGAPGPVGMKGLSGDRGDAGFTGEQGHPGSPGFKGIDGMPGTPGLKGDRGSPGMDGFQGMPGLKGRPGFPGSKGEAGFFGIPGLKGLAGEPGFKGSRGDPGPPGPPPVILPGMKDIKGEKGDEGPMGLKGYLGAKGIQGMPGIPGLSGIPGLPGRPGHIKGVKGDIGVPGIPGLPGFPGVAGPPGITGFPGFIGSRGDKGAPGRAGLYGEIGATGDFGDIGDTINLPGRPGLKGERGTTGIPGLKGFFGEKGTEGDIGFPGITGVTGVQGPPGLKGQTGFPGLTGPPGSQGELGRIGLPGGKGDDGWPGAPGLPGFPGLRGIRGLHGLPGTKGFPGSPGSDIHGDPGFPGPPGERGDPGEANTLPGPVGVPGQKGDQGAPGERGPPGSPGLQGFPGITPPSNISGAPGDKGAPGIFGLKGYRGPPGPPGSAALPGSKGDTGNPGAPGTPGTKGWAGDSGPQGRPGVFGLPGEKGPRGEQGFMGNTGPTGAVGDRGPKGPKGDPGFPGAPGTVGAPGIAGIPQKIAVQPGTVGPQGRRGPPGAPGEMGPQGPPGEPGFRGAPGKAGPQGRGGVSAVPGFRGDEGPIGHQGPIGQEGAPGRPGSPGLPGMPGRSVSIGYLLVKHSQTDQEPMCPVGMNKLWSGYSLLYFEGQEKAHNQDLGLAGSCLARFSTMPFLYCNPGDVCYYASRNDKSYWLSTTAPLPMMPVAEDEIKPYISRCSVCEAPAIAIAVHSQDVSIPHCPAGWRSLWIGYSFLMHTAAGDEGGGQSLVSPGSCLEDFRATPFIECNGGRGTCHYYANKYSFWLTTIPEQSFQGSPSADTLKAGLIRTHISRCQVCMKNL

SEQ ID NO: 3296 - protein, 42 aa, Homo Sapiens
  misc_feature (1)..(1): Xaa can be any naturally occurring amino acid
XGDPGQHGLPGFPGLKVRSNFIMKLARHSEASPGVPFLPFIS

SEQ ID NO: 3297 - protein, 199 aa, Homo Sapiens
ATWTTRGFVFTRHSQTTAIPSCPEGTVPLYSGFSFLFVQGNQRAHGQDLGTLGSCLQRFTTMPFLFCNVNDVCNFASRNDYSYWLSTPALMPMNMAPITGRALEPYISRCTVCEGPAIAIAVHSQTTDIPPCPHGWISLWKGFSFIMKAYSINCESWGIRKNNKSLSGVHEEKTLKLKKTAELLFFILKNKVMTEHAVI

SEQ ID NO: 3298 - protein, 156 aa, Homo Sapiens
GNPGEKGNRGVPGMPGLKGLKGLPGPAGPPGPRGDLGSTGNPGEPGLRGIPGSMGNMGMPGSKGKRGTLGFPGRAGRPGLPGIHGLQGDKGEPGYSEGTRPGPPGPTGDPGLPGDMGKKGEMGQPGPPGHLGPAGPEGAPGSPGSPGLPVPAAPSL

SEQ ID NO: 3299 - protein, 1670 aa, Homo Sapiens
MSARTAPRPQVLLLPLLLVLLAAAPAASKGCVCKDKGQCFCDGAKGEKGEKGFPGPPGSPGQKGFTGPEGLPGPQGPKGFPGLPGLTGSKGVRGISGLPGFSGSPGLPGTPGNTGPYGLVGVPGCSGSKGEQGFPGLPGTLGYPGIPGAAGLKGQKGAPAKEEDIELDAKGDPGLPGAPGPQGLPGPPGFPGPVGPPGPPGFFGFPGAMGPRGPKGHMGERVIGHKGERGVKGLTGPPGPPGTVIVTLTGPDNRTDLKGEKGDKGAMGEPGPPGPSGLPGESYGSEKGAPGDPGLQGKPGKDGVPGFPGSEGVKGNRGFPGLMGEDGIKGQKGDIGPPGFRGPTEYYDTYQEKGDEGTPGPPGPRGARGPQGPSGPPGVPGSPGSSRPGLRGAPGWPGLKGSKGERGRPGKDAMGTPGSPGCAGSPGLPGSPGPPGPPGDIVFRKGPPGDHGLPGYLGSPGIPGVDGPKGEPGLLCTQCPYIPGPPGLPGLPGLHGVKGIPGRQGAAGLKGSPGSPGNTGLPGFPGFPGAQGDPGLKGEKGETLQPEGQVGVPGDPGLRGQPGRKGLDGIPGTPGVKGLPGPKGELALSGEKGDQGPPGDPGSPGSPGPAGPAGPPGYGPQGEPGLQGTQGVPGAPGPPGEAGPRGELSVSTPVPGPPGPPGPPGHPGPQGPPGIPGSLGKCGDPGLPGPDGEPGIPGIGFPGPPGPKGDQGFPGTKGSLGCPGKMGEPGLPGKPGLPGAKGEPAVAMPGGPGTPGFPGERGNSGEHGEIGLPGLPGLPGTPGNEGLDGPRGDPGQPGPPGEQGPPGRCIEGPRGAQGLPGLNGLKGQQGRRGKTGPKGDPGIPGLDRSGFPGETGSPGIPGHQGEMGPLGQRGYPGNPGILGPPGEDGVIGMMGFPGAIGPPGPPGNPGTPGQRGSPGIPGVKGQRGTPGAKGEQGDKGNPGPSEISHVIGDKGEPGLKGFAGNPGEKGNRGVPGMPGLKGLKGLPGPAGPPGPRGDLGSTGNPGEPGLRGIPGSMGNMGMPGSKGKRGTLGFPGRAGRPGLPGIHGLQGDKGEPGYSEGTRPGPPGPTGDPGLPGDMGKKGEMGQPGPPGHLGPAGPEGAPGSPGSPGLPGKPGPHGDLGFKGIKGLLGPPGIRGPPGLPGFPGSPGPMGIRGDQGRDGIPGPAGEKGETGLLRAPPGPRGNPGAQGAKGDRGAPGFPGLPGRKGAMGDAGPRGPTGIEGFPGPPGLPGAIIPGQTGNRGPPGSRGSPGAPGPPGPPGSHVIGIKGDKGSMGHPGPKGPPGTAGDMGPPGRLGAPGTPGLPGPRGDPGFQGFPGVKGEKGNPGFLGSIGPPGPIGPKGPPGVRGDPGTLKIISLPGSPGPPGTPGEPGMQGEPGPPGPPGNLGPCGPRGKPGKDGKPGTPGPAGEKGNKGSKGEPGPAGSDGLPGLKGKRGDSGSPATWTTRGFVFTRHSQTTAIPSCPEGTVPLYSGFSFLFVQGNQRAHGQDLGTLGSCLQRFTTMPFLFCNVNDVCNFASRNDYSYWLSTPALMPMNMAPITGRALEPYISRCTVCEGPAIAIAVHSQTTDIPPCPHGWISLWKGFSFIMFTSAGSEGTGQALASPGSCLEEFRASPFLECHGRGTCNYYSNSYSFWLASLNPERMFRKPIPSTVKAGELEKIISRCQVCMKKRH

SEQ ID NO: 3300 - protein, 155 aa, Homo Sapiens
VRGDPGTLKIISLPGSPGPPGTPGEPGMQGEPGPPGPPGNLGPCGPRGKPGKDGKPGTPGPAGEKGNKGSKGEPGPAGSDGLPGLKGKRGDSGSPATWTTRGFVFTRHSQTTAIPSCPEGTVPLYSGFSFLFVQGNQRAHGQDLDALFVKVLRSP

SEQ ID NO: 3301 - protein, 1690 aa, Homo Sapiens
MWSLHIVLMRCSFRLTKSLATGPWSLILILFSVQYVYGSGKKYIGPCGGRDCSVCHCVPEKGSRGPPGPPGPQGPIGPLGAPGPIGLSGEKGMRGDRGPPGAAGDKGDKGPTGVPGFPGLDGIPGHPGPPGPRGKPGMSGHNGSRGDPGFPGGRGALGPGGPLGHPGEKGEKGNSVFILGAVKGIQGDRGDPGLPGLPGSWGAGGPAGPTGYPGEPGLVGPPGQPGRPGLKGNPGVGVKGQMGDPGEVGQQGSPGPTLLVEPPDFCLYKGEKGIKGIPGMVGLPGPPGRKGESGIGAKGEKGIPGFPGPRGDPGSYGSPGFPGLKGELGLVGDPGLFGLIGPKGDPGNRGHPGPPGVLVTPPLPLKGPPGDPGFPGRYGETGDVGPPGPPGLLGRPGEACAGMIGPPGPQGFPGLPGLPGEAGIPGRPDSAPGKPGKPGSPGLPGAPGLQGLPGSSVIYCSVGNPGPQGIKGKVGPPGGRGPKGEKGNEGLCACEPGPMGPPGPPGLPGRQGSKGDLGLPGWLGTKGDPGPPGAEGPPGLPGKHGASGPPGNKGAKGDMVVSRVKGHKGERGPDGPPGFPGQPGSHGRDGHAGEKGDPGPPGDHEDATPGGKGFPGPLGPPGKAGPVGPPGLGFPGPPGERGHPGVPGHPGVRGPDGLKGQKGDTISCNVTYPGRHGPPGFDGPPGPKGFPGPQGAPGLSGSDGHKGRPGTPGTAEIPGPPGFRGDMGDPGFGGEKGSSPVGPPGPPGSPGVNGQKGIPGDPAFGHLGPPGKRGLSGVPGIKGPRGDPGCPGAEGPAGIPGFLGLKGPKGREGHAGFPGVPGPPGHSCERGAPGIPGQPGLPGYPGSPGAPGGKGQPGDVGPPGPAGMKGLPGLPGRPGAHGPPGLPGIPGPFGDDGLPGPPGPKGPRGLPGFPGFPGERGKPGAEGCPGAKGEPGEKGMSGLPGDRGLRGAKGAIGPPGDEGEMAIISQKGTPGEPGPPGDDGFPGERGDKGTPGMQGRRGEPGRYGPPGFHRGEPGEKGQPGPPGPPGPPGSTGLRGFIGFPGLPGDQGEPGSPGPPGFSGIDGARGPKGNKGDPASHFGPPGPKGEPGSPGCPGHFGASGEQGLPGIQGPRGSPGRPGPPGSSGPPGCPGDHGMPGLRGQPGEMGDPGPRGLQGDPGIPGPPGIKGPSGSPGLNGLHGLKGQKGTKGASGLHDVGPPGPVGIPGLKGERGDPGSPGISPPGPRGKKGPPGPPGSSGPPGPAGATGRAPKDIPDPGPPGDQGPPGPDGPRGAPGPPGLPGSVDLLRGEPGDCGLPGPPGPPGPPGPPGYKGFPGCDGKDGQKGPVGFPGPQGPHGFPGPPGEKGLPGPPGRKGPTGLPGPRGEPGPPADVDDCPRIPGLPGAPGMRGPEGAMGLPGMRGPSGPGCKGEPGLDGRRGVDGVPGSPGPPGRKGDTGEDGYPGGPGPPGPIGDPGPKGFGPGYLGGFLLVLHSQTDQEPTCPLGMPRLWTGYSLLYLEGQEKAHNQDLGLAGSCLPVFSTLPFAYCNIHQVCHYAQRNDRSYWLASAAPLPMMPLSEEAIRPYVSRCAVCEAPAQAVAVHSQDQSIPPCPQTWRSLWIGYSFLMHTGAGDQGGGQALMSPGSCLEDFRAAPFLECQGRQGTCHFFANKYSFWLTTVKADLQFSSAPAPDTLKESQAQRQKISRCQVCVKYS

SEQ ID NO: 3302 - protein, 296 aa, Homo Sapiens
MWSLHIVLMRCSFRLTKSLATGPWSLILILFSVQYVYGSGKKYIGPCGGRDCSVCHCVPEKGSRGPPGPPGPQGPIGPLGAPGPIGLSGEKGMRGDRGPPGAAGDKGDKGPTGVPGFPGLDGIPGHPGPPGPRGKPGMSGHNGSRGDPGFPGGRGALGPGGPLGHPGEKGEKGNSVFILGAVKGIQGDRGDPGLPGLPGSWGAGGPAGPTGYPGEPGLVGPPGQPGRPGLKGNPGVGVKGQMGDPGEVGQQGSPGPTLLVEPPDFCLYKGEKGIKGIPGMVGLPGPPGRKGESGIG

SEQ ID NO: 3303 - protein, 73 aa, Homo Sapiens
FASRNDYSYWLSTPEPMPMSMQPLKGQSIQPFISRCAVCEAPAVVIAVHSQTIQIPHCPQGWDSLWIGYSFMM

SEQ ID NO: 3304 - protein, 695 aa, Homo Sapiens
MGPPGPPGFPGERGQKGDEGPPGISIPGPPGLDGQPGAPGLPGPPGPAGPHIPPSDEICEPGPPGPPGSPGDKGLQGEQGVKGDKGDTCFNCIGTGISGPPGQPGLPGLPGPPGSLGFPGQKGEKGQAGATGPKGLPGIPGAPGAPGFPGSKGEPGDILTFPGMKGDKGELGSPGAPGLPGLPGTPGQDGLPGLPGPKGEPGGITFKGERGPPGNPGLPGLPGNIGPMGPPGFGPPGPVGEKGIQGVAGNPGQPGIPGPKGDPGQTITQPGKPGLPGNPGRDGDVGLPGDPGLPGQPGLPGIPGSKGEPGIPGIGLPGPPGPKGFPGIPGPPGAPGTPGRIGLEGPPGPPGFPGPKGEPGFALPGPPGPPGLPGFKGALGPKGDRGFPGPPGPPGRTGLDGLPGPKGDVGPNGQPGPMGPPGLPGIGVQGPPGPPGIPGPIGQPGLHGIPGEKGDPGPPGLDVPGPPGERGSPGIPGAPGPIGPPGSPGLPGKAGASGFPGTKGEMGMMGPPGPPGPLGIPGRSGVPGLKGDDGLQGQPGLPGPTGEKGSKGEPGLPGPPGPMDPNLLGSKGEKGEPGLPGIPGVSGPKGYQGLPGDPGQPGLSGQPGLPGPPGPKGNPGLPGQPGLIGPPGLKGTIGDMGFPGPQGVEGPPGPSGVPGQPGSPGLPGQKGDKGDPGISSIGLPGLPGPKVIFGI

SEQ ID NO: 3305 - protein, 1691 aa, Homo Sapiens
MKLRGVSLAAGLFLLALSLWGQPAEAAACYGCSPGSKCDCSGIKGEKGERGFPGLEGHPGLPGFPGPEGPPGPRGQKGDDGIPGPPGPKGIRGPPGLPGFPGTPGLPGMPGHDGAPGPQGIPGCNGTKGERGFPGSPGFPGLQGPPGPPGIPGMKGEPGSIIMSSLPGPKGNPGYPGPPGIQGLPGPTGIPGPIGPPGPPGLMGPPGPPGLPGPKGNMGLNFQGPKGEKGEQGLQGPPGPPGQISEQKRPIDVEFQKGDQGLPGDRGPPGPPGIRGPPGPPGGEKGEKGEQGEPGKRGKPGKDGENGQPGIPGLPGDPGYPGEPGRDGEKGQKGDTGPPGPPGLVIPRPGTGITIGEKGNIGLPGLPGEKGERGFPGIQGPPGLPGPPGAAVMGPPGPPGFPGERGQKGDEGPPGISIPGPPGLDGQPGAPGLPGPPGPAGPHIPPSDEICEPGPPGPPGSPGDKGLQGEQGVKGDKGDTCFNCIGTGISGPPGQPGLPGLPGPPGSLGFPGQKGEKGQAGATGPKGLPGIPGAPGAPGFPGSKGEPGDILTFPGMKGDKGELGSPGAPGLPGLPGTPGQDGLPGLPGPKGEPGGITFKGERGPPGNPGLPGLPGNIGPMGPPGFGPPGPVGEKGIQGVAGNPGQPGIPGPKGDPGQTITQPGKPGLPGNPGRDGDVGLPGDPGLPGQPGLPGIPGSKGEPGIPGIGLPGPPGPKGFPGIPGPPGAPGTPGRIGLEGPPGPPGFPGPKGEPGFALPGPPGPPGLPGFKGALGPKGDRGFPGPPGPPGRTGLDGLPGPKGDVGPNGQPGPMGPPGLPGIGVQGPPGPPGIPGPIGQPGLHGIPGEKGDPGPPGLDVPGPPGERGSPGIPGAPGPIGPPGSPGLPGKAGASGFPGTKGEMGMMGPPGPPGPLGIPGRSGVPGLKGDDGLQGQPGLPGPTGEKGSKGEPGLPGPPGPMDPNLLGSKGEKGEPGLPGIPGVSGPKGYQGLPGDPGQPGLSGQPGLPGPPGPKGNPGLPGQPGLIGPPGLKGTIGDMGFPGPQGVEGPPGPSGVPGQPGSPGLPGQKGDKGDPGISSIGLPGLPGPKGEPGLPGYPGNPGIKGSVGDPGLPGLPGTPGAKGQPGLPGFPGTPGPPGPKGISGPPGNPGLPGEPGPVGGGGHPGQPGPPGEKGKPGQDGIPGPAGQKGEPGQPGFGNPGPPGLPGLSGQKGDGGLPGIPGNPGLPGPKGEPGFHGFPGVQGPPGPPGSPGPALEGPKGNPGPQGPPGRPGPTGFQGLPGPEGPPGLPGNGGIKGEKGNPGQPGLPGLPGLKGDQGPPGLQGNPGRPGLNGMKGDPGLPGVPGFPGMKGPSGVPGSAGPEGEPGLIGPPGPPGLPGPSGQSIIIKGDAGPPGIPGQPGLKGLPGPQGPQGLPGPTGPPGDPGRNGLPGFDGAGGRKGDPGLPGQPGTRGLDGPPGPDGLQGPPGPPGTSSVAHGFLITRHSQTTDAPQCPQGTLQVYEGFSLLYVQGNKRAHGQDLGTAGSCLRRFSTMPFMFCNINNVCNFASRNDYSYWLSTPEPMPMSMQPLKGQSIQPFISRCAVCEAPAVVIAVHSQTIQIPHCPQGWDSLWIGYSFMMHTSAGAEGSGQALASPGSCLEEFRSAPFIECHGRGTCNYYANSYSFWLATVDVSDMFSKPQSETLKAGDLRTRISRCQVCMKRT

SEQ ID NO: 3306 - protein, 1685 aa, Homo Sapiens
MKLRGVSLAAGLFLLALSLWGQPAEAAACYGCSPGSKCDCSGIKGEKGERGFPGLEGHPGLPGFPGPEGPPGPRGQKGDDGIPGPPGPKGIRGPPGLPGFPGTPGLPGMPGHDGAPGPQGIPGCNGTKGERGFPGSPGFPGLQGPPGPPGIPGMKGEPGSIIMSSLPGPKGNPGYPGPPGIQGLPGPTGIPGPIGPPGPPGLMGPPGPPGLPGPKGNMGLNFQGPKGEKGEQGLQGPPGPPGQISEQKRPIDVEFQKGDQGLPGDRGPPGPPGIRGPPGPPGGEKGEKGEQGEPGKRGKPGKDGENGQPGIPGLPGDPGYPGEPGRDGEKGQKGDTGPPGPPGLVIPRPGTGITIGEKGNIGLPGLPGEKGERGFPGIQGPPGLPGPPGAAVMGPPGPPGFPGERGQKGDEGPPGISIPGPPGLDGQPGAPGLPGPPGPAGPHIPPSDEICEPGPPGPPGSPGDKGLQGEQGVKGDKGDTCFNCIGTGISGPPGQPGLPGLPGPPGSLGFPGQKGEKGQAGATGPKGLPGIPGAPGAPGFPGSKGEPGDILTFPGMKGDKGELGSPGAPGLPGLPGTPGQDGLPGLPGPKGEPGGITFKGERGPPGNPGLPGLPGNIGPMGPPGFGPPGPVGEKGIQGVAGNPGQPGIPGPKGDPGQTITQPGKPGLPGNPGRDGDVGLPGDPGLPGQPGLPGIPGSKGEPGIPGIGLPGPPGPKGFPGIPGPPGAPGTPGRIGLEGPPGPPGFPGPKGEPGFALPGPPGPPGLPGFKGALGPKGDRGFPGPPGPPGRTGLDGLPGPKGDVGPNGQPGPMGPPGLPGIGVQGPPGPPGIPGPIGQPGLHGIPGEKGDPGPPGLDVPGPPGERGSPGIPGAPGPIGPPGSPGLPGKAGASGFPGTKGEMGMMGPPGPPGPLGIPGRSGVPGLKGDDGLQGQPGLPGPTGEKGSKGEPGLPGPPGPMDPNLLGSKGEKGEPGLPGIPGVSGPKGYQGLPGDPGQPGLSGQPGLPGPPGPKGNPGLPGQPGLIGPPGLKGTIGDMGFPGPQGVEGPPGPSGVPGQPGSPGLPGQKGDKGDPGISSIGLPGLPGPKGEPGLPGYPGNPGIKGSVGDPGLPGLPGTPGAKGQPGLPGFPGTPGPPGPKGISGPPGNPGLPGEPGPVGGGGHPGQPGPPGEKGKPGQDGIPGPAGQKGEPGQPGFGNPGPPGLPGLSGQKGDGGLPGIPGNPGLPGPKGEPGFHGFPGVQGPPGPPGSPGPALEGPKGNPGPQGPPGRPGLPGPEGPPGLPGNGGIKGEKGNPGQPGLPGLPGLKGDQGPPGLQGNPGRPGLNGMKGDPGLPGVPGFPGMKGPSGVPGSAGPEGEPGLIGPPGPPGLPGPSGQSIIIKGDAGPPGIPGQPGLKGLPGPQGPQGLPGPTGPPGDPGRNGLPGFDGAGGRKGDPGLPGQPGTRGLDGPPGPDGLQGPPGPPGTSSVAHGFLITRHSQTTDAPQCPQGTLQVYEGFSLLYVQGNKRAHGQDLGTAGSCLRRFSTMPFMFCNINNVCNFASRNDYSYWLSTPEPMPMSMQPLKGQSIQPFISRCAVCEAPAVVIAVHSQTIQIPHCPQGWDSLWIGYSFMMHTSAGAEGSGQALASPGSCLEEFRSAPFIECHGRGTCNYYANSYSFWLATVDVSDMFSKPQSETLKAGDLRTRISRCQVCMKRT

SEQ ID NO: 3307 - protein, 40 aa, Homo Sapiens
MKLRGVSLAAGLFLLALSLWGQPAEAAEETLFATPVTQAF

SEQ ID NO: 3308 - protein, 174 aa, Homo Sapiens
  misc_feature (1)..(1): Xaa can be any naturally occurring amino acid
XDDGLQGQPGLPGPTGEKGSKGEPGLPGPPGPMDPNLLGSKGEKGEPGLPGIPGVSGPKGYQGLPGDPGQPGLSGQPGLPGPPGPKGNPGLPGQPGLIGPPGLKGTIGDMGFPGPQGVEGPPGPSGVPGQPGSPGLPGQKGDKGDPGISSIGLPGLPGPKMIRRYVLGFVASPK

SEQ ID NO: 3309 - protein, 115 aa, Homo Sapiens
  misc_feature (1)..(1): Xaa can be any naturally occurring amino acid
XGLPGPTGPPGDPGRNGLPGFDGAGGRKGDPGLPGQPGTRGLDGPPGPDGLQGPPGPPGTSSVAHGFLITRHSQTTDAPQCPQGTLQVYEGFSLLYVQGNKRAHGQDLVNLSQKR

SEQ ID NO: 3310 - protein, 1690 aa, Homo Sapiens
MHPGLWLLLVTLCLTEELAAAGEKSYGKPCGGQDCSGSCQCFPEKGARGRPGPIGIQGPTGPQGFTGSTGLSGLKGERGFPGLLGPYGPKGDKGPMGVPGFLGINGIPGHPGQPGPRGPPGLDGCNGTQGAVGFPGPDGYPGLLGPPGLPGQKGSKGDPVLAPGSFKGMKGDPGLPGLDGITGPQGAPGFPGAVGPAGPPGLQGPPGPPGPLGPDGNMGLGFQGEKGVKGDVGLPGPAGPPPSTGELEFMGFPKGKKGSKGEPGPKGFPGISGPPGFPGLGTTGEKGEKGEKGIPGLPGPRGPMGSEGVQGPPGQQGKKGTLGFPGLNGFQGIEGQKGDIGLPGPDVFIDIDGAVISGNPGDPGVPGLPGLKGDEGIQGLRGPSGVPGLPALSGVPGALGPQGFPGLKGDQGNPGRTTIGAAGLPGRDGLPGPPGPPGPPSPEFETETLHNKESGFPGLRGEQGPKGNLGLKGIKGDSGFCACDGGVPNTGPPGEPGPPGPWGLIGLPGLKGARGDRGSGGAQGPAGAPGLVGPLGPSGPKGKKGEPILSTIQGMPGDRGDSGSQGFRGVIGEPGKDGVPGLPGLPGLPGDGGQGFPGEKGLPGLPGEKGHPGPPGLPGNGLPGLPGPRGLPGDKGKDGLPGQQGLPGSKGITLPCIIPGSYGPSGFPGTPGFPGPKGSRGLPGTPGQPGSSGSKGEPGSPGLVHLPELPGFPGPRGEKGLPGFPGLPGKDGLPGMIGSPGLPGSKGATGDIFGAENGAPGEQGLQGLTGHKGFLGDSGLPGLKGVHGKPGLLGPKGERGSPGTPGQVGQPGTPGSSGPYGIKGKSGLPGAPGFPGISGHPGKKGTRGKKGPPGSIVKKGLPGLKGLPGNPGLVGLKGSPGSPGVAGLPALSGPKGEKGSVGFVGFPGIPGLPGIPGTRGLKGIPGSTGKMGPSGRAGTPGEKGDRGNPGPVGIPSPRRPMSNLWLKGDKGSQGSAGSNGFPGPRGDKGEAGRPGPPGLPGAPGLPGIIKGVSGKPGPPGFMGIRGLPGLKGSSGITGFPGMPGESGSQGIRGSPGLPGASGLPGLKGDNGQTVEISGSPGPKGQPGESGFKGTKGRDGLIGNIGFPGNKGEDGKVGVSGDVGLPGAPGFPGVAGMRGEPGLPGSSGHQGAIGPLGSPGLIGPKGFPGFPGLHGLNGLPGTKGTHGTPGPSITGVPGPAGLPGPKGEKGYPGIGIGAPGKPGLRGQKGDRGFPGLQGPAGLPGAPGISLPSLIAGQPGDPGRPGLDGERGRPGPAGPPGPPGPSSNQGDTGDPGFPGIPGPKGPKGDQGIPGFSGLPGELGLKGMRGEPGFMGTPGKVGPPGDPGFPGMKGKAGPRGSSGLQGDPGQTPTAEAVQVPPGPLGLPGIDGIPGLTGDPGAQGPVGLQGSKGLPGIPGKDGPSGLPGPPGALGDPGLPGLQGPPGFEGAPGQQGPFGMPGMPGQSMRVGYTLVKHSQSEQVPPCPIGMSQLWVGYSLLFVEGQEKAHNQDLGFAGSCLPRFSTMPFIYCNINEVCHYARRNDKSYWLSTTAPIPMMPVSQTQIPQYISRCSVCEAPSQAIAVHSQDITIPQCPLGWRSLWIGYSFLMHTAAGAEGGGQSLVSPGSCLEDFRATPFIECSGARGTCHYFANKYSFWLTTVEERQQFGELPVSETLKAGQLHTRVSRCQVCMKSL

SEQ ID NO: 3311 - protein, 1707 aa, Homo Sapiens
MHPGLWLLLVTLCLTEELAAAGEKSYGKPCGGQDCSGSCQCFPEKGARGRPGPIGIQGPTGPQGFTGSTGLSGLKGERGFPGLLGPYGPKGDKGPMGVPGFLGINGIPGHPGQPGPRGPPGLDGCNGTQGAVGFPGPDGYPGLLGPPGLPGQKGSKGDPVLAPGSFKGMKGDPGLPGLDGITGPQGAPGFPGAVGPAGPPGLQGPPGPPGPLGPDGNMGLGFQGEKGVKGDVGLPGPAGPPPSTGELEFMGFPKGKKGSKGEPGPKGFPGISGPPGFPGLGTTGEKGEKGEKGIPGLPGPRGPMGSEGVQGPPGQQGKKGTLGFPGLNGFQGIEGQKGDIGLPGPDVFIDIDGAVISGNPGDPGVPGLPGLKGDEGIQGLRGPSGVPGLPALSGVPGALGPQGFPGLKGDQGNPGRTTIGAAGLPGRDGLPGPPGPPGPPSPEFETETLHNKESGFPGLRGEQGPKGNLGLKGIKGDSGFCACDGGVPNTGPPGEPGPPGPWGLIGLPGLKGARGDRGSGGAQGPAGAPGLVGPLGPSGPKGKKGEPILSTIQGMPGDRGDSGSQGFRGVIGEPGKDGVPGLPGLPGLPGDGGQGFPGEKGLPGLPGEKGHPGPPGLPGNGLPGLPGPRGLPGDKGKDGLPGQQGLPGSKGDCCCREVGKGDLDTERGITLPCIIPGSYGPSGFPGTPGFPGPKGSRGLPGTPGQPGSSGSKGEPGSPGLVHLPELPGFPGPRGEKGLPGFPGLPGKDGLPGMIGSPGLPGSKGATGDIFGAENGAPGEQGLQGLTGHKGFLGDSGLPGLKGVHGKPGLLGPKGERGSPGTPGQVGQPGTPGSSGPYGIKGKSGLPGAPGFPGISGHPGKKGTRGKKGPPGSIVKKGLPGLKGLPGNPGLVGLKGSPGSPGVAGLPALSGPKGEKGSVGFVGFPGIPGLPGIPGTRGLKGIPGSTGKMGPSGRAGTPGEKGDRGNPGPVGIPSPRRPMSNLWLKGDKGSQGSAGSNGFPGPRGDKGEAGRPGPPGLPGAPGLPGIIKGVSGKPGPPGFMGIRGLPGLKGSSGITGFPGMPGESGSQGIRGSPGLPGASGLPGLKGDNGQTVEISGSPGPKGQPGESGFKGTKGRDGLIGNIGFPGNKGEDGKVGVSGDVGLPGAPGFPGVAGMRGEPGLPGSSGHQGAIGPLGSPGLIGPKGFPGFPGLHGLNGLPGTKGTHGTPGPSITGVPGPAGLPGPKGEKGYPGIGIGAPGKPGLRGQKGDRGFPGLQGPAGLPGAPGISLPSLIAGQPGDPGRPGLDGERGRPGPAGPPGPPGPSSNQGDTGDPGFPGIPGPKGPKGDQGIPGFSGLPGELGLKGMRGEPGFMGTPGKVGPPGDPGFPGMKGKAGPRGSSGLQGDPGQTPTAEAVQVPPGPLGLPGIDGIPGLTGDPGAQGPVGLQGSKGLPGIPGKDGPSGLPGPPGALGDPGLPGLQGPPGFEGAPGQQGPFGMPGMPGQSMRVGYTLVKHSQSEQVPPCPIGMSQLWVGYSLLFVEGQEKAHNQDLGFAGSCLPRFSTMPFIYCNINEVCHYARRNDKSYWLSTTAPIPMMPVSQTQIPQYISRCSVCEAPSQAIAVHSQDITIPQCPLGWRSLWIGYSFLMHTAAGAEGGGQSLVSPGSCLEDFRATPFIECSGARGTCHYFANKYSFWLTTVEERQQFGELPVSETLKAGQLHTRVSRCQVCMKSL

SEQ ID NO: 3312 - protein, 1633 aa, Homo Sapiens
MHPGLWLLLVTLCLTEELAAAGEKSYGKPCGGQDCSGSCQCFPEKGARGRPGPIGIQGPTGPQGFTGSTGLSGLKGERGFPGLLGPYGPKGDKGPMGVPGFLGINGIPGHPGQPGPRGPPGLDGCNGTQGAVGFPGPDGYPGLLGPPGLPGQKGSKGDPVLAPGSFKGMKGDPGLPGLDGITGPQGAPGFPGAVGPAGPPGLQGPPGPPGPLGPDGNMGLGFQGEKGVKGDVGLPGPAGPPPSTGELEFMGFPKGKKGSKGEPGPKGFPGISGPPGFPGLGTTGEKGEKGEKGIPGLPGPRGPMGSEGVQGPPGQQGKKGTLGFPGLNGFQGIEGQKGDIGLPGPDVFIDIDGAVISGNPGDPGVPGLPGLKGDEGIQGLRGPSGVPGLPALSGVPGALGPQGFPGLKGDQGNPGRTTIGAAGLPGRDGLPGPPGPPGPPSPEFETETLHNKESGFPGLRGEQGPKGNLGLKGIKGDSGFCACDGGVPNTGPPGEPGPPGPWGLIGLPGLKGARGDRGSGGAQGPAGAPGLVGPLGPSGPKGKKGEPILSTIQGMPGDRGDSGSQGFRGVIGEPGKDGVPGLPGLPGLPGDGGQGFPGEKGLPGLPGEKGHPGPPGLPGNGLPGLPGPRGLPGDKGKDGLPGQQGLPGSKGITLPCIIPGSYGPSGFPGTPGFPGPKGSRGLPGTPGQPGSSGSKGEPGSPGLVHLPELPGFPGPRGEKGLPGFPGLPGKDGLPGMIGSPGLPGSKGATGDIFGAENGAPGEQGLQGLTGHKGFLGDSGLPGLKGVHGKPGLLGPKGERGSPGTPGQVGQPGTPGSSGPYGIKGKSGLPGAPGFPGISGHPGKKGTRGKKGPPGSIVKKGLPGLKGLPGNPGLVGLKGSPGSPGVAGLPALSGPKGEKGSVGFVGFPGIPGLPGIPGTRGLKGIPGSTGKMGPSGRAGTPGEKGDRGNPGPVGIPSPRRPMSNLWLKGDKGSQGSAGSNGFPGPRGDKGEAGRPGPPGLPGAPGLPGIIKGVSGKPGPPGFMGIRGLPGLKGSSGITGFPGMPGESGSQGIRGSPGLPGASGLPGLKGDNGQTVEISGSPGPKGQPGESGFKGTKGRDGLIGNIGFPGNKGEDGKVGVSGDVGLPGAPGFPGVAGMRGEPGLPGSSGHQGAIGPLGSPGLIGPKGPSITGVPGPAGLPGPKGEKGYPGIGIGAPGKPGLRGQKGDRGFPGLQGPAGLPGAPGISLPSLIAGQPGDPGRPGLDGERGRPGPAGPPGPPGPSSNQGDTGDPGFPGIPGPKGPKGDQGIPGFSGLPGELGLKGSSGLQGDPGQTPTAEAVQVPPGPLGLPGIDGIPGLTGDPGAQGPVGLQGSKGLPGIPGKDGPSGLPGPPGALGDPGLPGLQGPPGFEGAPGQQGPFGMPGMPGQSMRVGYTLVKHSQSEQVPPCPIGMSQLWVGYSLLFVEGQEKAHNQDLGFAGSCLPRFSTMPFIYCNINEVCHYARRNDKSYWLSTTAPIPMMPVSQTQIPQYISRCSVCEAPSQAIAVHSQDITIPQCPLGWRSLWIGYSFLMHTAAGAEGGGQSLVSPGSCLEDFRATPFIECSGARGTCHYFANKYSFWLTTVEERQQFGELPVSETLKAGQLHTRVSRCQVCMKSL

SEQ ID NO: 3313 - protein, 1678 aa, Homo Sapiens
MHPGLWLLLVTLCLTEELAAAGEKSYGKPCGGQDCSGSCQCFPEKGARGRPGPIGIQGPTGPQGFTGSTGLSGLKGERGFPGLLGPYGPKGDKGPMGVPGFLGINGIPGHPGQPGPRGPPGLDGCNGTQGAVGFPGPDGYPGLLGPPGLPGQKGSKGDPVLAPGSFKGMKGDPGLPGLDGITGPQGAPGFPGAVGPAGPPGLQGPPGPPGPLGPDGNMGLGFQGEKGVKGDVGLPGPAGPPPSTGELEFMGFPKGKKGSKGEPGPKGFPGISGPPGFPGLGTTGEKGEKGEKGIPGLPGPRGPMGSEGVQGPPGQQGKKGTLGFPGLNGFQGIEGQKGDIGLPGPDVFIDIDGAVISGNPGDPGVPGLPGLKGDEGIQGLRGPSGVPGLPALSGVPGALGPQGFPGLKGDQGNPGRTTIGAAGLPGRDGLPGPPGPPGPPSPEFETETLHNKESGFPGLRGEQGPKGNLGLKGIKGDSGFCACDGGVPNTGPPGEPGPPGPWGLIGLPGLKGARGDRGSGGAQGPAGAPGLVGPLGPSGPKGKKGEPILSTIQGMPGDRGDSGSQGFRGVIGEPGKDGVPGLPGLPGLPGDGGQGFPGEKGLPGLPGEKGHPGPPGLPGNGLPGLPGPRGLPGDKGKDGLPGQQGLPGSKGITLPCIIPGSYGPSGFPGTPGFPGPKGSRGLPGTPGQPGSSGSKGEPGSPGLVHLPELPGFPGPRGEKGLPGFPGLPGKDGLPGMIGSPGLPGSKGATGDIFGAENGAPGEQGLQGLTGHKGFLGDSGLPGLKGVHGKPGLLGPKGERGSPGTPGQVGQPGTPGSSGPYGIKGKSGLPGAPGFPGISGHPGKKGTRGKKGPPGSIVKKGLPGLKGLPGNPGLVGLKGSPGSPGVAGLPALSGPKGEKGSVGFVGFPGIPGLPGIPGTRGLKGIPGSTGKMGPSGRAGTPGEKGDRGNPGPVGIPSPRRPMSNLWLKGDKGSQGSAGSNGFPGPRGDKGEAGRPGPPGLPGAPGLPGIIKGVSGKPGPPGFMGIRGLPGLKGSSGITGFPGMPGESGSQGIRGSPGLPGASGLPGLKGDNGQTVEISGSPGPKGQPGESGFKGTKGRDGLIGNIGFPGNKGEDGKVGVSGDVGLPGAPGFPGVAGMRGEPGLPGSSGHQGAIGPLGSPGLIGPKGFPGFPGLHGLNGLPGTKGTHGTPGPSITGVPGPAGLPGPKGEKGYPGIGIGAPGKPGLRGQKGDRGFPGLQGPAGLPGAPGISLPSLIAGQPGDPGRPGLDGERGRPGPAGPPGPPGPSSNQGDTGDPGFPGIPGFSGLPGELGLKGMRGEPGFMGTPGKVGPPGDPGFPGMKGKAGPRGSSGLQGDPGQTPTAEAVQVPPGPLGLPGIDGIPGLTGDPGAQGPVGLQGSKGLPGIPGKDGPSGLPGPPGALGDPGLPGLQGPPGFEGAPGQQGPFGMPGMPGQSMRVGYTLVKHSQSEQVPPCPIGMSQLWVGYSLLFVEGQEKAHNQDLGFAGSCLPRFSTMPFIYCNINEVCHYARRNDKSYWLSTTAPIPMMPVSQTQIPQYISRCSVCEAPSQAIAVHSQDITIPQCPLGWRSLWIGYSFLMHTAAGAEGGGQSLVSPGSCLEDFRATPFIECSGARGTCHYFANKYSFWLTTVEERQQFGELPVSETLKAGQLHTRVSRCQVCMKSL

SEQ ID NO: 3314 - protein, 1666 aa, Homo Sapiens
MHPGLWLLLVTLCLTEELAAAGEKSYGKPCGGQDCSGSCQCFPEKGARGRPGPIGIQGPTGPQGFTGSTGLSGLKGERGFPGLLGPYGPKGDKGPMGVPGFLGINGIPGHPGQPGPRGPPGLDGCNGTQGAVGFPGPDGYPGLLGPPGLPGQKGSKGDPVLAPGSFKGMKGDPGLPGLDGITGPQGAPGFPGAVGPAGPPGLQGPPGPPGPLGPDGNMGLGFQGEKGVKGDVGLPGPAGPPPSTGELEFMGFPKGKKGSKGEPGPKGFPGISGPPGFPGLGTTGEKGEKGEKGIPGLPGPRGPMGSEGVQGPPGQQGKKGTLGFPGLNGFQGIEGQKGDIGLPGPDVFIDIDGAVISGNPGDPGVPGLPGLKGDEGIQGLRGPSGVPGLPALSGVPGALGPQGFPGLKGDQGNPGRTTIGAAGLPGRDGLPGPPGPPGPPSPEFETETLHNKESGFPGLRGEQGPKGNLGLKGIKGDSGFCACDGGVPNTGPPGEPGPPGPWGLIGLPGLKGARGDRGSGGAQGPAGAPGLVGPLGPSGPKGKKGEPILSTIQGMPGDRGDSGSQGFRGVIGEPGKDGVPGLPGLPGLPGDGGQGFPGEKGLPGLPGEKGHPGPPGLPGNGLPGLPGPRGLPGDKGKDGLPGQQGLPGSKGITLPCIIPGSYGPSGFPGTPGFPGPKGSRGLPGTPGQPGSSGSKGEPGSPGLVHLPELPGFPGPRGEKGLPGFPGLPGKDGLPGMIGSPGLPGSKGATGDIFGAENGAPGEQGLQGLTGHKGFLGDSGLPGLKGVHGKPGLLGPKGERGSPGTPGQVGQPGTPGSSGPYGIKGKSGLPGAPGFPGISGHPGKKGTRGKKGPPGSIVKKGLPGLKGLPGNPGLVGLKGSPGSPGVAGLPALSGPKGEKGSVGFVGFPGIPGLPGIPGTRGLKGIPGSTGKMGPSGRAGTPGEKGDRGNPGPVGIPSPRRPMSNLWLKGDKGSQGSAGSNGFPGPRGDKGEAGRPGPPGLPGAPGLPGIIKGVSGKPGPPGFMGIRGLPGLKGSSGITGFPGMPGESGSQGIRGSPGLPGASGLPGLKGDNGQTVEISGSPGPKGQPGESGFKGTKGRDGLIGNIGFPGNKGEDGKVGVSGDVGLPGAPGFPGVAGMRGEPGLPGSSGHQGAIGPLGSPGLIGPKGPSITGVPGPAGLPGPKGEKGYPGIGIGAPGKPGLRGQKGDRGFPGLQGPAGLPGAPGISLPSLIAGQPGDPGRPGLDGERGRPGPAGPPGPPGPSSNQGDTGDPGFPGIPGPKGPKGDQGIPGFSGLPGELGLKGMRGEPGFMGTPGKVGPPGDPGFPGMKGKAGPRGSSGLQGDPGQTPTAEAVQVPPGPLGLPGIDGIPGLTGDPGAQGPVGLQGSKGLPGIPGKDGPSGLPGPPGALGDPGLPGLQGPPGFEGAPGQQGPFGMPGMPGQSMRVGYTLVKHSQSEQVPPCPIGMSQLWVGYSLLFVEGQEKAHNQDLGFAGSCLPRFSTMPFIYCNINEVCHYARRNDKSYWLSTTAPIPMMPVSQTQIPQYISRCSVCEAPSQAIAVHSQDITIPQCPLGWRSLWIGYSFLMHTAAGAEGGGQSLVSPGSCLEDFRATPFIECSGARGTCHYFANKYSFWLTTVEERQQFGELPVSETLKAGQLHTRVSRCQVCMKSL

SEQ ID NO: 3315 - protein, 1691 aa, Homo Sapiens
MLINKLWLLLVTLCLTEELAAAGEKSYGKPCGGQDCSGSCQCFPEKGARGRPGPIGIQGPTGPQGFTGSTGLSGLKGERGFPGLLGPYGPKGDKGPMGVPGFLGINGIPGHPGQPGPRGPPGLDGCNGTQGAVGFPGPDGYPGLLGPPGLPGQKGSKGDPVLAPGSFKGMKGDPGLPGLDGITGPQGAPGFPGAVGPAGPPGLQGPPGPPGPLGPDGNMGLGFQGEKGVKGDVGLPGPAGPPPSTGELEFMGFPKGKKGSKGEPGPKGFPGISGPPGFPGLGTTGEKGEKGEKGIPGLPGPRGPMGSEGVQGPPGQQGKKGTLGFPGLNGFQGIEGQKGDIGLPGPDVFIDIDGAVISGNPGDPGVPGLPGLKGDEGIQGLRGPSGVPGLPALSGVPGALGPQGFPGLKGDQGNPGRTTIGAAGLPGRDGLPGPPGPPGPPSPEFETETLHNKESGFPGLRGEQGPKGNLGLKGIKGDSGFCACDGGVPNTGPPGEPGPPGPWGLIGLPGLKGARGDRGSGGAQGPAGAPGLVGPLGPSGPKGKKGEPILSTIQGMPGDRGDSGSQGFRGVIGEPGKDGVPGLPGLPGLPGDGGQGFPGEKGLPGLPGEKGHPGPPGLPGNGLPGLPGPRGLPGDKGKDGLPGQQGLPGSKGITLPCIIPGSYGPSGFPGTPGFPGPKGSRGLPGTPGQPGSSGSKGEPGSPGLVHLPELPGFPGPRGEKGLPGFPGLPGKDGLPGMIGSPGLPGSKGATGDIFGAENGAPGEQGLQGLTGHKGFLGDSGLPGLKGVHGKPGLLGPKGERGSPGTPGQVGQPGTPGSSGPYGIKGKSGLPGAPGFPGISGHPGKKGTRGKKGPPGSIVKKGLPGLKGLPGNPGLVGLKGSPGSPGVAGLPALSGPKGEKGSVGFVGFPGIPGLPGIPGTRGLKGIPGSTGKMGPSGRAGTPGEKGDRGNPGPVGIPSPRRPMSNLWLKGDKGSQGSAGSNGFPGPRGDKGEAGRPGPPGLPGAPGLPGIIKGVSGKPGPPGFMGIRGLPGLKGSSGITGFPGMPGESGSQGIRGSPGLPGASGLPGLKGDNGQTVEISGSPGPKGQPGESGFKGTKGRDGLIGNIGFPGNKGEDGKVGVSGDVGLPGAPGFPGVAGMRGEPGLPGSSGHQGAIGPLGSPGLIGPKGFPGFPGLHGLNGLPGTKGTHGTPGPSITGVPGPAGLPGPKGEKGYPGIGIGAPGKPGLRGQKGDRGFPGLQGPAGLPGAPGISLPSLIAGQPGDPGRPGLDGERGRPGPAGPPGPPGPSSNQGDTGDPGFPGIPGPKGPKGDQGIPGFSGLPGELGLKGMRGEPGFMGTPGKVGPPGDPGFPGMKGKAGPRGSSGLQGDPGQTPTAEAVQVPPGPLGLPGIDGIPGLTGDPGAQGPVGLQGSKGLPGIPGKDGPSGLPGPPGALGDPGLPGLQGPPGFEGAPGQQGPFGMPGMPGQSMRVGYTLVKHSQSEQVPPCPIGMSQLWVGYSLLFVEGQEKAHNQDLGFAGSCLPRFSTMPFIYCNINEVCHYARRNDKSYWLSTTAPIPMMPVSQTQIPQYISRCSVCEAPSQAIAVHSQDITIPQCPLGWRSLWIGYSFLMHTAAGAEGGGQSLVSPGSCLEDFRATPFIECSGARGTCHYFANKYSFWLTTVEERQQFGELPVSETLKAGQLHTRVSRCQVCMKSL

SEQ ID NO: 3316 - protein, 1838 aa, Homo Sapiens
MDVHTRWKARSALRPGAPLLPPLLLLLLWAPPPSRAAQPADLLKVLDFHNLPDGITKTTGFCATRRSSKGPDVAYRVTKDAQLSAPTKQLYPASAFPEDFSILTTVKAKKGSQAFLVSIYNEQGIQQIGLELGRSPVFLYEDHTGKPGPEDYPLFRGINLSDGKWHRIALSVHKKNVTLILDCKKKTTKFLDRSDHPMIDINGIIVFGTRILDEEVFEGDIQQLLFVSDHRAAYDYCEHYSPDCDTAVPDTPQSQDPNPDEYYTEGDGEGETYYYEYPYYEDPEDLGKEPTPSKKPVEAAKETTEVPEELTPTPTEAAPMPETSEGAGKEEDVGIGDYDYVPSEDYYTPSPYDDLTYGEGEENPDQPTDPGAGAEIPTSTADTSNSSNPAPPPGEGADDLEGEFTEETIRNLDENYYDPYYDPTSSPSEIGPGMPANQDTIYEGIGGPRGEKGQKGEPAIIEPGMLIEGPPGPEGPAGLPGPPGTMGPTGQVGDPGERGPPGRPGLPGADGLPGPPGTMLMLPFRFGGGGDAGSKGPMVSAQESQAQAILQQARLALRGPAGPMGLTGRPGPVGPPGSGGLKGEPGDVGPQGPRGVQGPPGPAGKPGRRGRAGSDGARGMPGQTGPKGDRGFDGLAGLPGEKGHRGDPGPSGPPGPPGDDGERGDDGEVGPRGLPGEPGPRGLLGPKGPPGPPGPPGVTGMDGQPGPKGNVGPQGEPGPPGQQGNPGAQGLPGPQGAIGPPGEKGPLGKPGLPGMPGADGPPGHPGKEGPPGEKGGQGPPGPQGPIGYPGPRGVKGADGIRGLKGTKGEKGEDGFPGFKGDMGIKGDRGEIGPPGPRGEDGPEGPKGRGGPNGDPGPLGPPGEKGKLGVPGLPGYPGRQGPKGSIGFPGFPGANGEKGGRGTPGKPGPRGQRGPTGPRGERGPRGITGKPGPKGNSGGDGPAGPPGERGPNGPQGPTGFPGPKGPPGPPGKDGLPGHPGQRGETGFQGKTGPPGPPGVVGPQGPTGETGPMGERGHPGPPGPPGEQGLPGLAGKEGTKGDPGPAGLPGKDGPPGLRGFPGDRGLPGPVGALGLKGNEGPPGPPGPAGSPGERGPAGAAGPIGIPGRPGPQGPPGPAGEKGAPGEKGPQGPAGRDGLQGPVGLPGPAGPVGPPGEDGDKGEIGEPGQKGSKGDKGEQGPPGPTGPQGPIGQPGPSGADGEPGPRGQQGLFGQKGDEGPRGFPGPPGPVGLQGLPGPPGEKGETGDVGQMGPPGPPGPRGPSGAPGADGPQGPPGGIGNPGAVGEKGEPGEAGEPGLPGEGGPPGPKGERGEKGESGPSGAAGPPGPKGPPGDDGPKGSPGPVGFPGDPGPPGEPGPAGQDGPPGDKGDDGEPGQTGSPGPTGEPGPSGPPGKRGPPGPAGPEGRQGEKGAKGEAGLEGPPGKTGPIGPQGAPGKPGPDGLRGIPGPVGEQGLPGSPGPDGPPGPMGPPGLPGLKGDSGPKGEKGHPGLIGLIGPPGEQGEKGDRGLPGPQGSSGPKGEQGITGPSGPIGPPGPPGLPGPPGPKGAKGSSGPTGPKGEAGHPGPPGPPGPPGEVIQPLPIQASRTRRNIDASQLLDDGNGENYVDYADGMEEIFGSLNSLKLEIEQMKRPLGTQQNPARTCKDLQLCHPDFPDGEYWVDPNQGCSRDSFKVYCNFTAGGSTCVFPDKKSEGARITSWPKENPGSWFSEFKRGKLLSYVDAEGNPVGVVQMTFLRLLSASAHQNVTYHCYQSVAWQDAATGSYDKALRFLGSNDEEMSYDNNPYIRALVDGCATKKGYQKTVLEIDTPKVEQVPIVDIMFNDFGEASQKFGFEVGPACFMG

SEQ ID NO: 3317 - protein, 1838 aa, Homo Sapiens
MDVHTRWKARSALRPGAPLLPPLLLLLLWAPPPSRAAQPADLLKVLDFHNLPDGITKTTGFCATRRSSKGPDVAYRVTKDAQLSAPTKQLYPASAFPEDFSILTTVKAKKGSQAFLVSIYNEQGIQQIGLELGRSPVFLYEDHTGKPGPEDYPLFRGINLSDGKWHRIALSVHKKNVTLILDCKKKTTKFLDRSDHPMIDINGIIVFGTRILDEEVFEGDIQQLLFVSDHRAAYDYCEHYSPDCDTAVPDTPQSQDPNPDEYYTEGDGEGETYYYEYPYYEDPEDLGKEPTPSKKPVEAAKETTEVPEELTPTPTEAAPMPETSEGAGKEEDVGIGDYDYVPSEDYYTPSPYDDLTYGEGEENPDQPTDPGAGAEIPTSTADTSNSSNPAPPPGEGADDLEGEFTEETIRNLDENYYDPYYDPTSSPSEIGPGMPANQDTIYEGIGGPRGEKGQKGEPAIIEPGMLIEGPPGPEGPAGLPGPPGTMGPTGQVGDPGERGPPGRPGLPGADGLPGPPGTMLMLPFRFGGGGDAGSKGPMVSAQESQAQAILQQARLALRGPAGPMGLTGRPGPVGPPGSGGLKGEPGDVGPQGPRGVQGPPGPAGKPGRRGRAGSDGARGMPGQTGPKGDRGFDGLAGLPGEKGHRGDPGPSGPPGPPGDDGERGDDGEVGPRGLPGEPGPRGLLGPKGPPGPPGPPGVTGMDGQPGPKGNVGPQGEPGPPGQQGNPGAQGLPGPQGAIGPPGEKGPLGKPGLPGMPGADGPPGHPGKEGPPGEKGGQGPPGPQGPIGYPGPRGVKGADGIRGLKGTKGEKGEDGFPGFKGDMGIKGDRGEIGPPGPRGEDGPEGPKGRGGPNGDPGPLGPPGEKGKLGVPGLPGYPGRQGPKGSIGFPGFPGANGEKGGRGTPGKPGPRGQRGPTGPRGERGPRGITGKPGPKGNSGGDGPAGPPGERGPNGPQGPTGFPGPKGPPGPPGKDGLPGHPGQRGETGFQGKTGPPGPPGVVGPQGPTGETGPMGERGHPGPPGPPGEQGLPGLAGKEGTKGDPGPAGLPGKDGPPGLRGFPGDRGLPGPVGALGLKGNEGPPGPPGPAGSPGERGPAGAAGPIGIPGRPGPQGPPGPAGEKGAPGEKGPQGPAGRDGLQGPVGLPGPAGPVGPPGEDGDKGEIGEPGQKGSKGDKGEQGPPGPTGPQGPIGQPGPSGADGEPGPRGQQGLFGQKGDEGPRGFPGPPGPVGLQGLPGPPGEKGETGDVGQMGPPGPPGPRGPSGAPGADGPQGPPGGIGNPGAVGEKGEPGEAGEPGLPGEGGPPGPKGERGEKGESGPSGAAGPPGPKGPPGDDGPKGSPGPVGFPGDPGPPGEPGPAGQDGPPGDKGDDGEPGQTGSPGPTGEPGPSGPPGKRGPPGPAGPEGRQGEKGAKGEAGLEGPPGKTGPIGPQGAPGKPGPDGLRGIPGPVGEQGLPGSPGPDGPPGPMGPPGLPGLKGDSGPKGEKGHPGLIGLIGPPGEQGEKGDRGLPGPQGSSGPKGEQGITGPSGPIGPPGPPGLPGPPGPKGAKGSSGPTGPKGEAGHPGPPGPPGPPGEVIQPLPIQASRTRRNIDASQLLDDGNGENYVDYADGMEEIFGSLNSLKLEIEQMKRPLGTQQNPARTCKDLQLCHPDFPDGEYWVDPNQGCSRDSFKVYCNFTAGGSTCVFPDKKSEGSKMARWPKEQPSTWYSQYKRGSLLSYVDAEGNPVGVVQMTFLRLLSASAHQNVTYHCYQSVAWQDAATGSYDKALRFLGSNDEEMSYDNNPYIRALVDGCATKKGYQKTVLEIDTPKVEQVPIVDIMFNDFGEASQKFGFEVGPACFMG

SEQ ID NO: 3318 - protein, 210 aa, Homo Sapiens
  misc_feature (1)..(1): Xaa can be any naturally occurring amino acid
XRTRRNIDASQLLDDGNGENYVDYADGMEEIFGSLNSLKLEIEQMKRPLGTQQNPARTCKDLQLCHPDFPDGEYWVDPNQGCSRDSFKVYCNFTAGGSTCVFPDKKSEGSKMARWPKEQPSTWYSQYKRGSLLSYVDAEGNPVGVVQMTFLRLLSASAHQNVTYHCYQSVAWQDAATGSYDKALRFLGSNDEEMSYDNNPYIRALVDGCA

SEQ ID NO: 3319 - protein, 1499 aa, Homo Sapiens
MMANWAEARPLLILIVLLGQFVSIKAQEEDEDEGYGEEIACTQNGQMYLNRDIWKPAPCQICVCDNGAILCDKIECQDVLDCADPVTPPGECCPVCSQTPGGGNTNFGRGRKGQKGEPGLVPVVTGIRGRPGPAGPPGSQGPRGERGPKGRPGPRGPQGIDGEPGVPGQPGAPGPPGHPSHPGPDGLSRPFSAQMAGLDEKSGLGSQVGLMPGSVGPVGPRGPQGLQGQQGGAGPTGPPGEPGDPGPMGPIGSRGPEGPPGKPGEDGEPGRNGNPGEVGFAGSPGARGFPGAPGLPGLKGHRGHKGLEGPKGEVGAPGSKGEAGPTGPMGAMGPLGPRGMPGERGRLGPQGAPGQRGAHGMPGKPGPMGPLGIPGSSGFPGNPGMKGEAGPTGARGPEGPQGQRGETGPPGPVGSPGLPGAIGTDGTPGAKGPTGSPGTSGPPGSAGPPGSPGPQGSTGPQGIRGQPGDPGVPGFKGEAGPKGEPGPHGIQGPIGPPGEEGKRGPRGDPGTVGPPGPVGERGAPGNRGFPGSDGLPGPKGAQGERGPVGSSGPKGSQGDPGRPGEPGLPGARGLTGNPGVQGPEGKLGPLGAPGEDGRPGPPGSIGIRGQPGSMGLPGPKGSSGDPGKPGEAGNAGVPGQRGAPGKDGEVGPSGPVGPPGLAGERGEQGPPGPTGFQGLPGPPGPPGEGGKPGDQGVPGDPGAVGPLGPRGERGNPGERGEPGITGLPGEKGMAGGHGPDGPKGSPGPSGTPGDTGPPGLQGMPGERGIAGTPGPKGDRGGIGEKGAEGTAGNDGARGLPGPLGPPGPAGPTGEKGEPGPRGLVGPPGSRGNPGSRGENGPTGAVGFAGPQGPDGQPGVKGEPGEPGQKGDAGSPGPQGLAGSPGPHGPNGVPGLKGGRGTQGPPGATGFPGSAGRVGPPGPAGAPGPAGPLGEPGKEGPPGLRGDPGSHGRVGDRGPAGPPGGPGDKGDPGEDGQPGPDGPPGPAGTTGQRGIVGMPGQRGERGMPGLPGPAGTPGKVGPTGATGDKGPPGPVGPPGSNGPVGEPGPEGPAGNDGTPGRDGAVGERGDRGDPGPAGLPGSQGAPGTPGPVGAPGDAGQRGDPGSRGPIGPPGRAGKRGLPGPQGPRGDKGDHGDRGDRGQKGHRGFTGLQGLPGPPGPNGEQGSAGIPGPFGPRGPPGPVGPSGKEGNPGPLGPIGPPGVRGSVGEAGPEGPPGEPGPPGPPGPPGHLTAALGDIMGHYDESMPDPLPEFTEDQAAPDDKNKTDPGVHATLKSLSSQIETMRSPDGSKKHPARTCDDLKLCHSAKQSGEYWIDPNQGSVEDAIKVYCNMETGETCISANPSSVPRKTWWASKSPDNKPVWYGLDMNRGSQFAYGDHQSPNTAITQMTFLRLLSKEASQNITYICKNSVGYMDDQAKNLKKAVVLKGANDLDIKAEGNIRFRYIVLQDTCSKRNGNVGKTVFEYRTQNVARLPIIDLAPVDVGGTDQEFGVEIGPVCFV

SEQ ID NO: 3320 - protein, 1112 aa, Homo Sapiens
MPGSVGPVGPRGPQGLQGQQGGAGPTGPPGEPGDPGPMGPIGSRGPEGPPGKPGEDGEPGRNGNPGEVGFAGSPGARGFPGAPGLPGLKGHRGHKGLEGPKGEVGAPGSKGEAGPTGPMGDPGTVGPPGPVGERGAPGNRGFPGSDGLPGPKGAQGERGPVGSSGPKGSQGDPGRPGEPGLPGARGLTGNPGVQGPEGKLGPLGAPGEDGRPGPPGSIGIRGQPGSMGLPGPKGSSGDPGKPGEAGNAGVPGQRGAPGKDGEVGPSGPVGPPGLAGERGEQGPPGPTGFQGLPGPPGPPGEGGKPGDQGVPGDPGAVGPLGPRGERGNPGERGEPGITGLPGEKGMAGGHGPDGPKGSPGPSGTPGDTGPPGLQGMPGERGIAGTPGPKGDRGGIGEKGAEGTAGNDGARGLPGPLGPPGPAGPTGEKGEPGPRGLVGPPGSRGNPGSRGENGPTGAVGFAGPQGPDGQPGVKGEPGEPGQKGDAGSPGPQGLAGSPGPHGPNGVPGLKGGRGTQGPPGATGFPGSAGRVGPPGPAGAPGPAGPLGEPGKEGPPGLRGDPGSHGRVGDRGPAGPPGGPGDKGDPGEDGQPGPDGPPGPAGTTGQRGIVGMPGQRGERGMPGLPGPAGTPGKVGPTGATGDKGPPGPVGPPGSNGPVGEPGPEGPAGNDGTPGRDGAVGERGDRGDPGPAGLPGSQGAPGTPGPVGAPGDAGQRGDPGSRGPIGPPGRAGKRGLPGPQGPRGDKGDHGDRGDRGQKGHRGFTGLQGLPGPPGPNGEQGSAGIPGPFGPRGPPGPVGPSGKEGNPGPLGPIGPPGVRGSVGEAGPEGPPGEPGPPGPPGPPGHLTAALGDIMGHYDESMPDPLPEFTEDQAAPDDKNKTDPGVHATLKSLSSQIETMRSPDGSKKHPARTCDDLKLCHSAKQSGEYWIDPNQGSVEDAIKVYCNMETGETCISANPSSVPRKTWWASKSPDNKPVWYGLDMNRGSQFAYGDHQSPNTAITQMTFLRLLSKEASQNITYICKNSVGYMDDQAKNLKKAVVLKGANDLDIKAEGNIRFRYIVLQDTCSKRNGNVGKTVFEYRTQNVARLPIIDLAPVDVGGTDQEFGVEIGPVCFV

SEQ ID NO: 3321 - protein, 1745 aa, Homo Sapiens
MGNRRDLGQPRAGLCLLLAALQLLPGTQADPVDVLKALGVQGGQAGVPEGPGFCPQRTPEGDRAFRIGQASTLGIPTWELFPEGHFPENFSLLITLRGQPANQSVLLSIYDERGARQLGLALGPALGLLGDPFRPLPQQVNLTDGRWHRVAVSIDGEMVTLVADCEAQPPVLGHGPRFISIAGLTVLGTQDLGEKTFEGDIQELLISPDPQAAFQACERYLPDCDNLAPAATVAPQGEPETPRPRRKGKGKGRKKGRGRKGKGRKKNKEIWTSSPPPDSAENQTSTDIPKTETPAPNLPPTPTPLVVTSTVTTGLNATILERSLDPDSGTELGTLETKAAREDEEGDDSTMGPDFRAAEYPSRTQFQIFPGAGEKGAKGEPAVIEKGQQFEGPPGAPGPQGVVGPSGPPGPPGFPGDPGPPGPAGLPGIPGIDGIRGPPGTVIMMPFQFAGGSFKGPPVSFQQAQAQAVLQQTQLSMKGPPGPVGLTGRPGPVGLPGHPGLKGEEGAEGPQGPRGLQGPHGPPGRVGKMGRPGADGARGLPGDTGPKGDRGFDGLPGLPGEKGQRGDFGHVGQPGPPGEDGERGAEGPPGPTGQAGEPGPRGLLGPRGSPGPTGRPGVTGIDGAPGAKGNVGPPGEPGPPGQQGNHGSQGLPGPQGLIGTPGEKGPPGNPGIPGLPGSDGPLGHPGHEGPTGEKGAQGPPGSAGPPGYPGPRGVKGTSGNRGLQGEKGEKGEDGFPGFKGDVGLKGDQGKPGAPGPRGEDGPEGPKGQAGQAGEEGPPGSAGEKGKLGVPGLPGYPGRPGPKGSIGFPGPLGPIGEKGKSGKTGQPGLEGERGPPGSRGERGQPGATGQPGPKGDVGQDGAPGIPGEKGLPGLQGPPGFPGPKGPPGHQGKDGRPGHPGQRGELGFQGQTGPPGPAGVLGPQGKTGEVGPLGERGPPGPPGPPGEQGLPGLEGREGAKGELGPPGPLGKEGPAGLRGFPGPKGGPGDPGPTGLKGDKGPPGPVGANGSPGERGPLGPAGGIGLPGQSGSEGPVGPAGKKGSRGERGPPGPTGKDGIPGPLGPLGPPGAAGPSGEEGDKGDVGAPGHKGSKGDKGDAGPPGQPGIRGPAGHPGPPGADGAQGRRGPPGLFGQKGDDGVRGFVGVIGPPGLQGLPGPPGEKGEVGDVGSMGPHGAPGPRGPQGPTGSEGTPGLPGGVGQPGAVGEKGERGDAGDPGPPGAPGIPGPKGDIGEKGDSGPSGAAGPPGKKGPPGEDGAKGSVGPTGLPGDLGPPGDPGVSGIDGSPGEKGDPGDVGGPGPPGASGEPGAPGPPGKRGPSGHMGREGREGEKGAKGEPGPDGPPGRTGPMGARGPPGRVGPEGLRGIPGPVGEPGLLGAPGQMGPPGPLGPSGLPGLKGDTGPKGEKGHIGLIGLIGPPGEAGEKGDQGLPGVQGPPGPKGDPGPPGPIGSLGHPGPPGVAGPLGQKGSKGSPGSMGPRGDTGPAGPPGPPGAPAELHGLRRRRRFVPVPLPVVEGGLEEVLASLTSLSLELEQLRRPPGTAERPGLVCHELHRNHPHLPDGEYWIDPNQGCARDSFRVFCNFTAGGETCLYPDKKFEIVKLASWSKEKPGGWYSTFRRGKKFSYVDADGSPVNVVQLNFLKLLSATARQNFTYSCQNAAAWLDEATGDYSHSARFLGTNGEELSFNQTTAATVSVPQDGCRLRKGQTKTLFEFSSSRAGFLPLWDVAATDFGQTNQKFGFELGPVCFSS

SEQ ID NO: 3322 - protein, 1028 aa, Homo Sapiens
MRAARALLPLLLQACWTAAQDEPETPRAVAFQDCPVDLFFVLDTSESVALRLKPYGALVDKVKSFTKRFIDNLRDRYYRCDRNLVWNAGALHYSDEVEIIQGLTRMPGGRDALKSSVDAVKYFGKGTYTDCAIKKGLEQLLVGGSHLKENKYLIVVTDGHPLEGYKEPCGGLEDAVNEAKHLGVKVFSVAITPDHLEPRLSIIATDHTYRRNFTAADWGQSRDAEEAISQTIDTIVDMIKNNVEQVCCSFECQPARGPPGLRGDPGFEGERGKPGLPGEKGEAGDPGRPGDLGPVGYQGMKGEKGSRGEKGSRGPKGYKGEKGKRGIDGVDGVKGEMGYPGLPGCKGSPGFDGIQGPPGPKGDPGAFGLKGEKGEPGADGEAGRPGSSGPSGDEGQPGEPGPPGEKGEAGDEGNPGPDGAPGERGGPGERGPRGTPGTRGPRGDPGEAGPQGDQGREGPVGVPGDPGEAGPIGPKGYRGDEGPPGSEGARGAPGPAGPPGDPGLMGERGEDGPAGNGTEGFPGFPGYPGNRGAPGINGTKGYPGLKGDEGEAGDPGDDNNDIAPRGVKGAKGYRGPEGPQGPPGHQGPPGPDECEILDIIMKMCSCCECKCGPIDLLFVLDSSESIGLQNFEIAKDFVVKVIDRLSRDELVKFEPGQSYAGVVQYSHSQMQEHVSLRSPSIRNVQELKEAIKSLQWMAGGTFTGEALQYTRDQLLPPSPNNRIALVITDGRSDTQRDTTPLNVLCSPGIQVVSVGIKDVFDFIPGSDQLNVISCQGLAPSQGRPGLSLVKENYAELLEDAFLKNVTAQICIDKKCPDYTCPITFSSPADITILLDGSASVGSHNFDTTKRFAKRLAERFLTAGRTDPAHDVRVAVVQYSGTGQQRPERASLQFLQNYTALASAVDAMDFINDATDVNDALGYVTRFYREASSGAAKKRLLLFSDGNSQGATPAAIEKAVQEAQRAGIEIFVVVVGRQVNEPHIRVLVTGKTAEYDVAYGESHLFRVPSYQALLRGVFHQTVSRKVALG

SEQ ID NO: 3323 - protein, 1026 aa, Homo Sapiens [sequence omitted]

SEQ ID NO: 3324 - protein, 250 aa, Homo Sapiens
GNKGAKGDRGLPGPRGPQGALGEPGKQGSRGDPGDAGPRGDSGQPGPKGDPGRPGFSYPGPRGAPGEKGEPGPRGPEGGRGDFGLKGEPGRKGEKGEPADPGPPGEPGPRGPRGVPGPEGEPGPPGDPGLTECDVMTYVRETCGCCGSEVSPVPPDDPATPPDCEKRCGALDVVFVIDSSESIGYTNFTLEKNFVINVVNRLGAIAKDPKSETGTRVGVVQYSHEGTFEAIQLDDERIDSLSSFKEAVKN

SEQ ID NO: 3325 - protein, 180 aa, Homo Sapiens
MLQGTCSVLLLWGILGAIQAQQQEVISPDTTERNNNCPEKTDCPIHVYFVLDTSESVTMQSPTDILLFHMKQFVPQFISQLQNEFYLDQVALSWRYGGLHFSDQVEVFSPPGSDRASFIKNLQGISSFRRGTFTDCALANMTEQIRQDRSKGTVHFAVVITDGHVTGSPCGGIKLQAERA

SEQ ID NO: 3326 - protein, 1019 aa, Homo Sapiens
MLQGTCSVLLLWGILGAIQAQQQEVISPDTTERNNNCPEKTDCPIHVYFVLDTSESVTMQSPTDILLFHMKQFVPQFISQLQNEFYLDQVALSWRYGGLHFSDQVEVFSPPGSDRASFIKNLQGISSFRRGTFTDCALANMTEQIRQDRSKGTVHFAVVITDGHVTGSPCGGIKLQAERAREEGIRLFAVAPNQNLKEQGLRDIASTPHELYRNDYATMLPDSTEIDQDTINRIIKVMKHEAYGECYKVSCLEIPGPSGPKGYRGQKGAKGNMGEPGEPGQKGRQGDPGIEGPIGFPGPKGVPGFKGEKGEFGADGRKGAPGLAGKNGTDGQKGKLGRIGPPGCKGDPGNRGPDGYPGEAGSPGERGDQGGKGDPGRPGRRGPPGEIGAKGSKGYQGNSGAPGSPGVKGAKGGPGPRGPKGEPGRRGDPGTKGSPGSDGPKGEKGDPGPEGPRGLAGEVGNKGAKGDRGLPGPRGPQGALGEPGKQGSRGDPGDAGPRGDSGQPGPKGDPGRPGFSYPGPRGAPGEKGEPGPRGPEGGRGDFGLKGEPGRKGEKGEPADPGPPGEPGPRGPRGVPGPEGEPGPPGDPGLTECDVMTYVRETCGCCDCEKRCGALDVVFVIDSSESIGYTNFTLEKNFVINVVNRLGAIAKDPKSETGTRVGVVQYSHEGTFEAIQLDDERIDSLSSFKEAVKNLEWIAGGTWTPSALKFAYDRLIKESRRQKTRVFAVVITDGRHDPRDDDLNLRALCDRDVTVTAIGIGDMFHEKHESENLYSIACDKPQQVRNMTLFSDLVAEKFIDDMEDVLCPDPQIVCPDLPCQTELSVAQCTQRPVDIVFLLDGSERLGEQNFHKARRFVEQVARRLTLARRDDDPLNARVALLQFGGPGEQQVAFPLSHNLTAIHEALETTQYLNSFSHVGAGVVHAINAIVRSPRGGARRHAELSFVFLTDGVTGNDSLHESAHSMRKQNVVPTVLALGSDVDMDVLTTLSLGDRAAVFHEKDYDSLAQPGFFDRFIRWIC

SEQ ID NO: 3327 - protein, 828 aa, Homo Sapiens
MLQGTCSVLLLWGILGAIQAQQQEVISPDTTERNNNCPEKTDCPIHVYFVLDTSESVTMQSPTDILLFHMKQFVPQFISQLQNEFYLDQVALSWRYGGLHFSDQVEVFSPPGSDRASFIKNLQGISSFRRGTFTDCALANMTEQIRQDRSKGTVHFAVVITDGHVTGSPCGGIKLQAERAREEGIRLFAVAPNQNLKEQGLRDIASTPHELYRNDYATMLPDSTEIDQDTINRIIKVMKHEAYGECYKVSCLEIPGPSGPKGYRGQKGAKGNMGEPGEPGQKGRQGDPGIEGPIGFPGPKGVPGFKGEKGEFGADGRKGAPGLAGKNGTDGQKGKLGRIGPPGCKGDPGNRGPDGYPGEAGSPGERGDQGGKGDPGRPGRRGPPGEIGAKGSKGYQGNSGAPGSPGVKGAKGGPGPRGPKGEPGRRGDPGTKGSPGSDGPKGEKGDPGPEGPRGLAGEVGNKGAKGDRGLPGPRGPQGALGEPGKQGSRGDPGDAGPRGDSGQPGPKGDPGRPGFSYPGPRGAPGEKGEPGPRGPEGGRGDFGLKGEPGRKGEKGEPADPGPPGEPGPRGPRGVPGPEGEPGPPGDPGLTECDVMTYVRETCGCCDCEKRCGALDVVFVIDSSESIGYTNFTLEKNFVINVVNRLGAIAKDPKSETGTRVGVVQYSHEGTFEAIQLDDERIDSLSSFKEAVKNLEWIAGGTWTPSALKFAYDRLIKESRRQKTRVFAVVITDGRHDPRDDDLNLRALCDRDVTVTAIGIGDMFHEKHESENLYSIACDKPQQVRNMTLFSDLVAEKFIDDMEDVLCPDPQIVCPDLPCQTGLDGAVLC

SEQ ID NO: 3328 - protein, 918 aa, Homo Sapiens
MLQGTCSVLLLWGILGAIQAQQQEVISPDTTERNNNCPEKTDCPIHVYFVLDTSESVTMQSPTDILLFHMKQFVPQFISQLQNEFYLDQVALSWRYGGLHFSDQVEVFSPPGSDRASFIKNLQGISSFRRGTFTDCALANMTEQIRQDRSKGTVHFAVVITDGHVTGSPCGGIKLQAERAREEGIRLFAVAPNQNLKEQGLRDIASTPHELYRNDYATMLPDSTEIDQDTINRIIKVMKHEAYGECYKVSCLEIPGPSGPKGYRGQKGAKGNMGEPGEPGQKGRQGDPGIEGPIGFPGPKGVPGFKGEKGEFGADGRKGAPGLAGKNGTDGQKGKLGRIGPPGCKGDPGNRGPDGYPGEAGSPGERGDQGGKGDPGRPGRRGPPGEIGAKGSKGYQGNSGAPGSPGVKGAKGGPGPRGPKGEPGRRGDPGTKGSPGSDGPKGEKGDPGPEGPRGLAGEVGNKGAKGDRGLPGPRGPQGALGEPGKQGSRGDPGDAGPRGDSGQPGPKGDPGRPGFSYPGPRGAPGEKGEPGPRGPEGGRGDFGLKGEPGRKGEKGEPADPGPPGEPGPRGPRGVPGPEGEPGPPGDPGLTECDVMTYVRETCGCCDCEKRCGALDVVFVIDSSESIGYTNFTLEKNFVINVVNRLGAIAKDPKSETGTRVGVVQYSHEGTFEAIQLDDERIDSLSSFKEAVKNLEWIAGGTWTPSALKFAYDRLIKESRRQKTRVFAVVITDGRHDPRDDDLNLRALCDRDVTVTAIGIGDMFHEKHESENLYSIACDKPQQVRNMTLFSDLVAEKFIDDMEDVLCPDPQIVCPDLPCQTDAPWPGGEPPVTFLRTEEGPDATFPRTIPLIQQLLNATELTQDPAAYSQLVAVLVYTAERAKFATGVERQDWMELFIDTFKLVHRDIVGDPETALALC

SEQ ID NO: 3329 - protein, 828 aa, Homo Sapiens; identical to SEQ ID NO: 3327

SEQ ID NO: 3330 - protein, 2971 aa, Homo Sapiens
MRKHRHLPLVAVFCLFLSGFPTTHAQQQQAAQDSADIIFLIDGSNNTGSVNFAVILDFLVNLLEKLPIGTQQIRVGVVQFSDEPRTMFSLDTYSTKAQVLGAVKALGFAGGELANIGLALDFVVENHFTRAGGSRVEEGVPQVLVLISAGPSSDEIRYGVVALKQASVFSFGLGAQAASRAELQHIATDDNLVFTVPEFRSFGDLQEKLLPYIVGVAQRHIVLKPPTIVTQVIEVNKRDIVFLVDGSSALGLANFNAIRDFIAKVIQRLEIGQDLIQVAVAQYADTVRPEFYFNTHPTKREVITAVRKMKPLDGSALYTGSALDFVRNNLFTSSAGYRAAEGIPKLLVLITGGKSLDEISQPAQELKRSSIMAFAIGNKGADQAELEEIAFDSSLVFIPAEFRAAPLQGMLPGLLAPLRTLSGTPEVHSNKRDIIFLLDGSANVGKTNFPYVRDFVMNLVNSLDIGNDNIRVGLVQFSDTPVTEFSLNTYQTKSDILGHLRQLQLQGGSGLNTGSALSYVYANHFTEAGGSRIREHVPQLLLLLTAGQSEDSYLQAANALTRAGILTFCVGASQANKAELEQIAFNPSLVYLMDDFSSLPALPQQLIQPLTTYVSGGVEEVPLAQPESKRDILFLFDGSANLVGQFPVVRDFLYKIIDELNVKPEGTRIAVAQYSDDVKVESRFDEHQSKPEILNLVKRMKIKTGKALNLGYALDYAQRYIFVKSAGSRIEDGVLQFLVLLVAGRSSDRVDGPASNLKQSGVVPFIFQAKNADPAELEQIVLSPAFILAAESLPKIGDLHPQIVNLLKSVHNGAPAPVSGEKDVVFLLDGSEGVRSGFPLLKEFVQRVVESLDVGQDRVRVAVVQYSDRTRPEFYLNSYMNKQDVVNAVRQLTLLGGPTPNTGAALEFVLRNILVSSAGSRITEGVPQLLIVLTADRSGDDVRNPSVVVKRGGAVPIGIGIGNADITEMQTISFIPDFAVAIPTFRQLGTVQQVISERVTQLTREELSRLQPVLQPLPSPGVGGKRDVVFLIDGSQSAGPEFQYVRTLIERLVDYLDVGFDTTRVAVIQFSDDPKVEFLLNAHSSKDEVQNAVQRLRPKGGRQINVGNALEYVSRNIFKRPLGSRIEEGVPQFLVLISSGKSDDEVDDPAVELKQFGVAPFTIARNADQEELVKISLSPEYVFSVSTFRELPSLEQKLLTPITTLTSEQIQKLLASTRYPPPAVESDAADIVFLIDSSEGVRPDGFAHIRDFVSRIVRRLNIGPSKVRVGVVQFSNDVFPEFYLKTYRSQAPVLDAIRRLRLRGGSPLNTGKALEFVARNLFVKSAGSRIEDGVPQHLVLVLGGKSQDDVSRFAQVIRSSGIVSLGVGDRNIDRTELQTITNDPRLVFTVREFRELPNIEERIMNSFGPSAATPAPPGVDTPPPSRPEKKKADIVFLLDGSINFRRDSFQEVLRFVSEIVDTVYEDGDSIQVGLVQYNSDPTDEFFLKDFSTKRQIIDAINKVVYKGGRHANTKVGLEHLRVNHFVPEAGSRLDQRVPQIAFVITGGKSVEDAQDVSLALTQRGVKVFAVGVRNIDSEEVGKIASNSATAFRVGNVQELSELSEQVLETLHDAMHETLCPGVTDAAKACNLDVILGFDGSRDQNVFVAQKGFESKVDAILNRISQMHRVSCSGGRSPTVRVSVVANTPSGPVEAFDFDEYQPEMLEKFRNMRSQHPYVLTEDTLKVYLNKFRQSSPDSVKVVIHFTDGADGDLADLHRASENLRQEGVRALILVGLERVVNLERLMHLEFGRGFMYDRPLRLNLLDLDYELAEQLDNIAEKACCGVPCKCSGQRGDRGPIGSIGPKGIPGEDGYRGYPGDEGGPGERGPPGVNGTQGFQGCPGQRGVKGSRGFPGEKGEVGEIGLDGLDGEDGDKGLPGSSGEKGNPGRRGDKGPRGEKGERGDVGIRGDPGNPGQDSQERGPKGETGDLGPMGVPGRDGVPGGPGETGKNGGFGRRGPPGAKGNKGGPGQPGFEGEQGTRGAQGPAGPAGPPGLIGEQGISGPRGSGGAAGAPGERGRTGPLGRKGEPGEPGPKGGIGNRGPRGETGDDGRDGVGSEGRRGKKGERGFPGYPGPKGNPGEPGLNGTTGPKGIRGRRGNSGPPGIVGQKGDPGYPGPAGPKGNRGDSIDQCALIQSIKDKCPCCYGPLECPVFPTELAFALDTSEGVNQDTFGRMRDVVLSIVNDLTIAESNCPRGARVAVVTYNNEVTTEIRFADSKRKSVLLDKIKNLQVALTSKQQSLETAMSFVARNTFKRVRNGFLMRKVAVFFSNTPTRASPQLREAVLKLSDAGITPLFLTRQEDRQLINALQINNTAVGHALVLPAGRDLTDFLENVLTCHVCLDICNIDPSCGFGSWRPSFRDRRAAGSDVDIDMAFILDSAETTTLFQFNEMKKYIAYLVRQLDMSPDPKASQHFARVAVVQHAPSESVDNASMPPVKVEFSLTDYGSKEKLVDFLSRGMTQLQGTRALGSAIEYTIENVFESAPNPRDLKIVVLMLTGEVPEQQLEEAQRVILQAKCKGYFFVVLGIGRKVNIKEVYTFASEPNDVFFKLVDKSTELNEEPLMRFGRLLPSFVSSENAFYLSPDIRKQCDWFQGDQPTKNLVKFGHKQVNVPNNVTSSPTSNPVTTTKPVTTTKPVTTTTKPVTTTTKPVTIINQPSVKPAAAKPAPAKPVAAKPVATKMATVRPPVAVKPATAAKPVAAKPAAVRPPAAAAAKPVATKPEVPRPQAAKPAATKPATTKPMVKMSREVQVFEITENSAKLHWERAEPPGPYFYDLTVTSAHDQSLVLKQNLTVTDRVIGGLLAGQTYHVAVVCYLRSQVRATYHGSFSTKKSQPPPPQPARSASSSTINLMVSTEPLALTETDICKLPKDEGTCRDFILKWYYDPNTKSCARFWYGGCGGNENKFGSQKECEKVCAPVLAKPGVISVMGT

SEQ ID NO: 3331 - protein, 1237 aa, Homo Sapiens
MRKHRHLPLVAVFCLFLSGFPTTHAQQQQAAQDSADIIFLIDGSNNTGSVNFAVILDFLVNLLEKLPIGTQQIRVGVVQFSDEPRTMFSLDTYSTKAQVLGAVKALGFAGGELANIGLALDFVVENHFTRAGGSRVEEGVPQVLVLISAGPSSDEIRYGVVALKQASVFSFGLGAQAASRAELQHIATDDNLVFTVPEFRSFGDLQEKLLPYIVGVAQRHIVLKPPTIVTQVIEVNKRDIVFLVDGSSALGLANFNAIRDFIAKVIQRLEIGQDLIQVAVAQYADTVRPEFYFNTHPTKREVITAVRKMKPLDGSALYTGSALDFVRNNLFTSSAGYRAAEGIPKLLVLITGGKSLDEISQPAQELKRSSIMAFAIGNKGADQAELEEIAFDSSLVFIPAEFRAAPLQGMLPGLLAPLRTLSGTPEVHSNKRDIIFLLDGSANVGKTNFPYVRDFVMNLVNSLDIGNDNIRVGLVQFSDTPVTEFSLNTYQTKSDILGHLRQLQLQGGSGLNTGSALSYVYANHFTEAGGSRIREHVPQLLLLLTAGQSEDSYLQAANALTRAGILTFCVGASQANKAELEQIAFNPSLVYLMDDFSSLPALPQQLIQPLTTYVSGGVEEVPLAQPESKRDILFLFDGSANLVGQFPVVRDFLYKIIDELNVKPEGTRIAVAQYSDDVKVESRFDEHQSKPEILNLVKRMKIKTGKALNLGYALDYAQRYIFVKSAGSRIEDGVLQFLVLLVAGRSSDRVDGPASNLKQSGVVPFIFQAKNADPAELEQIVLSPAFILAAESLPKIGDLHPQIVNLLKSVHNGAPAPVSGEKDVVFLLDGSEGVRSGFPLLKEFVQRVVESLDVGQDRVRVAVVQYSDRTRPEFYLNSYMNKQDVVNAVRQLTLLGGPTPNTGAALEFVLRNILVSSAGSRITEGVPQLLIVLTADRSGDDVRNPSVVVKRGGAVPIGIGIGNADITEMQTISFIPDFAVAIPTFRQLGTVQQVISERVTQLTREELSRLQPVLQPLPSPGVGGKRDVVFLIDGSQSAGPEFQYVRTLIERLVDYLDVGFDTTRVAVIQFSDDPKVEFLLNAHSSKDEVQNAVQRLRPKGGRQINVGNALEYVSRNIFKRPLGSRIEEGVPQFLVLISSGKSDDEVDDPAVELKQFGVAPFTIARNADQEELVKISLSPEYVFSVSTFRELPSLEQKLLTPITTLTSEQIQKLLASTRYPPPGEMGASEVLLGAFSI

SEQ ID NO: 3332 - protein, 2971 aa, Homo Sapiens; identical to SEQ ID NO: 3330

SEQ ID NO: 3333 - protein, 3177 aa, Homo Sapiens
MRKHRHLPLVAVFCLFLSGFPTTHAQQQQADVKNGAAADIIFLVDSSWTIGEEHFQLVREFLYDVVKSLAVGENDFHFALVQFNGNPHTEFLLNTYRTKQEVLSHISNMSYIGGTNQTGKGLEYIMQSHLTKAAGSRAGDGVPQVIVVLTDGHSKDGLALPSAELKSADVNVFAIGVEDADEGALKEIASEPLNMHMFNLENFTSLHDIVGNLVSCVHSSVSPERAGDTETLKDITAQDSADIIFLIDGSNNTGSVNFAVILDFLVNLLEKLPIGTQQIRVGVVQFSDEPRTMFSLDTYSTKAQVLGAVKALGFAGGELANIGLALDFVVENHFTRAGGSRVEEGVPQVLVLISAGPSSDEIRYGVVALKQASVFSFGLGAQAASRAELQHIATDDNLVFTVPEFRSFGDLQEKLLPYIVGVAQRHIVLKPPTIVTQVIEVNKRDIVFLVDGSSALGLANFNAIRDFIAKVIQRLEIGQDLIQVAVAQYADTVRPEFYFNTHPTKREVITAVRKMKPLDGSALYTGSALDFVRNNLFTSSAGYRAAEGIPKLLVLITGGKSLDEISQPAQELKRSSIMAFAIGNKGADQAELEEIAFDSSLVFIPAEFRAAPLQGMLPGLLAPLRTLSGTPEVHSNKRDIIFLLDGSANVGKTNFPYVRDFVMNLVNSLDIGNDNIRVGLVQFSDTPVTEFSLNTYQTKSDILGHLRQLQLQGGSGLNTGSALSYVYANHFTEAGGSRIREHVPQLLLLLTAGQSEDSYLQAANALTRAGILTFCVGASQANKAELEQIAFNPSLVYLMDDFSSLPALPQQLIQPLTTYVSGGVEEVPLAQPESKRDILFLFDGSANLVGQFPVVRDFLYKIIDELNVKPEGTRIAVAQYSDDVKVESRFDEHQSKPEILNLVKRMKIKTGKALNLGYALDYAQRYIFVKSAGSRIEDGVLQFLVLLVAGRSSDRVDGPASNLKQSGVVPFIFQAKNADPAELEQIVLSPAFILAAESLPKIGDLHPQIVNLLKSVHNGAPAPVSGEKDVVFLLDGSEGVRSGFPLLKEFVQRVVESLDVGQDRVRVAVVQYSDRTRPEFYLNSYMNKQDVVNAVRQLTLLGGPTPNTGAALEFVLRNILVSSAGSRITEGVPQLLIVLTADRSGDDVRNPSVVVKRGGAVPIGIGIGNADITEMQTISFIPDFAVAIPTFRQLGTVQQVISERVTQLTREELSRLQPVLQPLPSPGVGGKRDVVFLIDGSQSAGPEFQYVRTLIERLVDYLDVGFDTTRVAVIQFSDDPKVEFLLNAHSSKDEVQNAVQRLRPKGGRQINVGNALEYVSRNIFKRPLGSRIEEGVPQFLVLISSGKSDDEVDDPAVELKQFGVAPFTIARNADQEELVKISLSPEYVFSVSTFRELPSLEQKLLTPITTLTSEQIQKLLASTRYPPPAVESDAADIVFLIDSSEGVRPDGFAHIRDFVSRIVRRLNIGPSKVRVGVVQFSNDVFPEFYLKTYRSQAPVLDAIRRLRLRGGSPLNTGKALEFVARNLFVKSAGSRIEDGVPQHLVLVLGGKSQDDVSRFAQVIRSSGIVSLGVGDRNIDRTELQTITNDPRLVFTVREFRELPNIEERIMNSFGPSAATPAPPGVDTPPPSRPEKKKADIVFLLDGSINFRRDSFQEVLRFVSEIVDTVYEDGDSIQVGLVQYNSDPTDEFFLKDFSTKRQIIDAINKVVYKGGRHANTKVGLEHLRVNHFVPEAGSRLDQRVPQIAFVITGGKSVEDAQDVSLALTQRGVKVFAVGVRNIDSEEVGKIASNSATAFRVGNVQELSELSEQVLETLHDAMHETLCPGVTDAAKACNLDVILGFDGSRDQNVFVAQKGFESKVDAILNRISQMHRVSCSGGRSPTVRVSVVANTPSGPVEAFDFDEYQPEMLEKFRNMRSQHPYVLTEDTLKVYLNKFRQSSPDSVKVVIHFTDGADGDLADLHRASENLRQEGVRALILVGLERVVNLERLMHLEFGRGFMYDRPLRLNLLDLDYELAEQLDNIAEKACCGVPCKCSGQRGDRGPIGSIGPKGIPGEDGYRGYPGDEGGPGERGPPGVNGTQGFQGCPGQRGVKGSRGFPGEKGEVGEIGLDGLDGEDGDKGLPGSSGEKGNPGRRGDKGPRGEKGERGDVGIRGDPGNPGQDSQERGPKGETGDLGPMGVPGRDGVPGGPGETGKNGGFGRRGPPGAKGNKGGPGQPGFEGEQGTRGAQGPAGPAGPPGLIGEQGISGPRGSGGAAGAPGERGRTGPLGRKGEPGEPGPKGGIGNRGPRGETGDDGRDGVGSEGRRGKKGERGFPGYPGPKGNPGEPGLNGTTGPKGIRGRRGNSGPPGIVGQKGDPGYPGPAGPKGNRGDSIDQCALIQSIKDKCPCCYGPLECPVFPTELAFALDTSEGVNQDTFGRMRDVVLSIVNDLTIAESNCPRGARVAVVTYNNEVTTEIRFADSKRKSVLLDKIKNLQVALTSKQQSLETAMSFVARNTFKRVRNGFLMRKVAVFFSNTPTRASPQLREAVLKLSDAGITPLFLTRQEDRQLINALQINNTAVGHALVLPAGRDLTDFLENVLTCHVCLDICNIDPSCGFGSWRPSFRDRRAAGSDVDIDMAFILDSAETTTLFQFNEMKKYIAYLVRQLDMSPDPKASQHFARVAVVQHAPSESVDNASMPPVKVEFSLTDYGSKEKLVDFLSRGMTQLQGTRALGSAIEYTIENVFESAPNPRDLKIVVLMLTGEVPEQQLEEAQRVILQAKCKGYFFVVLGIGRKVNIKEVYTFASEPNDVFFKLVDKSTELNEEPLMRFGRLLPSFVSSENAFYLSPDIRKQCDWFQGDQPTKNLVKFGHKQVNVPNNVTSSPTSNPVTTTKPVTTTKPVTTTTKPVTTTTKPVTIINQPSVKPAAAKPAPAKPVAAKPVATKMATVRPPVAVKPATAAKPVAAKPAAVRPPAAAAAKPVATKPEVPRPQAAKPAATKPATTKPMVKMSREVQVFEITENSAKLHWERAEPPGPYFYDLTVTSAHDQSLVLKQNLTVTDRVIGGLLAGQTYHVAVVCYLRSQVRATYHGSFSTKKSQPPPPQPARSASSSTINLMVSTEPLALTETDICKLPKDEGTCRDFILKWYYDPNTKSCARFWYGGCGGNENKFGSQKECEKVCAPVLAKPGVISVMGT

SEQ ID NO: 3334 - protein, 708 aa, Homo Sapiens
MRKHRHLPLVAVFCLFLSGFPTTHAQQQQADVKNGAAADIIFLVDSSWTIGEEHFQLVREFLYDVVKSLAVGENDFHFALVQFNGNPHTEFLLNTYRTKQEVLSHISNMSYIGGTNQTGKGLEYIMQSHLTKAAGSRAGDGVPQVIVVLTDGHSKDGLALPSAELKSADVNVFAIGVEDADEGALKEIASEPLNMHMFNLENFTSLHDIVGNLVSCVHSSVSPERAGDTETLKDITAQDSADIIFLIDGSNNTGSVNFAVILDFLVNLLEKLPIGTQQIRVGVVQFSDEPRTMFSLDTYSTKAQVLGAVKALGFAGGELANIGLALDFVVENHFTRAGGSRVEEGVPQVLVLISAGPSSDEIRYGVVALKQASVFSFGLGAQAASRAELQHIATDDNLVFTVPEFRSFGDLQEKLLPYIVGVAQRHIVLKPPTIVTQVIEVNKRDIVFLVDGSSALGLANFNAIRDFIAKVIQRLEIGQDLIQVAVAQYADTVRPEFYFNTHPTKREVITAVRKMKPLDGSALYTGSALDFVRNNLFTSSAGYRAAEGIPKLLVLITGGKSLDEISQPAQELKRSSIMAFAIGNKGADQAELEEIAFDSSLVFIPAEFRAAPLQGMLPGLLAPLRTLSGTPEESKRDILFLFDGSANLVGQFPVVRDFLYKIIDELNVKPEGTRIAVAQYSDDVKVESRFDEHQSKPEILNLVKRMKI

SEQ ID NO: 3335 - protein, 2569 aa, Homo Sapiens
MRKHRHLPLVAVFCLFLSGFPTTHAQQQQAVIEVNKRDIVFLVDGSSALGLANFNAIRDFIAKVIQRLEIGQDLIQVAVAQYADTVRPEFYFNTHPTKREVITAVRKMKPLDGSALYTGSALDFVRNNLFTSSAGYRAAEGIPKLLVLITGGKSLDEISQPAQELKRSSIMAFAIGNKGADQAELEEIAFDSSLVFIPAEFRAAPLQGMLPGLLAPLRTLSGTPEESKRDILFLFDGSANLVGQFPVVRDFLYKIIDELNVKPEGTRIAVAQYSDDVKVESRFDEHQSKPEILNLVKRMKIKTGKALNLGYALDYAQRYIFVKSAGSRIEDGVLQFLVLLVAGRSSDRVDGPASNLKQSGVVPFIFQAKNADPAELEQIVLSPAFILAAESLPKIGDLHPQIVNLLKSVHNGAPAPVSGEKDVVFLLDGSEGVRSGFPLLKEFVQRVVESLDVGQDRVRVAVVQYSDRTRPEFYLNSYMNKQDVVNAVRQLTLLGGPTPNTGAALEFVLRNILVSSAGSRITEGVPQLLIVLTADRSGDDVRNPSVVVKRGGAVPIGIGIGNADITEMQTISFIPDFAVAIPTFRQLGTVQQVISERVTQLTREELSRLQPVLQPLPSPGVGGKRDVVFLIDGSQSAGPEFQYVRTLIERLVDYLDVGFDTTRVAVIQFSDDPKVEFLLNAHSSKDEVQNAVQRLRPKGGRQINVGNALEYVSRNIFKRPLGSRIEEGVPQFLVLISSGKSDDEVDDPAVELKQFGVAPFTIARNADQEELVKISLSPEYVFSVSTFRELPSLEQKLLTPITTLTSEQIQKLLASTRYPPPAVESDAADIVFLIDSSEGVRPDGFAHIRDFVSRIVRRLNIGPSKVRVGVVQFSNDVFPEFYLKTYRSQAPVLDAIRRLRLRGGSPLNTGKALEFVARNLFVKSAGSRIEDGVPQHLVLVLGGKSQDDVSRFAQVIRSSGIVSLGVGDRNIDRTELQTITNDPRLVFTVREFRELPNIEERIMNSFGPSAATPAPPGVDTPPPSRPEKKKADIVFLLDGSINFRRDSFQEVLRFVSEIVDTVYEDGDSIQVGLVQYNSDPTDEFFLKDFSTKRQIIDAINKVVYKGGRHANTKVGLEHLRVNHFVPEAGSRLDQRVPQIAFVITGGKSVEDAQDVSLALTQRGVKVFAVGVRNIDSEEVGKIASNSATAFRVGNVQELSELSEQVLETLHDAMHETLCPGVTDAAKACNLDVILGFDGSRDQNVFVAQKGFESKVDAILNRISQMHRVSCSGGRSPTVRVSVVANTPSGPVEAFDFDEYQPEMLEKFRNMRSQHPYVLTEDTLKVYLNKFRQSSPDSVKVVIHFTDGADGDLADLHRASENLRQEGVRALILVGLERVVNLERLMHLEFGRGFMYDRPLRLNLLDLDYELAEQLDNIAEKACCGVPCKCSGQRGDRGPIGSIGPKGIPGEDGYRGYPGDEGGPGERGPPGVNGTQGFQGCPGQRGVKGSRGFPGEKGEVGEIGLDGLDGEDGDKGLPGSSGEKGNPGRRGDKGPRGEKGERGDVGIRGDPGNPGQDSQERGPKGETGDLGPMGVPGRDGVPGGPGETGKNGGFGRRGPPGAKGNKGGPGQPGFEGEQGTRGAQGPAGPAGPPGLIGEQGISGPRGSGGAAGAPGERGRTGPLGRKGEPGEPGPKGGIGNRGPRGETGDDGRDGVGSEGRRGKKGERGFPGYPGPKGNPGEPGLNGTTGPKGIRGRRGNSGPPGIVGQKGDPGYPGPAGPKGNRGDSIDQCALIQSIKDKCPFHGPLECPVFPTELAFALDTSEGVNQDTFGRMRDVVLSIVNDLTIAESNCPRGARVAVVTYNNEVTTEIRFADSKRKSVLLDKIKNLQVALTSKQQSLETAMSFVARNTFKRVRNGFLMRKVAVFFSNTPTRASPQLREAVLKLSDAGITPLFLTRQEDRQLINALQINNTAVGHALVLPAGRDLTDFLENVLTCHVCLDICNIDPSCGFGSWRPSFRDRRAAGSDVDIDMAFILDSAETTTLFQFNEMKKYIAYLVRQLDMSPDPKASQHFARVAVVQHAPSESVDNASMPPVKVEFSLTDYGSKEKLVDFLSRGMTQLQGTRALGSAIEYTIENVFESAPNPRDLKIVVLMLTGEVPEQQLEEAQRVILQAKCKGYFFVVLGIGRKVNIKEVYTFASEPNDVFFKLVDKSTELNEEPLMRFGRLLPSFVSSENAFYLSPDIRKQCDWFQGDQPTKNLVKFGHKQVNVPNNVTSSPTSNPVTTTKPVTTTKPVTTTTKPVTTTTKPVTIINQPSVKPAAAKPAPAKPVAAKPVATKMATVRPPVAVKPATAAKPVAAKPAAVRPPAAAAAKPVATKPEVPRPQAAKPAATKPATTKPMVKMSREVQVFEITENSAKLHWERAEPPGPYFYDLTVTSAHDQSLVLKQNLTVTDRVIGGLLAGQTYHVAVVCYLRSQVRATYHGSFSTKKSQPPPPQPARSASSSTINLMVSTEPLALTETDICKLPKDEGTCRDFILKWYYDPNTKSCARFWYGGCGGNENKFGSQKECEKVCAPVLAKPGVISVMGT

SEQ ID NO: 3336 - protein, 2570 aa, Homo Sapiens
MRKHRHLPLVAVFCLFLSGFPTTHAQQQQAVIEVNKRDIVFLVDGSSALGLANFNAIRDFIAKVIQRLEIGQDLIQVAVAQYADTVRPEFYFNTHPTKREVITAVRKMKPLDGSALYTGSALDFVRNNLFTSSAGYRAAEGIPKLLVLITGGKSLDEISQPAQELKRSSIMAFAIGNKGADQAELEEIAFDSSLVFIPAEFRAAPLQGMLPGLLAPLRTLSGTPEESKRDILFLFDGSANLVGQFPVVRDFLYKIIDELNVKPEGTRIAVAQYSDDVKVESRFDEHQSKPEILNLVKRMKIKTGKALNLGYALDYAQRYIFVKSAGSRIEDGVLQFLVLLVAGRSSDRVDGPASNLKQSGVVPFIFQAKNADPAELEQIVLSPAFILAAESLPKIGDLHPQIVNLLKSVHNGAPAPVSGEKDVVFLLDGSEGVRSGFPLLKEFVQRVVESLDVGQDRVRVAVVQYSDRTRPEFYLNSYMNKQDVVNAVRQLTLLGGPTPNTGAALEFVLRNILVSSAGSRITEGVPQLLIVLTADRSGDDVRNPSVVVKRGGAVPIGIGIGNADITEMQTISFIPDFAVAIPTFRQLGTVQQVISERVTQLTREELSRLQPVLQPLPSPGVGGKRDVVFLIDGSQSAGPEFQYVRTLIERLVDYLDVGFDTTRVAVIQFSDDPKVEFLLNAHSSKDEVQNAVQRLRPKGGRQINVGNALEYVSRNIFKRPLGSRIEEGVPQFLVLISSGKSDDEVDDPAVELKQFGVAPFTIARNADQEELVKISLSPEYVFSVSTFRELPSLEQKLLTPITTLTSEQIQKLLASTRYPPPAVESDAADIVFLIDSSEGVRPDGFAHIRDFVSRIVRRLNIGPSKVRVGVVQFSNDVFPEFYLKTYRSQAPVLDAIRRLRLRGGSPLNTGKALEFVARNLFVKSAGSRIEDGVPQHLVLVLGGKSQDDVSRFAQVIRSSGIVSLGVGDRNIDRTELQTITNDPRLVFTVREFRELPNIEERIMNSFGPSAATPAPPGVDTPPPSRPEKKKADIVFLLDGSINFRRDSFQEVLRFVSEIVDTVYEDGDSIQVGLVQYNSDPTDEFFLKDFSTKRQIIDAINKVVYKGGRHANTKVGLEHLRVNHFVPEAGSRLDQRVPQIAFVITGGKSVEDAQDVSLALTQRGVKVFAVGVRNIDSEEVGKIASNSATAFRVGNVQELSELSEQVLETLHDAMHETLCPGVTDAAKACNLDVILGFDGSRDQNVFVAQKGFESKVDAILNRISQMHRVSCSGGRSPTVRVSVVANTPSGPVEAFDFDEYQPEMLEKFRNMRSQHPYVLTEDTLKVYLNKFRQSSPDSVKVVIHFTDGADGDLADLHRASENLRQEGVRALILVGLERVVNLERLMHLEFGRGFMYDRPLRLNLLDLDYELAEQLDNIAEKACCGVPCKCSGQRGDRGPIGSIGPKGIPGEDGYRGYPGDEGGPGERGPPGVNGTQGFQGCPGQRGVKGSRGFPGEKGEVGEIGLDGLDGEDGDKGLPGSSGEKGNPGRRGDKGPRGEKGERGDVGIRGDPGNPGQDSQERGPKGETGDLGPMGVPGRDGVPGGPGETGKNGGFGRRGPPGAKGNKGGPGQPGFEGEQGTRGAQGPAGPAGPPGLIGEQGISGPRGSGGAAGAPGERGRTGPLGRKGEPGEPGPKGGIGNRGPRGETGDDGRDGVGSEGRRGKKGERGFPGYPGPKGNPGEPGLNGTTGPKGIRGRRGNSGPPGIVGQKGDPGYPGPAGPKGNRGDSIDQCALIQSIKDKCPCCYGPLECPVFPTELAFALDTSEGVNQDTFGRMRDVVLSIVNDLTIAESNCPRGARVAVVTYNNEVTTEIRFADSKRKSVLLDKIKNLQVALTSKQQSLETAMSFVARNTFKRVRNGFLMRKVAVFFSNTPTRASPQLREAVLKLSDAGITPLFLTRQEDRQLINALQINNTAVGHALVLPAGRDLTDFLENVLTCHVCLDICNIDPSCGFGSWRPSFRDRRAAGSDVDIDMAFILDSAETTTLFQFNEMKKYIAYLVRQLDMSPDPKASQHFARVAVVQHAPSESVDNASMPPVKVEFSLTDYGSKEKLVDFLSRGMTQLQGTRALGSAIEYTIENVFESAPNPRDLKIVVLMLTGEVPEQQLEEAQRVILQAKCKGYFFVVLGIGRKVNIKEVYTFASEPNDVFFKLVDKSTELNEEPLMRFGRLLPSFVSSENAFYLSPDIRKQCDWFQGDQPTKNLVKFGHKQVNVPNNVTSSPTSNPVTTTKPVTTTKPVTTTTKPVTTTTKPVTIINQPSVKPAAAKPAPAKPVAAKPVATKMATVRPPVAVKPATAAKPVAAKPAAVRPPAAAAAKPVATKPEVPRPQAAKPAATKPATTKPMVKMSREVQVFEITENSAKLHWERAEPPGPYFYDLTVTSAHDQSLVLKQNLTVTDRVIGGLLAGQTYHVAVVCYLRSQVRATYHGSFSTKKSQPPPPQPARSASSSTINLMVSTEPLALTETDICKLPKDEGTCRDFILKWYYDPNTKSCARFWYGGCGGNENKFGSQKECEKVCAPVLAKPGVISVMGT

SEQ ID NO: 3337 - protein, 1036 aa, Homo Sapiens
MRKHRHLPLVAVFCLFLSGFPTTHAQQQQAVIEVNKRDIVFLVDGSSALGLANFNAIRDFIAKVIQRLEIGQDLIQVAVAQYADTVRPEFYFNTHPTKREVITAVRKMKPLDGSALYTGSALDFVRNNLFTSSAGYRAAEGIPKLLVLITGGKSLDEISQPAQELKRSSIMAFAIGNKGADQAELEEIAFDSSLVFIPAEFRAAPLQGMLPGLLAPLRTLSGTPEVHSNKRDIIFLLDGSANVGKTNFPYVRDFVMNLVNSLDIGNDNIRVGLVQFSDTPVTEFSLNTYQTKSDILGHLRQLQLQGGSGLNTGSALSYVYANHFTEAGGSRIREHVPQLLLLLTAGQSEDSYLQAANALTRAGILTFCVGASQANKAELEQIAFNPSLVYLMDDFSSLPALPQQLIQPLTTYVSGGVEEVPLAQPESKRDILFLFDGSANLVGQFPVVRDFLYKIIDELNVKPEGTRIAVAQYSDDVKVESRFDEHQSKPEILNLVKRMKIKTGKALNLGYALDYAQRYIFVKSAGSRIEDGVLQFLVLLVAGRSSDRVDGPASNLKQSGVVPFIFQAKNADPAELEQIVLSPAFILAAESLPKIGDLHPQIVNLLKSVHNGAPAPVSGEKDVVFLLDGSEGVRSGFPLLKEFVQRVVESLDVGQDRVRVAVVQYSDRTRPEFYLNSYMNKQDVVNAVRQLTLLGGPTPNTGAALEFVLRNILVSSAGSRITEGVPQLLIVLTADRSGDDVRNPSVVVKRGGAVPIGIGIGNADITEMQTISFIPDFAVAIPTFRQLGTVQQVISERVTQLTREELSRLQPVLQPLPSPGVGGKRDVVFLIDGSQSAGPEFQYVRTLIERLVDYLDVGFDTTRVAVIQFSDDPKVEFLLNAHSSKDEVQNAVQRLRPKGGRQINVGNALEYVSRNIFKRPLGSRIEEGVPQFLVLISSGKSDDEVDDPAVELKQFGVAPFTIARNADQEELVKISLSPEYVFSVSTFRELPSLEQKLLTPITTLTSEQIQKLLASTRYPPPGEMGASEVLLGAFSI

SEQ ID NO: 3338 - protein, 173 aa, Homo Sapiens
PIGTQQIRVGVVQFSDEPRTMFSLDTYSTKAQVLGAVKALGFAGGELANIGLALDFVVENHFTRAGGSRVEEGVPQVLVLISAGPSSDEIRYGVVALKQASVFSFGLGAQAASRAELQHIATDDNLVFTVPEFRSFGDLQEKLLPYIVGVAQRHIVLKPPTIVTQEYGLNENW

SEQ ID NO: 3339 - protein, 557 aa, Homo Sapiens
IGRALLWTTENLFPETPYLRKHKVIFVVSAGENYERKEFVKMMALRAKCQGYVIFVISLGSTRKDDMEELASYPLDQHLIQLGRIHKPDLNYIAKFLKPFLYSVRRGFNQYPPPMLEDACRLINLGGENIQNDGFQFVTELQEDFLGGNGFIGQELNSGRESPFVKTEDNGSDYLVYLPSQMFEPQKLMINYEKDQKSAEIASLTSGHENYGRKEEPDHTYEPGDVSLQEYYMDVAFLIDASQRVGSDEFKEVKAFITSVLDYFHIAPTPLTSTLGDRVAVLSYSPPGYMPNTEECPVYLEFDLVTYNSIHQMKHHLQDSQQLNGDVFIGHALQWTIDNVFVGTPNLRKNKVIFVISAGETNSLDKDVLRNVSLRAKCQGYSIFVFSFGPKHNDKELEELASHPLDHHLVQLGRTHKPDWNYIIKFVKPFVHLIRRAINKYPTEDMKATCVNMTSPNPENGGTENTVLLLPGIYEIKTENGDLFDEFDSQAQHLLVLGNNHSSGSETATDLMQKLYLLFSTEKLAMKDKEKAHLEEISALVVDKQQEKEDGEDTRSS

SEQ ID NO: 3340 - protein, 2611 aa, Homo Sapiens
MKILLIIFVLIIWTETLADQSPGPGPVYADVVFLVDSSDHLGPKSFPFVKTFINKMINSLPIEANKYRVALAQYSDEFHSEFHLSTFKGRSPMLNHLKKNFQFIGGSLQIGKALQEAHRTYFSAPINGRDRKQFPPILVVLASAESEDEVEEASKALQKDGVKIISVGVQKASEENLKAMATSHFHFNLRTIRDLSTFSQNMTQIIKDVTKYKEGAVDADMQVHFPISCQKDSLADLVFLVDESLGTGGNLRHLQTFLENITSSMDVKENCMRLGLMSYSNSAKTISFLKSSTTQSEFQQQIKNLSIQVGKSNTGAAIDQMRRDGFSESYGSRRAQGVPQIAVLVTHRPSDDEVHDAALNLRLEDVNVFALSIQGANNTQLEEIVSYPPEQTISTLKSYADLETYSTKFLKKLQNEIWSQISTYAEQRNLDKTGCVDTKEADIHFLIDGSSSIQEKQFEQIKRFMLEVTEMFSIGPDKVRVGVVQYSDDTEVEFYITDYSNDIDLRKAIFNIKQLTGGTYTGKALDYILQIIKNGMKDRMSKVPCYLIVLTDGMSTDRVVEPAKRLRAEQITVHAVGIGAANKIELQEIAGKEERVSFGQNFDALKSIKNEVVREICAEKGCEDMKADIMFLVDSSWSIGNENFRKMKIFMKNLLTKIQIGADKTQIGVVQFSDKTKEEFQLNRYFTQQEISDAIDRMSLINEGTLTGKALNFVGQYFTHSKGARLGAKKFLILITDGVAQDDVRDPARILRGKDVTIFSVGVYNANRSQLEEISGDSSLVFHVENFDHLKALERKLIFRVCALHDCKRITLLDVVFVLDHSGSIKKQYQDHMINLTIHLVKKADVGRDRVQFGALKYSDQPNILFYLNTYSNRSAIIENLRKRRDTGGNTYTAKALKHANALFTEEHGSRIKQNVKQMLIVITDGESHDHDQLNDTALELRNKGITIFAVGVGKANQKELEGMAGNKNNTIYVDNFDKLKDVFTLVQERMCTEAPEVCHLQEADVIFLCDGSDRVSNSDFVTMTTFLSDLIDNFDIQSQRMKIGMAQFGSNYQSIIELKNSLTKTQWKTQIQNVSKSGGFPRIDFALKKVSNMFNLHAGGRRNAGVPQTLVVITSGDPRYDVADAVKTLKDLGICVLVLGIGDVYKEHLLPITGNSEKIITFQDFDKLKNVDVKKRIIREICQSCGKTNCFMDIVVGFDISTHVQGQPLFQGHPQLESYLPGILEDISSIKGVSCGAGTEAQVSLAFKVNSDQGFPAKFQIYQKAVFDSLLQVNVSGPTHLNAQFLRSLWDTFKDKSASRGQVLLIFSDGLQSESNIMLENQSDRLREAGLDALLVVSLNTTAHHEFSSFEFGKRFDYRTHLTIGMRELGKKLSQYLGNIAERTCCCTFCKCPGIPGPHGTRGLQAMKGSQGLKGSRGHRGEDGNPGVRGDTGPQGDKGIAGCPGAWGQKGLKGFSGPKGGHGDDGIDGLDGEEGCHGFPGIKGEKGDPGSQGSPGSRGAPGQYGEKGFPGDPGNPGQNNNIKGQKGSKGEQGRQGRSGQKGVQGSPSSRGSRGREGQRGLRGVSGEPGNPGPTGTLGAEGLQGPQGSQGNPGRKGEKGSQGQKGPQGSPGLMGAKGSTGRPGLLGKKGEPGLPGDLGPVGQTGQRGRQGDSGIPGYGQMGRKGVKGPRGFPGDAGQKGDIGNPGIPGGPGPKGFRGLALTVGLKGEEGSRGLPGPPGQRGIKGMAGQPVYSQCDLIRFLREHSLFKNAYPTELVFALDNSYDVTEESFNKTRDIITSIVNDLNIRENNCPVGARVAMVSYNSGTSYLIRWSDYNRKKQLLQQLSQIKYQDTTEPRDVGNAMRFVTRNVFKRTYAGANVRRVAVFFSNGQTASRSSIITATMEFSALDISPTVFAFDERVFLEAFGFDNTGTFQVIPVPPNGENQTLERLRRCALCYDKCFPNACIREAFLPEDSYMDVVFLIDNSRNIAKDEFKAVKALVSSVIDNFNIASDPLISDSGDRIALLSYSPWESSRRKMGTVKTEFDFITYDNQLLMKNHIQTSFQQLNGEATIGRALLWTTENLFPETPYLRKHKVIFVVSAGENYERKEFVKMMALRAKCQGYVIFVISLGSTRKDDMEELASYPLDQHLIQLGRIHKPDLNYIAKFLKPFLYSVRRGFNQYPPPMLEDACRLINLGGENIQNDGFQFVTELQEDFLGGNGFIGQELNSGRESPFVKTEDNGSDYLVYLPSQMFEPQKLMINYEKDQKSAEIASLTSGHENYGRKEEPDHTYEPGDVSLQEYYMDVAFLIDASQRVGSDEFKEVKAFITSVLDYFHIAPTPLTSTLGDRVAVLSYSPPGYMPNTEECPVYLEFDLVTYNSIHQMKHHLQDSQQLNGDVFIGHALQWTIDNVFVGTPNLRKNKVIFVISAGETNSLDKDVLRNVSLRAKCQGYSIFVFSFGPKHNDKELEELASHPLDHHLVQLGRTHKPDWNYIIKFVKPFVHLIRRAINKYPTEDMKATCVNMTSPNPENGGTENTVLLLPGIYEIKTENGDLFDEFDSQAQHLLVLGNNHSSGSETATDLMQKLYLLFSTEKLAMKDKEKAHLEEISALVVDKQQEKEDKEMEATDI

SEQ ID NO: 3341 - protein, 2615 aa, Homo Sapiens
MKILLIIFVLIIWTETLADQSPGPGPVYADVVFLVDSSDHLGPKSFPFVKTFINKMINSLPIEANKYRVALAQYSDEFHSEFHLSTFKGRSPMLNHLKKNFQFIGGSLQIGKALQEAHRTYFSAPINGRDRKQFPPILVVLASAESEDEVEEASKALQKDGVKIISVGVQKASEENLKAMATSHFHFNLRTIRDLSTFSQNMTQIIKDVTKYKEGAVDADMQVHFPISCQKDSLADLVFLVDESLGTGGNLRHLQTFLENITSSMDVKENCMRLGLMSYSNSAKTISFLKSSTTQSEFQQQIKNLSIQVGKSNTGAAIDQMRRDGFSESYGSRRAQGVPQIAVLVTHRPSDDEVHDAALNLRLEDVNVFALSIQGANNTQLEEIVSYPPEQTISTLKSYADLETYSTKFLKKLQNEIWSQISTYAEQRNLDKTGCVDTKEADIHFLIDGSSSIQEKQFEQIKRFMLEVTEMFSIGPDKVRVGVVQYSDDTEVEFYITDYSNDIDLRKAIFNIKQLTGGTYTGKALDYILQIIKNGMKDRMSKVPCYLIVLTDGMSTDRVVEPAKRLRAEQITVHAVGIGAANKIELQEIAGKEERVSFGQNFDALKSIKNEVVREICAEKGCEDMKADIMFLVDSSWSIGNENFRKMKIFMKNLLTKIQIGADKTQIGVVQFSDKTKEEFQLNRYFTQQEISDAIDRMSLINEGTLTGKALNFVGQYFTHSKGARLGAKKFLILITDGVAQDDVRDPARILRGKDVTIFSVGVYNANRSQLEEISGDSSLVFHVENFDHLKALERKLIFRVCALHDCKRITLLDVVFVLDHSGSIKKQYQDHMINLTIHLVKKADVGRDRVQFGALKYSDQPNILFYLNTYSNRSAIIENLRKRRDTGGNTYTAKALKHANALFTEEHGSRIKQNVKQMLIVITDGESHDHDQLNDTALELRNKGITIFAVGVGKANQKELEGMAGNKNNTIYVDNFDKLKDVFTLVQERMCTEAPEVCHLQEADVIFLCDGSDRVSNSDFVTMTTFLSDLIDNFDIQSQRMKIGMAQFGSNYQSIIELKNSLTKTQWKTQIQNVSKSGGFPRIDFALKKVSNMFNLHAGGRRNAGVPQTLVVITSGDPRYDVADAVKTLKDLGICVLVLGIGDVYKEHLLPITGNSEKIITFQDFDKLKNVDVKKRIIREICQSCGKTNCFMDIVVGFDISTHVQGQPLFQGHPQLESYLPGILEDISSIKGVSCGAGTEAQVSLAFKVNSDQGFPAKFQIYQKAVFDSLLQVNVSGPTHLNAQFLRSLWDTFKDKSASRGQVLLIFSDGLQSESNIMLENQSDRLREAGLDALLVVSLNTTAHHEFSSFEFGKRFDYRTHLTIGMRELGKKLSQYLGNIAERTCCCTFCKCPGIPGPHGTRGLQAMKGSQGLKGSRGHRGEDGNPGVRGDTGPQGDKGIAGCPGAWGQKGLKGFSGPKGGHGDDGIDGLDGEEGCHGFPGIKGEKGDPGSQGSPGSRGAPGQYGEKGFPGDPGNPGQNNNIKGQKGSKGEQGRQGRSGQKGVQGSPSSRGSRGREGQRGLRGVSGEPGNPGPTGTLGAEGLQGPQGSQGNPGRKGEKGSQGQKGPQGSPGLMGAKGSTGRPGLLGKKGEPGLPGDLGPVGQTGQRGRQGDSGIPGYGQMGRKGVKGPRGFPGDAGQKGDIGNPGIPGGPGPKGFRGLALTVGLKGEEGSRGLPGPPGQRGIKGMAGQPVYSQCDLIRFLREHSPCWKEKCPAYPTELVFALDNSYDVTEESFNKTRDIITSIVNDLNIRENNCPVGARVAMVSYNSGTSYLIRWSDYNRKKQLLQQLSQIKYQDTTEPRDVGNAMRFVTRNVFKRTYAGANVRRVAVFFSNGQTASRSSIITATMEFSALDISPTVFAFDERVFLEAFGFDNTGTFQVIPVPPNGENQTLERLRRCALCYDKCFPNACIREAFLPEDSYMDVVFLIDNSRNIAKDEFKAVKALVSSVIDNFNIASDPLISDSGDRIALLSYSPWESSRRKMGTVKTEFDFITYDNQLLMKNHIQTSFQQLNGEATIGRALLWTTENLFPETPYLRKHKVIFVVSAGENYERKEFVKMMALRAKCQGYVIFVISLGSTRKDDMEELASYPLDQHLIQLGRIHKPDLNYIAKFLKPFLYSVRRGFNQYPPPMLEDACRLINLGGENIQNDGFQFVTELQEDFLGGNGFIGQELNSGRESPFVKTEDNGSDYLVYLPSQMFEPQKLMINYEKDQKSAEIASLTSGHENYGRKEEPDHTYEPGDVSLQEYYMDVAFLIDASQRVGSDEFKEVKAFITSVLDYFHIAPTPLTSTLGDRVAVLSYSPPGYMPNTEECPVYLEFDLVTYNSIHQMKHHLQDSQQLNGDVFIGHALQWTIDNVFVGTPNLRKNKVIFVISAGETNSLDKDVLRNVSLRAKCQGYSIFVFSFGPKHNDKELEELASHPLDHHLVQLGRTHKPDWNYIIKFVKPFVHLIRRAINKYPTEDMKATCVNMTSPNPENGGTENTVLLLPGIYEIKTENGDLFDEFDSQAQHLLVLGNNHSSGSETATDLMQKLYLLFSTEKLAMKDKEKAHLEEISALVVDKQQEKEDKEMEATDI

SEQ ID NO: 3342 - protein, 443 aa, Homo Sapiens
NQYPPPMLEDACRLINLGGENIQNDGFQFVTELQEDFLGGNGFIGQELNSGRESPFVKTEDNGSDYLVYLPSQMFEPQKLMINYEKDQKSAEIASLTSGHENYGRKEEPDHTYEPGDVSLQEYYMDVAFLIDASQRVGSDEFKEVKAFITSVLDYFHIAPTPLTSTLGDRVAVLSYSPPGYMPNTEECPVYLEFDLVTYNSIHQMKHHLQDSQQLNGDVFIGHALQWTIDNVFVGTPNLRKNKVIFVISAGETNSLDKDVLRNVSLRAKCQGYSIFVFSFGPKHNDKELEELASHPLDHHLVQLGRTHKPDWNYIIKFVKPFVHLIRRAINKYPTEDMKATCVNMTSPNPENGGTENTVLLLPGIYEIKTENGDLFDEFDSQAQHLLVLGNNHSSGSETATDLMQKLYLLFSTEKLAMKDKEKAHLEEISALVVDKQQEKEDL

SEQ ID NO: 3343 - protein, 778 aa, Homo Sapiens
  misc_feature (1)..(1): Xaa can be any naturally occurring amino acid
XEKCPAYPTELVFALDNSYDVTEESFNKTRDIITSIVNDLNIRENNCPVGARVAMVSYNSGTSYLIRWSDYNRKKQLLQQLSQIKYQDTTEPRDVGNAMRFVTRNVFKRTYAGANVRRVAVFFSNGQTASRSSIITATMEFSALDISPTVFAFDERVFLEAFGFDNTGTFQVIPVPPNGENQTLERLRRCALCYDKCFPNACIREAFLPEDSYMDVVFLIDNSRNIAKDEFKAVKALVSSVIDNFNIASDPLISDSGDRIALLSYSPWESSRRKMGTVKTEFDFITYDNQLLMKNHIQTSFQQLNGEATIGRALLWTTENLFPETPYLRKHKVIFVVSAGENYERKEFVKMMALRAKCQGYVIFVISLGSTRKDDMEELASYPLDQHLIQLGRIHKPDLNYIAKFLKPFLYSVRRGFNQYPPPMLEDACRLINLGGENIQNDGFQFVTELQEDFLGGNGFIGQELNSGRESPFVKTEDNGSDYLVYLPSQMFEPQKLMINYEKDQKSAEIASLTSGHENYGRKEEPDHTYEPGDVSLQEYYMDVAFLIDASQRVGSDEFKEVKAFITSVLDYFHIAPTPLTSTLGDRVAVLSYSPPGYMPNTEECPVYLEFDLVTYNSIHQMKHHLQDSQQLNGDVFIGHALQWTIDNVFVGTPNLRKNKVIFVISAGETNSLDKDVLRNVSLRAKCQGYSIFVFSFGPKHNDKELEELASHPLDHHLVQLGRTHKPDWNYIIKFVKPFVHLIRRAINKYPTEDMKATCVNMTSPNPENGGTENTVLW

SEQ ID NO: 3344 - protein, 2263 aa, Homo Sapiens
MMLLILFLVIICSHISVNQDSGPEYADVVFLVDSSDRLGSKSFPFVKMFITKMISSLPIEADKYRVALAQYSDKLHSEFHLSTFKGRSPMLNHLRKNFGFIGGSLQIGKALQEAHRTYFSAPANGRDKKQFPPILVVLASSESEDNVEEASKALRKDGVKIISVGVQKASEENLKAMATSQFHFNLRTVRDLSMFSQNMTHIIKDVIKYKEGAVDDIFVEACQGPSMADVVFLLDMSINGSEENFDYLKGFLEESVSALDIKENCMRVGLVAYSNETKVINSLSMGINKSEVLQHIQNLSPRTGKAYTGAAIKKLRKEVFSARNGSRKNQGVPQIAVLVTHRDSEDNVTKAAVNLRREGVTIFTLGIEGASDTQLEKIASHPAEQYVSKLKTFADLAAHNQTFLKKLRNQITHTVSVFSERTETLKSGCVDTEEADIYLLIDGSGSTQATDFHEMKTFLSEVVGMFNIAPHKVRVGAVQYADSWDLEFEINKYSNKQDLGKAIENIRQMGGNTNTGAALNFTLSLLQKAKKQRGNKVPCHLVVLTNGMSKDSILEPANRLREEHIRVYAIGIKEANQTQLREIAGEEKRVYYVHDFDALKDIRNQVVQEICTEEACKEMKADIMFLVDSSGSIGPENFSKMKTFMKNLVSKSQIGPDRVQIGVVQFSDINKEEFQLNRFMSQSDISNAIDQMAHIGQTTLTGSALSFVSQYFSPTKGARPNIRKFLILITDGEAQDIVKEPAVVLRQEGVIIYSVGVFGSNVTQLEEISGRPEMVFYVENFDILQRIEDDLVFGICSPREECKRIEVLDVVFVIDSSGSIDYDEYNIMKDFMIGLVKKADVGKNQVRFGALKYADDPEVLFYLDDFGTKLEVISVLQNDQAMGGSTYTAEALGFSDHMFTEARGSRLNKGVPQVLIVITDGESHDADKLNATAKALRDKGILVLAVGIDGANPVELLAMAGSSDKYFFVETFGGLKGIFSDVTASVCNSSKVDCEIDKVDLVFLMDGSTSIQPNDFKKMKEFLASVVQDFDVSLNRVRIGAAQFSDTYHPEFPLGTFIGEKEISFQIENIKQIFGNTHIGAALREVEHYFRPDMGSRINTGTPQVLLVLTDGQSQDEVAQAAEALRHRGIDIYSVGIGDVDDQQLIQITGTAEKKLTVHNFDELKKVNKRIVRNICTTAGESNCFVDVVVGFDVSTQEKGQTLLEGQPWMETYLQDILRAISSLNGVSCEVGTETQVSVAFQVTNAMEKYSPKFEIYSENILNSLKDITVKGPSLLNANLLDSLWDTFQNKSAARGKVVLLFSDGLDDDVEKLEQKSDELRKEGLNALITVALDGPADSSDLADLPYIEFGKGFEYRTQLSIGMRELGSRLSKQLVNVAERTCCCLFCKCIGGDGTMGDPGPPGKRGPPGFKGSEGYLGEEGIAGERGAPGPVGEQGTKGCYGTKGPKGNRGLNGQEGEVGENGIDGLNGEQGDNGLPGRKGEKGDEGSQGSPGKRGTPGDRGAKGLRGDPGAPGVDSSIEGPTGLKGERGRQGRRGWPGPPGTPGSRRKTAAHGRRGHTGPQGTAGIPGPDGLEGSLGLKGPQGPRGEAGVKGEKGGVGSKGPQGPPGPGGEAGNQGRLGSQGNKGEPGDLGEKGAVGFPGPRGLQGNDGSPGYGSVGRKGAKGQEGFPGESGPKGEIGDPGGPGETGLKGARGKMISAGLPGEMGSPGEPGPPGRKGVKGAKGLASFSTCELIQYVRDRSPGRHGKPECPVHPTELVFALDHSRDVTEQEFERMKEMMAFLVRDIKVRENSCPVGAHIAILSYNSHARHLVRFSDAYKKSQLLREIETIPYERSSASREIGRAMRFISRNVFKRTLPGAHTRKIATFFSSGQSADAHSITTAAMEFGALEIIPVVITFSNVPSVRRAFAIDDTGTFQVIVVPSGADYIPALERLQRCTFCYDVCKPDASCDQARPPPVQSYMDAAFLLDASRNMGSAEFEDIRAFLGALLDHFEITPEPETSVTGDRVALLSHAPPDFLPNTQKSPVRAEFNLTTYRSKRLMKRHVHESVKQLNGDAFIGHALQWTLDNVFLSTPNLRRNKVIFVISAGETSHLDGEILKKESLRAKCQGYALFVFSLGPIWDDKELEDLASHPLDHHLVQLGRIHKPDHSYGVKFVKSFINSIRRAINKYPPINLKIKCNRLNSIDPKQPPRPFRSFVPGPLKATLKEDVLQKAKFFQDKKYLSRVARSGRDDAIQNFMRSTSHTFKNGRMIESAPKQHD

SEQ ID NO: 3345 - protein, 298 aa, Homo Sapiens
  misc_feature (1)..(1): Xaa can be any naturally occurring amino acid
XLNGVSCEVGTETQVSVAFQVTNAMEKYSPKFEIYSENILNSLKDITVKGPSLLNANLLDSLWDTFQNKSAARGKVVLLFSDGLDDDVEKLEQKSDELRKEGLNALITVALDGPADSSDLADLPYIEFGKGFEYRTQLSIGMRELGSRLSKQLVNVAERTCCCLFCKCIGGDGTMGDPGPPGKRGPPGFKGSEGYLGEEGIAGERGAPGPVGEQGTKGCYGTKGPKGNRGLNGQEGEVGENGIDGLNGEQGDNGLPGRKGEKGDEGSQGSPGKRGTPGDRGAKGLRGDPVSARAANWS

SEQ ID NO: 3346 - protein, 259 aa, Homo Sapiens
  misc_feature (1)..(1): Xaa can be any naturally occurring amino acid
XTNAMEKYSPKFEIYSENILNSLKDITVKGPSLLNANLLDSLWDTFQNKSAARGKVVLLFSDGLDDDVEKLEQKSDELRKEGLNALITVALDGPADSSDLADLPYIEFGKGFEYRTQLSIGMRELGSRLSKQLVNVAERTCCCLFCKCIGGDGTMGDPGPPGKRLHVKRVVDFFKKQGSERMERKGPPGFKGSEGYLGEEGIAGERGAPGPVGEQGTKGCYGTKGPKGNRGLNGQEGEVGENGIDGLNGEQGDNGLPGR

SEQ ID NO: 3347 - protein, 173 aa, Homo Sapiens
MSALACGLPVPVPCLNSHLSMGQKGAPGPKGFKGDPGVGVPGSPGPPGPPGVKGDLGLPGLPGAPGVVGFPGQTGPRGEMGQPGPSGERGLAGPPGREGIPGPLGPPGPPGSVGPPGASGLKGDKGDPGVGLPGPRGERGEPGIRGEDGRPGQEGPRGLTGPPGSRGERGEKG

SEQ ID NO: 3348 - protein, 2944 aa, Homo Sapiens
MTLRLLVAALCAGILAEAPRVRAQHRERVTCTRLYAADIVFLLDGSSSIGRSNFREVRSFLEGLVLPFSGAASAQGVRFATVQYSDDPRTEFGLDALGSGGDVIRAIRELSYKGGNTRTGAAILHVADHVFLPQLARPGVPKVCILITDGKSQDLVDTAAQRLKGQGVKLFAVGIKNADPEELKRVASQPTSDFFFFVNDFSILRTLLPLVSRRVCTTAGGVPVTRPPDDSTSAPRDLVLSEPSSQSLRVQWTAASGPVTGYKVQYTPLTGLGQPLPSERQEVNVPAGETSVRLRGLRPLTEYQVTVIALYANSIGEAVSGTARTTALEGPELTIQNTTAHSLLVAWRSVPGATGYRVTWRVLSGGPTQQQELGPGQGSVLLRDLEPGTDYEVTVSTLFGRSVGPATSLMARTDASVEQTLRPVILGPTSILLSWNLVPEARGYRLEWRRETGLEPPQKVVLPSDVTRYQLDGLQPGTEYRLTLYTLLEGHEVATPATVVPTGPELPVSPVTDLQATELPGQRVRVSWSPVPGATQYRIIVRSTQGVERTLVLPGSQTAFDLDDVQAGLSYTVRVSARVGPREGSASVLTVRREPETPLAVPGLRVVVSDATRVRVAWGPVPGASGFRISWSTGSGPESSQTLPPDSTATDITGLQPGTTYQVAVSVLRGREEGPAAVIVARTDPLGPVRTVHVTQASSSSVTITWTRVPGATGYRVSWHSAHGPEKSQLVSGEATVAELDGLEPDTEYTVHVRAHVAGVDGPPASVVVRTAPEPVGRVSRLQILNASSDVLRITWVGVTGATAYRLAWGRSEGGPMRHQILPGNTDSAEIRGLEGGVSYSVRVTALVGDREGTPVSIVVTTPPEAPPALGTLHVVQRGEHSLRLRWEPVPRAQGFLLHWQPEGGQEQSRVLGPELSSYHLDGLEPATQYRVRLSVLGPAGEGPSAEVTARTESPRVPSIELRVVDTSIDSVTLAWTPVSRASSYILSWRPLRGPGQEVPGSPQTLPGISSSQRVTGLEPGVSYIFSLTPVLDGVRGPEASVTQTPVCPRGLADVVFLPHATQDNAHRAEATRRVLERLVLALGPLGPQAVQVGLLSYSHRPSPLFPLNGSHDLGIILQRIRDMPYMDPSGNNLGTAVVTAHRYMLAPDAPGRRQHVPGVMVLLVDEPLRGDIFSPIREAQASGLNVVMLGMAGADPEQLRRLAPGMDSVQTFFAVDDGPSLDQAVSGLATALCQASFTTQPRPEPCPVYCPKGQKGEPGEMGLRGQVGPPGDPGLPGRTGAPGPQGPPGSATAKGERGFPGADGRPGSPGRAGNPGTPGAPGLKGSPGLPGPRGDPGERGPRGPKGEPGAPGQVIGGEGPGLPGRKGDPGPSGPPGPRGPLGDPGPRGPPGLPGTAMKGDKGDRGERGPPGPGEGGIAPGEPGLPGLPGSPGPQGPVGPPGKKGEKGDSEDGAPGLPGQPGSPGEQGPRGPPGAIGPKGDRGFPGPLGEAGEKGERGPPGPAGSRGLPGVAGRPGAKGPEGPPGPTGRQGEKGEPGRPGDPAVVGPAVAGPKGEKGDVGPAGPRGATGVQGERGPPGLVLPGDPGPKGDPGDRGPIGLTGRAGPPGDSGPPGEKGDPGRPGPPGPVGPRGRDGEVGEKGDEGPPGDPGLPGKAGERGLRGAPGVRGPVGEKGDQGDPGEDGRNGSPGSSGPKGDRGEPGPPGPPGRLVDTGPGAREKGEPGDRGQEGPRGPKGDPGLPGAPGERGIEGFRGPPGPQGDPGVRGPAGEKGDRGPPGLDGRSGLDGKPGAAGPSGPNGAAGKAGDPGRDGLPGLRGEQGLPGPSGPPGLPGKPGEDGKPGLNGKNGEPGDPGEDGRKGEKGDSGASGREGRDGPKGERGAPGILGPQGPPGLPGPVGPPGQGFPGVPGGTGPKGDRGETGSKGEQGLPGERGLRGEPGSVPNVDRLLETAGIKASALREIVETWDESSGSFLPVPERRRGPKGDSGEQGPPGKEGPIGFPGERGLKGDRGDPGPQGPPGLALGERGPPGPSGLAGEPGKPGIPGLPGRAGGVGEAGRPGERGERGEKGERGEQGRDGPPGLPGTPGPPGPPGPKVSVDEPGPGLSGEQGPPGLKGAKGEPGSNGDQGPKGDRGVPGIKGDRGEPGPRGQDGNPGLPGERGMAGPEGKPGLQGPRGPPGPVGGHGDPGPPGAPGLAGPAGPQGPSGLKGEPGETGPPGRGLTGPTGAVGLPGPPGPSGLVGPQGSPGLPGQVGETGKPGAPGRDGASGKDGDRGSPGVPGSPGLPGPVGPKGEPGPTGAPGQAVVGLPGAKGEKGAPGGLAGDLVGEPGAKGDRGLPGPRGEKGEAGRAGEPGDPGEDGQKGAPGPKGFKGDPGVGVPGSPGPPGPPGVKGDLGLPGLPGAPGVVGFPGQTGPRGEMGQPGPSGERGLAGPPGREGIPGPLGPPGPPGSVGPPGASGLKGDKGDPGVGLPGPRGERGEPGIRGEDGRPGQEGPRGLTGPPGSRGERGEKGDVGSAGLKGDKGDSAVILGPPGPRGAKGDMGERGPRGLDGDKGPRGDNGDPGDKGSKGEPGDKGSAGLPGLRGLLGPQGQPGAAGIPGDPGSPGKDGVPGIRGEKGDVGFMGPRGLKGERGVKGACGLDGEKGDKGEAGPPGRPGLAGHKGEMGEPGVPGQSGAPGKEGLIGPKGDRGFDGQPGPKGDQGEKGERGTPGIGGFPGPSGNDGSAGPPGPPGSVGPRGPEGLQGQKGERGPPGERVVGAPGVPGAPGERGEQGRPGPAGPRGEKGEAALTEDDIRGFVRQEMSQHCACQGQFIASGSRPLPSYAADTAGSQLHAVPVLRVSHAEEEERVPPEDDEYSEYSEYSVEEYQDPEAPWDSDDPCSLPLDEGSCTAYTLRWYHRAVTGSTEACHPFVYGGCGGNANRFGTREACERRCPPRVVQSQGTGTAQD

SEQ ID NO: 3349 - protein, 114 aa, Homo Sapiens
MAVLPGPLQLLGVLLTISLSSIRLIQAGAYYGIKPLPPQIPPQMPPQIPQYQPLGQQVPHMPLAKDGLAMGKEMPHLQYGKEYPHLPQYMKEIQPAPRMGKEAVPKKGKEIPLA

SEQ ID NO: 3350 - protein, 202 aa, Homo Sapiens
MAVLPGPLQLLGVLLTISLSSIRLIQAGAYYGIKPLPPQIPPQMPPQIPQYQPLGQQVPHMPLAKDGLAMGKEMPHLQYGKEYPHLPQYMKEIQPAPRMGKEAVPKKGKEIPLASLRGEQGPRGEPGPRGPPGPPGLPGHGIPGIKGKPGPQGYPGVGKPGMPGMPGKPGAMGMPGAKGEIGQKGEIGPMGIPGPQGPPGPH

SEQ ID NO: 3351 - protein, 744 aa, Homo Sapiens
MAVLPGPLQLLGVLLTISLSSIRLIQAGAYYGIKPLPPQIPPQMPPQIPQYQPLGQQVPHMPLAKDGLAMGKEMPHLQYGKEYPHLPQYMKEIQPAPRMGKEAVPKKGKEIPLASLRGEQGPRGEPGPRGPPGPPGLPGHGIPGIKGKPGPQGYPGVGKPGMPGMPGKPGAMGMPGAKGEIGQKGEIGPMGIPGPQGPPGPHGLPGIGKPGGPGLPGQPGPKGDRGPKGLPGPQGLRGPKGDKGFGMPGAPGVKGPPGMHGPPGPVGLPGVGKPGVTGFPGPQGPLGKPGAPGEPGPQGPIGVPGVQGPPGIPGIGKPGQDGIPGQPGFPGGKGEQGLPGLPGPPGLPGIGKPGFPGPKGDRGMGGVPGALGPRGEKGPIGAPGIGGPPGEPGLPGIPGPMGPPGAIGFPGPKGEGGIVGPQGPPGPKGEPGLQGFPGKPGFLGEVGPPGMRGLPGPIGPKGEAGQKGVPGLPGVPGLLGPKGEPGIPGDQGLQGPPGIPGIGGPSGPIGPPGIPGPKGEPGLPGPPGFPGIGKPGVAGLHGPPGKPGALGPQGQPGLPGPPGPPGPPGPPAVMPPTPPPQGEYLPDMGLGIDGVKPPHAYGAKKGKNGGPAYEMPAFTAELTAPFPPVGAPVKFNKLLYNGRQNYNPQTGIFTCEVPGVYYFAYHVHCKGGNVWVALFKNNEPVMYTYDEYKKGFLDQASGSAVLLLRPGDRVFLQMPSEQAAGLYAGQYVHSSFSGYLLYPM

SEQ ID NO: 3352 - protein, 744 aa, Homo Sapiens; identical to SEQ ID NO: 3351

SEQ ID NO: 3353 - protein, 703 aa, Homo Sapiens
MLGTLTPLSSLLLLLLVLVLGCGPRASSGGGAGGAAGYAPVKYIQPMQKGPVGPPFREGKGQYLEMPLPLLPMDLKGEPGPPGKPGPRGPPGPPGFPGKPGMGKPGLHGQPGPAGPPGFSRMGKAGPPGLPGKVGPPGQPGLRGEPGIRGDQGLRGPPGPPGLPGPSGITIPGKPGAQGVPGPPGFQGEPGPQGEPGPPGDRGLKGDNGVGQPGLPGAPGQGGAPGPPGLPGPAGLGKPGLDGLPGAPGDKGESGPPGVPGPRGEPGAVGPKGPPGVDGVGVPGAAGLPGPQGPSGAKGEPGTRGPPGLIGPTGYGMPGLPGPKGDRGPAGVPGLLGDRGEPGEDGEPGEQGPQGLGGPPGLPGSAGLPGRRGPPGPKGEAGPGGPPGVPGIRGDQGPSGLAGKPGVPGERGLPGAHGPPGPTGPKGEPGFTGRPGGPGVAGALGQKGDLGLPGQPGLRGPSGIPGLQGPAGPIGPQGLPGLKGEPGLPGPPGEGRAGEPGTAGPTGPPGVPGSPGITGPPGPPGPPGPPGAPGAFDETGIAGLHLPNGGVEGAVLGKGGKPQFGLGELSAHATPAFTAVLTSPFPASGMPVKFDRTLYNGHSGYNPATGIFTCPVGGVYYFAYHVHVKGTNVWVALYKNNVPATYTYDEYKKGYLDQASGGAVLQLRPNDQVWVQMPSDQANGLYSTEYIHSSFSGFLLCPT

SEQ ID NO: 3354 - protein, 703 aa, Homo Sapiens; identical to SEQ ID NO: 3353

SEQ ID NO: 3355 - protein, 638 aa, Homo Sapiens
MPLPLLPMDLKGEPGPPGKPGPRGPPGPPGFPGKPGMGKPGLHGQPGPAGPPGFSRMGKAGPPGLPGKVGPPGQPGLRGEPGIRGDQGLRGPPGPPGLPGPSGITIPGKPGAQGVPGPPGFQGEPGPQGEPGPPGDRGLKGDNGVGQPGLPGAPGQGGAPGPPGLPGPAGLGKPGLDGLPGAPGDKGESGPPGVPGPRGEPGAVGPKGPPGVDGVGVPGAAGLPGPQGPSGAKGEPGTRGPPGLIGPTGYGMPGLPGPKGDRGPAGVPGLLGDRGEPGEDGEPGEQGPQGLGGPPGLPGSAGLPGRRGPPGPKGEAGPGGPPGVPGIRGDQGPSGLAGKPGVPGERGLPGAHGPPGPTGPKGEPGFTGRPGGPGVAGALGQKGDLGLPGQPGLRGPSGIPGLQGPAGPIGPQGLPGLKGEPGLPGPPGEGRAGEPGTAGPTGPPGVPGSPGITGPPGPPGPPGPPGAPGAFDETGIAGLHLPNGGVEGAVLGKGGKPQFGLGELSAHATPAFTAVLTSPFPASGMPVKFDRTLYNGHSGYNPATGIFTCPVGGVYYFAYHVHVKGTNVWVALYKNNVPATYTYDEYKKGYLDQASGGAVLQLRPNDQVWVQMPSDQANGLYSTEYIHSSFSGFLLCPT

SEQ ID NO: 3356 - protein, 112 aa, Homo Sapiens
MAWTARDRGALGLLLLGLCLCAAQRGPPGEQGPPGPPGPPGVPGIDGIDGDRGPKGPPGPPGPAGEPGKPGAPGKPGTPGADAGVQWHDLGSLQPLPPGFKRFSCLSLQLPE

SEQ ID NO: 3357 - protein, 678 aa, Homo Sapiens
MAWTARDRGALGLLLLGLCLCAAQRGPPGEQGPPGPPGPPGVPGIDGIDGDRGPKGPPGPPGPAGEPGKPGAPGKPGTPGADGLTGPDGSPGSIGSKGQKGEPGVPGSRGFPGRGIPGPPGPPGTAGLPGELGRVGPVGDPGRRGPPGPPGPPGPRGTIGFHDGDPLCPNACPPGRSGYPGLPGMRGHKGAKGEIGEPGRQGHKGEEGDQGELGEVGAQGPPGAQGLRGITGIVGDKGEKGARGLDGEPGPQGLPGAPGDQGQRGPPGEAGPKGDRGAEGARGIPGLPGPKGDTGLPGVDGRDGIPGMPGTKGEPGKPGPPGDAGLQGLPGVPGIPGAKGVAGEKGSTGAPGKPGQMGNSGKPGQQGPPGEVGPRGPQGLPGSRGELGPVGSPGLPGKLGSLGSPGLPGLPGPPGLPGMKGDRGVVGEPGPKGEQGASGEEGEAGERGELGDIGLPGPKGSAGNPGEPGLRGPEGSRGLPGVEGPRGPPGPRGVQGEQGATGLPGVQGPPGRAPTDQHIKQVCMRVIQEHFAEMAASLKRPDSGATGLPGRPGPPGPPGPPGENGFPGQMGIRGLPGIKGPPGALGLRGPKGDLGEKGERGPPGRGPNGLPGAIGLPGDPGPASYGRNGRDGERGPPGVAGIPGVPGPPGPPGLPGFCEPASCTMQAGQRAFNKGPDP

SEQ ID NO: 3358 - protein, 921 aa, Homo Sapiens
MKTCWKIPVFFFVCSFLEPWASAAVKRRPRFPVNSNSNGGNELCPKIRIGQDDLPGFDLISQFQVDKAASRRAIQRVVGSATLQVAYKLGNNVDFRIPTRNLYPSGLPEEYSFLTTFRMTGSTLKKNWNIWQIQDSSGKEQVGIKINGQTQSVVFSYKGLDGSLQTAAFSNLSSLFDSQWHKIMIGVERSSATLFVDCNRIESLPIKPRGPIDIDGFAVLGKLADNPQVSVPFELQWMLIHCDPLRPRRETCHELPARITPSQTTDERGPPGEQGPPGPPGPPGVPGIDGIDGDRGPKGPPGPPGPAGEPGKPGAPGKPGTPGADGLTGPDGSPGSIGSKGQKGEPGVPGSRGFPGRGIPGPPGPPGTAGLPGELGRVGPVGDPGRRGPPGPPGPPGPRGTIGFHDGDPLCPNACPPGRSGYPGLPGMRGHKGAKGEIGEPGRQGHKGEEGDQGELGEVGAQGPPGAQGLRGITGIVGDKGEKGARGLDGEPGPQGLPGAPGDQGQRGPPGEAGPKGDRGAEGARGIPGLPGPKGDTGLPGVDGRDGIPGMPGTKGEPGKPGPPGDAGLQGLPGVPGIPGAKGVAGEKGSTGAPGKPGQMGNSGKPGQQGPPGEVGPRGPQGLPGSRGELGPVGSPGLPGKLGSLGSPGLPGLPGPPGLPGMKGDRGVVGEPGPKGEQGASGEEGEAGERGELGDIGLPGPKGSAGNPGEPGLRGPEGSRGLPGVEGPRGPPGPRGVQGEQGATGLPGVQGPPGRAPTDQHIKQVCMRVIQEHFAEMAASLKRPDSGATGLPGRPGPPGPPGPPGENGFPGQMGIRGLPGIKGPPGALGLRGPKGDLGEKGERGPPGRGPNGLPGAIGLPGDPGPASYGRNGRDGERGPPGVAGIPGVPGPPGPPGLPGFCEPASCTMQAGQRAFNKGPDP

SEQ ID NO: 3359 - protein, 328 aa, Homo Sapiens
MKTCWKIPVFFFVCSFLEPWASAAVKRRPRFPVNSNSNGGNELCPKIRIGQDDLPGFDLISQFQVDKAASRRAIQRVVGSATLQVAYKLGNNVDFRIPTRNLYPSGLPEEYSFLTTFRMTGSTLKKNWNIWQIQDSSGKEQVGIKINGQTQSVVFSYKGLDGSLQTAAFSNLSSLFDSQWHKIMIGVERSSATLFVDCNRIESLPIKPRGPIDIDGFAVLGKLADNPQVSVPFELQWMLIHCDPLRPRRETCHELPARITPSQTTDERGPPGEQGPPGPPGPPGVPGIDGIDGDRGPKGPPGPPGPAGEPGKPGAPGKPGTPGADTSP

SEQ ID NO: 3360 - protein, 689 aa, Homo Sapiens
MAAATASPRSLLVLLQVVVLALAQIRGPPGERGPPGPPGPPGVPGSDGIDGDNGPPGKAGPPGPKGEPGKAGPDGPDGKPGIDGLTGAKGEPGPMGIPGVKGQPGLPGPPGLPGPGFAGPPGPPGPVGLPGEIGIRGPKGDPGPDGPSGPPGPPGKPGRPGTIQGLEGSADFLCPTNCPPGMKGPPGLQGVKGHAGKRGILGDPGHQGKPGPKGDVGASGEQGIPGPPGPQGIRGYPGMAGPKGETGPHGYKGMVGAIGATGPPGEEGPRGPPGRAGEKGDEGSPGIRGPQGITGPKGATGPPGINGKDGTPGTPGMKGSAGQAGQPGSPGHQGLAGVPGQPGTKGGPGDQGEPGPQGLPGFSGPPGKEGEPGPRGEIGPQGIMGQKGDQGERGPVGQPGPQGRQGPKGEQGPPGIPGPQGLPGVKGDKGSPGKTGPRGKVGDPGVAGLPGEKGEKGESGEPGPKGQQGVRGEPGYPGPSGDAGAPGVQGYPGPPGPRGLAGNRGVPGQPGRQGVEGRDATDQHIVDVALKMLQEQLAEVAVSAKREALGAVGMMGPPGPPGPPGYPGKQGPHGHPGPRGVPGIVGAVGQIGNTGPKGKRGEKGDPGEVGRGHPGMPGPPGIPGLPGRPGQAINGKDGDRGSPGAPGEAGRPGLPGPVGLPGFCEPAACLGASAYASARLTEPGSIKGP

SEQ ID NO: 3361 - protein, 83 aa, Homo Sapiens
MAAATASPRSLLVLLQVVVLALAQIRGPPGERGPPGPPGPPGVPGSDGIDGPPGPVGLPGEIGIRGPKGDPGPDGPSGPPGPP

SEQ ID NO: 3362 - protein, 11 aa, Homo Sapiens
MGIPGVKGQPG

SEQ ID NO: 3363 - protein, 143 aa, Homo Sapiens
MGIPGVKGQPGLPGPPGLPGPGFAGPPGPPGPVGLPGEIGIRGPKGDPGPDGPSGPPGPPGKPGRPGTIQGLEGSADFLCPTNCPPGMKGPPGLQGVKGHAGKRGILGDPGHQGKPGPKGDVGASGEQGIPGPPGPQGIRGYP

SEQ ID NO: 3364 - protein, 684 aa, Homo Sapiens
MAGPRACAPLLLLLLLGELLAAAGAQRVGLPGPPGPPGPPGKPGQDGIDGEAGPPGLPGPPGPKGAPGKPGKPGEAGLPGLPGVDGLTGRDGPPGPKGAPGERGSLGPPGPPGLGGKGLPGPPGEAGVSGPPGGIGLRGPPGPSGLPGLPGPPGPPGPPGHPGVLPEGATDLQCPSICPPGPPGPPGMPGFKGPTGYKGEQGEVGKDGEKGDPGPPGPAGLPGSVGLQGPRGLRGLPGPLGPPGDRGPIGFRGPPGIPGAPGKAGDRGERGPEGFRGPKGDLGRPGPKGTPGVAGPSGEPGMPGKDGQNGVPGLDGQKGEAGRNGAPGEKGPNGLPGLPGRAGSKGEKGERGRAGELGEAGPSGEPGVPGDAGMPGERGEAGHRGSAGALGPQGPPGAPGVRGFQGQKGSMGDPGLPGPQGLRGDVGDRGPGGAAGPKGDQGIAGSDGLPGDKGELGPSGLVGPKGESGSRGELGPKGTQGPNGTSGVQGVPGPPGPLGLQGVPGVPGITGKPGVPGKEASEQRIRELCGGMISEQIAQLAAHLRKPLAPGSIGRPGPAGPPGPPGPPGSIGHPGARGPPGYRGPTGELGDPGPRGNQGDRGDKGAAGAGLDGPEGDQGPQGPQGVPGTSKDGQDGAPGEPGPPGDPGLPGAIGAQGTPGICDTSACQGAVLGGVGEKSGSRSS

SEQ ID NO: 3365 - protein, 191 aa, Homo Sapiens
MWWSSTQNAGTEGEAGPPGLPGPPGPKGAPGKPGKPGEAGLPGLPGVDGLTGRDGPPGPKGAPGERGSLGPPGPPGLGGKGLPGPPGEAGVSGPPGGIGLRGPPGPSGLPGLPGPPGPPGPPGHPGVLPEGATDLQCPSICPPGPPGPPGMPGFKGPTGYKGEQGEVGKDGEKGDPGPPGPAGLPGSVGLQ

SEQ ID NO: 3366 - protein, 277 aa, Homo Sapiens
MNGFASLLRRNQFILLVLFLLQIQSLGLDIDSRPTAEVCATHTISPGPKGDDGEKGDPGEEGKHGKVGRMGPKGIKGELGDMGDQGNIGKTGPIGKKGDKGEKGLLGIPGEKGKAGTVCDCGRYRKFVGQLDISIARLKTSMKFVKNVIAGIRETEEKFYYIVQEEKNYRESLTHCRIRGGMLAMPKDEAANTLIADYVAKSGFFRVFIGVNDLEREGQYMFTDNTPLQNYSNWNEGEPSDPYGHEDCVEMLSSGRWNDTECHLTMYFVCEFIKKKK

SEQ ID NO: 3367 - protein, 123 aa, Homo Sapiens
MKKQRGVGVLPALRMRGNLALVGVLISLAFLSLLPSGHPQPAGDDACSVQILVPGLKGDAGEKGDKGAPGRPGRVGPTGEKGDMGDKGQKGSVGRHGKIGPIGSKGEKGDSGDIGPPGPNGEP

SEQ ID NO: 3368 - protein, 285 aa, Homo Sapiens
MKKQRGVGVLPALRMRGNLALVGVLISLAFLSLLPSGHPQPAGDDACSVQILVPGLKGDAGEKGDKGAPGRPGRVGPTGEKGDMGDKGQKGSVGRHGKIGPIGSKGEKGDSGDIGPPGPNGEPGLPCECSQLRKAIGEMDNQVSQLTSELKFIKNAVAGVRETESKIYLLVKEEKRYADAQLSCQGRGGTLSMPKDEAANGLMAAYLAQAGLARVFIGINDLEKEGAFVYSDHSPMRTFNKWRSGEPNNAYDEEDCVEMVASGGWNDVACHTTMYFMCEFDKENM

SEQ ID NO: 3369 - protein, 116 aa, Homo Sapiens
MRGNLALVGVLISLAFLSLLPSGHPQPAGDDACSVQILVPGLKGDAGEKGDKGAPGRPGRVGPTGEKGDMGDKGQKGSVGRHGKIGPIGSKGEKGDSGDIGPPGPNGEPAPSAPQR

SEQ ID NO: 3370 - protein, 271 aa, Homo Sapiens
MRGNLALVGVLISLAFLSLLPSGHPQPAGDDACSVQILVPGLKGDAGEKGDKGAPGRPGRVGPTGEKGDMGDKGQKGSVGRHGKIGPIGSKGEKGDSGDIGPPGPNGEPGLPCECSQLRKAIGEMDNQVSQLTSELKFIKNAVAGVRETESKIYLLVKEEKRYADAQLSCQGRGGTLSMPKDEAANGLMAAYLAQAGLARVFIGINDLEKEGAFVYSDHSPMRTFNKWRSGEPNNAYDEEDCVEMVASGGWNDVACHTTMYFMCEFDKENM

SEQ ID NO: 3371 - protein, 247 aa, Homo Sapiens
MRGNLALVGVLISLAFLSLLPSGHPQPAGDDACSVQILVPGLKGDAGEKGDKGAPGRPGRVGPTGEKGEKGDSGDIGPPGPNGEPGLPCECSQLRKAIGEMDNQVSQLTSELKFIKNAVAGVRETESKIYLLVKEEKRYADAQLSCQGRGGTLSMPKDEAANGLMAAYLAQAGLARVFIGINDLEKEGAFVYSDHSPMRTFNKWRSGEPNNAYDEEDCVEMVASGGWNDVACHTTMYFMCEFDKENM

SEQ ID NO: 3372 - protein, 268 aa, Homo Sapiens
MTPALCRSSSLASKGMRERRETKAPPDGLEESAPREKKQSQPVVTASDISKRKCTSSFVEMGSQGDMGDKGQKGSVGRHGKIGPIGSKGEKGDSGDIGPPGPNGEPGLPCECSQLRKAIGEMDNQVSQLTSELKFIKNAVAGVRETESKIYLLVKEEKRYADAQLSCQGRGGTLSMPKDEAANGLMAAYLAQAGLARVFIGINDLEKEGAFVYSDHSPMRTFNKWRSGEPNNAYDEEDCVEMVASGGWNDVACHTTMYFMCEFDKENM

SEQ ID NO: 3373 - protein, 245 aa, Homo Sapiens
MWWVPPSPYGCLPCALPGDAGEKGDKGAPGRPGRVGPTGEKGDMGDKGQKGSVGRHGKIGPIGSKGEKGDSGDIGPPGPNGEPGLPCECSQLRKAIGEMDNQVSQLTSELKFIKNAVAGVRETESKIYLLVKEEKRYADAQLSCQGRGGTLSMPKDEAANGLMAAYLAQAGLARVFIGINDLEKEGAFVYSDHSPMRTFNKWRSGEPNNAYDEEDCVEMVASGGWNDVACHTTMYFMCEFDKENM

SEQ ID NO: 3374 - protein, 221 aa, Homo Sapiens
MWWVPPSPYGCLPCALPGDAGEKGDKGAPGRPGRVGPTGEKGEKGDSGDIGPPGPNGEPGLPCECSQLRKAIGEMDNQVSQLTSELKFIKNAVAGVRETESKIYLLVKEEKRYADAQLSCQGRGGTLSMPKDEAANGLMAAYLAQAGLARVFIGINDLEKEGAFVYSDHSPMRTFNKWRSGEPNNAYDEEDCVEMVASGGWNDVACHTTMYFMCEFDKENM

SEQ ID NO: 3375 - protein, 221 aa, Homo Sapiens
MWWVPPSPYGCLPCALPGDMGDKGQKGSVGRHGKIGPIGSKGEKGDSGDIGPPGPNGEPGLPCECSQLRKAIGEMDNQVSQLTSELKFIKNAVAGVRETESKIYLLVKEEKRYADAQLSCQGRGGTLSMPKDEAANGLMAAYLAQAGLARVFIGINDLEKEGAFVYSDHSPMRTFNKWRSGEPNNAYDEEDCVEMVASGGWNDVACHTTMYFMCEFDKENM

SEQ ID NO: 3376 - protein, 197 aa, Homo Sapiens
MWWVPPSPYGCLPCALPGEKGDSGDIGPPGPNGEPGLPCECSQLRKAIGEMDNQVSQLTSELKFIKNAVAGVRETESKIYLLVKEEKRYADAQLSCQGRGGTLSMPKDEAANGLMAAYLAQAGLARVFIGINDLEKEGAFVYSDHSPMRTFNKWRSGEPNNAYDEEDCVEMVASGGWNDVACHTTMYFMCEFDKENM

SEQ ID NO: 3377 - protein, 622 aa, Homo Sapiens
MAAAPRAGRRRGQPLLALLLLLLAPLPPGAPPGADAYFPEERWSPESPLQAPRVLIALLARNAAHALPTTLGALERLRHPRERTALWVATDHNMDNTSTVLREWLVAVKSLYHSVEWRPAEEPRSYPDEEGPKHWSDSRYEHVMKLRQAALKSARDMWADYILFVDADNLILNPDTLSLLIAENKTVVAPMLDSRAAYSNFWCGMTSQGYYKRTPAYIPIRKRDRRGCFAVPMVHSTFLIDLRKAASRNLAFYPPHPDYTWSFDDIIVFAFSCKQAEVQMYVCNKEEYGFLPVPLRAHSTLQDEAESFMHVQLEVMVKHPPAEPSRFISAPTKTPDKMGFDEVFMINLRRRQDRRERMLRALQAQEIECRLVEAVDGKAMNTSQVEALGIQMLPGYRDPYHGRPLTKGELGCFLSHYNIWKEVVDRGLQKSLVFEDDLRFEIFFKRRLMNLMRDVEREGLDWDLIYVGRKRMQVEHPEKAVPRVRNLVEADYSYWTLAYVISLQGARKLLAAEPLSKMLPVDEFLPVMFDKHPVSEYKAHFSLRNLHAFSVEPLLIYPTHYTGDDGYVSDTETSVVWNNEHVKTDWDRAKSQKMREQQALSREAKNSDVLQSPLDSAARDEL

SEQ ID NO: 3378 - protein, 138 aa, Homo Sapiens
MDNTSTVLREWLVAVKSLYHSVEWRPAEEPRSYPDEEGPKHWSDSRYEHVMKLRQAALKSARDMWADYILFVDADNLILNPDTLSLLIAENKTVVAPMLDSRAAYSNFWCGMTSQGYYKRTPAYIPIRKRDRRGCFAV

SEQ ID NO: 3379 - protein, 218 aa, Homo Sapiens
  misc_feature (1)..(1): Xaa can be any naturally occurring amino acid
XKAASRNLAFYPPHPDYTWSFDDIIVFAFSCKQAVKHPPAEPSRFISAPTKTPDKMGFDEVFMINLRRRQDRRERMLRALQAQEIECRLVEAVDGKAMNTSQVEALGIQMLPGYRDPYHGRPLTKGELGCFLSHYNIWKEVVDRGLQKSLVFEDDLRFEIFFKRRLMNLMRDVEREGLDWDLIYVGRKRMQVEHPEKAVPRVRNLVEADYSYWTLAYV

SEQ ID NO: 3380 - protein, 626 aa, Homo Sapiens
MAARPAATLAWSLLLLSSALLREGCRARFVAERDSEDDGEEPVVFPESPLQSPTVLVAVLARNAAHTLPHFLGCLERLDYPKSRMAIWAATDHNVDNTTEIFREWLKNVQRLYHYVEWRPMDEPESYPDEIGPKHWPTSRFAHVMKLRQAALRTAREKWSDYILFIDVDNFLTNPQTLNLLIAENKTIVAPMLESRGLYSNFWCGITPKGFYKRTPDYVQIREWKRTGCFPVPMVHSTFLIDLRKEASDKLTFYPPHQDYTWTFDDIIVFAFSSRQAGIQMYLCNREHYGYLPIPLKPHQTLQEDIENLIHVQIEAMIDRPPMEPSQYVSVVPKYPDKMGFDEIFMINLKRRKDRRDRMLRTLYEQEIEVKIVEAVDGKALNTSQLKALNIEMLPGYRDPYSSRPLTRGEIGCFLSHYSVWKEVIDRELEKTLVIEDDVRFEHQFKKKLMKLMDNIDQAQLDWELIYIGRKRMQVKEPEKAVPNVANLVEADYSYWTLGYVISLEGAQKLVGANPFGKMLPVDEFLPVMYNKHPVAEYKEYYESRDLKAFSAEPLLIYPTHYTGQPGYLSDTETSTIWDNETVATDWDRTHAWKSRKQSRIYSNAKNTEALPPPTSLDTVPSRDEL

SEQ ID NO: 3381 - protein, 363 aa, Homo Sapiens
MFSDCWLCPSLGSSGIQMYLCNREHYGYLPIPLKPHQTLQEDIENLIHVQIEAMIDRPPMEPSQYVSVVPKYPDKMGFDEIFMINLKRRKDRRDRMLRTLYEQEIEVKIVEAVDGKALNTSQLKALNIEMLPGYRDPYSSRPLTRGEIGCFLSHYSVWKEVIDRELEKTLVIEDDVRFEHQFKKKLMKLMDNIDQAQLDWELIYIGRKRMQVKEPEKAVPNVANLVEADYSYWTLGYVISLEGAQKLVGANPFGKMLPVDEFLPVMYNKHPVAEYKEYYESRDLKAFSAEPLLIYPTHYTGQPGYLSDTETSTIWDNETVATDWDRTHAWKSRKQSRIYSNAKNTEALPPPTSLDTVPSRDEL

SEQ ID NO: 3382 - protein, 234 aa, Homo Sapiens
MLPGYRDPYSSRPLTRGEIGCFLSHYSVWKEVIDRELEKTLVIEDDVRFEHQFKKKLMKLMDNIDQAQLDWELIYIGRKRMQVKEPEKAVPNVANLVEADYSYWTLGYVISLEGAQKLVGANPFGKMLPVDEFLPVMYNKHPVAEYKEYYESRDLKAFSAEPLLIYPTHYTGQPGYLSDTETSTIWDNETVATDWDRTHAWKSRKQSRIYSNAKNTEALPPPTSLDTVPSRDEL

SEQ ID NO: 3383 - protein, 194 aa, Homo Sapiens
ISGLLCYSAGCLALPSLDQKKRGGHKACCLLTPPPPPLFPPPFFRGGRSPGPPGLPGKTGPKGEKGELGRPGRKGRPGPPGVPGMPGPIGWPGPEGPRGEKGDLGMMGLPGSRGPMGSKGYPGSRGEKGSRGEKGDLGPKGEKGFPGFPGMLGQKGEMGPKGEPGIAGHRGPTGRPGKRGKQGQKGDSGVMGPP

SEQ ID NO: 3384 - protein, 445 aa, Homo Sapiens
MTGSSFSLAHLLIISGLLCYSAGCLALPSLDQKKRGGHKACCLLTPPPPPLFPPPFFRGGRSPLLSPDMKNLMLELETSQSPCMQGSLGSPGPPGPQGPPGLPGKTGPKGEKGELGRPGRKGRPGPPGVPGMPGPIGWPGPEGPRGEKGDLGMMGLPGSRGPMGSKGYPGSRGEKGSRGEKGDLGPKGEKGFPGFPGMLGQKGEMGPKGEPGIAGHRGPTGRPGKRGKQGQKGDSGVMGPPGKPGPSGQPGRPGPPGPPPAGQLIMGPKGERGFPGPPGRCLCGPTMNVNNPSYGESVYGPSSPRVPVIFVVNNQEELERLNTQNAIAFRRDQRSLYFKDSLGWLPIQLTPFYPVDYTADQHGTCGDGLLQPGEECDDGNSDVGDDCIRCHRAYCGDGHRHEGVEDCDGSDFGYLTCETYLPGSYGDLQCTQYCYIDSTPCRYFT

SEQ ID NO: 3385 - protein, 421 aa, Homo Sapiens
MVVLNPMTLGIYLQLFFLSIVSQPTFINSVLPISAALPSLDQKKRGGHKACCLLTPPPPPLFPPPFFRGGRSPGPPGLPGKTGPKGEKGELGRPGRKGRPGPPGVPGMPGPIGWPGPEGPRGEKGDLGMMGLPGSRGPMGSKGYPGSRGEKGSRGEKGDLGPKGEKGFPGFPGMLGQKGEMGPKGEPGIAGHRGPTGRPGKRGKQGQKGDSGVMGPPGKPGPSGQPGRPGPPGPPPAGQLIMGPKGERGFPGPPGRCLCGPTMNVNNPSYGESVYGPSSPRVPVIFVVNNQEELERLNTQNAIAFRRDQRSLYFKDSLGWLPIQLTPFYPVDYTADQHGTCGDGLLQPGEECDDGNSDVGDDCIRCHRAYCGDGHRHEGVEDCDGSDFGYLTCETYLPGSYGDLQCTQYCYIDSTPCRYFT

SEQ ID NO: 3386 - protein, 455 aa, Homo Sapiens
MVVLNPMTLGIYLQLFFLSIVSQPTFINSVLPISAALPSLDQKKRGGHKACCLLTPPPPPLFPPPFFRGGRSPLLSPDMKNLMLELETSQSPCMQGSLGSPGPPGPQGPPGLPGKTGPKGEKGELGRPGRKGRPGPPGVPGMPGPIGWPGPEGPRGEKGDLGMMGLPGSRGPMGSKGYPGSRGEKGSRGEKGDLGPKGEKGFPGFPGMLGQKGEMGPKGEPGIAGHRGPTGRPGKRGKQGQKGDSGVMGPPGKPGPSGQPGRPGPPGPPPAGQLIMGPKGERGFPGPPGRCLCGPTMNVNNPSYGESVYGPSSPRVPVIFVVNNQEELERLNTQNAIAFRRDQRSLYFKDSLGWLPIQLTPFYPVDYTADQHGTCGDGLLQPGEECDDGNSDVGDDCIRCHRAYCGDGHRHEGVEDCDGSDFGYLTCETYLPGSYGDLQCTQYCYIDSTPCRYFT

SEQ ID NO: 3387 - protein, 456 aa, Homo Sapiens
MVVLNPMTLGIYLQLFFLSIVSQPTFINSVLPISAALPSLDQKKRGGHKACCLLTPPPPPLFPPPFFRGGRSPLLSPDMKNLMLELETSQSPCMQGSLGSPGPPGPQGPPGLPGKTGPKGEKGELGRPGRKGRPGPPGVPGMPGPIGWPGPEGPRGEKGDLGMMGLPGSRGPMGSKGYPGSRGEKGSRGEKGDLGPKGEKGFPGFPGMLGQKGEMGPKGEPGIAGHRGPTGRPGKRGKQGQKGDSGVMGPPGKPGPSGQPGRPGPPGPPPAGQLIMGPKGERGFPGPPGRCLCGPTMNVNNPSYGESVYGPSSPRVPVIFVVNNQEELERLNTQNAIAFRRDQRSLYFKDSLGWLPIQLTPFYPVDYTADQHGTCGDGLLQPGEECDDGNSDVGDDCIRDCHRAYCGDGHRHEGVEDCDGSDFGYLTCETYLPGSYGDLQCTQYCYIDSTPCRYFT

SEQ ID NO: 3388 - protein, 724 aa, Homo Sapiens
MLRELQETNAALQDVRELLRQQVREITFLKNTVMECDACGMQQSVRTGLPSVRPLLHCAPGFCFPGVACIQTESGARCGPCPAGFTGNGSHCTDVNECNAHPCFPRVRCINTSPGFRCEACPPGYSGPTHQGVGLAFAKANKQVCTDINECETGQHNCVPNSVCINTRGSFQCGPCQPGFVGDQASGCQRRAQRFCPDGSPSECHEHADCVLERDGSRSCVCAVGWAGNGILCGRDTDLDGFPDEKLRCPERQCRKDNCVTVPNSGQEDVDRDGIGDACDPDADGDGVPNEKDNCPLVRNPDQRNTDEDKWGDACDNCRSQKNDDQKDTDQDGRGDACDDDIDGDRIRNQADNCPRVPNSDQKDSDGDGIGDACDNCPQKSNPDQADVDHDFVGDACDSDQDQDGDGHQDSRDNCPTVPNSAQEDSDHDGQGDACDDDDDNDGVPDSRDNCRLVPNPGQEDADRDGVGDVCQDDFDADKVVDKIDVCPENAEVTLTDFRAFQTVVLDPEGDAQIDPNWVVLNQGREIVQTMNSDPGLAVGYTAFNGVDFEGTFHVNTVTDDDYAGFIFGYQDSSSFYVVMWKQMEQTYWQANPFRAVAEPGIQLKAVKSSTGPGEQLRNALWHTGDTESQVRLLWKDPRNVGWKDKKSYRWFLQHRPQVGYIRVRFYEGPELVADSNVVLDTTMRGGRLGVFCFSQENIIWANLRYRCNDTIPEDYETHQLRQA

SEQ ID NO: 3389 - protein, 704 aa, Homo Sapiens
MVPDTACVLLLTLAALGASGQGQSPLGSDLGPQMLRELQETNAALQDVRELLRQQVREITFLKNTVMECDACGMQQSVRTGLPSVRPLLHCAPGFCFPGVACIQTESGARCGPCPAGFTGNGSHCTDVNECETGQHNCVPNSVCINTRGSFQCGPCQPGFVGDQASGCQRRAQRFCPDGSPSECHEHADCVLERDGSRSCVCAVGWAGNGILCGRDTDLDGFPDEKLRCPERQCRKDNCVTVPNSGQEDVDRDGIGDACDPDADGDGVPNEKDNCPLVRNPDQRNTDEDKWGDACDNCRSQKNDDQKDTDQDGRGDACDDDIDGDRIRNQADNCPRVPNSDQKDSDGDGIGDACDNCPQKSNPDQADVDHDFVGDACDSDQDQDGDGHQDSRDNCPTVPNSAQEDSDHDGQGDACDDDDDNDGVPDSRDNCRLVPNPGQEDADRDGVGDVCQDDFDADKVVDKIDVCPENAEVTLTDFRAFQTVVLDPEGDAQIDPNWVVLNQGREIVQTMNSDPGLAVGYTAFNGVDFEGTFHVNTVTDDDYAGFIFGYQDSSSFYVVMWKQMEQTYWQANPFRAVAEPGIQLKAVKSSTGPGEQLRNALWHTGDTESQVRLLWKDPRNVGWKDKKSYRWFLQHRPQVGYIRVRFYEGPELVADSNVVLDTTMRGGRLGVFCFSQENIIWANLRYRCNDTIPEDYETHQLRQA

SEQ ID NO: 3390 - protein, 757 aa, Homo Sapiens
MVPDTACVLLLTLAALGASGQGQSPLGSDLGPQMLRELQETNAALQDVRELLRQQVREITFLKNTVMECDACGMQQSVRTGLPSVRPLLHCAPGFCFPGVACIQTESGARCGPCPAGFTGNGSHCTDVNECNAHPCFPRVRCINTSPGFRCEACPPGYSGPTHQGVGLAFAKANKQVCTDINECETGQHNCVPNSVCINTRGSFQCGPCQPGFVGDQASGCQRRAQRFCPDGSPSECHEHADCVLERDGSRSCVCAVGWAGNGILCGRDTDLDGFPDEKLRCPERQCRKDNCVTVPNSGQEDVDRDGIGDACDPDADGDGVPNEKDNCPLVRNPDQRNTDEDKWGDACDNCRSQKNDDQKDTDQDGRGDACDDDIDGDRIRNQADNCPRVPNSDQKDSDGDGIGDACDNCPQKSNPDQADVDHDFVGDACDSDQDQDGDGHQDSRDNCPTVPNSAQEDSDHDGQGDACDDDDDNDGVPDSRDNCRLVPNPGQEDADRDGVGDVCQDDFDADKVVDKIDVCPENAEVTLTDFRAFQTVVLDPEGDAQIDPNWVVLNQGREIVQTMNSDPGLAVGYTAFNGVDFEGTFHVNTVTDDDYAGFIFGYQDSSSFYVVMWKQMEQTYWQANPFRAVAEPGIQLKAVKSSTGPGEQLRNALWHTGDTESQVRLLWKDPRNVGWKDKKSYRWFLQHRPQVGYIRVRFYEGPELVADSNVVLDTTMRGGRLGVFCFSQENIIWANLRYRCNDTIPEDYETHQLRQA

SEQ ID NO: 3391 - protein, 123 aa, Homo Sapiens
LGWYTTGGPPDPSDIHVHKQVCEIIESPLFLKLNPMTKHTDLPVSVFESVIDIINGEATMLFAELTYTLATEEAERIGVDHVARMTATGSGENSTVAEHLIAQHSAIKMLHSRVKLILERGPL

SEQ ID NO: 3392 - protein, 326 aa, Homo Sapiens
MAAAAAAAAATNGTGGSSGMEVDAAVPSVMACGVTGSVSVALHPLVILNISDHWIRMRSQEGRPVQVIGALIGKQEGRNIEVMNSFELLSHTVEEKIIIDKEYYYTKEEQFKQVFKELEFLGWYTTGGPPDPSDIHVHKQVCEIIESPLFLKLNPMTKHTDLPVSVFESVIDIINGEATMLFAELTYTLATEEAERIGVDHVARMTATGSGENSTVAEHLIAQHSAIKMLHSRVKLILEYVKASEAGEVPFNHEILREAYALCHCLPVLSTDKFKTDFYDQCNDVGLMAYLGTITKTCNTMNQFVNKFNVLYDRQGIGRRMRGLFF

SEQ ID NO: 3393 - protein, 327 aa, Homo Sapiens
MAAAAAAAAATNGTGGSSGMEVDAAVVPSVMACGVTGSVSVALHPLVILNISDHWIRMRSQEGRPVQVIGALIGKQEGRNIEVMNSFELLSHTVEEKIIIDKEYYYTKEEQFKQVFKELEFLGWYTTGGPPDPSDIHVHKQVCEIIESPLFLKLNPMTKHTDLPVSVFESVIDIINGEATMLFAELTYTLATEEAERIGVDHVARMTATGSGENSTVAEHLIAQHSAIKMLHSRVKLILEYVKASEAGEVPFNHEILREAYALCHCLPVLSTDKFKTDFYDQCNDVGLMAYLGTITKTCNTMNQFVNKFNVLYDRQGIGRRMRGLFF

SEQ ID NO: 3394 - protein, 42 aa, Homo Sapiens
MACGVTGSVSVALHPLVILNISDHWIRMRSQEGRPVQVIGAL

SEQ ID NO: 3395 - protein, 468 aa, Homo Sapiens
MAARLVSRCGAVRAAPHSGPLVSWRRWSGASTDTVYDVVVSGGGLVGAAMACALGYDIHFHDKKILLLEAGPKKVLEKLSETYSNRVSSISPGSATLLSSFGAWDHICNMRYRAFRRMQVWDACSEALIMFDKDNLDDMGYIVENDVIMHALTKQLEAVSDRVTVLYRSKAIRYTWPCPFPMADSSPWVHITLGDGSTFQTKLLIGADGHNSGVRQAVGIQNVSWNYDQSAVVATLHLSEATENNVAWQRFLPSGPIALLPLSDTLSSLVWSTSHEHAAELVSMDEEKFVDAVNSAFWSDADHTDFIDTAGAMLQYAVSLLKPTKVSARQLPPSVARVDAKSRVLFPLGLGHAAEYVRPRVALIGDAAHRVHPLAGQGVNMGFGDISSLAHHLSTAAFNGKDLGSVSHLTGYETERQRHNTALLAATDLLKRLYSTSASPLVLLRTWGLQATNAVSPLKEQIMAFASK

SEQ ID NO: 3396 - protein, 200 aa, Homo Sapiens
MAARLVSRCGAVRAAPHSGPLVSWRRWSGASTDTVYDVVVSGGGLVGAAMACALGYDIHFHDKKILLLEAGPKKVLEKLSETYSNRVSSISPGSATLLSSFGAWDHICNMRYRAFRRMQVWDACSEALIMFDKDNLDDMGYIVENDVIMHALTKQLEAVSGTDYGLCKQMSTPLLKKDYVDEKEHPAQDPSYIFSRSYLI

SEQ ID NO: 3397 - protein, 111 aa, Homo Sapiens
MAARLVSRCGAVRAAPHSGPLVSWRRWSGASTDTVYDVVVSGGGLVGAAMACALGYDIHFHDKKILLLEAGPKKVLEKLSETYSNRVSSISPGSATLLSSVGRLLRGPDNV

SEQ ID NO: 3398 - protein, 54 aa, Homo Sapiens
MIFTFMTRKSCCSKQVQRKYWRNCQKLTATGSAPFPLALQRFSVVLVPGTISAT

SEQ ID NO: 3399 - protein, 262 aa, Homo Sapiens
MIFTFMTRKSCCSKQVQRKYWRNCQKLTATGSAPFPLALQRFSVVWDACSEALIMFDKDNLDDMGYIVENDVIMHALTKQLEAVSDRVTVLYRSKAIRYTWPCPFPMADSSPWVHITLGDGSTFQTKLLIGADGHNSGVRQAVGIQNVSWNYDQSAVVATLHLSEATENNVAWQRFLPSGPIALLPLSDTLSSLVWSTSHEHAAELVSMDEEKFVDAVNSAFWSDADHTDFIDTAGAMLQYAVSLLKPTKVSARQLPPSVAR

SEQ ID NO: 3400 - protein, 393 aa, Homo Sapiens
MIFTFMTRKSCCSKQVQRKYWRNCQKLTATGSAPFPLALQRFSVVWDACSEALIMFDKDNLDDMGYIVENDVIMHALTKQLEAVSDRVTVLYRSKAIRYTWPCPFPMADSSPWVHITLGDGSTFQTKLLIGADGHNSGVRQAVGIQNVSWNYDQSAVVATLHLSEATENNVAWQRFLPSGPIALLPLSDTLSSLVWSTSHEHAAELVSMDEEKFVDAVNSAFWSDADHTDFIDTAGAMLQYAVSLLKPTKVSARQLPPSVARVDAKSRVLFPLGLGHAAEYVRPRVALIGDAAHRVHPLAGQGVNMGFGDISSLAHHLSTAAFNGKDLGSVSHLTGYETERQRHNTALLAATDLLKRLYSTSASPLVLLRTWGLQATNAVSPLKEQIMAFASK

SEQ ID NO: 3401 - protein, 443 aa, Homo Sapiens
MRGQGPPLSSFGVWLASRAASDPSRPRRQGYDIHFHDKKILLLEAGPKKVLEKLSETYSNRVSSISPGSATLLSSFGAWDHICNMRYRAFRRMQVWDACSEALIMFDKDNLDDMGYIVENDVIMHALTKQLEAVSDRVTVLYRSKAIRYTWPCPFPMADSSPWVHITLGDGSTFQTKLLIGADGHNSGVRQAVGIQNVSWNYDQSAVVATLHLSEATENNVAWQRFLPSGPIALLPLSDTLSSLVWSTSHEHAAELVSMDEEKFVDAVNSAFWSDADHTDFIDTAGAMLQYAVSLLKPTKVSARQLPPSVARVDAKSRVLFPLGLGHAAEYVRPRVALIGDAAHRVHPLAGQGVNMGFGDISSLAHHLSTAAFNGKDLGSVSHLTGYETERQRHNTALLAATDLLKRLYSTSASPLVLLRTWGLQATNAVSPLKEQIMAFASK

SEQ ID NO: 3402 - protein, 86 aa, Homo Sapiens
MRGQGPPLSSFGVWLASRAASDPSRPRRQGYDIHFHDKKILLLEAGPKKVLEKLSETYSNRVSSISPGSATLLSSVGRLLRGPDNV

SEQ ID NO: 3403 - protein, 105 aa, Homo Sapiens
MPLSPGLLLLLLSGATATAALPLEGGPTGRDSEHMQEAAGIRKSSLLTFLAWWFEWTSQASAGPLIGEEAREVARRQEGAPPQQSARRDRMPCRNFFWKTFSSCK

SEQ ID NO: 3404 - protein, 225 aa, Homo Sapiens
GAGTEDSACIPWAYYSTVDQVKDLYSGLIGPLIVCRRPYLKVFNPRRKLEFALLFLVFDENESWYLDDNIKTYSDHPEKVNKDDEEFIESNKMHAINGRMFGNLQGLTMHVGDEVNWYLMGMGNEIDLHTVHFHGHSFQYKHRGVYSSDVFDIFPGTYQTLEMFPRTPGIWLLHCHVTDHIHAGMETTYTVLQNEASSETHRRIWNVIYPITVSVIILFQISTKE

SEQ ID NO: 3405 - protein, 1065 aa, Homo Sapiens
MKILILGIFLFLCSTPAWAKEKHYYIGIIETTWDYASDHGEKKLISVDTEHSNIYLQNGPDRIGRLYKKALYLQYTDETFRTTIEKPVWLGFLGPIIKAETGDKVYVHLKNLASRPYTFHSHGITYYKEHEGAIYPDNTTDFQRADDKVYPGEQYTYMLLATEEQSPGEGDGNCVTRIYHSHIDAPKDIASGLIGPLIICKKDSLDKEKEKHIDREFVVMFSVVDENFSWYLEDNIKTYCSEPEKVDKDNEDFQESNRMYSVNGYTFGSLPGLSMCAEDRVKWYLFGMGNEVDVHAAFFHGQALTNKNYRIDTINLFPATLFDAYMVAQNPGEWMLSCQNLNHLKAGLQAFFQVQECNKSSSKDNIRGKHVRHYYIAAEEIIWNYAPSGIDIFTKENLTAPGSDSAVFFEQGTTRIGGSYKKLVYREYTDASFTNRKERGPEEEHLGILGPVIWAEVGDTIRVTFHNKGAYPLSIEPIGVRFNKNNEGTYYSPNYNPQSRSVPPSASHVAPTETFTYEWTVPKEVGPTNADPVCLAKMYYSAVEPTKDIFTGLIGPMKICKKGSLHANGRQKDVDKEFYLFPTVFDENESLLLEDNIRMFTTAPDQVDKEDEDFQESNKMHSMNGFMYGNQPGLTMCKGDSVVWYLFSAGNEADVHGIYFSGNTYLWRGERRDTANLFPQTSLTLHMWPDTEGTFNVECLTTDHYTGGMKQKYTVNQCRRQSEDSTFYLGERTYYIAAVEVEWDYSPQREWEKELHHLQEQNVSNAFLDKGEFYIGSKYKKVVYRQYTDSTFRVPVERKAEEEHLGILGPQLHADVGDKVKIIFKNMATRPYSIHAHGVQTESSTVTPTLPGETLTYVWKIPERSGAGTEDSACIPWAYYSTVDQVKDLYSGLIGPLIVCRRPYLKVFNPRRKLEFALLFLVFDENESWYLDDNIKTYSDHPEKVNKDDEEFIESNKMHAINGRMFGNLQGLTMHVGDEVNWYLMGMGNEIDLHTVHFHGHSFQYKHRGVYSSDVFDIFPGTYQTLEMFPRTPGIWLLHCHVTDHIHAGMETTYTVLQNEDTKSG

SEQ ID NO: 3406 - protein, 946 aa, Homo Sapiens
MKILILGIFLFLCSTPAWAKEKHYYIGIIETTWDYASDHGEKKLISVDTEHSNIYLQNGPDRIGRLYKKALYLQYTDETFRTTIEKPVWLGFLGPIIKAETGDKVYVHLKNLASRPYTFHSHGITYYKEHEGAIYPDNTTDFQRADDKVYPGEQYTYMLLATEEQSPGEGDGNCVTRIYHSHIDAPKDIASGLIGPLIICKKDSLDKEKEKHIDREFVVMFSVVDENFSWYLEDNIKTYCSEPEKVDKDNEDFQESNRMYSVNGYTFGSLPGLSMCAEDRVKWYLFGMGNEVDVHAAFFHGQALTNKNYRIDTINLFPATLFDAYMVAQNPGEWMLSCQNLNHLKAGLQAFFQVQECNKSSSKDNIRGKHVRHYYIAAEEIIWNYAPSGIDIFTKENLTAPGSDSAVFFEQGTTRIGGSYKKLVYREYTDASFTNRKERGPEEEHLGILGPVIWAEVGDTIRVTFHNKGAYPLSIEPIGVRFNKNNEGTYYSPNYNPQSRSVPPSASHVAPTETFTYEWTVPKEVGPTNADPVCLAKMYYSAVEPTKDIFTGLIGPMKICKKGSLHANGRQKDVDKEFYLFPTVFDENESLLLEDNIRMFTTAPDQVDKEDEDFQESNKMHWTFNVECLTTDHYTGGMKQKYTVNQCRRQSEDSTFYLGERTYYIAAVEVEWDYSPQREWEKELHHLQEQNVSNAFLDKGEFYIGSKYKKVVYRQYTDSTFRVPVERKAEEEHLGILGPQLHADVGDKVKIIFKNMATRPYSIHAHGVQTESSTVTPTLPGETLTYVWKIPERSGAGTEDSACIPWAYYSTVDQVKDLYSGLIGPLIVCRRPYLKVFNPRRKLEFALLFLVFDENESWYLDDNIKTYSDHPEKVNKDDEEFIESNKMHAINGRMFGNLQGLTMHVGDEVNWYLMGMGNEIDLHTVHFHGHSFQYKHLLRLTGEYGM

SEQ ID NO: 3407 - protein, 179 aa, Homo Sapiens [sequence omitted]

SEQ ID NO: 3408 - protein, 852 aa, Homo Sapiens
VVMFSVVDENFSWYLEDNIKTYCSEPEKVDKDNEDFQESNRMYSVNGYTFGSLPGLSMCAEDRVKWYLFGMGNEVDVHAAFFHGQALTNKNYRIDTINLFPATLFDAYMVAQNPGEWMLSCQNLNHLKAGLQAFFQVQECNKSSSKDNIRGKHVRHYYIAAEEIIWNYAPSGIDIFTKENLTAPGSDSAVFFEQGTTRIGGSYKKLVYREYTDASFTNRKERGPEEEHLGILGPVIWAEVGDTIRVTFHNKGAYPLSIEPIGVRFNKNNEGTYYSPNYNPQSRSVPPSASHVAPTETFTYEWTVPKEVGPTNADPVCLAKMYYSAVEPTKDIFTGLIGPMKICKKGSLHANGRQKDVDKEFYLFPTVFDENESLLLEDNIRMFTTAPDQVDKEDEDFQESNKMHSMNGFMYGNQPGLTMCKGDSVVWYLFSAGNEADVHGIYFSGNTYLWRGERRDTANLFPQTSLTLHMWPDTEGTFNVECLTTDHYTGGMKQKYTVNQCRRQSEDSTFYLGERTYYIAAVEVEWDYSPQREWEKELHHLQEQNVSNAFLDKGEFYIGSKYKKVVYRQYTDSTFRVPVERKAEEEHLGILGPQLHADVGDKVKIIFKNMATRPYSIHAHGVQTESSTVTPTLPGETLTYVWKIPERSGAGTEDSACIPWAYYSTVDQVKDLYSGLIGPLIVCRRPYLKVFNPRRKLEFALLFLVFDENESWYLDDNIKTYSDHPEKVNKDDEEFIESNKMHAINGRMFGNLQGLTMHVGDEVNWYLMGMGNEIDLHTVHFHGHSFQYKHRGVYSSDVFDIFPGTYQTLEMFPRTPGIWLLHCHVTDHIHAGMETTYTVLQNEGEYPDTKSG

SEQ ID NO: 3409 - protein, 103 aa, Homo Sapiens
MIEDVQSLLDEEQEQMFAFRSRARSTDTFNYATYHTLEEIYDFLDLLVAENPHLVSKIQIGNTYEGRPIYVLKFSTGGSKRPAIWIDTGIHSREWVTQASGVW

SEQ ID NO: 3410 - protein, 331 aa, Homo Sapiens
MIEDVQSLLDEEQEQMFAFRSRARSTDTFNYATYHTLEEIYDFLDLLVAENPHLVSKIQIGNTYEGRPIYVLKFSTGGSKRPAIWIDTGIHSREWVTQASGVWFAKKITQDYGQDAAFTAILDTLDIFLEIVTNPDGFAFTHSTNRMWRKTRSHTAGSLCIGVDPNRNWDAGFGLSGASSNPCSETYHGKFANSEVEVKSIVDFVKDHGNIKAFISIHSYSQLLMYPYGYKTEPVPDQDELDQLSKAAVTALASLYGTKFNYGSIIKAIYQASGSTIDWTYSQGIKYSFTFELRDTGRYGFLLPASQIIPTAKETWLALLTIMEHTLNHPY

SEQ ID NO: 3411 - protein, 269 aa, Homo Sapiens
MIEDVQSLLDEEQEQMFAFRSRARSTDTFNYATYHTLEEIYDFLDLLVAENPHLVSKIQIGNTYEGRPIYVLKFSTGGSKRPAIWIDTGIHSREWVTQASGVWFAKKITQDYGQDAAFTAILDTLDIFLEIVTNPDGFAFTHSTNRMWRKTRSHTAGSLCIGVDPNRNWDAGFGLSGASSNPCSETYHGKFANSEVEVKSIVDFVKDHGNIKAFISIHSYSQLLMYPYGYKTEPVPDQDELDQLSKAAVTALASLYGTKFNYGSIIKAI

SEQ ID NO: 3412 - protein, 419 aa, Homo Sapiens
MRGLLVLSVLLGAVFGKEDFVGHQVLRISVADEAQVQKVKELEDLEHLQLDFWRGPAHPGSPIDVRVPFPSIQAVKIFLESHGISYETMIEDVQSLLDEEQEQMFAFRSRARSTDTFNYATYHTLEEIYDFLDLLVAENPHLVSKIQIGNTYEGRPIYVLKFSTGGSKRPAIWIDTGIHSREWVTQASGVWFAKKITQDYGQDAAFTAILDTLDIFLEIVTNPDGFAFTHSTNRMWRKTRSHTAGSLCIGVDPNRNWDAGFGLSGASSNPCSETYHGKFANSEVEVKSIVDFVKDHGNIKAFISIHSYSQLLMYPYGYKTEPVPDQDELDQLSKAAVTALASLYGTKFNYGSIIKAIYQASGSTIDWTYSQGIKYSFTFELRDTGRYGFLLPASQIIPTAKETWLALLTIMEHTLNHPY

SEQ ID NO: 3413 - protein, 191 aa, Homo Sapiens
SLTFPPGSSMRGLLVLSVLLGAVFGKEDFVGHQVLRISVADEAQVQKITQDYGQDAAFTAILDTLDIFLEIVTNPDGFAFTHSTNRMWRKTRSHTAGSLCIGVDPNRNWDAGFGLSGASSNPCSETYHGKFANSEVEVKSIVDFVKDHGNIKAFISIHSYSQLLMYPYGYKTEPVPDQDELDQLSKAAVTA

SEQ ID NO: 3414 - protein, 419 aa, Homo Sapiens
MAMRLILFFGALFGHIYCLETFVGDQVLEIVPSNEEQIKNLLQLEAQEHLQLDFWKSPTTPGETAHVRVPFVNVQAVKVFLESQGIAYSIMIEDVQVLLDKENEEMLFNRRRERSGNFNFGAYHTLEEISQEMDNLVAEHPGLVSKVNIGSSFENRPMNVLKFSTGGDKPAIWLDAGIHAREWVTQATALWTANKIVSDYGKDPSITSILDALDIFLLPVTNPDGYVFSQTKNRMWRKTRSKVSGSLCVGVDPNRNWDAGFGGPGASSNPCSDSYHGPSANSEVEVKSIVDFIKSHGKVKAFITLHSYSQLLMFPYGYKCTKLDDFDELSEVAQKAAQSLRSLHGTKYKVGPICSVIYQASGGSIDWSYDYGIKYSFAFELRDTGRYGFLLPARQILPTAEETWLGLKAIMEHVRDHPY

SEQ ID NO: 3415 - protein, 182 aa, Homo Sapiens
MRLILFFGALFGHIYCLETFVGDQVLEIVPSNEEQIKNLLQLEAQEHLQLDFWKSPTTPGETAHVRVPFVNVQAVKVFLESQGIAYSIMIEDVQVLLDKENEEMLFNRRRERSGNFNFGAYHTLEEISQEMDNLVAEHPGLVSKVNIGSSFENRPMNVLKKSSGRMQKDDGQLNPKPQRQTP

SEQ ID NO: 3416 - protein, 417 aa, Homo Sapiens
MRLILPVGLIATTLAIAPVRFDREKVFRVKPQDEKQADIIKDLAKTNELDFWYPGATHHVAANMMVDFRVSEKESQAIQSALDQNKMHYEILIHDLQEEIEKQFDVKEDIPGRHSYAKYNNWEKIVAWTEKMMDKYPEMVSRIKIGSTVEDNPLYVLKIGEKNERRKAIFTDCGIHAREWVSPAFCQWFVYQATKTYGRNKIMTKLLDRMNFYILPVFNVDGYIWSWTKNRMWRKNRSKNQNSKCIGTDLNRNFNASWNSIPNTNDPCADNYRGSAPESEKETKAVTNFIRSHLNEIKVYITFHSYSQMLLFPYGYTSKLPPNHEDLAKVAKIGTDVLSTRYETRYIYGPIESTIYPISGSSLDWAYDLGIKHTFAFELRDKGKFGFLLPESRIKPTCRETMLAVKFIAKYILKHTS

SEQ ID NO: 3417 - protein, 29 aa, Homo Sapiens
MQHNEGQERSSNNFNYGAYHSLEAIYHEM

SEQ ID NO: 3418 - protein, 317 aa, Homo Sapiens
MQHNEGQERSSNNFNYGAYHSLEAIYHEMDNIAADFPDLARRVKIGHSFENRPMYVLKFSTGKGVRRPAVWLNAGIHSREWISQATAIWTARKIVSDYQRDPAITSILEKMDIFLLPVANPDGYVYTQTQNRLWRKTRSRNPGSSCIGADPNRNWNASFAGKGASDNPCSEVYHGPHANSEVEVKSVVDFIQKHGNFKGFIDLHSYSQLLMYPYGYSVKKAPDAEELDKVARLAAKALASVSGTEYQVGPTCTTVYPASGSSIDWAYDNGIKFAFTFELRDTGTYGFLLPANQIIPTAEETWLGLKTIMEHVRDNLY

SEQ ID NO: 3419 - protein, 421 aa, Homo Sapiens
MRWILFIGALIGSSICGQEKFFGDQVLRINVRNGDEISKLSQLVNSNNLKLNFWKSPSSFNRPVDVLVPSVSLQAFKSFLRSQGLEYAVTIEDLQALLDNEDDEMQHNEGQERSSNNFNYGAYHSLEAIYHEMDNIAADFPDLARRVKIGHSFENRPMYVLKFSTGKGVRRPAVWLNAGIHSREWISQATAIWTARKIVSDYQRDPAITSILEKMDIFLLPVANPDGYVYTQTQNRLWRKTRSRNPGSSCIGADPNRNWNASFAGKGASDNPCSEVYHGPHANSEVEVKSVVDFIQKHGNFKGFIDLHSYSQLLMYPYGYSVKKAPDAEELDKVARLAAKALASVSGTEYQVGPTCTTVYPASGSSIDWAYDNGIKFAFTFELRDTGTYGFLLPANQIIPTAEETWLGLKTIMEHVRDNLY

SEQ ID NO: 3420 - protein, 172 aa, Homo Sapiens [sequence omitted]

SEQ ID NO: 3421 - protein, 177 aa, Homo Sapiens
MRWILFIGALIGSSICGQEKFFGDQVLRINVRNGDEISKLSQLVNSNNLKLNFWKSPSSFNRPVDVLVPSVSLQAFKSFLRSQGLEYAVTIEDLQIYHEMDNIAADFPDLARRVKIGHSFENRPMYVLKFSTGKGVRRPAVWLNAGIHSREWISQATAIWTARKIVSDYQRDPAITS

SEQ ID NO: 3422 - protein, 388 aa, Homo Sapiens
MRWILFIGALIGSSICGQEKFFGDQVLRINVRNGDEISKLSQLVNSNNLKLNFWKSPSSFNRPVDVLVPSVSLQAFKSFLRSQGLEYAVTIEDLQIYHEMDNIAADFPDLARRVKIGHSFENRPMYVLKFSTGKGVRRPAVWLNAGIHSREWISQATAIWTARKIVSDYQRDPAITSILEKMDIFLLPVANPDGYVYTQTQNRLWRKTRSRNPGSSCIGADPNRNWNASFAGKGASDNPCSEVYHGPHANSEVEVKSVVDFIQKHGNFKGFIDLHSYSQLLMYPYGYSVKKAPDAEELDKVARLAAKALASVSGTEYQVGPTCTTVYPASGSSIDWAYDNGIKFAFTFELRDTGTYGFLLPANQIIPTAEETWLGLKTIMEHVRDNLY

SEQ ID NO: 3423 - protein, 92 aa, Homo Sapiens
MKCLGKRRGQAAAFLPLCWLFLKILQPGHSHLYNNRYAGDKVIRFIPKTEEEAYALKKISYQLKGPHRRSSENTGEGKQLAHPEKPKIPLWI

SEQ ID NO: 3424 - protein, 92 aa, Homo Sapiens; identical to SEQ ID NO: 3423

SEQ ID NO: 3425 - protein, 437 aa, Homo Sapiens
MKCLGKRRGQAAAFLPLCWLFLKILQPGHSHLYNNRYAGDKVIRFIPKTEEEAYALKKISYQLKVDLWQPSSISYVSEGTVTDVHIPQNGSRALLAFLQEANIQYKVLIEDLQKTLEKGSSLHTQRNRRSLSGYNYEVYHSLEEIQNWMHHLNKTHSGLIHMFSIGRSYEGRSLFILKLGRRSRLKRAVWIDCGIHAREWIGPAFCQWFVKEALLTYKSDPAMRKMLNHLYFYIMPVFNVDGYHFSWTNDRFWRKTRSRNSRFRCRGVDANRNWKVKWCDEGASMHPCDDTYCGPFPESEPEVKAVANFLRKHRKHIRAYLSFHAYAQMLLYPYSYKYATIPNFRCVESAAYKAVNALQSVYGVRYRYGPASTTLYVSSGSSMDWAYKNGIPYAFAFELRDTGYFGFLLPEMLIKPTCTETMLAVKNITMHLLKKCP

SEQ ID NO: 3426 - protein, 175 aa, Homo Sapiens
LLLDKHMGMKRYEVAGRRVLFYFDEIPSRCLTCVRFRALRECVVGRTSALPVSVYDYYEPAFEATRFYNVSTHSPLARELCAGPACNEVERAPARGPGWFPGESGPAVAPEEGAAIARCGCDHDCGAQGNPVCGSDGVVYASACRLREAACRQAAPLEPAPPSCCALAGREAEWS

SEQ ID NO: 3427 - protein, 550 aa, Homo Sapiens
MAPGALRGGCEQRAPGGGARTAALGPWPWPSPGPAPSPGAAPPRSRKMSGALLWPLLPLLLLLLSARDGVRAAQPQAPGYLIAAPSVFRAGVEEVISVTIFNSPREVTVQAQLVAQGEPVVQSQGAILDKGTIKLKVPTGLRGQALLKVWGRGWQAEEGPLFHNQTSVTVDGRGASVFIQTDKPVYRPQHRVLISIFTVSPNLRPVNEKLEAYILDPRGSRMIEWRHLKPFCCGITNMSFPLSDQPVLGEWFIFVEMQGHAYNKSFEVQKYVLPKFELLIDPPRYIQDLDACETGTVRARYTFGKPVAGALMINMTVNGVGYYSHEVGRPVLRTTKILGSRDFDICVRDMIPADVPEHFRGRVSIWAMVTSVDGSQQVAFDDSTPVQRQLVDIRYSKDTRKQFKPGLAYVGKVELSYPDGSPAEGVTVQIKAELTPKDNIYTSEVVSQRGLVGFEIPSIPTSAQHVWLEVFQELEDYDVSDSFGVSREDGPFWWAGLTAQRRRRSSVFPWPWGITKDSGFAFTVRRGNGTGGDDRPSEPEPPAGRWPLHR

SEQ ID NO: 3428 - protein, 1932 aa, Homo Sapiens
MAPGALRGGCEQRAPGGGARTAALGPWPWPSPGPAPSPGAAPPRSRKMSGALLWPLLPLLLLLLSARDGVRAAQPQAPGYLIAAPSVFRAGVEEVISVTIFNSPREVTVQAQLVAQGEPVVQSQGAILDKGTIKLKVPTGLRGQALLKVWGRGWQAEEGPLFHNQTSVTVDGRGASVFIQTDKPVYRPQHRVLISIFTVSPNLRPVNEKLEAYILDPRGSRMIEWRHLKPFCCGITNMSFPLSDQPVLGEWFIFVEMQGHAYNKSFEVQKYVLPKFELLIDPPRYIQDLDACETGTVRARYTFGKPVAGALMINMTVNGVGYYSHEVGRPVLRTTKILGSRDFDICVRDMIPADVPEHFRGRVSIWAMVTSVDGSQQVAFDDSTPVQRQLVDIRYSKDTRKQFKPGLAYVGKVELSYPDGSPAEGVTVQIKAELTPKDNIYTSEVVSQRGLVGFEIPSIPTSAQHVWLETKVMALNGKPVGAQYLPSYLSLGSWYSPSQCYLQLQPPSHPLQVGEEAYFSVKSTCPCNFTLYYEVAARGNIVLSGQQPAHTTQQRSKRAAPALEKPIRLTHLSETEPPPAPEAEVDVCVTSLHLAVTPSMVPLGRLLVFYVRENGEGVADSLQFAVETFFENQVSVTYSANETQPGEVVDLRIRAARGSCVCVAAVDKSVYLLRSGFRLTPAQVFQELEDYDVSDSFGVSREDGPFWWAGLTAQRRRRSSVFPWPWGITKDSGFAFTETGLVVMTDRVSLNHRQDGGLYTDEAVPAFQPHTGSLVAVAPSRHPPRTEKRKRTFFPETWIWHCLNISDPSGEGTLSVKVPDSITSWVGEAVALSTSQGLGIAEPSLLKTFKPFFVDFMLPALIIRGEQVKIPLSVYNYMGTCAEVYMKLSVPKGIQFVGHPGKRHVTKKMCVAPGEAEPIWVVLSFSDLGLNNITAKALAYGDTNCCRDGRSSKHPEENHADRRVPIGVDHVRRSVMVEAEGVPRAYTYSAFFCPSERVHISTPNKYEFQYVQRPLRLTRFDVAVRAHNDARVALSSGPQDTAGMIEIVLGGHQNTRSWISTSKMGEPVASAHTAKILSWDEFRTFWISWRGGLIQVGHGPEPSNESVIVAWTLPRPPEVQFIGFSTGWGSMGEFRIWRKMEVDESYSEAFTLGVPHGAIPGSERATASIIGDVMGPTLNHLNNLLRLPFGCGEQNMIHFAPNVFVLKYLQKTQQLSPEVERETTDYLVQGYQRQLTYKRQDGSYSAFGERDASGSMWLTAFVLKSFAQARSFIFVDPRELAAAKSWIIQQQQADGSFLAVGRVLNKDIQGGIHGTVPLTAYVVVALLETGTASEEERGSTDKARHFLESAAPLAMDPYSCALTTYALTLLRSPAAPEALRKLRSLAIMRDGVTHWSLSNSWDVDKGTFLSFSDRVSQSVVSAEVEMTAYALLTYTLLGDVAAALPVVKWLSQQRNALGGFSSTQDTCVALQALAEYAILSYAGGINLTVSLASTNLDYQETFELHRTNQKVLQTAAIPSLPTGLFVSAKGDGCCLMQIDVTYNVPDPVAKPAFQLLVSLQEPEAQGRPPPMPASAAEGSRGDWPPADDDDPAADQHHQEYKVMLEVCTRWLHAGSSNMAVLEVPLLSGFRADIESLEQLLLDKHMGMKRYEVAGRRVLFYFDEIPSRCLTCVRFRALRECVVGRTSALPVSVYDYYEPAFEATRFYNVSTHSPLARELCAGPACNEVERAPARGPGWFPGESGPAVAPEEGAAIARCGCDHDCGAQGNPVCGSDGVVYASACRLREAACRQAAPLEPAPPSCCALEQRLPASSSSTYGDDLASVAPGPLQQDVKLNGAGLEVEDSDPEPEGEAEDRVTAGPRPPVSSGNLESSTQSASPFHRWGQTPAPQRHSGRVVGAHRPGLLSPVFVYSPAFQSGGEEGLWMSNTCTLR

SEQ ID NO: 3429 - protein, 503 aa, Homo Sapiens
MSGALLWPLLPLLLLLLSARDGVRAAQPQAPGYLIAAPSVFRAGVEEVISVTIFNSPREVTVQAQLVAQGEPVVQSQGAILDKGTIKLKVPTGLRGQALLKVWGRGWQAEEGPLFHNQTSVTVDGRGASVFIQTDKPVYRPQHRVLISIFTVSPNLRPVNEKLEAYILDPRGSRMIEWRHLKPFCCGITNMSFPLSDQPVLGEWFIFVEMQGHAYNKSFEVQKYVLPKFELLIDPPRYIQDLDACETGTVRARYTFGKPVAGALMINMTVNGVGYYSHEVGRPVLRTTKILGSRDFDICVRDMIPADVPEHFRGRVSIWAMVTSVDGSQQVAFDDSTPVQRQLVDIRYSKDTRKQFKPGLAYVGKVELSYPDGSPAEGVTVQIKAELTPKDNIYTSEVVSQRGLVGFEIPSIPTSAQHVWLEVFQELEDYDVSDSFGVSREDGPFWWAGLTAQRRRRSSVFPWPWGITKDSGFAFTVRRGNGTGGDDRPSEPEPPAGRWPLHR

SEQ ID NO: 3430 - protein, 56 aa, Homo Sapiens
RTQTLSLKGRRRTERLLFLTAALLRAGRHHLAASCPYQPVTLYGGWADLSPGDTCL

SEQ ID NO: 3431 - protein, 338 aa, Homo Sapiens
  misc_feature (1)..(1): Xaa can be any naturally occurring amino acid
XVSAKGDGCCLMQIDVTYNVPDPVAKPAFQLLVSLQEPEAQGRPPPMPASAAEGSRGDWPPADDDDPAADQHHQEYKVMLEVCTRWLHAGSSNMAVLEVPLLSGFRADIESLEQLLLDKHMGMKRYEVAGRRVLFYFDEIPSRCLTCVRFRALRECVVGRTSALPVSVYDYYEPAFEATRFYNVSTHSPLARELCAGPACNEVERAPARGPGWFPGESGPAVAPEEGAAIARCGCDHDCGAQGNPVCGSDGVVYASACRLREAACRQAAPLEPAPPSCCALEQRLPASSSSTYGDDLASVAPGPLQQDVKLNGAGLEVEDSDPEPEGEAEDSQSGFSS

SEQ ID NO: 3432 - protein, 59 aa, Homo Sapiens
MLALLVLVTVALASAHHGGEHFEGEKVFRVNVEDENHINIIRELASTTQIDFWKPDSVT

SEQ ID NO: 3433 - protein, 99 aa, Homo Sapiens
MLALLVLVTVALASAHHGGEHFEGEKVFRVNVEDENHINIIRELASTTQIDFWKPDSVTQIKPHSTVDFRVKAEDTVTVENVLKQNELQYKVLISNLRN

SEQ ID NO: 3434 - protein, 417 aa, Homo Sapiens
MLALLVLVTVALASAHHGGEHFEGEKVFRVNVEDENHINIIRELASTTQIDFWKPDSVTQIKPHSTVDFRVKAEDTVTVENVLKQNELQYKVLISNLRNVVEAQFDSRVRATGHSYEKYNKWETIEAWTQQVATENPALISRSVIGTTFEGRAIYLLKVGKAGQNKPAIFMDCGFHAREWISPAFCQWFVREAVRTYGREIQVTELLDKLDFYVLPVLNIDGYIYTWTKSRFWRKTRSTHTGSSCIGTDPNRNFDAGWCEIGASRNPCDETYCGPAAESEKETKALADFIRNKLSSIKAYLTIHSYSQMMIYPYSYAYKLGENNAELNALAKATVKELASLHGTKYTYGPGATTIYPAAGGSDDWAYDQGIRYSFTFELRDTGRYGFLLPESQIRATCEETFLAIKYVASYVLEHLY

SEQ ID NO: 3435 - protein, 417 aa, Homo Sapiens; identical to SEQ ID NO: 3434

SEQ ID NO: 3436 - protein, 203 aa, Homo Sapiens
MLALLVLVTVALASAHHGGEHFEGEKVFRVNVEDENHINIIRELASTTQIDFWKPDSVTQIKPHSTVDFRVKAEDTVTVENVLKQNELQYKVLISNLRNVVEAQFDSRVRATGHSYEKYNKWETVGKAGQNKPAIFMDCGFHAREWISPAFCQWFVREAVRTYGREIQVTELLDKLDFYVLPVLNIDGYIYTWTKSRFWRKTR

SEQ ID NO: 3437 - protein, 423 aa, Homo Sapiens
MKLCSLAVLVPIVLFCEQHVFAFQSGQVLAALPRTSRQVQVLQNLTTTYEIVLWQPVTADLIVKKKQVHFFVNASDVDNVKAHLNVSGIPCSVLLADVEDLIQQQISNDTVSPRASASYYEQYHSLNEIYSWIEFITERHPDMLTKIHIGSSFEKYPLYVLKVSGKEQAAKNAIWIDCGIHAREWISPAFCLWFIGHITQFYGIIGQYTNLLRLVDFYVMPVVNVDGYDYSWKKNRMWRKNRSFYANNHCIGTDLNRNFASKHWCEEGASSSSCSETYCGLYPESEPEVKAVASFLRRNINQIKAYISMHSYSQHIVFPYSYTRSKSKDHEELSLVASEAVRAIEKISKNTRYTHGHGSETLYLAPGGGDDWIYDLGIKYSFTIELRDTGTYGFLLPERYIKPTCREAFAAVSKIAWHVIRNV

SEQ ID NO: 3438 - protein, 423 aa, Homo Sapiens; identical to SEQ ID NO: 3437

SEQ ID NO: 3439 - protein, 386 aa, Homo Sapiens
MKLCSLAVLVPIVLFCEQHVFAFQSGQVLAALPRTSRQVQVLQNLTTTYEIVLWQPVTADLIVKKKQVHFFVNASDVDNVKAHLNVSGIPCSVLLADVEDLIQQQISNDTVSPRASASYYEQYHSLNEIYSWIEFITERHPDMLTKIHIGSSFEKYPLYVLKVSGKEQAAKNAIWIDCGIHAREWISPAFCLWFIGHNRMWRKNRSFYANNHCIGTDLNRNFASKHWCEEGASSSSCSETYCGLYPESEPEVKAVASFLRRNINQIKAYISMHSYSQHIVFPYSYTRSKSKDHEELSLVASEAVRAIEKISKNTRYTHGHGSETLYLAPGGGDDWIYDLGIKYSFTIELRDTGTYGFLLPERYIKPTCREAFAAVSKIAWHVIRNV

SEQ ID NO: 3440 - protein, 476 aa, Homo Sapiens
MAGRGGSALLALCGALAACGWLLGAEAQEPGAPAAGMRRRRRLQQEDGISFEYHRYPELREALVSVWLQCTAISRIYTVGRSFEGRELLVIELSDNPGVHEPGEPEFKYIGNMHGNEAVGRELLIFLAQYLCNEYQKGNETIVNLIHSTRIHIMPSLNPDGFEKAASQPGELKDWFVGRSNAQGIDLNRNFPDLDRIVYVNEKEGGPNNHLLKNMKKIVDQNTKLAPETKAVIHWIMDIPFVLSANLHGGDLVANYPYDETRSGSAHEYSSSPDDAIFQSLARAYSSFNPAMSDPNRPPCRKNDDDSSFVDGTTNGGAWYSVPGGMQDFNYLSSNCFEITVELSCEKFPPEETLKTYWEDNKNSLISYLEQIHRGVKGFVRDLQGNPIANATISVEGIDHDVTSAKDGDYWRLLIPGNYKLTASAPGYLAITKKVAVPYSPAAGVDFELESFSERKEEEKEELMEWWKMMSETLNF

SEQ ID NO: 3441 - protein, 139 aa, Homo Sapiens
MHGNEAVGRELLIFLAQYLCNEYQKGNETIVNLIHSTRIHIMPSLNPDGFEKAASQPGELKDWFVGRSNAQGIDLNRNFPDLDRIVYVNEKEGGPNNHLLKNMKKIVDQNTKLAPETKAVIHWIMDIPFVLSANLHGGD

SEQ ID NO: 3442 - protein, 147 aa, Homo Sapiens
MHGNEAVGRELLIFLAQYLCNEYQKGNETIVNLIHSTRIHIMPSLNPDGFEKAASQPGELKDWFVGRSNAQGIDLNRNFPDLDRIVYVNEKEGGPNNHLLKNMKKIVDQNTKLAPETKAVIHWIMDIPFVLSANLHGGDLVANYPYD

SEQ ID NO: 3443 - protein, 157 aa, Homo Sapiens
MHGNEAVGRELLIFLAQYLCNEYQKGNETIVNLIHSTRIHIMPSLNPDGFEKAASQPGELKDWFVGRSNAQGIDLNRNFPDLDRIVYVNEKEGGPNNHLLKNMKKIVDQNTKLAPETKAVIHWIMDIPFVLSANLHGGDLVANYPYDETRSGSAHEY

SEQ ID NO: 3444 - protein, 108 aa, Homo Sapiens
  misc_feature (1)..(1): Xaa can be any naturally occurring amino acid
XLGAEAQEPGAPAAGMRRRRRLQQEDGISFEYHRYPELREALVSVWLQCTAISRIYTVGRSFEGRELLVIELSDNPGVHEPDCKLYEVGTLIPAPSSCLAHSGLEYTL

SEQ ID NO: 3445 - protein, 64 aa, Homo Sapiens
MDFPCLWLGLLLPLVAALDFNYHRQEGMEAFLKTVAQNYSSVTHLHSIGKSVKDCWAGAAAPSD

SEQ ID NO: 3446 - protein, 64 aa, Homo Sapiens; identical to SEQ ID NO: 3445

SEQ ID NO: 3447 - protein, 72 aa, Homo Sapiens
MDFPCLWLGLLLPLVAALDFNYHRQEGMEAFLKTVAQNYSSVTHLHSIGKSVKETCGFLLWGGFQRNTELGF

SEQ ID NO: 3448 - protein, 136 aa, Homo Sapiens
MDFPCLWLGLLLPLVAALDFNYHRQEGMEAFLKTVAQNYSSVTHLHSIGKSVKGRNLWVLVVGRFPKEHRIGIPEFKYVANMHGDETVGRELLLHLIDYLVTSDGKDPEITNLINSTRIHIMPSMNPDGFEAVKKP

SEQ ID NO: 3449 - protein, 249 aa, Homo Sapiens
MDFPCLWLGLLLPLVAALDFNYHRQEGMEAFLKTVAQNYSSVTHLHSIGKSVKGRNLWVLVVGRFPKEHRIGIPEFKYVANMHGDETVGRELLLHLIDYLVTSDGKDPEITNLINSTRIHIMPSMNPDGFEAVKKPDCYYSIGRENYNQYDLNRNFPDAFEYNNVSRQPETVAVMKWLKTETFVLSANLHGGALVASYPFDNGVQATGALYSRSLTPDDDVFQYLAHTYASRNPNMKKGDECKNKMNFP

SEQ ID NO: 3450 - protein, 443 aa, Homo Sapiens
MDFPCLWLGLLLPLVAALDFNYHRQEGMEAFLKTVAQNYSSVTHLHSIGKSVKGRNLWVLVVGRFPKEHRIGIPEFKYVANMHGDETVGRELLLHLIDYLVTSDGKDPEITNLINSTRIHIMPSMNPDGFEAVKKPDCYYSIGRENYNQYDLNRNFPDAFEYNNVSRQPETVAVMKWLKTETFVLSANLHGGALVASYPFDNGVQATGALYSRSLTPDDDVFQYLAHTYASRNPNMKKGDECKNKMNFPNGVTNGYSWYPLQGGMQDYNYIWAQCFEITLELSCCKYPREEKLPSFWNNNKASLIEYIKQVHLGVKGQVFDQNGNPLPNVIVEVQDRKHICPYRTNKYGEYYLLLLPGSYIINVTVPGHDPHITKVIIPEKSQNFSALKKDILLPFQGQLDSIPVSNPSCPMIPLYRNLPDHSAATKPSLFLFLVSLLHIFFK

SEQ ID NO: 3451 - protein, 443 aa, Homo Sapiens; identical to SEQ ID NO: 3450

SEQ ID NO: 3452 - protein, 443 aa, Homo Sapiens; identical to SEQ ID NO: 3450

SEQ ID NO: 3453 - protein, 35 aa, Homo Sapiens
SCPMIPLYRNLPDHSAATKPSLFLFLVSLLHIFFK

SEQ ID NO: 3454 - protein, 198 aa, Homo Sapiens
  misc_feature (1)..(1): Xaa can be any naturally occurring amino acid
XPFDNGVQATGALYSRSLTPDDDVFQYLAHTYASRNPNMKKGDECKNKMNFPNGVTNGYSWYPLQGGMQDYNYIWAQCFEITLELSCCKYPREEKLPSFWNNNKASLIEYIKQVHLGVKGQVFDQNGNPLPNVIVEVQDRKHICPYRTNKYGEYYLLLLPGSYIINVTVPGHDPHITKLRSFACNRGQDEFCLTSLMS

SEQ ID NO: 3455 - protein, 204 aa, Homo Sapiens
MHSFNFVLSANLHGGAVVANYPYDKSFEHRVRGVRRTASTPTPDDKLFQKLAKVYSYAHGWMFQGWNCGDYFPDGITNGASWYSLSKGMQDFNYLHTNCFEITLELSCDKFPPEEELQREWLGNREALIQFLEQVHQGIKGMVLDENYNNLANAVISVSGINHDVTSGDHGDYFRLLLPGIYTVSATAPGYDPETVTVTVGPAE

SEQ ID NO: 3456 - protein, 458 aa, Homo Sapiens
MSDLLSVFLHLLLLFKLVAPVTFRHHRYDDLVRTLYKVQNECPGITRVYSIGRSVEGRHLYVLEFSDHPGIHEPLEPEVKYVGNMHGNEALGRELMLQLSEFLCEEFRNRNQRIVQLIQDTRIHILPSMNPDGYEVAAAQGPNKPGYLVGRNNANGVDLNRNFPDLNTYIYYNEKYGGPNHHLPLPDNWKSQVEPETRAVIRWMHSFNFVLSANLHGGAVVANYPYDKSFEHRVRGVRRTASTPTPDDKLFQKLAKVYSYAHGWMFQGWNCGDYFPDGITNGASWYSLSKGMQDFNYLHTNCFEITLELSCDKFPPEEELQREWLGNREALIQFLEQVHQGIKGMVLDENYNNLANAVISVSGINHDVTSGDHGDYFRLLLPGIYTVSATAPGYDPETVTVTVGPAEPTLVNFHLKRSIPQVSPVRRAPSRRHGVRAKVQPQARKKEMEMRQLQRGPA

SEQ ID NO: 3457 - protein, 545 aa, Homo Sapiens
MLPGAWLLWTSLLLLARPAQPCPMGCDCFVQEVFCSDEELATVPLDIPPYTKNIIFVETSFTTLETRAFGSNPNLTKVVFLNTQLCQFRPDAFGGLPRLEDLEVTGSSFLNLSTNIFSNLTSLGKLTLNFNMLEALPEGLFQHLAALESLHLQGNQLQALPRRLFQPLTHLKTLNLAQNLLAQLPEELFHPLTSLQTLKLSNNALSGLPQGVFGKLGSLQELFLDSNNISELPPQVFSQLFCLERLWLQRNAITHLPLSIFASLGNLTFLSLQWNMLRVLPAGLFAHTPCLVGLSLTHNQLETVAEGTFAHLSNLRSLMLSYNAITHLPAGIFRDLEELVKLYLGSNNLTALHPALFQNLSKLELLSLSKNQLTTLPEGIFDTNYNLFNLALHGNPWQCDCHLAYLFNWLQQYTDRLLNIQTYCAGPAYLKGQVVPALNEKQLVCPVTRDHLGFQVTWPDESKAGGSWDLAVQERAARSQCTYSNPEGTVVLACDQAQCRWLNVQLSPQQGSLGLQYNASQEWDLRSSCGSLRLTVSIEARAAGP

SEQ ID NO: 3458 - protein, 545 aa, Homo Sapiens; identical to SEQ ID NO: 3457

SEQ ID NO: 3459 - protein, 374 aa, Homo Sapiens
MKPLLETLYLLGMLVPGGLGYDRSLAQHRQEIVDKSVSPWSLETYSYNIYHPMGEIYEWMREISEKYKEVVTQHFLGVTYETHPMYYLKISQPSGNPKKIIWMDCGIHAREWIAPAFCQWFVKEILQNHKDNSSIRKLLRNLDFYVLPVLNIDGYIYTWTTDRLWRKSRSPHNNGTCFGTDLNRNFNASWCSIGASRNCQDQTFCGTGPVSEPETKAVASFIESKKDDILCFLTMHSYGQLILTPYGYTKNKSSNHPEMIQVGQKAANALKAKYGTNYRVGSSADILYASSGSSRDWARDIGIPFSYTFELRDSGTYGFVLPEAQIQPTCEETMEAVLSVLDDVYAKHWHSDSAGRVTSATMLLGLLVSCMSLL

SEQ ID NO: 3460 - protein, 130 aa, Homo Sapiens
MKFLIFAFFGGVHLLSLCSGKAICKNGISKRTFEEIKEEIASCGDVAKAIINLAVYGKAQNRSYERLALLVDTVGPRLSGSKNLEKAIQIMYQNLQQDGLEKVHLEPVRIPHWERGEESAVMLEPRIHKI

SEQ ID NO: 3461 - protein, 131 aa, Homo Sapiens
MKFLIFAFFGGVHLLSLCSGKAICKNGISKRTFEEIKEEIASCGDVAKAIINLAVYGKAQNRSYERLALLVDTVGPRLSGSKNLEKAIQIMYQNLQQDGLEKVHLEPVRIPHWERGEESAVMLEPRIHKIA

SEQ ID NO: 3462 - protein, 137 aa, Homo Sapiens
MKFLIFAFFGGVHLLSLCSGKAICKNGISKRTFEEIKEEIASCGDVAKAIINLAVYGKAQNRSYERLALLVDTVGPRLSGSKNLEKAIQIMYQNLQQDGLEKVHLEPVRIPHWERGEESAVMLEPRIHKIAILGLGS

SEQ ID NO: 3463 - protein, 186 aa, Homo Sapiens
MKFLIFAFFGGVHLLSLCSGKAICKNGISKRTFEEIKEEIASCGDVAKAIINLAVYGKAQNRSYERLALLVDTVGPRLSGSKNLEKAIQIMYQNLQQDGLEKVHLEPVRIPHWERGEESAVMLEPRIHKIAILGLGSSIGTPPEGITAEVLVVTSFDELQRRASEARGKIVVYNQPYINYSRTVQY

SEQ ID NO: 3464 - protein, 472 aa, Homo Sapiens
MKFLIFAFFGGVHLLSLCSGKAICKNGISKRTFEEIKEEIASCGDVAKAIINLAVYGKAQNRSYERLALLVDTVGPRLSGSKNLEKAIQIMYQNLQQDGLEKVHLEPVRIPHWERGEESAVMLEPRIHKIAILGLGSSIGTPPEGITAEVLVVTSFDELQRRASEARGKIVVYNQPYINYSRTVQYRTQGAVEAAKVGALASLIRSVASFSIYSPHTGIQEYQDGVPKIPTACITVEDAEMMSRMASHGIKIVIQLKMGAKTYPDTDSFNTVAEITGSKYPEQVVLVSGHLDSWDVGQGAMDDGGGAFISWEALSLIKDLGLRPKRTLRLVLWTAEEQGGVGAFQYYQLHKVNISNYSLVMESDAGTFLPTGLQFTGSEKARAIMEEVMSLLQPLNITQVLSHGEGTDINFWIQAGVPGASLLDDLYKYFFFHHSHGDTMTVMDPKQMNVAAAVWAVVSYVVADMEEMLPRS

SEQ ID NO: 3465 - protein, 130 aa, Homo Sapiens
  misc_feature (1)..(1): Xaa can be any naturally occurring amino acid
XFQYYQLHKVNISNYSLVMESDAGTFLPTGLQFTGSEKARAIMEEVMSLLQPLNITQVLSHGEGTDINFWIQAGVPGASLLDDLYKYFFFHHSHGDTMTVMDPKQMNVAAAVWAVVSYVVADMEEMLPRS

SEQ ID NO: 3466 - protein, 141 aa, Homo Sapiens
IIGGYAEFLYQIGLLDEKQKKYFQKQCHECIEHIRKQNWFEAFEVLIYNGQLDIIVAAALTERSLMGMDWKGSQEYKKAEKKVWKIFKSDSEVAGYIRQAGDFHQVIIRGGGHILPYDQPLRAFDMINRFIYGKGWDPYVG

SEQ ID NO: 3467 - protein, 100 aa, Homo Sapiens
MFGLFVEHGPYVVTSNMTLRDRDFPWTTTLSMLYIDNPVGTGFSFTDDTHGYAVNEDDVARDLYSALIQFFQIFPEYKNNDFYVTGESYAGKYVPAIAHL

SEQ ID NO: 3468 - protein, 142 aa, Homo Sapiens
MKSYAGFLTVNKTYNSNLFFWFFPAQIQPEDAPVVLWLQGGPGGSSMFGLFVEHGPYVVTSNMTLRDRDFPWTTTLSMLYIDNPVGTGFSFTDDTHGYAVNEDDVARDLYSALIQFFQIFPEYKNNDFYVTGESYAGKYVPA

SEQ ID NO: 3469 - protein, 244 aa, Homo Sapiens
MKSYAGFLTVNKTYNSNLFFWFFPAQIQPEDAPVVLWLQGGPGGSSMFGLFVEHGPYVVTSNMTLRDRDFPWTTTLSMLYIDNPVGTGFSFTDDTHGYAVNEDDVARDLYSALIQFFQIFPEYKNNDFYVTGESYAGKYVPAIAHLIHSLNPVREVKINLNGIAIGDGYSDPESIIGGYAEFLYQIGLLDEKQKKYFQKQCHECIEHIRKQNWFEAFEILDKLLDGDLTSDPSYFQNVTGCSNY

SEQ ID NO: 3470 - protein, 6 aa, Homo Sapiens
MVGAMW

SEQ ID NO: 3471 - protein, 43 aa, Homo Sapiens
MVGAMWKVIVSLVLLMPGPCDGLFRSLYRSVSMPPKGDSGQPL

SEQ ID NO: 3472 - protein, 52 aa, Homo Sapiens
MVGAMWKVIVSLVLLMPGPCDGLFRSLYRSVSMPPKGDSGQPLFLTPYIEAG

SEQ ID NO: 3473 - protein, 476 aa, Homo Sapiens
MVGAMWKVIVSLVLLMPGPCDGLFRSLYRSVSMPPKGDSGQPLFLTPYIEAGKIQKGRELSLVGPFPGLNMKSYAGFLTVNKTYNSNLFFWFFPAQIQPEDAPVVLWLQGGPGGSSMFGLFVEHGPYVVTSNMTLRDRDFPWTTTLSMLYIDNPVGTGFSFTDDTHGYAVNEDDVARDLYSALIQFFQIFPEYKNNDFYVTGESYAGKYVPAIAHLIHSLNPVREVKINLNGIAIGDGYSDPESIIGGYAEFLYQIGLLDEKQKKYFQKQCHECIEHIRKQNWFEAFEILDKLLDGDLTSDPSYFQNVTGCSNYYNFLRCTEPEDQLYYVKFLSLPEVRQAIHVGNQTFNDGTIVEKYLREDTVQSVKPWLTEIMNNYKVLIYNGQLDIIVAAALTERSLMGMDWKGSQEYKKAEKKVWKIFKSDSEVAGYIRQAGDFHQVIIRGGGHILPYDQPLRAFDMINRFIYGKGWDPYVG

SEQ ID NO: 3474 - protein, 476 aa, Homo Sapiens; identical to SEQ ID NO: 3473

SEQ ID NO: 3475 - protein, 476 aa, Homo Sapiens; identical to SEQ ID NO: 3473

SEQ ID NO: 3476 - protein, 180 aa, Homo Sapiens
  misc_feature (1)..(1): Xaa can be any naturally occurring amino acid
XKYFQKQCHECIEHIRKQNWFEAFEEPEDQLYYVKFLSLPEVRQAIHVGNQTFNDGTIVEKYLREDTVQSVKPWLTEIMNNYKVLIYNGQLDIIVAAALTERSLMGMDWKGSQEYKKAEKKVWKIFKSDSEVAGYIRQAGDFHQVIIRGGGHILPYDQPLRAFDMINRFIYGKGWDPYVG

SEQ ID NO: 3477 - protein, 734 aa, Homo Sapiens
MWGLLLALAAFAPAVGPALGAPRNSVLGLAQPGTTKVPGSTPALHSSPAQPPAETANGTSEQHVRIRVIKKKKVIMKKRKKLTLTRPTPLVTAGPLVTPTPAGTLDPAEKQETGCPPLGLESLRVSDSRLEASSSQSFGLGPHRGRLNIQSGLEDGDLYDGAWCAEEQDADPWFQVDAGHPTRFSGVITQGRNSVWRYDWVTSYKVQFSNDSRTWWGSRNHSSGMDAVFPANSDPETPVLNLLPEPQVARFIRLLPQTWLQGGAPCLRAEILACPVSDPNDLFLEAPASGSSDPLDFQHHNYKAMRKLMKQVQEQCPNITRIYSIGKSYQGLKLYVMEMSDKPGEHELGEPEVRYVAGMHGNEALGRELLLLLMQFLCHEFLRGNPRVTRLLSEMRIHLLPSMNPDGYEIAYHRGSELVGWAEGRWNNQSIDLNHNFADLNTPLWEAQDDGKVPHIVPNHHLPLPTYYTLPNATVAPETRAVIKWMKRIPFVLSANLHGGELVVSYPFDMTRTPWAARELTPTPDDAVFRWLSTVYAGSNLAMQDTSRRPCHSQDFSVHGNIINGADWHTVPGSMNDFSYLHTNCFEVTVELSCDKFPHENELPQEWENNKDALLTYLEQVRMGIAGVVRDKDTELGIADAVIAVDGINHDVTTAWGGDYWRLLTPGDYMVTASAEGYHSVTRNCRVTFEEGPFPCNFVLTKTPKQRLRELLAAGAKVPPDLRRRLERLRGQKD

SEQ ID NO: 3478 - protein, 224 aa, Homo Sapiens
MEKIPFVLGGNLQGGELVVAYPYDLVRSPWKTQEHTPTPDDHVFRWLAYSYASTHRLMTDARRRVCHTEDFQKEEGTVNGASWHTVAGSLNDFSYLHTNCFELSIYVGCDKYPHESQLPEEWENNRESLIVFMEQVHRGIKGLVRDSHGKGIPNAIISVEGINHDIRTGRVSLQKLSLACRRVRCAFALSSSSTMIVRPPQPYGTVPHSSPDPVTTKISPLRNF

SEQ ID NO: 3479 - protein, 756 aa, Homo Sapiens
MSRPGTATPALALVLLAVTLAGVGAQGAALEDPDYYGQEIWSREPYYARPEPELETFSPPLPAGPGEEWERRPQEPRPPKRATKPKKAPKREKSAPEPPPPGKHSNKKVMRTKSSEKAANDDHSVRVAREDVRESCPPLGLETLKITDFQLHASTVKRYGLGAHRGRLNIQAGINENDFYDGAWCAGRNDLQQWIEVDARRLTRFTGVITQGRNSLWLSDWVTSYKVMVSNDSHTWVTVKNGSGDMIFEGNSEKEIPVLNELPVPMVARYIRINPQSWFDNGSICMRMEILGCPLPDPNNYYHRRNEMTTTDDLDFKHHNYKEMRQLMKVVNEMCPNITRIYNIGKSHQGLKLYAVEISDHPGEHEVGEPEFHYIAGAHGNEVLGRELLLLLVQFVCQEYLARNARIVHLVEETRIHVLPSLNPDGYEKAYEGGSELGGWSLGRWTHDGIDINNNFPDLNTLLWEAEDRQNVPRKVPNHYIAIPEWFLSENATVAAETRAVIAWMEKIPFVLGGNLQGGELVVAYPYDLVRSPWKTQEHTPTPDDHVFRWLAYSYASTHRLMTDARRRVCHTEDFQKEEGTVNGASWHTVAGSLNDFSYLHTNCFELSIYVGCDKYPHESQLPEEWENNRESLIVFMEQVHRGIKGLVRDSHGKGIPNAIISVEGINHDIRTANDGDYWRLLNPGEYVVTAKAEGFTASTKNCMVGYDMGATRCDFTLSKTNMARIREIMEKFGKQPVSLPARRLKLRGQKRRQRG

SEQ ID NO: 3480 - protein, 515 aa, Homo Sapiens
MAWPYFLDCHRYFTREDEGCYDPLEKLRGGLEADEALPSGLPPTFIRFSHHSYAQMVRVLRRTASRCAHVARTYSIGRSFDGRELLVIEFSSRPGQHELMEPEVKLIGNIHGNEVAGREMLIYLAQYLCSEYLLGNPRIQRLLNTTRIHLLPSMNPDGYEVAAAEGAGYNGWTSGRQNAQNLDLNRNFPDLTSEYYRLAETRGARSDHIPIPQHYWWGKVAPETKAIMKWMQTIPFVLSASLHGGDLVVSYPFDFSKHPQEEKMFSPTPDEKMFKLLSRAYADVHPMMMDRSENRCGGNFLKRGSIINGADWYSFTGGMSDFNYLHTNCFEITVELGCVKFPPEEALYILWQHNKESLLNFVETVHRGIKGVVTDKFGKPVKNARISVKGIRHDITTAPDGDYWRLLPPGIHIVIAQAPGYAKVIKKVIIPARMKRAGRVDFILQPLGMGPKNFIHGLRRTGPHDPLGGASSLGEATEPDPLRARRQPSADGSKPWWWSYFTSLSTHRPRWLLKY

SEQ ID NO: 3481 - protein, 641 aa, Homo Sapiens
MPPPLPLLLLTVLVVAAARPGCEFERNPAATCVDLQLRTCSDAAYNHTTFPNLLQHRSWEVVEASSEYILLSVLHQLLEGQCNPDLRLLGCAVLAPRCEGGWVRRPCRHICEGLREVCQPAFDAIDMAWPYFLDCHRYFTREDEGCYDPLEKLRGGLEADEALPSGLPPTFIRFSHHSYAQMVRVLRRTASRCAHVARTYSIGRSFDGRELLVIEFSSRPGQHELMEPEVKLIGNIHGNEVAGREMLIYLAQYLCSEYLLGNPRIQRLLNTTRIHLLPSMNPDGYEVAAAEGAGYNGWTSGRQNAQNLDLNRNFPDLTSEYYRLAETRGARSDHIPIPQHYWWGKVAPETKAIMKWMQTIPFVLSASLHGGDLVVSYPFDFSKHPQEEKMFSPTPDEKMFKLLSRAYADVHPMMMDRSENRCGGNFLKRGSIINGADWYSFTGGMSDFNYLHTNCFEITVELGCVKFPPEEALYILWQHNKESLLNFVETVHRGIKGVVTDKFGKPVKNARISVKGIRHDITTAPDGDYWRLLPPGIHIVIAQAPGYAKVIKKVIIPARMKRAGRVDFILQPLGMGPKNFIHGLRRTGPHDPLGGASSLGEATEPDPLRARRQPSADGSKPWWWSYFTSLSTHRPRWLLKY

SEQ ID NO: 3482 - protein, 652 aa, Homo Sapiens
MPPPLPLLLLTVLVVAAARPGCEFERNPAGECHRPPAADSATCVDLQLRTCSDAAYNHTTFPNLLQHRSWEVVEASSEYILLSVLHQLLEGQCNPDLRLLGCAVLAPRCEGGWVRRPCRHICEGLREVCQPAFDAIDMAWPYFLDCHRYFTREDEGCYDPLEKLRGGLEADEALPSGLPPTFIRFSHHSYAQMVRVLRRTASRCAHVARTYSIGRSFDGRELLVIEFSSRPGQHELMEPEVKLIGNIHGNEVAGREMLIYLAQYLCSEYLLGNPRIQRLLNTTRIHLLPSMNPDGYEVAAAEGAGYNGWTSGRQNAQNLDLNRNFPDLTSEYYRLAETRGARSDHIPIPQHYWWGKVAPETKAIMKWMQTIPFVLSASLHGGDLVVSYPFDFSKHPQEEKMFSPTPDEKMFKLLSRAYADVHPMMMDRSENRCGGNFLKRGSIINGADWYSFTGGMSDFNYLHTNCFEITVELGCVKFPPEEALYILWQHNKESLLNFVETVHRGIKGVVTDKFGKPVKNARISVKGIRHDITTAPDGDYWRLLPPGIHIVIAQAPGYAKVIKKVIIPARMKRAGRVDFILQPLGMGPKNFIHGLRRTGPHDPLGGASSLGEATEPDPLRARRQPSADGSKPWWWSYFTSLSTHRPRWLLKY

SEQ ID NO: 3483 - protein, 69 aa, Homo Sapiens
MPPPLPLLLLTVLVVAAARPGCEFERNPAGECHRPPAADSGTVPGPPWLLFCRRAAAPTLSEHFRQLNP

SEQ ID NO: 3484 - protein, 388 aa, Homo Sapiens
IGTYLNYECRPGYSGRPFSIICLKNSVWTSAKDKCKRKSCRNPPDPVNGMAHVIKDIQFRSQIKYSCPKGYRLIGSSSATCIISGNTVIWDNKTPVCDRIICGLPPTIANGDFTSISREYFHYGSVVTYHCNLGSRGKKVFELVGEPSIYCTSKDDQVGIWSGPAPQCIIPNKCTPPNVENGILVSDNRSLFSLNEVVEFRCQPGFGMKGPSHVKCQALNKWEPELPSCSRVCQPPPDVLHAERTQRDKDNFSPGQEVFYSCEPGYDLRGSTYLHCTPQGDWSPAAPRCEVKSCDDFLGQLPNGHVLFPLNLQLGAKVDFVCDEGFQLKGSSASYCVLAGMESLWNSSVPVCERKSCETPPVPVNGMVHVITDIHVGSRINYSCTTGF

SEQ ID NO: 3485 - protein, 569 aa, Homo Sapiens
MAPPVRLERPFPSRRFPGLLLAALVLLLSSFSDQCNVPEWLPFARPTNLTDDFEFPIGTYLNYECRPGYSGRPFSIICLKNSVWTSAKDKCKRKSCRNPPDPVNGMAHVIKDIQFRSQIKYSCPKGYRLIGSSSATCIISGNTVIWDNKTPVCDRIICGLPPTIANGDFTSISREYFHYGSVVTYHCNLGSRGKKVFELVGEPSIYCTSKDDQVGIWSGPAPQCIIPNKCTPPNVENGILVSDNRSLFSLNEVVEFRCQPGFGMKGPSHVKCQALNKWEPELPSCSRVCQPPPDVLHAERTQRDKDNFSPGQEVFYSCEPGYDLRGSTYLHCTPQGDWSPAAPRCEVKSCDDFLGQLPNGHVLFPLNLQLGAKVDFVCDEGFQLKGSSASYCVLAGMESLWNSSVPVCERKSCETPPVPVNGMVHVITDIHVGSRINYSCTTGHRLIGHSSAECILSGNTAHWSMKPPICQQIFCPNPPAILNGRHTGTPLGDIPYGKEVSYTCDPHPDRGMTFNLIGESTIRRTSEPHGNGVWSSPAPRCELPVGAGSHDALIVGKFYEVFAEEFCHL

SEQ ID NO: 3486 - protein, 1176 aa, Homo Sapiens
MALARPGTPDPQALASVLLLLLWAPALSLLAGTVPSEPPSACASDPCAPGTECQATESGGYTCGPMEPRGCATQPCHHGALCVPQGPDPTGFRCYCVPGFQGPRCELDIDECASRPCHHGATCRNLADRYECHCPLGYAGVTCEMEVDECASAPCLHGGSCLDGVGSFRCVCAPGYGGTRCQLDLDECQSQPCAHGGTCHDLVNGFRCDCAGTGYEGTHCEREVLECASAPCEHNASCLEGLGSFRCLCWPGYSGELCEVDEDECASSPCQHGGRCLQRSDPALYGGVQAAFPGAFSFRHAAGFLCHCPPGFEGADCGVEVDECASRPCLNGGHCQDLPNGFQCHCPDGYAGPTCEEDVDECLSDPCLHGGTCSDTVAGYICRCPETWGGRDCSVQLTGCQGHTCPLAATCIPIFESGVHSYVCHCPPGTHGPFCGQNTTFSVMAGSPIQASVPAGGPLGLALRFRTTLPAGTLATRNDTKESLELALVAATLQATLWSYSTTVLVLRLPDLALNDGHWHQVEVVLHLATLELRLWHEGCPARLCVASGPVALASTASATPLPAGISSAQLGDATFAGCLQDVRVDGHLLLPEDLGENVLLGCERREQCRPLPCVHGGSCVDLWTHFRCDCARPHRGPTCADEIPAATFGLGGAPSSASFLLQELPGPNLTVSFLLRTRESAGLLLQFANDSAAGLTVFLSEGRIRAEVPGSPAVVLPGRWDDGLRHLVMLSFGPDQLQDLGQHVHVGGRLLAADSQPWGGPFRGCLQDLRLDGCHLPFFPLPLDNSSQPSELGGRQSWNLTAGCVSEDMCSPDPCFNGGTCLVTWNDFHCTCPANFTGPTCAQQLWCPGQPCLPPATCEEVPDGFVCVAEATFREGPPAAFSGHNASSGRLLGGLSLAFRTRDSEAWLLRAAAGALEGVWLAVRNGSLAGGVRGGHGLPGAVLPIPGPRVADGAWHRVRLAMERPAATTSRWLLWLDGAATPVALRGLASDLGFLQGPGAVRILLAENFTGCLGRVALGGLPLPLARPRPGAAPGAREHFASWPGTPAPILGCRGAPVCAPSPCLHDGACRDLFDAFACACGPGWEGPRCEAHVDPCHSAPCARGRCHTHPDGRFECRCPPGFGGPRCRWDGWAGGWAANAPWGYGGAEKSARSVDESLPFPGPHVLICDMRRTV

SEQ ID NO: 3487 - protein, 1285 aa, Homo Sapiens
MALARPGTPDPQALASVLLLLLWAPALSLLAGTVPSEPPSACASDPCAPGTECQATESGGYTCGPMEPRGCATQPCHHGALCVPQGPDPTGFRCYCVPGFQGPRCELDIDECASRPCHHGATCRNLADRYECHCPLGYAGVTCEMEVDECASAPCLHGGSCLDGVGSFRCVCAPGYGGTRCQLDLDECQSQPCAHGGTCHDLVNGFRCDCAGTGYEGTHCEREVLECASAPCEHNASCLEGLGSFRCLCWPGYSGELCEVDEDECASSPCQHGGRCLQRSDPALYGGVQAAFPGAFSFRHAAGFLCHCPPGFEGADCGVEVDECASRPCLNGGHCQDLPNGFQCHCPDGYAGPTCEEDVDECLSDPCLHGGTCSDTVAGYICRCPETWGGRDCSVQLTGCQGHTCPLAATCIPIFESGVHSYVCHCPPGTHGPFCGQNTTFSVMAGSPIQASVPAGGPLGLALRFRTTLPAGTLATRNDTKESLELALVAATLQATLWSYSTTVLVLRLPDLALNDGHWHQVEVVLHLATLELRLWHEGCPARLCVASGPVALASTASATPLPAGISSAQLGDATFAGCLQDVRVDGHLLLPEDLGENVLLGCERREQCRPLPCVHGGSCVDLWTHFRCDCARPHRGPTCADEIPAATFGLGGAPSSASFLLQELPGPNLTVSFLLRTRESAGLLLQFANDSAAGLTVFLSEGRIRAEVPGSPAVVLPGRWDDGLRHLVMLSFGPDQLQDLGQHVHVGGRLLAADSQPWGGPFRGCLQDLRLDGCHLPFFPLPLDNSSQPSELGGRQSWNLTAGCVSEDMCSPDPCFNGGTCLVTWNDFHCTCPANFTGPTCAQQLWCPGQPCLPPATCEEVPDGFVCVAEATFREGPPAAFSGHNASSGRLLGGLSLAFRTRDSEAWLLRAAAGALEGVWLAVRNGSLAGGVRGGHGLPGAVLPIPGPRVADGAWHRVRLAMERPAATTSRWLLWLDGAATPVALRGLASDLGFLQGPGAVRILLAENFTGCLGRVALGGLPLPLARPRPGAAPGAREHFASWPGTPAPILGCRGAPVCAPSPCLHDGACRDLFDAFACACGPGWEGPRCEAHVDPCHSAPCARGRCHTHPDGRFECRCPPGFGGPRCRLPVPSKECSLNVTCLDGSPCEGGSPAANCSCLEGLAGQRCQVPTLPCEANPCLNGGTCRAAGGVSECICNARFSGQFCEVAKGLPLPLPFPLLEVAVPAACACLLLLLLGLLSGILAARKRRQSEGTYSPSQQEVAGARLEMDSVLKVPPEERLI

SEQ ID NO: 3488 - protein, 953 aa, Homo Sapiens
MAMEPGALWTFLGHLWLLAGPTCEEDVDECLSDPCLHGGTCSDTVAGYICRCPETWGGRDCSVQLTGCQGHTCPLAATCIPIFESGVHSYVCHCPPGTHGPFCGQNTTFSVMAGSPIQASVPAGGPLGLALRFRTTLPAGTLATRNDTKESLELALVAATLQATLWSYSTTVLVLRLPDLALNDGHWHQVEVVLHLATLELRLWHEGCPARLCVASGPVALASTASATPLPAGISSAQLGDATFAGCLQDVRVDGHLLLPEDLGENVLLGCERREQCRPLPCVHGGSCVDLWTHFRCDCARPHRGPTCADEIPAATFGLGGAPSSASFLLQELPGPNLTVSFLLRTRESAGLLLQFANDSAAGLTVFLSEGRIRAEVPGSPAVVLPGRWDDGLRHLVMLSFGPDQLQDLGQHVHVGGRLLAADSQPWGGPFRGCLQDLRLDGCHLPFFPLPLDNSSQPSELGGRQSWNLTAGCVSEDMCSPDPCFNGGTCLVTWNDFHCTCPANFTGPTCAQQLWCPGQPCLPPATCEEVPDGFVCVAEATFREGPPAAFSGHNASSGRLLGGLSLAFRTRDSEAWLLRAAAGALEGVWLAVRNGSLAGGVRGGHGLPGAVLPIPGPRVADGAWHRVRLAMERPAATTSRWLLWLDGAATPVALRGLASDLGFLQGPGAVRILLAENFTGCLGRVALGGLPLPLARPRPGAAPGAREHFASWPGTPAPILGCRGAPVCAPSPCLHDGACRDLFDAFACACGPGWEGPRCEAHVDPCHSAPCARGRCHTHPDGRFECRCPPGFGGPRCRLPVPSKECSLNVTCLDGSPCEGGSPAANCSCLEGLAGQRCQVPTLPCEANPCLNGGTCRAAGGVSECICNARFSGQFCEVAKGLPLPLPFPLLEVAVPAACACLLLLLLGLLSGILAARKRRQSEGTYSPSQQEVAGARLEMDSVLKVPPEERLI

SEQ ID NO: 3489 - protein, 220 aa, Homo Sapiens
MAGLSRGSARALLAALLASTLLALLVSPARGRGGRDHGDWDEASRLPPLPPREDAARVARFVTHVSDWGALATISTLEAVRGRPFADVLSLSDGPPGAGSGVPYFYLSPLQLSVSNLQENPYATLTMTLAQTNFCKKHGFDPQSPLCVHIMLSGTVTKVNETEMDIAKHSLFIRHPEMKTWPSSHNWFFAKLNITNIWVLDYFGGPKIVTPEEYYNVTVQ

SEQ ID NO: 3490 - protein, 290 aa, Homo Sapiens
MSVRRGRRPARPGTRLSWLLCCSALLSPAAGYVIVSSVSWAVTNEVDEELDSASTEEAMPALLEDSGSIWQQSFPASAHKEDAHLRPRAGAARARPPPAPPGMFSYRREGGQTASAPPGPRLRAATARSLAHASVWGCLATVSTHKKIQGLPFGNCLPVSDGPFNNSTGIPFFYMTAKDPVVADLMKNPMASLMLPESEGEFCRKNIVDPEDPRCVQLTLTGQMIAVSPEEVEFAKQAMFSRHPGMRKWPRQYEWFFMKMRIEHIWLQKWYGGASSISREEYFKAVPRKA

SEQ ID NO: 3491 - protein, 422 aa, Homo Sapiens
MAPWPPKGLVPAMLWGLSLFLNLPGPIWLQPSPPPQSSPPPQPHPCHTCRGLVDSFNKGLERTIRDNFGGGNTAWEEENLSKYKDSETRLVEVLEGVCSKSDFECHRLLELSEELVESWWFHKQQEAPDLFQWLCSDSLKLCCPAGTFGPSCLPCPGGTERPCGGYGQCEGEGTRGGSGHCDCQAGYGGEACGQCGLGYFEAERNASHLVCSACFGPCARCSGPEESNCLQCKKGWALHHLKCVDIDECGTEGANCGADQFCVNTEGSYECRDCAKACLGCMGAGPGRCKKCSPGYQQVGSKCLDVDECETEVCPGENKQCENTEGGYRCICAEGYKQMEGICVKEQIPGAFPILTDLTPETTRRWKLGSHPHSTYVKMKMQRDEATFPGLYGKQVAKLGSQSRQSDRGTRLIHSQQASSQR

SEQ ID NO: 3492 - protein, 420 aa, Homo Sapiens
MAPWPPKGLVPAMLWGLSLFLNLPGPIWLQPSPPPQSSPPPQPHPCHTCRGLVDSFNKGLERTIRDNFGGGNTAWEEENLSKYKDSETRLVEVLEGVCSKSDFECHRLLELSEELVESWWFHKQQEAPDLFQWLCSDSLKLCCPAGTFGPSCLPCPGGTERPCGGYGQCEGEGTRGGSGHCDCQAGYGGEACGQCGLGYFEAERNASHLVCSACFGPCARCSGPEESNCLQCKKGWALHHLKCVDIDECGTEGANCGADQFCVNTEGSYECRDCAKACLGCMGAGPGRCKKCSPGYQQVGSKCLDVDECETEVCPGENKQCENTEGGYRCICAEGYKQMEGICVKEQIPESAGFFSEMTEDELVVLQQMFFGIIICALATLAAKGDLVFTAIFIGAVAAMTGYWLSERSDRVLEGFIKGR

SEQ ID NO: 3493 - protein, 420 aa, Homo Sapiens; identical to SEQ ID NO: 3492

SEQ ID NO: 3494 - protein, 420 aa, Homo Sapiens; identical to SEQ ID NO: 3492

SEQ ID NO: 3495 - protein, 101 aa, Homo Sapiens
MAPWPPKGLVPAMLWGLSLFLNLPGPIWLQPSPPPQSSPPPQPHPCHTCRGLVDSFNKGLERTIRDNFGGGNTAWEEENLSKYKDSLSWGNREALRWLRAV

SEQ ID NO: 3496 - protein, 100 aa, Homo Sapiens
  misc_feature (1)..(1): Xaa can be any naturally occurring amino acid
XPAHLSADIDECGTEGANCGADQFCVNTEGSYECRDCAKACLGCMGAGPGRCKKCSPGYQQMWMSVRQRCVRERTSSVKTPRAVIAASVPRATSRWKASV

SEQ ID NO: 3497 - protein, 229 aa, Homo Sapiens
MRLPRRAALGLLPLLLLLPPAPEAAKKPTPCHRCRGLVDKFNQGMVDTAKKNFGGGNTAWEEKTLSKYESSEIRLLEILEGLCESSDFECNQMLEAQEEHLEAWWLQLKSEYPDLFEWFCVKTLKVCCSPGTYGPDCLACQGGSQRPCSGNGHCSGDGSRQGDGSCRCHMGYQGPLCTDCMDGYFSSLRNETHSICTACDESCKTCSGLTNRDCGECEVGWVLDEGACV

SEQ ID NO: 3498 - protein, 353 aa, Homo Sapiens
MRLPRRAALGLLPLLLLLPPAPEAAKKPTPCHRCRGLVDKFNQGMVDTAKKNFGGGNTAWEEKTLSKYESSEIRLLEILEGLCESSDFECNQMLEAQEEHLEAWWLQLKSEYPDLFEWFCVKTLKVCCSPGTYGPDCLACQGGSQRPCSGNGHCSGDGSRQGDGSCRCHMGYQGPLCTDCMDGYFSSLRNETHSICTACDESCKTCSGLTNRDCGECEVGWVLDEGACVDVDECAAEPPPCSAAQFCKNANGSYTCEECDSSCVGCTGEGPGNCKECISGYAREHGQCADVDECSLAEKTCVRKNENCYNTPGSYVCVCPDGFEETEDACVPPAEAEATEGESPTQLPSREDL

SEQ ID NO: 3499 - protein, 321 aa, Homo Sapiens
MRLPRRAALGLLPLLLLLPPAPEAAKKPTPCHRCRGLVDKFNQGMVDTAKKNFGGGNTAWEEKTLSKYESSEIRLLEILEGLCESSDFECNQMLEAQEEHLEAWWLQLKSEYPDLFEWFCVKTLKVCCSPGTYGPDCLACQGGSQRPCSGNGHCSGDGSRQGDGSCRCHMGYQGPLCTDCMDGYFSSLRNETHSICTACDESCKTCSGLTNRDCGECEVGWVLDEGACVDVDECAAEPPPCSAAQFCKNANGSYTCEDVDECSLAEKTCVRKNENCYNTPGSYVCVCPDGFEETEDACVPPAEAEATEGESPTQLPSREDL

SEQ ID NO: 3500 - protein, 325 aa, Homo Sapiens
MRLPRRAALGLLPLLLLLPPAPEAAKKPTPCHRCRGLVDKFNQGMVDTAKKNFGGGNTAWEEKTLSKYESSEIRLLEILEGLCESSDFECNQMLEAQEEHLEAWWLQLKSEYPDLFEWFCVKTLKVCCSPGTYGPDCLACQGGSQRPCSGNGHCSGDGSRQGDGSCRCHMGYQGPLCTDCMDGYFSSLRNETHSICTACDESCKTCSGLTNRDCGECEVGWVLDEGACVECDSSCVGCTGEGPGNCKECISGYAREHGQCADVDECSLAEKTCVRKNENCYNTPGSYVCVCPDGFEETEDACVPPAEAEATEGESPTQLPSREDL

SEQ ID NO: 3501 - protein, 402 aa, Homo Sapiens
MRLPRRAALGLLPLLLLLPPAPEAAKKPTPCHRCRGLVDKFNQGMVDTAKKNFGGGNTAWEEKTLSKYESSEIRLLEILEGLCESSDFECNQMLEAQEEHLEAWWLQLKSEYPDLFEWFCVKTLKVCCSPGTYGPDCLACQGGSQRPCSGNGHCSGDGSRQGDGSCRCHMGYQGPLCTDCMDGYFSSLRNETHSICTVRTGLSDSYPPCCLSLGCWRGVGHAWIRGRNTHTQPGYSSRVWIAAFSPACDESCKTCSGLTNRDCGECEVGWVLDEGACVDVDECAAEPPPCSAAQFCKNANGSYTCEECDSSCVGCTGEGPGNCKECISGYAREHGQCADVDECSLAEKTCVRKNENCYNTPGSYVCVCPDGFEETEDACVPPAEAEATEGESPTQLPSREDL

SEQ ID NO: 3502 - protein, 196 aa, Homo Sapiens
MRLPLLVSAGVLLVALLPCPPCRALLSRGPVPGARQAPQHPQPLDFFQPPPQSEQPQQPQARPVLLRMGEEYFLRLGNLNKSPAAPLSPASSLLAGGSGSRPSPEQATANFFRVLLQQLLLPRRSLDSPAALAERGARNALGGHQEAPERERRSEEPPISLDLTFHLLREVLEMARAEQLAQQAHSNRKLMEIIGK

SEQ ID NO: 3503 - protein, 322 aa, Homo Sapiens
MSPNFKLQCHFILIFLTALRGESRYLELREAADYDPFLLFSANLKRELAGEQPYRRALRCLDMLSLQGQFTFTADRPQLHCAAFFISEPEEFITIHYDQVSIDCQGGDFLKVFDGWILKGEKFPSSQDHPLPSAERYIDFCESGLSRRSIRSSQNVAMIFFRVHEPGNGFTLTIKTDPNLFPCNVISQTPNGKFTLVVPHQHRNCSFSIIYPVVIKISDLTLGHVNGLQLKKSSAGCEGIGDFVELLGGTGLDPSKMTPLADLCYPFHGPAQMKVGCDNTVVRMVSSGKHVNRVTFEYRQLEPYELENPNGNSIGEFCLSGL

SEQ ID NO: 3504 - protein, 238 aa, Homo Sapiens
MSPNFKLQCHFILIFLTALRGESRYLELREAADYDPFLLFSANLKRELAGEQPYRRALRCLDMLSLQGQFTFTADRPQLHCAAFFISEPEEFITIHYDQVSIDCQGGDFLKVFDGWILKGEKFPSSQDHPLPSAERYIDFCESGLSRRSIRSSQNVAMIFFRVHEPGNGFTLTIKTDPNLFPCNVISQTPNGKFTLVVPHQHRNCSFSIIYPVVIKISDLTLGHVNGLQLKVSCLLVS

SEQ ID NO: 3505 - protein, 375 aa, Homo Sapiens
MGGHPQLRLVKALLLLGLNPVSASLQDQHCESLSLASNISDNGYRECLANGSWAARVNYSECQEILNEEKKSKVHYHVAVIINYLGHCISLVALLVAFVLFLRLRSIRCLRNIIHWNLISAFILRNATWFVVQLTMSPEVHQSNVGWCRLVTAAYNYFHVTNFFWMFGEGCYLHTAIVLTYSTDRLRKWMFICIGWGVPFPIIVAWAIGKLYYDNEKCWFGKRPGVYTDYIYQGPMILVLLINFIFLFNIVRILMTKLRASTTSETIQYRKAVKATLVLLPLLGITYMLFFVNPGEDEVSRVVFIYFNSFLESFQGFFVSVFYCFLNSEVRSAIRKRWHRWQDKHSIRARVARAMSIPTSPTRVSFHSIKQSTAV

SEQ ID NO: 3506 - protein, 154 aa, Homo Sapiens
MGGHPQLRLVKALLLLGLNPVSASLQDQHCESLSLASNISEKKQGALPCRSHHQLPGPLYLPGGPPGGLCPLSAAQEHPVPAKHHPLEPHLRLHPAQRHLVRGPANHEPRGPPEQRGLVQVGDSRLQLLPCDQLLLDVRRGLLPAHSHRAHLLH

SEQ ID NO: 3507 - protein, 430 aa, Homo Sapiens
MGGHPQLRLVKALLLLGLNPVSASLQDQHCESLSLASNISGLQCNASVDLIGTCWPRSPAGQLVVRPCPAFFYGVRYNTTNNGYRECLANGSWAARVNYSECQEILNEEKKSKVHYHVAVIINYLGHCISLVALLVAFVLFLRLRPGCTHWGDQADGALEVGAPWSGAPFQVRRSIRCLRNIIHWNLISAFILRNATWFVVQLTMSPEVHQSNVGWCRLVTAAYNYFHVTNFFWMFGEGCYLHTAIVLTYSTDRLRKWMFICIGWGVPFPIIVAWAIGKLYYDNEKCWFGKRPGVYTDYIYQGPMILVLLINFIFLFNIVRILMTKLRASTTSETIQYRKAVKATLVLLPLLGITYMLFFVNPGEDEVSRVVFIYFNSFLESFQVRSAIRKRWHRWQDKHSIRARVARAMSIPTSPTRVSFHSIKQSTAV

SEQ ID NO: 3508 - protein, 444 aa, Homo Sapiens
MGGHPQLRLVKALLLLGLNPVSASLQDQHCESLSLASNISGLQCNASVDLIGTCWPRSPAGQLVVRPCPAFFYGVRYNTTNNGYRECLANGSWAARVNYSECQEILNEEKKSKVHYHVAVIINYLGHCISLVALLVAFVLFLRLRPGCTHWGDQADGALEVGAPWSGAPFQVRRSIRCLRNIIHWNLISAFILRNATWFVVQLTMSPEVHQSNVGWCRLVTAAYNYFHVTNFFWMFGEGCYLHTAIVLTYSTDRLRKWMFICIGWGVPFPIIVAWAIGKLYYDNEKCWFGKRPGVYTDYIYQGPMILVLLINFIFLFNIVRILMTKLRASTTSETIQYRKAVKATLVLLPLLGITYMLFFVNPGEDEVSRVVFIYFNSFLESFQGFFVSVFYCFLNSEVRSAIRKRWHRWQDKHSIRARVARAMSIPTSPTRVSFHSIKQSTAV

SEQ ID NO: 3509 - protein, 415 aa, Homo Sapiens
MGGHPQLRLVKALLLLGLNPVSASLQDQHCESLSLASNISGLQCNASVDLIGTCWPRSPAGQLVVRPCPAFFYGVRYNTTNNGYRECLANGSWAARVNYSECQEILNEEKKSKVHYHVAVIINYLGHCISLVALLVAFVLFLRLRSIRCLRNIIHWNLISAFILRNATWFVVQLTMSPEVHQSNVGWCRLVTAAYNYFHVTNFFWMFGEGCYLHTAIVLTYSTDRLRKWMFICIGWGVPFPIIVAWAIGKLYYDNEKCWFGKRPGVYTDYIYQGPMILVLLINFIFLFNIVRILMTKLRASTTSETIQYRKAVKATLVLLPLLGITYMLFFVNPGEDEVSRVVFIYFNSFLESFQGFFVSVFYCFLNSEVRSAIRKRWHRWQDKHSIRARVARAMSIPTSPTRVSFHSIKQSTAV

SEQ ID NO: 3510 - protein, 401 aa, Homo Sapiens
MGGHPQLRLVKALLLLGLNPVSASLQDQHCESLSLASNISGLQCNASVDLIGTCWPRSPAGQLVVRPCPAFFYGVRYNTTNNGYRECLANGSWAARVNYSECQEILNEEKKSKVHYHVAVIINYLGHCISLVALLVAFVLFLRLRSIRCLRNIIHWNLISAFILRNATWFVVQLTMSPEVHQSNVGWCRLVTAAYNYFHVTNFFWMFGEGCYLHTAIVLTYSTDRLRKWMFICIGWGVPFPIIVAWAIGKLYYDNEKCWFGKRPGVYTDYIYQGPMILVLLINFIFLFNIVRILMTKLRASTTSETIQYRKAVKATLVLLPLLGITYMLFFVNPGEDEVSRVVFIYFNSFLESFQVRSAIRKRWHRWQDKHSIRARVARAMSIPTSPTRVSFHSIKQSTAV

SEQ ID NO: 3511 - protein, 145 aa, Homo Sapiens
MGGHPQLRLVKALLLLGLNPVSASLQDQHCESLSLASNISGLQCNASVDLIGTCWPRSPAGQLVVRPCPAFFYGVRYNTTNNGYRECLANGSWAARVNYSECQEILNEEKKSKVHYHVAVIINYLGHCISLVALLVAFVLFLRLS

SEQ ID NO: 3512 - protein, 314 aa, Homo Sapiens
MVSATIPQKKSKVHYHVAVIINYLGHCISLVALLVAFVLFLRLRSIRCLRNIIHWNLISAFILRNATWFVVQLTMSPEVHQSNVGWCRLVTAAYNYFHVTNFFWMFGEGCYLHTAIVLTYSTDRLRKWMFICIGWGVPFPIIVAWAIGKLYYDNEKCWFGKRPGVYTDYIYQGPMILVLLINFIFLFNIVRILMTKLRASTTSETIQYRKAVKATLVLLPLLGITYMLFFVNPGEDEVSRVVFIYFNSFLESFQGFFVSVFYCFLNSEVRSAIRKRWHRWQDKHSIRARVARAMSIPTSPTRVSFHSIKQSTAV

SEQ ID NO: 3513 - protein, 52 aa, Homo Sapiens
  misc_feature (1)..(1): Xaa can be any naturally occurring amino acid
XCWFGKRPGVYTDYIYQGPMILVLLEGCESHSGAAAPPGHHLHAVLRQSRGG

SEQ ID NO: 3514 - protein, 75 aa, Homo Sapiens
  misc_feature (1)..(1): Xaa can be any naturally occurring amino acid
XCWFGKRPGVYTDYIYQGPMILVLLINFIFLFNIVRILMTKLRASTTSETIQYRASLCLCSTVSSIVRSVLPSGR

SEQ ID NO: 3515 - protein, 93 aa, Homo Sapiens
  misc_feature (1)..(1): Xaa can be any naturally occurring amino acid
XSLASNISGLQCNASVDLIGTCWPRSPAGQLVVRPCPAFFYGVRYNTTNNGYRECLANGSWAARVNYSECQEILNEEEPGPQAQPGRAHRGGT

SEQ ID NO: 3516 - protein, 152 aa, Homo Sapiens
YGVRYNTTNNGYRECLANGSWAARVNYSECQEILNEEKKSKVHYHVAVIINYLGHCISLVALLVAFVLFLRLRSIRCLRNIIHWNLISAFILRNATWFVVQLTMSPEVHQSNVVCPSPSLWPGPLGSCTTTMRSAGLAKGLGCTPTTSTRAP

SEQ ID NO: 3517 - protein, 411 aa, Homo Sapiens
MDAALLHSLLEANCSLALAEELLLDGWGPPLDPEGPYSYCNTTLDQIGTCWPRSAAGALVERPCPEYFNGVKYNTTRNAYRECLENGTWASKINYSQCEPILDDKQRKYDLHYRIALVVNYLGHCVSVAALVAAFLLFLALRSIRCLRNVIHWNLITTFILRNVMWFLLQLVDHEVHESNEVWCRCITTIFNYFVVTNFFWMFVEGCYLHTAIVMTYSTERLRKCLFLFIGWCIPFPIIVAWAIGKLYYENEQCWFGKEPGDLVDYIYQGPIILVLLINFVFLFNIVRILMTKLRASTTSETIQYRKAVKATLVLLPLLGITYMLFFVNPGEDDLSQIMFIYFNSFLQSFQGFFVSVFYCFFNGEVRSAVRKRWHRWQDHHSLRVPMARAMSIPTSPTRISFHSIKQTAAV

SEQ ID NO: 3518 - protein, 387 aa, Homo Sapiens
MDAALLHSLLEANCSLALAEELLLDGWGPPLDPEGPYSYCNTTLDQIGTCWPRSAAGALVERPCPEYFNGVKYNTTRNAYRECLENGTWASKINYSQCEPILDDKQRKYDLHYRIALVVNYLGHCVSVAALVAAFLLFLALRSIRCLRNVIHWNLITTFILRNVMWFLLQLVDHEVHESNEVWCRCITTIFNYFVVTNFFWMFVEGCYLHTAIVMTYSTERLRKCLFLFIGWCIPFPIIVAWAIGKLYYENEQCWFGKEPGDLVDYIYQGPIILVLLINFVFLFNIVRILMTKLRASTTSETIQYRKAVKATLVLLPLLGITYMLFFVNPGEDDLSQIMFIYFNSFLQSFQGFFVSVFYCFFNGESWVSKEAQAAGPHGREKPEQRW

SEQ ID NO: 3519 - protein, 397 aa, Homo Sapiens
MGREPWPEDRDLGFPQLFCQGPYSYCNTTLDQIGTCWPRSAAGALVERPCPEYFNGVKYNTTRNAYRECLENGTWASKINYSQCEPILDDKQRKYDLHYRIALVVNYLGHCVSVAALVAAFLLFLALRSIRCLRNVIHWNLITTFILRNVMWFLLQLVDHEVHESNEVWCRCITTIFNYFVVTNFFWMFVEGCYLHTAIVMTYSTERLRKCLFLFIGWCIPFPIIVAWAIGKLYYENEQCWFGKEPGDLVDYIYQGPIILVLLINFVFLFNIVRILMTKLRASTTSETIQYRKAVKATLVLLPLLGITYMLFFVNPGEDDLSQIMFIYFNSFLQSFQGFFVSVFYCFFNGEVRSAVRKRWHRWQDHHSLRVPMARAMSIPTSPTRISFHSIKQTAAV

SEQ ID NO: 3520 - protein, 438 aa, Homo Sapiens
MRGPSGPPGLLYVPHLLLCLLCLLPPPLQYAAGQSQMPKDQPLWALLEQYCHTIMTLTNLSGPYSYCNTTLDQIGTCWPRSAAGALVERPCPEYFNGVKYNTTRNAYRECLENGTWASKINYSQCEPILDDKQRKYDLHYRIALVVNYLGHCVSVAALVAAFLLFLALRSIRCLRNVIHWNLITTFILRNVMWFLLQLVDHEVHESNEVWCRCITTIFNYFVVTNFFWMFVEGCYLHTAIVMTYSTERLRKCLFLFIGWCIPFPIIVAWAIGKLYYENEQCWFGKEPGDLVDYIYQGPIILVLLINFVFLFNIVRILMTKLRASTTSETIQYRKAVKATLVLLPLLGITYMLFFVNPGEDDLSQIMFIYFNSFLQSFQGFFVSVFYCFFNGEVRSAVRKRWHRWQDHHSLRVPMARAMSIPTSPTRISFHSIKQTAAV

SEQ ID NO: 3521 - protein, 64 aa, Homo Sapiens
MRGPSGPPGLLYVPHLLLCLLCLLPPPLQYAAGQSQMPKDQPLWALLEQYCHTIMTLTNLSGWS

SEQ ID NO: 3522 - protein, 64 aa, Homo Sapiens; identical to SEQ ID NO: 3521

SEQ ID NO: 3523 - protein, 99 aa, Homo Sapiens
MRGPSGPPGLLYVPHLLLCLLCLLPPPLQYAAGQSQMPKDQPLWALLEQYCHTIMTLTNLSVTPGAHSHSLSARGCGTRWTRHCSTACWRPTAAWRWLK

SEQ ID NO: 3524 - protein, 178 aa, Homo Sapiens
MEIKHLLFLVAAACLLPMLSMKKKSARDQFNKLVTDLPNVQEEIVNIHNALRRRVVPPASNMLKMSWSEEAAQNARIFSKYCDMTESNPLERRLPNTFCGENMHMTSYPVSWSSVIGVWYSESTSFKHGEWTTTDDDITTDHYTQIVWATSYLIGCAIASCRQQGSPRYLYVCHYCHD

SEQ ID NO: 3525 - protein, 178 aa, Homo Sapiens; identical to SEQ ID NO: 3524

SEQ ID NO: 3526 - protein, 249 aa, Homo Sapiens
MEIKHLLFLVAAACLLPMLSMKKKSARDQFNKLVTDLPNVQEEIVNIHNALRRRVVPPASNMLKMSWSEEAAQNARIFSKYCDMTESNPLERRLPNTFCGENMHMTSYPVSWSSVIGVWYSESTSFKHGEWTTTDDDITTDHYTQIVWATSYLIGCAIASCRQQGSPRYLYVCHYCHEGNDPETKNEPYKTGVPCEACPSNCEDKLCTNPCIYYDEYFDCDIQVHYLGCNHSTTILFCKATCLCDTEIK

SEQ ID NO: 3527 - protein, 249 aa, Homo Sapiens; identical to SEQ ID NO: 3526

SEQ ID NO: 3528 - protein, 243 aa, Homo Sapiens
MALLPVLFLVTVLLPSLPAEGKDPAFTALLTTQLQVQREIVNKHNELRKAVSPPASNMLKMEWSREVTTNAQRWANKCTLQHSDPEDRKTSTRCGENLYMSSDPTSWSSAIQSWYDEILDFVYGVGPKSPNAVVGHYTQLVWYSTYQVGCGIAYCPNQDSLKYYYVCQYCPAGNNMNRKNTPYQQGTPCAGCPDDCDKGLCTNSCQYQDLLSNCDSLKNTAGCEHELLKEKCKATCLCENKIY

SEQ ID NO: 3529 - protein, 243 aa, Homo Sapiens; identical to SEQ ID NO: 3528

SEQ ID NO: 3530 - protein, 278 aa, Homo Sapiens
MALLPVLFLVTVLLPSLPAEGKDPAFTALLTTQLQVQREIVNKHNELRKAVSPPASNMLKMEWSREVTTNAQRWANKCTLQHSDPEDRKTSTRCGENLYMSSDPTSWSSAIQSWYDEILDFVYGVGPKSPNAVVGHYTQLVWYSTYQVGCGIAYCPNQDSLKYYYVCQYCPAMKTYLNKREGINVWKCFLRLRHFQLLRGEQLLTFSGNNMNRKNTPYQQGTPCAGCPDDCDKGLCTNSCQYQDLLSNCDSLKNTAGCEHELLKEKCKATCLCENKIY

SEQ ID NO: 3531 - protein, 276 aa, Homo Sapiens
MKQILHPALETTACTNHFNADPCSTGFVFPAMTLFPVLLFLVAGLLPSFPANEDKDPAFTALLTTQTQVQREIVNKHNELRRAVSPPARNMLKMEWNKEAAANAQKWANQCNYRHSNPKDRMTSLKCGENLYMSSASSSWSQAIQSWFDEYNDFDFGVGPKTPNAVVGHYTQVVWYSSYLVGCGNAYCPNQKVLKYYYVCQYCPAGNWANRLYVPYEQGAPCASCPDNCDDGLCTNGCKYEDLYSNCKSLKLTLTCKHQLVRDSCKASCNCSNSIY

SEQ ID NO: 3532 - protein, 258 aa, Homo Sapiens
MKQILHPALETTAMTLFPVLLFLVAGLLPSFPANEDKDPAFTALLTTQTQVQREIVNKHNELRRAVSPPARNMLKMEWNKEAAANAQKWANQCNYRHSNPKDRMTSLKCGENLYMSSASSSWSQAIQSWFDEYNDFDFGVGPKTPNAVVGHYTQVVWYSSYLVGCGNAYCPNQKVLKYYYVCQYCPAGNWANRLYVPYEQGAPCASCPDNCDDGLCTNGCKYEDLYSNCKSLKLTLTCKHQLVRDSCKASCNCSNSIY

SEQ ID NO: 3533 - protein, 191 aa, Homo Sapiens
MKQILHPALETTDPCSTGFVFPAMTLFPVLLFLVAGLLPSFPANEDKDPAFTALLTTQTQVQREIVNKHNELRRAVSPPARNMLKMEWNKEAAANAQKWANQCNYRHSNPKDRMTSLKCGENLYMSSASSSWSQAIQSWFDEYNDFDFGVGPKTPNAVVGHYTQVVWYSSYLVGCGNAYCPNQKVLKYYYV

SEQ ID NO: 3534 - protein, 268 aa, Homo Sapiens
MKQILHPALETTDPCSTGFVFPAMTLFPVLLFLVAGLLPSFPANEDKDPAFTALLTTQTQVQREIVNKHNELRRAVSPPARNMLKMEWNKEAAANAQKWANQCNYRHSNPKDRMTSLKCGENLYMSSASSSWSQAIQSWFDEYNDFDFGVGPKTPNAVVGHYTQVVWYSSYLVGCGNAYCPNQKVLKYYYVCQYCPAGNWANRLYVPYEQGAPCASCPDNCDDGLCTNGCKYEDLYSNCKSLKLTLTCKHQLVRDSCKASCNCSNSIY

SEQ ID NO: 3535 - protein, 112 aa, Homo Sapiens
MCTHYTQIVWATTNKIGCAVNTCRKMTVWGEVWENAVYFVCNYSPKGNWIGEAPYKNGRPCSECPPSYGGSCRNNLCYREETYTPKPETDEMNEVETAPIPEENHVWLQPRV

SEQ ID NO: 3536 - protein, 210 aa, Homo Sapiens
MCTHYTQIVWATTNKIGCAVNTCRKMTVWGEVWENAVYFVCNYSPKGNWIGEAPYKNGRPCSECPPSYGGSCRNNLCYREETYTPKPETDEMNEVETAPIPEENHVWLQPRVMRPTKPKKTSAVNYMTQVVRCDTKMKDRCKGSTCNRYQCPAGCLNHKAKIFGTLFYESSSSICRAAIHYGILDDKGGLVDITRNGKVPFFVKSERHGV

SEQ ID NO: 3537 - protein, 19 aa, Homo Sapiens
MSCVLGGVIPLGLLFLVCG

SEQ ID NO: 3538 - protein, 120 aa, Homo Sapiens
MSCVLGGVIPLGLLFLVCGSQGYLLPNVTLLEELLSKYQHNESHSRVRRAIPREDKEEILMLHNKLRGQVQPQASNMEYMTWDDELEKSAAAWASQCIWEHGPTSLLVSIGQNLGAHWGR

SEQ ID NO: 3539 - protein, 497 aa, Homo Sapiens
MSCVLGGVIPLGLLFLVCGSQGYLLPNVTLLEELLSKYQHNESHSRVRRAIPREDKEEILMLHNKLRGQVQPQASNMEYMTWDDELEKSAAAWASQCIWEHGPTSLLVSIGQNLGAHWGRYRSPGFHVQSWYDEVKDYTYPYPSECNPWCPERCSGPMCTHYTQIVWATTNKIGCAVNTCRKMTVWGEVWENAVYFVCNYSPKGNWIGEAPYKNGRPCSECPPSYGGSCRNNLCYREETYTPKPETDEMNEVETAPIPEENHVWLQPRVMRPTKPKKTSAVNYMTQVVRCDTKMKDRCKGSTCNRYQCPAGCLNHKAKIFGTLFYESSSSICRAAIHYGILDDKGGLVDITRNGKVPFFVKSERHGVQSLSKYKPSSSFMVSKVKVQDLDCYTTVAQLCPFEKPATHCPRIHCPAHCKDEPSYWAPVFGTNIYADTSSICKTAVHAGVISNESGGDVDVMPVDKKKTYVGSLRNGVQSESLGTPRDGKAFRIFAVRQ

SEQ ID NO: 3540 - protein, 449 aa, Homo Sapiens
MSCVLGGVIPLGLLFLVCGSQGYLLPNVTLLEELLSKYQHNESHSRVRRAIPREDKEEILMLHNKLRGQVQPQASNMEYMTWDDELEKSAAAWASQCIWEHGPTSLLVSIGQNLGAHWGRYRSPGFHVQSWYDEVKDYTYPYPSECNPWCPERCSGPMCTHYTQIVWATTNKIGCAVNTCRKMTVWGEVWENAVYFVCNYSPKGNWIGEAPYKNGRPCSECPPSYGGSCRNNLCYREETYTPKPETDEMNEVETAPIPEENHVWLQPRVMRPTKPKKTSAVNYMTQVVRCDTKMKDRCKGSTCNRYQCPAGCLNHKAKIFGTLFYESSSSICRAAIHYGILDDKGGLVDITRNGKVPFFVKSERHGVQSLSKYKPSSSFMVSKVKVQDLDCYTTVAQLCPFEKPATHCPRIHCPAHCKDEPSYWAPVFGTNIYADVSRMHFQQLSRKAC

SEQ ID NO: 3541 - protein, 496 aa, Homo Sapiens
MSCVLGGVIPLGLLFLVCGSQGYLLPNVTLLEELLSKYQHNESHSRVRRAIPREDKEEILMLHNKLRGQVQPQASNMEYMTWDDELEKSAAAWASQCIWEHGPTSLLVSIGQNLGAHWGRYRSPGFHVQSWYDEVKDYTYPYPSECNPWCPERCSGPMCTHYTQIVWATTNKIGCAVNTCRKMTVWGEVWENAVYFVCNYSPKGNWIGEAPYKNGRPCSECPPSYGGSCRNNLCYRETYTPKPETDEMNEVETAPIPEENHVWLQPRVMRPTKPKKTSAVNYMTQVVRCDTKMKDRCKGSTCNRYQCPAGCLNHKAKIFGTLFYESSSSICRAAIHYGILDDKGGLVDITRNGKVPFFVKSERHGVQSLSKYKPSSSFMVSKVKVQDLDCYTTVAQLCPFEKPATHCPRIHCPAHCKDEPSYWAPVFGTNIYADTSSICKTAVHAGVISNESGGDVDVMPVDKKKTYVGSLRNGVQSESLGTPRDGKAFRIFAVRQ

SEQ ID NO: 3542 - protein, 43 aa, Homo Sapiens
  misc_feature (1)..(1): Xaa can be any naturally occurring amino acid
XKTAVHAGVISNESGGDVDVMPVDKKKTYVGSLRNGVQSERNM

SEQ ID NO: 3543 - protein, 422 aa, Homo Sapiens
MPAGRRGPAAQSARRPPPLLPLLLLLCVLGAPRAGSGAHTAVISPQDPTLLIGSSLLATCSVHGDPPGATAEGLYWTLNGRRLPPELSRVLNASTLALALANLNGSRQRSGDNLVCHARDGSILAGSCLYVGLPPEKPVNISCWSKNMKDLTCRWTPGAHGETFLHTNYSLKYKLRWYGQDNTCEEYHTVGPHSCHIPKDLALFTPYEIWVEATNRLGSARSDVLTLDILDVVTTDPPPDVHVSRVGGLEDQLSVRWVSPPALKDFLFQAKYQIRYRVEDSVDWKVVDDVSNQTSCRLAGLKPGTVYFVQVRCNPFGIYGSKKAGIWSEWSHPTAASTPRSERPGPGGGACEPRGGEPSSGPVRRELKQFLGWLKKHAYCSNLSFRLYDQWRAWMQKSHKTRNQDEGILPSGRRGTARGPAR

SEQ ID NO: 3544 - protein, 173 aa, Homo Sapiens
  misc_feature (1)..(1): Xaa can be any naturally occurring amino acid
XQDNTCEEYHTVGPHSCHIPKDLALFTPYEIWVEATNRLGSARSDVLTLDILDVVTTDPPPDVHVSRVGGLEDQLSVRWVSPPALKDFLFQAKYQIRYRVEDSVDWKVVDDVSNQTSCRLAGLKPGTVYFVQVRCNPFGIYGSKKAGIWKRPGPGGGACEPRGGEPSSGPVRR

SEQ ID NO: 3545 - protein, 102 aa, Homo Sapiens
MEKLLCFLVLTSLSHAFGQTDMSRKAFVFPKESDTSYVSLKAPLTKPLKAFTVCLHFYTELSSTHEINTIYLGGPFSPNVLNWRALKYEVQGEVFTKPQLWP

SEQ ID NO: 3546 - protein, 102 aa, Homo Sapiens; identical to SEQ ID NO: 3545

SEQ ID NO: 3547 - protein, 91 aa, Homo Sapiens
MEKLLCFLVLTSLSHAFGQTDMSRKAFVFPKESDTSYVSLKAPLTKPLKAFTVCLHFYTELSSTRGPNVLNWRALKYEVQGEVFTKPQLWP

SEQ ID NO: 3548 - protein, 224 aa, Homo Sapiens
MEKLLCFLVLTSLSHAFGQTDMSRKAFVFPKESDTSYVSLKAPLTKPLKAFTVCLHFYTELSSTRGYSIFSYATKRQDNEILIFWSKDIGYSFTVGGSEILFEVPEVTVAPVHICTSWESASGIVEFWVDGKPRVRKSLKKGYTVGAEASIILGQEQDSFGGNFEGSQSLVGDIGNVNMWDFVLSPDEINTIYLGGPFSPNVLNWRALKYEVQGEVFTKPQLWP

SEQ ID NO: 3549 - protein, 46 aa, Homo Sapiens
MWDFVLSPDEINTIYLGGPFSPNVLNWRALKYEVQGEVFTKPQLWP

SEQ ID NO: 3550 - protein, 645 aa, Homo Sapiens
MAPSADPGMSRMLPFLLLLWFLPITEGSQRAEPMFTAVTNSVLPPDYDSNPTQLNYGVAVTDVDHDGDFEIVVAGYNGPNLVLKYDRAQKRLVNIAVDERSSPYYALRDRQGNAIGVTACDIDGDGREEIYFLNTNNAFSGVATYTDKLFKFRNNRWEDILSDEVNVARGVASLFAGRSVACVDRKGSGRYSIYIANYAYGNVGPDALIEMDPEASDLSRGILALRDVAAEAGVSKYTGGRGVSVGPILSSSASDIFCDNENGPNFLFHNRGDGTFVDAAASAGVDDPHQHGRGVALADFNRDGKVDIVYGNWNGPHRLYLQMSTHGKVRFRDIASPKFSMPSPVRTVITADFDNDQELEIFFNNIAYRSSSANRLFRVIRREHGDPLIEELNPGDALEPEGRGTGGVVTDFDGDGMLDLILSHGESMAQPLSVFRGNQGFNNNWLRVVPRTRFGAFARGAKVVLYTKKSGAHLRIIDGGSGYLCEMEPVAHFGLGKDEASSVEVTWPDGKMVSRNVASGEMNSVLEILYPRDEDTLQDPAPLECGQGFSQQENGHCMDTNECIQFPFVCPRDKPVCVNTYGSYRCRTNKKCSRGYEPNEDGTACVAQVAFLGGYSSAASRISEPLSRASYLSLGLGLCLQLYAL

SEQ ID NO: 3551 - protein, 661 aa, Homo Sapiens
MAPSADPGMSRMLPFLLLLWFLPITEGSQRAEPMFTAVTNSVLPPDYDSNPTQLNYGVAVTDVDHDGDFEIVVAGYNGPNLVLKYDRAQKRLVNIAVDERSSPYYALRDRQGNAIGVTACDIDGDGREEIYFLNTNNAFSGVATYTDKLFKFRNNRWEDILSDEVNVARGVASLFAGRSVACVDRKGSGRYSIYIANYAYGNVGPDALIEMDPEASDLSRGILALRDVAAEAGVSKYTGGRGVSVGPILSSSASDIFCDNENGPNFLFHNRGDGTFVDAAASAGVDDPHQHGRGVALADFNRDGKVDIVYGNWNGPHRLYLQMSTHGKVRFRDIASPKFSMPSPVRTVITADFDNDQELEIFFNNIAYRSSSANRLFRVIRREHGDPLIEELNPGDALEPEGRGTGGVVTDFDGDGMLDLILSHGESMAQPLSVFRGNQGFNNNWLRVVPRTRFGAFARGAKVVLYTKKSGAHLRIIDGGSGYLCEMEPVAHFGLGKDEASSVEVTWPDGKMVSRNVASGEMNSVLEILYPRDEDTLQDPAPLECGQGFSQQENGHCMDTNECIQFPFVCPRDKPVCVNTYGSYRCRTNKKCSRGYEPNEDGTACVGTLGQSPGPRPTTPTAAAATAAAAAAAGAATAAPVLVDGDLNLGSVVKESCEPSC

SEQ ID NO: 3552 - protein, 637 aa, Homo Sapiens
MSRMLPFLLLLWFLPITEGSQRAEPMFTAVTNSVLPPDYDSNPTQLNYGVAVTDVDHDGDFEIVVAGYNGPNLVLKYDRAQKRLVNIAVDERSSPYYALRDRQGNAIGVTACDIDGDGREEIYFLNTNNAFSGVATYTDKLFKFRNNRWEDILSDEVNVARGVASLFAGRSVACVDRKGSGRYSIYIANYAYGNVGPDALIEMDPEASDLSRGILALRDVAAEAGVSKYTGGRGVSVGPILSSSASDIFCDNENGPNFLFHNRGDGTFVDAAASAGVDDPHQHGRGVALADFNRDGKVDIVYGNWNGPHRLYLQMSTHGKVRFRDIASPKFSMPSPVRTVITADFDNDQELEIFFNNIAYRSSSANRLFRVIRREHGDPLIEELNPGDALEPEGRGTGGVVTDFDGDGMLDLILSHGESMAQPLSVFRGNQGFNNNWLRVVPRTRFGAFARGAKVVLYTKKSGAHLRIIDGGSGYLCEMEPVAHFGLGKDEASSVEVTWPDGKMVSRNVASGEMNSVLEILYPRDEDTLQDPAPLECGQGFSQQENGHCMDTNECIQFPFVCPRDKPVCVNTYGSYRCRTNKKCSRGYEPNEDGTACVAQVAFLGGYSSAASRISEPLSRASYLSLGLGLCLQLYAL

SEQ ID NO: 3553 - protein, 79 aa, Homo Sapiens
  misc_feature (1)..(1): Xaa can be any naturally occurring amino acid
XDEDTLQDPAPLETPMNASSSHSCALETSPYVSTPMEATGAGPTRSAVGATSPTRMAQPAWKEPCYLVSAISLENRMLL

SEQ ID NO: 3554 - protein, 524 aa, Homo Sapiens
YALRDRQGNAIGVTACDIDGDGREEIYFLNTNNAFSGVATYTDKLFKFRNNRWEDILSDEVNVARGVASLFAGRSVACVDRKGSGRYSIYIANYAYGNVGPDALIEMDPEASDLSRGILALRDVAAEAGVSKYTGGRGVSVGPILSSSASDIFCDNENGPNFLFHNRGDGTFVDAAASAGVDDPHQHGRGVALADFNRDGKVDIVYGNWNGPHRLYLQMSTHGKVRFRDIASPKFSMPSPVRTVITADFDNDQELEIFFNNIAYRSSSANRLFRVIRREHGDPLIEELNPGDALEPEGRGTGGVVTDFDGDGMLDLILSHGESMAQPLSVFRGNQGFNNNWLRVVPRTRFGAFARGAKVVLYTKKSGAHLRIIDGGSGYLCEMEPVAHFGLGKDEASSVEVTWPDGKMVSRNVASGEMNSVLEILYPRDEDTLQDPAPLETPMNASSSHSCALETSPYVSTPMEATGAGPTRSAVGATSPTRMAQPAWGLSASHRAPAPPPPPLLLPLPLLLPLLELPLLHRSS

SEQ ID NO: 3555 - protein, 401 aa, Homo Sapiens
MEPGRRGAAALLALLCVACALRAGRAQYERYSFRSFPRDELMPLESAYRHALDKYSGEHWAESVGYLEISLRLHRLLRDSEAFCHRNCSAAPQPEPAAGLASYPELRLFGGLLRRAHCLKRCKQGLPAFRQSQPSREVLADFQRREPYKFLQFAYFKANNLPKAIAAAHTFLLKHPDDEMMKRNMAYYKSLPGAEDYIKDLETKSYESLFIRAVRAYNGENWRTSITDMELALPDFFKAFYECLAACEGSREIKDFKDFYLSIADHYVEVLECKIQCEENLTPVIGGYPVEKFVATMYHYLQFAYYKLNDLKNAAPCAVSYLLFDQNDKVMQQNLVYYQYHRDTWGLSDEHFQPRPEAVQFFNVTTLQKELYDFAKENIMDDDEGEVVEYVDDLLELEETS

SEQ ID NO: 3556 - protein, 358 aa, Homo Sapiens
MEPGRRGAAALLALLCVACALRAGRAQYERYSFRSFPRDELMPLESAYRHALDKYSGEHWAESVGYLEISLRLHRLLRDSEAFCHRNCSAAPQPEPAAGLASYPELRLFGGLLRRAHCLKRCKQGLPAFRQSQPSREVLADFQRREPYKFLQFAYFKANNLPKAIAAAHTFLLKHPDDEMMKRNMAYYKSLPGAEDYIKDLETKSYESLFIRAVRAYNGENWRTSITDMELALPDFFKAFYECLAACEGSREIKDFKDFYLSIAVNDLKNAAPCAVSYLLFDQNDKVMQQNLVYYQYHRDTWGLSDEHFQPRPEAVQFFNVTTLQKELYDFAKENIMDDDEGEVVEYVDDLLELEETS

SEQ ID NO: 3557 - protein, 593 aa, Homo Sapiens
MAATVATAAAVAPAPAPGTDSASSVHWFRKGLRLHDNPALLAAVRGARCVRCVYILDPWFAASSSVGINRWRFLLQSLEDLDTSLRKLNSRLFVVRGQPADVFPRLFKEWGVTRLTFEYDSEPFGKERDAAIMKMAKEAGVEVVTENSHTLYDLDRIIELNGQKPPLTYKRFQAIISRMELPKKPVGLVTSQQMESCRAEIQENHDETYGVPSLEELGFPTEGLGPAVWQGGETEALARLDKHLERKAWVANYERPRMNANSLLASPTGLSPYLRFGCLSCRLFYYRLWDLYKKVKRNSTPPLSLFGQLLWREFFYTAATNNPRFDRMEGNPICIQIPWDRNPEALAKWAEGKTGFPWIDAIMTQLRQEGWIHHLARHAVACFLTRGDLWVSWESGVRVFDELLLDADFSVNAGSWMWLSCSAFFQQFFHCYCPVGFGRRTDPSGDYIRRYLPKLKAFPSRYIYEPWNAPESIQKAAKCIIGVDYPRPIVNHAETSRLNIERMKQIYQQLSRYRGLCLLASVPSCVEDLSHPVAEPSSSQAGSMSSAGPRPLPSGPASPKRKLEAAEEPPGEELSKRARVAELPTPELPSKDA

SEQ ID NO: 3558 - protein, 614 aa, Homo Sapiens
MGGVHVAYRGGAGVAGAVWTVMAATVATAAAVAPAPAPGTDSASSVHWFRKGLRLHDNPALLAAVRGARCVRCVYILDPWFAASSSVGINRWRFLLQSLEDLDTSLRKLNSRLFVVRGQPADVFPRLFKEWGVTRLTFEYDSEPFGKERDAAIMKMAKEAGVEVVTENSHTLYDLDRIIELNGQKPPLTYKRFQAIISRMELPKKPVGLVTSQQMESCRAEIQENHDETYGVPSLEELGFPTEGLGPAVWQGGETEALARLDKHLERKAWVANYERPRMNANSLLASPTGLSPYLRFGCLSCRLFYYRLWDLYKKVKRNSTPPLSLFGQLLWREFFYTAATNNPRFDRMEGNPICIQIPWDRNPEALAKWAEGKTGFPWIDAIMTQLRQEGWIHHLARHAVACFLTRGDLWVSWESGVRVFDELLLDADFSVNAGSWMWLSCSAFFQQFFHCYCPVGFGRRTDPSGDYIRRYLPKLKAFPSRYIYEPWNAPESIQKAAKCIIGVDYPRPIVNHAETSRLNIERMKQIYQQLSRYRGLCLLASVPSCVEDLSHPVAEPSSSQAGSMSSAGPRPLPSGPASPKRKLEAAEEPPGEELSKRARVAELPTPELPSKDA

SEQ ID NO: 3559 - protein, 614 aa, Homo Sapiens; identical to SEQ ID NO: 3558

SEQ ID NO: 3560 - protein, 532 aa, Homo Sapiens
MPAPPGRTHTWFLLQSLEDLDTSLRKLNSRLFVVRGQPADVFPRLFKEWGVTRLTFEYDSEPFGKERDAAIMKMAKEAGVEVVTENSHTLYDLDRIIELNGQKPPLTYKRFQAIISRMELPKKPVGLVTSQQMESCRAEIQENHDETYGVPSLEELGFPTEGLGPAVWQGGETEALARLDKHLERKAWVANYERPRMNANSLLASPTGLSPYLRFGCLSCRLFYYRLWDLYKKVKRNSTPPLSLFGQLLWREFFYTAATNNPRFDRMEGNPICIQIPWDRNPEALAKWAEGKTGFPWIDAIMTQLRQEGWIHHLARHAVACFLTRGDLWVSWESGVRVFDELLLDADFSVNAGSWMWLSCSAFFQQFFHCYCPVGFGRRTDPSGDYIRRYLPKLKAFPSRYIYEPWNAPESIQKAAKCIIGVDYPRPIVNHAETSRLNIERMKQIYQQLSRYRGLCLLASVPSCVEDLSHPVAEPSSSQAGSMSSAGPRPLPSGPASPKRKLEAAEEPPGEELSKRARVAELPTPELPSKDA

SEQ ID NO: 3561 - protein, 142 aa, Homo Sapiens
IQKGTSVSQKVCEWKEPEELKQLLDLELRSQGESQKQILERCRAVIRYSVKTGHPRFFNQLFSGLDPHALAGRIITESLNTSQYTYEIAPVFVLMEEEVLRKLRALVGWSSGDGIFCPVSLLHPEGSCVSGTWHRQCPSGQG

SEQ ID NO: 3562 - protein, 135 aa, Homo Sapiens
MADSEALPSLAGDPVAVEALLRAVFGVVVDEAIQKGTSVSQKCHYSIQKGAAFLGLGTDSVRVVKADERGKMVPEDLERQIGMAEAEGAVPFLVSATSGTTVLGAFDPLEAIADVCQRHGLWLHVDAAWGGSVLL

SEQ ID NO: 3563 - protein, 346 aa, Homo Sapiens
MADSEALPSLAGDPVAVEALLRAVFGVVVDEAIQKGTSVSQKCHYSIQKGAAFLGLGTDSVRVVKADERGKMVPEDLERQIGMAEAEGAVPFLVSATSGTTVLGAFDPLEAIADVCQRHGLWLHVDAAWGGSVLLSQTHRHLLDGIQRADSVAWNPHKLLAAGLQCSALLLQDTSNLLKRCHGSQASYLFQQDKFYDVALDTGDKVVQCGRRVDCLKLWLMWKAQGDQGLERRIDQAFVLARYLVEEMKKREGFELVMEPEFVNVCFWFVPPSLRGKQESPDYHERLSKVAPVLKERMVKEGSMMIGYQPHGTRGNFFRVVVANSALTCADMDFLLNELERLGQDL

SEQ ID NO: 3564 - protein, 129 aa, Homo Sapiens
MADSEALPSLAGDPVAVEALLRAVFGVVVDEAIQKGTSVSQKVCEWKEPEELKQLLDLELRSQGESQKQILERCRAVIRYSVKTGHPRFFNQLFSGLDPHALAGRIITESLNTSQYTYEIAPVFVLMEE

SEQ ID NO: 3565 - protein, 146 aa, Homo Sapiens
MADSEALPSLAGDPVAVEALLRAVFGVVVDEAIQKGTSVSQKVCEWKEPEELKQLLDLELRSQGESQKQILERCRAVIRYSVKTGHPRFFNQLFSGLDPHALAGRIITESLNTSQYTYEIAPVFVLMEEEVLRKLRALVGWSSGDG

SEQ ID NO: 3566 - protein, 163 aa, Homo Sapiens
MADSEALPSLAGDPVAVEALLRAVFGVVVDEAIQKGTSVSQKVCEWKEPEELKQLLDLELRSQGESQKQILERCRAVIRYSVKTGHPRFFNQLFSGLDPHALAGRIITESLNTSQYTYEIAPVFVLMEEEVLRKLRALVGWSSGDGIFCPGGSISNMYAVNLA

SEQ ID NO: 3567 - protein, 493 aa, Homo Sapiens
MADSEALPSLAGDPVAVEALLRAVFGVVVDEAIQKGTSVSQKVCEWKEPEELKQLLDLELRSQGESQKQILERCRAVIRYSVKTGHPRFFNQLFSGLDPHALAGRIITESLNTSQYTYEIAPVFVLMEEEVLRKLRALVGWSSGDGIFCPGGSISNMYAVNLARYQRYPDCKQRGLRTLPPLALFTSKECHYSIQKGAAFLGLGTDSVRVVKADERGKMVPEDLERQIGMAEAEGAVPFLVSATSGTTVLGAFDPLEAIADVCQRHGLWLHVDAAWGGSVLLSQTHRHLLDGIQRADSVAWNPHKLLAAGLQCSALLLQDTSNLLKRCHGSQASYLFQQDKFYDVALDTGDKVVQCGRRVDCLKLWLMWKAQGDQGLERRIDQAFVLARYLVEEMKKREGFELVMEPEFVNVCFWFVPPSLRGKQESPDYHERLSKVAPVLKERMVKEGSMMIGYQPHGTRGNFFRVVVANSALTCADMDFLLNELERLGQDL

SEQ ID NO: 3568 - protein, 493 aa, Homo Sapiens; identical to SEQ ID NO: 3567

SEQ ID NO: 3569 - protein, 267 aa, Homo Sapiens
MADSEALPSLAGDPVAVEALLRAVFGVVVDEAIQKGTSVSQKVCEWKEPEELKQLLDLELRSQGESQKQILERCRAVIRYSVKTGHPRFFNQLFSGLDPHALAGRIITESLNTSQYTYEIAPVFVLMEEEVLRKLRALVGWSSGDGIFCPGGSISNMYAVNLARYQRYPDCKQRGLRTLPPLALFTSKEVGKRHRPNPGLLILISSHVTTPSRRELRFWDLAPTVSEWSRLMREGKWSPRIWRGRLVWPRLRVLCRSWSVPPLAPLC

SEQ ID NO: 3570 - protein, 267 aa, Homo Sapiens; identical to SEQ ID NO: 3569

SEQ ID NO: 3571 - protein, 45 aa, Homo Sapiens
MADSEALPSLAGDPVAVEALLRAVFGVVVDEAIQKGTSVSQKVHI

SEQ ID NO: 3572 - protein, 520 aa, Homo Sapiens
MSIPLKSSFLLSYLCTLPPALLSREILMADSEALPSLAGDPVAVEALLRAVFGVVVDEAIQKGTSVSQKVCEWKEPEELKQLLDLELRSQGESQKQILERCRAVIRYSVKTGHPRFFNQLFSGLDPHALAGRIITESLNTSQYTYEIAPVFVLMEEEVLRKLRALVGWSSGDGIFCPGGSISNMYAVNLARYQRYPDCKQRGLRTLPPLALFTSKECHYSIQKGAAFLGLGTDSVRVVKADERGKMVPEDLERQIGMAEAEGAVPFLVSATSGTTVLGAFDPLEAIADVCQRHGLWLHVDAAWGGSVLLSQTHRHLLDGIQRADSVAWNPHKLLAAGLQCSALLLQDTSNLLKRCHGSQASYLFQQDKFYDVALDTGDKVVQCGRRVDCLKLWLMWKAQGDQGLERRIDQAFVLARYLVEEMKKREGFELVMEPEFVNVCFWFVPPSLRGKQESPDYHERLSKVAPVLKERMVKEGSMMIGYQPHGTRGNFFRVVVANSALTCADMDFLLNELERLGQDL

SEQ ID NO: 3573 - protein, 519 aa, Homo Sapiens
  misc_feature (1)..(1): Xaa can be any naturally occurring amino acid
XLGDARRGAAGYLCTLPPALLSREILMADSEALPSLAGDPVAVEALLRAVFGVVVDEAIQKGTSVSQKVCEWKEPEELKQLLDLELRSQGESQKQILERCRAVIRYSVKTGHPRFFNQLFSGLDPHALAGRIITESLNTSQYTYEIAPVFVLMEEEVLRKLRALVGWSSGDGIFCPGGSISNMYAVNLARYQRYPDCKQRGLRTLPPLALFTSKECHYSIQKGAAFLGLGTDSVRVVKADERGKMVPEDLERQIGMAEAEGAVPFLVSATSGTTVLGAFDPLEAIADVCQRHGLWLHVDAAWGGSVLLSQTHRHLLDGIQRADSVAWNPHKLLAAGLQCSALLLQDTSNLLKRCHGSQASYLFQQDKFYDVALDTGDKVVQCGRRVDCLKLWLMWKAQGDQGLERRIDQAFVLARYLVEEMKKREGFELVMEPEFVNVCFWFVPPSLRGKQESPDYHERLSKVAPVLKERMVKEGSMMIGYQPHGTRGNFFRVVVANSALTCADMDFLLNELERLGQDL

SEQ ID NO: 3574 - protein, 150 aa, Homo Sapiens
MGWGRLQRISLPSQCLSLLSTWLGSLLLLVCLLASRSITEEVSEYCSHMIGSGHLQSLQRLIDSQMETSCQITFEFVDQEQLKDPVCYLKKAFLLVQDIMEDTMRFRDNTPNAIAIVQLQELSLRLKSCFTKDYEEHDKACVRTFYETPL

SEQ ID NO: 3575 - protein, 113 aa, Homo Sapiens
MIGSGHLQSLQRLIDSQMETSCQITFEFVDQEQLKDPVCYLKKAFLLVQDIMEDTMRFRDNTPNAIAIVQLQELSLRLKSCFTKDYEEHDKACVRTFYETPLQLLEKVKNVFN

SEQ ID NO: 3576 - protein, 285 aa, Homo Sapiens
MTAPGAAGRCPPTIDSQMETSCQITFEFVDQEQLKDPVCYLKKAFLLVQDIMEDTMRFRDNTPNAIAIVQLQELSLRLKSCFTKDYEEHDKACVRTFYETPLQLLEKVKNVFNETKNLLDKDWNIFSKNCNNSFAECSSQDVVTKPDCNCLYPKAIPSSDPASVSPHQPLAPSMAPVAGLTWEDSEGTEGSSLLPGEQPLHTVDPGSAKQRPPRSTCQSFEPPETPVVKDSTIGGSPQPRPSVGAFNPGMEDILDSAMGTNWVPEEASGEASEIPVPQGTELSPS

SEQ ID NO: 3577 - protein, 119 aa, Homo Sapiens
MTAPGAAGRCPPTTWLGSLLLLVCLLASRSITEEVSEYCSHMIGSGHLQSLQRLIDSQMETSCQITFEFVDQEQLKDPVCYLKKAFLLVQDIMEDTMRFRDNTPNAIAIVQLQELSLRL

SEQ ID NO: 3578 - protein, 554 aa, Homo Sapiens
MTAPGAAGRCPPTTWLGSLLLLVCLLASRSITEEVSEYCSHMIGSGHLQSLQRLIDSQMETSCQITFEFVDQEQLKDPVCYLKKAFLLVQDIMEDTMRFRDNTPNAIAIVQLQELSLRLKSCFTKDYEEHDKACVRTFYETPLQLLEKVKNVFNETKNLLDKDWNIFSKNCNNSFAECSSQDVVTKPDCNCLYPKAIPSSDPASVSPHQPLAPSMAPVAGLTWEDSEGTEGSSLLPGEQPLHTVDPGSAKQRPPRSTCQSFEPPETPVVKDSTIGGSPQPRPSVGAFNPGMEDILDSAMGTNWVPEEASGEASEIPVPQGTELSPSRPGGGSMQTEPARPSNFLSASSPLPASAKGQQPADVTGTALPRVGPVRPTGQDWNHTPQKTDHPSALLRDPPEPGSPRISSLRPQGLSNPSTLSAQPQLSRSHSSGSVLPLGELEGRRSTRDRRSPAEPEGGPASEGAARPLPRFNSVPLTDTGHERQSEGSFSPQLQESVFHLLVPSVILVLLAVGGLLFYRWRRRSHQEPQRADSPLEQPEGSPLTQDDRQVELPV

SEQ ID NO: 3579 - protein, 554 aa, Homo Sapiens; identical to SEQ ID NO: 3578

SEQ ID NO: 3580 - protein, 438 aa, Homo Sapiens
MTAPGAAGRCPPTTWLGSLLLLVCLLASRSITEEVSEYCSHMIGSGHLQSLQRLIDSQMETSCQITFEFVDQEQLKDPVCYLKKAFLLVQDIMEDTMRFRDNTPNAIAIVQLQELSLRLKSCFTKDYEEHDKACVRTFYETPLQLLEKVKNVFNETKNLLDKDWNIFSKNCNNSFAECSSQDVVTKPDCNCLYPKAIPSSDPASVSPHQPLAPSMAPVAGLTWEDSEGTEGSSLLPGEQPLHTVDPGSAKQRPPRSTCQSFEPPETPVVKDSTIGGSPQPRPSVGAFNPGMEDILDSAMGTNWVPEEASGEASEIPVPQGTELSPSRPGGGSMQTEPARPSNFLSASSPLPASAKGQQPADVTGHERQSEGSFSPQLQESVFHLLVPSVILVLLAVGGLLFYRWRRRSHQEPQRADSPLEQPEGSPLTQDDRQVELPV

SEQ ID NO: 3581 - protein, 256 aa, Homo Sapiens
MTAPGAAGRCPPTTWLGSLLLLVCLLASRSITEEVSEYCSHMIGSGHLQSLQRLIDSQMETSCQITFEFVDQEQLKDPVCYLKKAFLLVQDIMEDTMRFRDNTPNAIAIVQLQELSLRLKSCFTKDYEEHDKACVRTFYETPLQLLEKVKNVFNETKNLLDKDWNIFSKNCNNSFAECSSQGHERQSEGSFSPQLQESVFHLLVPSVILVLLAVGGLLFYRWRRRSHQEPQRADSPLEQPEGSPLTQDDRQVELPV

SEQ ID NO: 3582 - protein, 64 aa, Homo Sapiens
AGSPWALGQRPFGAQGLKGPVCVAATAHADEKEALMSELKIMSHLGQHENIVNLLGACTHGGIS

SEQ ID NO: 3583 - protein, 972 aa, Homo Sapiens
MGPGVLLLLLVATAWHGQGIPVIEPSVPELVVKPGATVTLRCVGNGSVEWDGPPSPHWTLYSDGSSSILSTNNATFQNTGTYRCTEPGDPLGGSAAIHLYVKDPARPWNVLAQEVVVFEDQDALLPCLLTDPVLEAGVSLVRVRGRPLMRHTNYSFSPWHGFTIHRAKFIQSQDYQCSALMGGRKVMSISIRLKVQKVIPGPPALTLVPAELVRIRGEAAQIVCSASSVDVNFDVFLQHNNTKLAIPQQSDFHNNRYQKVLTLNLDQVDFQHAGNYSCVASNVQGKHSTSMFFRVVESAYLNLSSEQNLIQEVTVGEGLNLKVMVEAYPGLQGFNWTYLGPFSDHQPEPKLANATTKDTYRHTFTLSLPRLKPSEAGRYSFLARNPGGWRALTFELTLRYPPEVSVIWTFINGSGTLLCAASGYPQPNVTWLQCSGHTDRCDEAQVLQVWDDPYPEVLSQEPFHKVTVQSLLTVETLEHNQTYECRAHNSVGSGSWAFIPISAGAHTHPPDEFLFTPVVVACMSIMALLLLLLLLLLYKYKQKPKYQVRWKIIESYEGNSYTFIDPTQLPYNEKWEFPRNNLQFGKTLGAGAFGKVVEATAFGLGKEDAVLKVAVKMLKSTAHADEKEALMSELKIMSHLGQHENIVNLLGACTHGGPVLVITEYCCYGDLLNFLRRKAEAMLGPSLSPGQDPEGGVDYKNIHLEKKYVRRDSGFSSQGVDTYVEMRPVSTSSNDSFSEQDLDKEDGRPLELRDLLHFSSQVAQGMAFLASKNCIHRDVAARNVLLTNGHVAKIGDFGLARDIMNDSNYIVKGNARLPVKWMAPESIFDCVYTVQSDVWSYGILLWEIFSLGLNPYPGILVNSKFYKLVKDGYQMAQPAFAPKNIYSIMQACWALEPTHRPTFQQICSFLQEQAQEDRRERDYTNLPSSSRSGGSGSSSSELEEESSSEHLTCCEQGDIAQPLLQPNNYQFC

SEQ ID NO: 3584 - protein, 671 aa, Homo Sapiens
MGPGVLLLLLVATAWHGQGIPVIEPSVPELVVKPGATVTLRCVGNGSVEWDGPPSPHWTLYSDGSSSILSTNNATFQNTGTYRCTEPGDPLGGSAAIHLYVKDPARPWNVLAQEVVVFEDQDALLPCLLTDPVLEAGVSLVRVRGRPLMRHTNYSFSPWHGFTIHRAKFIQSQDYQCSALMGGRKVMSISIRLKVQKVIPGPPALTLVPAELVRIRGEAAQIVCSASSVDVNFDVFLQHNNTKLAIPQQSDFHNNRYQKVLTLNLDQVDFQHAGNYSCVASNVQGKHSTSMFFRVVESAYLNLSSEQNLIQEVTVGEGLNLKVMVEAYPGLQGFNWTYLGPFSDHQPEPKLANATTKDTYRHTFTLSLPRLKPSEAGRYSFLARNPGGWRALTFELTLRYPPEVSVIWTFINGSGTLLCAASGYPQPNVTWLQCSGHTDRCDEAQVLQVWDDPYPEVLSQEPFHKVTVQSLLTVETLEHNQTYECRAHNSVGSGSWAFIPISAGAHTHPPDEFLFTPVVVACMSIMALLLLLLLLLLYKYKQKPKYQVRWKIIESYEGNSYTFIDPTQLPYNEKWEFPRNNLQFGKTLGAGAFGKVVEATAFGLGKEDAVLKVAVKMLKSTAHADEKEALMSELKIMSHLGQHENIVNLLGACTHGGTVASPARVWTPMWR

SEQ ID NO: 3585 - protein, 306 aa, Homo Sapiens
MGPGVLLLLLVATAWHGQGIPVIEPSVPELVVKPGATVTLRCVGNGSVEWDGPPSPHWTLYSDGSSSILSTNNATFQNTGTYRCTEPGDPLGGSAAIHLYVKDPARPWNVLAQEVVVFEDQDALLPCLLTDPVLEAGVSLVRVRGRPLMRHTNYSFSPWHGFTIHRAKFIQSQDYQCSALMGGRKVMSISIRLKVQKVIPGPPALTLVPAELVRIRGEAAQIVCSASSVDVNFDVFLQHNNTKLAIPQQSDFHNNRYQKVLTLNLDQVDFQHAGNYSCVASNVQGKHSTSMFFRVVGTPSPSLCPA

SEQ ID NO: 3586 - protein, 49 aa, Homo Sapiens
MRHTNYSFSPWHGFTIHRAKFIQSQDYQCSALMGGRKVMSISIRLKVQK

SEQ ID NO: 3587 - protein, 144 aa, Homo Sapiens
MWLQSLLLLGTVACSISAPARSPSPSTQPWEHVNAIQEARRLLNLSRDTAAEMNETVEVISEMFDLQEPTCLQTRLELYKQGLRGSLTKLKGPLTMMASHYKQHCPPTPETSCATQIITFESFKENLKDFLLVIPFDCWEPVQE

SEQ ID NO: 3588 - protein, 238 aa, Homo Sapiens
MLLLVTSLLLCELPHPAFLLIPEKSDLRTVAPASSLNVRFDSRTMNLSWDCQENTTFSKCFLTDKKNRVVEPRLSNNECSCTFREICLHEGVTFEVHVNTSQRGFQQKLLYPNSGREGTAAQNFSCFIYNADLMNCTWARGPTAPRDVQYFLYIRNSKRRREIRCPYYIQDSGTHVGCHLDNLSGLTSRNYFLVNGTSREIGIQFFDSLLDTKKIERFNPPSNVTVRCNTTHCLVRWK

SEQ ID NO: 3589 - protein, 377 aa, Homo Sapiens
MLLLVTSLLLCELPHPAFLLIPEKSDLRTVAPASSLNVRFDSRTMNLSWDCQENTTFSKCFLTDKKNRVVEPRLSNNECSCTFREICLHEGVTFEVHVNTSQRGFQQKLLYPNSGREGTAAQNFSCFIYNADLMNCTWARGPTAPRDVQYFLYIRNSKRRREIRCPYYIQDSGTHVGCHLDNLSGLTSRNYFLVNGTSREIGIQFFDSLLDTKKIERFNPPSNVTVRCNTTHCLVRWKQPRTYQKLSYLDFQYQLDVHRKNTQPGTENLLINVSGDLENRYNFPSSEPRAKHSVKIRAADVRILNWSSWSEAIEFDHLGGIHPRGRERLPRRGLDREGNYLRPRGCRNGMDISASATRGNCFLDDAVNLYIIFYVFI

SEQ ID NO: 3590 - protein, 410 aa, Homo Sapiens
MLLLVTSLLLCELPHPAFLLIPEKSDLRTVAPASSLNVRFDSRTMNLSWDCQENTTFSKCFLTDKKNRVVEPRLSNNECSCTFREICLHEGVTFEVHVNTSQRGFQQKLLYPNSGREGTAAQNFSCFIYNADLMNCTWARGPTAPRDVQYFLYIRNSKRRREIRCPYYIQDSGTHVGCHLDNLSGLTSRNYFLVNGTSREIGIQFFDSLLDTKKIERFNPPSNVTVRCNTTHCLVRWKQPRTYQKLSYLDFQYQLDVHRKNTQPGTENLLINVSGDLENRYNFPSSEPRAKHSVKIRAADVRILNWSSWSEAIEFGSDDGNLGSVYIYVLLIVGTLVCGIVLGFLFKRFLRIQRLFPPVPQIKDKLNDNHEVEDEMGPQRHHRCGWNLYPTPGPSPGSGSSPRLGSESSL

SEQ ID NO: 3591 - protein, 333 aa, Homo Sapiens
MLLLVTSLLLCELPHPAFLLIPEKSDLRTVAPASSLNVRFDSRTMNLSWDCQENTTFSKCFLTDKKNRVVEPRLSNNECSCTFREICLHEGVTFEVHVNTSQRGFQQKLLYPNSGREGTAAQNFSCFIYNADLMNCTWARGPTAPRDVQYFLYIRNSKRRREIRCPYYIQDSGTHVGCHLDNLSGLTSRNYFLVNGTSREIGIQFFDSLLDTKKIERFNPPSNVTVRCNTTHCLVRWKQPRTYQKLSYLDFQYQLDVHRKNTQPGTENLLINVSGDLENRYNFPSSEPRAKHSVKIRAADVRILNWSSWSEAIEFGSLGYSGCSRQFHRSKTN

SEQ ID NO: 3592 - protein, 400 aa, Homo Sapiens
MLLLVTSLLLCELPHPAFLLIPEKSDLRTVAPASSLNVRFDSRTMNLSWDCQENTTFSKCFLTDKKNRVVEPRLSNNECSCTFREICLHEGVTFEVHVNTSQRGFQQKLLYPNSGREGTAAQNFSCFIYNADLMNCTWARGPTAPRDVQYFLYIRNSKRRREIRCPYYIQDSGTHVGCHLDNLSGLTSRNYFLVNGTSREIGIQFFDSLLDTKKIERFNPPSNVTVRCNTTHCLVRWKQPRTYQKLSYLDFQYQLDVHRKNTQPGTENLLINVSGDLENRYNFPSSEPRAKHSVKIRAADVRILNWSSWSEAIEFGSDDGNLGSVYIYVLLIVGTLVCGIVLGFLFKRFLRIQRLFPPVPQIKDKLNDNHEVEDEIIWEEFTPEEGKGYREEVLTVKEIT

SEQ ID NO: 3593 - protein, 400 aa, Homo Sapiens; identical to SEQ ID NO: 3592

SEQ ID NO: 3594 - protein, 434 aa, Homo Sapiens
MLLLVTSLLLCELPHPAFLLIPEKSDLRTVAPASSLNVRFDSRTMNLSWDCQENTTFSKCFLTDKKNRVVEPRLSNNECSCTFREICLHEGVTFEVHVNTSQRGFQQKLLYPNSGREGTAAQNFSCFIYNADLMNCTWARGPTAPRDVQYFLYIRNSKRRREIRCPYYIQDSGTHVGCHLDNLSGLTSRNYFLVNGTSREIGIQFFDSLLDTKKIERFNPPSNVTVRCNTTHCLVRWKQPRTYQKLSYLDFQYQLDVHRKNTQPGTENLLINVSGDLENRYNFPSSEPRAKHSVKIRAADVRILNWSSWSEAIEFGSHSVTQAGVQWHNLGSLQPPSPRLKRFSCLRLPGSDDGNLGSVYIYVLLIVGTLVCGIVLGFLFKRFLRIQRLFPPVPQIKDKLNDNHEVEDEIIWEEFTPEEGKGYREEVLTVKEIT

SEQ ID NO: 3595 - protein, 285 aa, Homo Sapiens
MLLLVTSLLLCELPHPAFLLIPEKSDLRTVAPASSLNVRFDSRTMNLSWDCQENTTFSKCFLTDKKNRVVEPRLSNNECSCTFREICLHEGVTFEVHVNTSQRGFQQKLLYPNSGREGTAAQNFSCFIYNADLMNCTWARGPTAPRDVQYFLYIRNSKRRREIRCPYYIQDSGTHVGCHLDNLSGLTSRNYFLVNGTSREIGIQFFDSLLDTKKIERFNPPSNVTVRCNTTHCLVRWKQPRTYQKLSYLDFQYQLDVHRKNTQPGTENLLVLTTGTSALCTFMCS

SEQ ID NO: 3596 - protein, 400 aa, Homo Sapiens; identical to SEQ ID NO: 3592

SEQ ID NO: 3597 - protein, 233 aa, Homo Sapiens
MLLLVTSLLLCELPHPAFLLIPEKSDLRTVAPASSLNVRFDSRTMNLSWDCQENTTFSKCFLTDKKNRVVEPRLSNNECSCTFREICLHEGVTFEVHVNTSQRGFQQKLLYPNSGREGTAAQNFSCFIYNADLMNCTWARGPTAPRDVQYFLYIRNSKRRREIRCPYYIQDSGTHVGCHLDNLSGLTSRNYFLVNGTSREIGIQFFDSLLDTKKIGSLGYSGCSRQFHRSKTN

SEQ ID NO: 3598 - protein, 90 aa, Homo Sapiens
MLLLVTSLLLCELPHPAFLLIPEKSDLRTVAPASSLNVRFDSRTMNLSWDCQENTTFSKCFLTDKKNRVVEPRMEFPSCCPDRTIAHQPA

SEQ ID NO: 3599 - protein, 267 aa, Homo Sapiens
MNCTWARGPTAPRDVQYFLYIRNSKRRREIRCPYYIQDSGTHVGCHLDNLSGLTSRNYFLVNGTSREIGIQFFDSLLDTKKIERFNPPSNVTVRCNTTHCLVRWKQPRTYQKLSYLDFQYQLDVHRKNTQPGTENLLINVSGDLENRYNFPSSEPRAKHSVKIRAADVRILNWSSWSEAIEFGSDDGNLGSVYIYVLLIVGTLVCGIVLGFLFKRFLRIQRLFPPVPQIKDKLNDNHEVEDEIIWEEFTPEEGKGYREEVLTVKEIT

SEQ ID NO: 3600 - protein, 155 aa, Homo Sapiens
MAGPATQSPMKLMALQLLLWHSALWTVQEATPLGPASSLPQSFLLKCLEQVRKIQGDGAALQEKLAGCLSQLHSGLFLYQGLLQALEGISPELGPTLDTLQLDVADFATTIWQQMEELGMAPALQPTQGAMPAFASAFQRRAGGVLVASHLQSFL

SEQ ID NO: 3601 - protein, 204 aa, Homo Sapiens
MAGPATQSPMKLMALQLLLWHSALWTVQEATPLGPASSLPQSFLLKCLEQVRKIQGDGAALQEKLCATYKLCHPEELVLLGHSLGIPWAPLSSCPSQALQLAGCLSQLHSGLFLYQGLLQALEGISPELGPTLDTLQLDVADFATTIWQQMEELGMAPALQPTQGAMPAFASAFQRRAGGVLVASHLQSFLEVSYRVLRHLAQP

SEQ ID NO: 3602 - protein, 171 aa, Homo Sapiens
MAGPATQSPMKLMALQLLLWHSALWTVQEATPLGPASSLPQSFLLKCLEQVRKIQGDGAALQEKLVSEAGCLSQLHSGLFLYQGLLQALEGISPELGPTLDTLQLDVADFATTIWQQMEELGMAPALQPTQGAMPAFASAFQRRAGGVLVASHLQSFLEVSYRVLRHLAQP

SEQ ID NO: 3603 - protein, 207 aa, Homo Sapiens
MAGPATQSPMKLMALQLLLWHSALWTVQEATPLGPASSLPQSFLLKCLEQVRKIQGDGAALQEKLVSECATYKLCHPEELVLLGHSLGIPWAPLSSCPSQALQLAGCLSQLHSGLFLYQGLLQALEGISPELGPTLDTLQLDVADFATTIWQQMEELGMAPALQPTQGAMPAFASAFQRRAGGVLVASHLQSFLEVSYRVLRHLAQP

SEQ ID NO: 3604 - protein, 57 aa, Homo Sapiens
MAGPATQSPMKLMVCHLQAVPPRGAGAARTLSGHPLGSPEQLPQPGPAAGRLLEPTP

SEQ ID NO: 3605 - protein, 164 aa, Homo Sapiens
MSPEPALSPALQLLLWHSALWTVQEATPLGPASSLPQSFLLKCLEQVRKIQGDGAALQEKLAGCLSQLHSGLFLYQGLLQALEGISPELGPTLDTLQLDVADFATTIWQQMEELGMAPALQPTQGAMPAFASAFQRRAGGVLVASHLQSFLEVSYRVLRHLAQP

SEQ ID NO: 3606 - protein, 200 aa, Homo Sapiens
MSPEPALSPALQLLLWHSALWTVQEATPLGPASSLPQSFLLKCLEQVRKIQGDGAALQEKLCATYKLCHPEELVLLGHSLGIPWAPLSSCPSQALQLAGCLSQLHSGLFLYQGLLQALEGISPELGPTLDTLQLDVADFATTIWQQMEELGMAPALQPTQGAMPAFASAFQRRAGGVLVASHLQSFLEVSYRVLRHLAQP

SEQ ID NO: 3607 - protein, 14 aa, Homo Sapiens
MMMVRRGLLAWISR

SEQ ID NO: 3608 - protein, 53 aa, Homo Sapiens
MMMVRRGLLAWISRVVVLLVLLCCAISVLYMLACTPKGDEEQLALPRANSPTG

SEQ ID NO: 3609 - protein, 96 aa, Homo Sapiens
MMMVRRGLLAWISRVVVLLVLLCCAISVLYMLACTPKGDEEQLALPRANSPTGKEGYQAVLQEWEEQHRNYVSSLKRQIAQLKEELQERSEQLRNG

SEQ ID NO: 3610 - protein, 104 aa, Homo Sapiens
MMMVRRGLLAWISRVVVLLVLLCCAISVLYMLACTPKGDEEQLALPRANSPTGKEGYQAVLQEWEEQHRNYVSSLKRQIAQLKEELQERSEQLRNGQYQASDAA

SEQ ID NO: 3611 - protein, 532 aa, Homo Sapiens
MMMVRRGLLAWISRVVVLLVLLCCAISVLYMLACTPKGDEEQLALPRANSPTGKEGYQAVLQEWEEQHRNYVSSLKRQIAQLKEELQERSEQLRNGQYQASDAAGLGLDRSPPEKTQADLLAFLHSQVDKAEVNAGVKLATEYAAVPFDSFTLQKVYQLETGLTRHPEEKPVRKDKRDELVEAIESALETLNSPAENSPNHRPYTASDFIEGIYRTERDKGTLYELTFKGDHKHEFKRLILFRPFGPIMKVKNEKLNMANTLINVIVPLAKRVDKFRQFMQNFREMCIEQDGRVHLTVVYFGKEEINEVKGILENTSKAANFRNFTFIQLNGEFSRGKGLDVGARFWKGSNVLLFFCDVDIYFTSEFLNTCRLNTQPGKKVFYPVLFSQYNPGIIYGHHDAVPPLEQQLVIKKETGFWRDFGFGMTCQYRSDFINIGGFDLDIKGWGGEDVHLYRKYLHSNLIVVRTPVRGLFHLWHEKRCMDELTPEQYKMCMQSKAMNEASHGQLGMLVFRHEIEAHLRKQKQKTSSKKT

SEQ ID NO: 3612 - protein, 297 aa, Homo Sapiens
MMMVRRGLLAWISRVVVLLVLLCCAISVLYMLACTPKGDEEQLALPRANSPTGKEGYQAVLQEWEEQHRNYVSSLKRQIAQLKEELQERSEQLRNGQYQASDAAGLGLDRSPPEKTQADLLAFLHSQVDKAEVNAGVKLATEYAAVPFDSFTLQKVYQLETGLTRHPEEKPVRKDKRDELVEAIESALETLNSPAENSPNHRPYTASDFIEGIYRTERDKGTLYELTFKGDHKHEFKRLILFRPFGPIMKVKNEKLNMANTLINVIVPLAKRVDKFRQFMQNFRPADEVFRCVPLSP

SEQ ID NO: 3613 - protein, 297 aa, Homo Sapiens; identical to SEQ ID NO: 3612

SEQ ID NO: 3614 - protein, 532 aa, Homo Sapiens; identical to SEQ ID NO: 3611

SEQ ID NO: 3615 - protein, 532 aa, Homo Sapiens; identical to SEQ ID NO: 3611

SEQ ID NO: 3616 - protein, 217 aa, Homo Sapiens
MAPGSRTSLLLAFALLCLPWLQEAGAVQTVPLSRLFDHAMLQAHRAHQLAIDTYQEFEETYIPKDQKYSFLHDSQTSFCFSDSIPTPSNMEETQQKSNLELLRISLLLIESWLEPVRFLRSMFANNLVYDTSDSDDYHLLKDLEEGIQTLMGRLEDGSRRTGQILKQTYSKFDTNSHNHDALLKNYGLLYCFRKDMDKVETFLRMVQCRSVEGSCGF

SEQ ID NO: 3617 - protein, 256 aa, Homo Sapiens
MAPGSRTSLLLAFALLCLPWLQEAGAVQTVPLSRLFDHAMLQAHRAHQLAIDTYQEFEETYIPKDQKYSFLHDSQTSFCFSDSIPTPSNMEETQQKSNLELLRISLLLIESWLEPVRFLRSMFANNLVYDTSDSDDYHLLKDLEEGIQTLMGVRVAPGVTNPGTPLASRAGGEKYCCPLFSSKALTQENSPYSSFRLVNPPGLSLHPEGEGGKWINERGREQCPSAWPLLLFLHFAEAGRRQPPDWADPQADLQQV

SEQ ID NO: 3618 - protein, 122 aa, Homo Sapiens
MAPGSRTSLLLAFALLCLPWLQEAGAVQTVPLSRLFDHAMLQAHRAHQLAIDTYQEFRLEDGSRRTGQILKQTYSKFDTNSHNHDALLKNYGLLYCFRKDMDKVETFLRMVQCRSVEGSCGF

SEQ ID NO: 3619 - protein, 128 aa, Homo Sapiens
MEETQQKSNLELLRISLLLIESWLEPVRFLRSMFANNLVYDTSDSDDYHLLKDLEEGIQTLMGRLEDGSRRTGQILKQTYSKFDTNSHNHDALLKNYGLLYCFRKDMDKVETFLRMVQCRSVEGSCGF

SEQ ID NO: 3620 - protein, 160 aa, Homo Sapiens
MAAGSRTSLLLAFALLCLPWLQEADSIPTPSNMEETQQKSNLELLRISLLLIESWLEPVRFLRSMFANNLVYDTSDSDDYHLLKDLEEGIQTLMGRLEDGSRRTGQILKQTYSKFDTNSHNHDALLKNYGLLYCFRKDMDKVETFLRMVQCRSVEGSCGF

SEQ ID NO: 3621 - protein, 217 aa, Homo Sapiens
MAAGSRTSLLLAFALLCLPWLQEAGAVQTVPLSRLFDHAMLQAHRAHQLAIDTYQEFEETYIPKDQKYSFLHDSQTSFCFSDSIPTPSNMEETQQKSNLELLRISLLLIESWLEPVRFLRSMFANNLVYDTSDSDDYHLLKDLEEGIQTLMGRLEDGSRRTGQILKQTYSKFDTNSHNHDALLKNYGLLYCFRKDMDKVETFLRMVQCRSVEGSCGF

SEQ ID NO: 3622 - protein, 167 aa, Homo Sapiens
MAAGSRTSLLLAFALLCLPWLQEAGAVQTVPLSRLFDHAMLQAHRAHQLAIDTYQEFEETYIPKDQKYSFLHDSQTSFCFSDSIPTPSNMEETQQKSNLELLRISLLLIESWLEPVRFLRSMFANNLVYDTSDSDDYHLLKDLEEGIQTLMGVRVAPGVANPGTPLA

SEQ ID NO: 3623 - protein, 122 aa, Homo Sapiens
MAAGSRTSLLLAFALLCLPWLQEAGAVQTVPLSRLFDHAMLQAHRAHQLAIDTYQEFRLEDGSRRTGQILKQTYSKFDTNSHNHDALLKNYGLLYCFRKDMDKVETFLRMVQCRSVEGSCGF

SEQ ID NO: 3624 - protein, 128 aa, Homo Sapiens; identical to SEQ ID NO: 3619

SEQ ID NO: 3625 - protein, 139 aa, Homo Sapiens
MAADSIPTSSNMEETQQKSNLELLHISLLLIESRLEPVRFLRSTFTNNLVYDTSDSDDYHLLKDLEEGIQMLMGRLEDGSHLTGQTLKQTYSKFDTNSHNHDALLKNYGLLHCFRKDMDKVETFLRMVQCRSVEGSCGF

SEQ ID NO: 3626 - protein, 178 aa, Homo Sapiens
MAADSIPTSSNMEETQQKSNLELLHISLLLIESRLEPVRFLRSTFTNNLVYDTSDSDDYHLLKDLEEGIQMLMGVRVAPGVPNPGSPLASRAGGEKHCCPLFSSQALTQENSPYSSFPLVNPPGLSLHPEGEGGKWINERGREQCPSAWSLLLLLHFAEAGRRQPPDWADPQADLQQV

SEQ ID NO: 3627 - protein, 160 aa, Homo Sapiens
MAAGSRTSLLLAFALLCLPWLQEADSIPTSSNMEETQQKSNLELLHISLLLIESRLEPVRFLRSTFTNNLVYDTSDSDDYHLLKDLEEGIQMLMGRLEDGSHLTGQTLKQTYSKFDTNSHNHDALLKNYGLLHCFRKDMDKVETFLRMVQCRSVEGSCGF

SEQ ID NO: 3628 - protein, 222 aa, Homo Sapiens
MAAGSRTSLLLAFALLCLPWLQEAGAVQTVPLSRLFKEAMLQAHRAHQLAIDTYQEFISSWGMEAYITKEQKYSFLHDSQTSFCFSDSIPTSSNMEETQQKSNLELLHISLLLIESRLEPVRFLRSTFTNNLVYDTSDSDDYHLLKDLEEGIQMLMGRLEDGSHLTGQTLKQTYSKFDTNSHNHDALLKNYGLLHCFRKDMDKVETFLRMVQCRSVEGSCGF

SEQ ID NO: 3629 - protein, 217 aa, Homo Sapiens [sequence omitted]

SEQ ID NO: 3630 - protein, 128 aa, Homo Sapiens
MEETQQKSNLELLHISLLLIESRLEPVRFLRSTFTNNLVYDTSDSDDYHLLKDLEEGIQMLMGRLEDGSHLTGQTLKQTYSKFDTNSHNHDALLKNYGLLHCFRKDMDKVETFLRMVQCRSVEGSCGF

SEQ ID NO: 3631 - protein, 167 aa, Homo Sapiens
MEETQQKSNLELLHISLLLIESRLEPVRFLRSTFTNNLVYDTSDSDDYHLLKDLEEGIQMLMGVRVAPGVPNPGSPLASRAGGEKHCCPLFSSQALTQENSPYSSFPLVNPPGLSLHPEGEGGKWINERGREQCPSAWSLLLLLHFAEAGRRQPPDWADPQADLQQV

SEQ ID NO: 3632 - protein, 76 aa, Homo Sapiens
KMESSISSSSEEQIRRMNENSHVQVPFQQLNQLAAYPYAVWYYPQIMQYVPFPPFSDISNPTAHENYEKNNVMLQW

SEQ ID NO: 3633 - protein, 185 aa, Homo Sapiens
MRLLILTCLVAVALARPKLPLRYPERLQNPSESSEPIPLESREEYMNGMNRQRNILREKQTDEIKDTRNESTQNCVVAEPEKMESSISSSSEEMSLSKCAEQFCRLNEYNQLQLQAAHAQEQIRRMNENSHVQVPFQQLNQLAAYPYAVWYYPQIMQYVPFPPFSDISNPTAHENYEKNNVMLQW

SEQ ID NO: 3634 - protein, 177 aa, Homo Sapiens
MRLLILTCLVAVALARPKLPLRYPERLQNPSESSEPIPLESREEYMNGMNRQRNILREKQTDEIKDTRNESTQNCVVAEPEKMESSISSSSEEQFCRLNEYNQLQLQAAHAQEQIRRMNENSHVQVPFQQLNQLAAYPYAVWYYPQIMQYVPFPPFSDISNPTAHENYEKNNVMLQW

SEQ ID NO: 3635 - protein, 169 aa, Homo Sapiens
MRLLILTCLVAVALARPKLPLRYPERLQNPSESSEPIPLESREEYMNGMNRQRNILREKQTDEIKNCVVAEPEKMESSISSSSEEQFCRLNEYNQLQLQAAHAQEQIRRMNENSHVQVPFQQLNQLAAYPYAVWYYPQIMQYVPFPPFSDISNPTAHENYEKNNVMLQW

SEQ ID NO: 3636 - protein, 176 aa, Homo Sapiens
MRLLILTCLVAVALARPKLPLRYPERLQNPSESSEPIPLESREEYMNGMNRRNILREKQTDEIKDTRNESTQNCVVAEPEKMESSISSSSEEQFCRLNEYNQLQLQAAHAQEQIRRMNENSHVQVPFQQLNQLAAYPYAVWYYPQIMQYVPFPPFSDISNPTAHENYEKNNVMLQW

SEQ ID NO: 3637 - protein, 55 aa, Homo Sapiens
QRNILREKQTDEIKNCVVAEPEKMESSISSSSEEMSLSKCAEQFCRLNEYNQLQL

SEQ ID NO: 3638 - protein, 226 aa, Homo Sapiens
MKVLILACLVALALARETIESLSSSEESITEYKQKVEKVKHEDQQQGEDEHQDKIYPSFQPQPLIYPFVEPIPYGFLPQNILPLAQPAVVLPVPQPEIMEVPKAKDTVYTKGRVMPVLKSPTIPFFDPQIPKLTDLENLHLPLPLLQPLMQQVPQPIPQTLALPPQPLWSVPQPKVLPIPQQVVPYPQRAVPVQALLLNQELLLNPTHQIYPVTQPLAPVHNPISV

SEQ ID NO: 3639 - protein, 182 aa, Homo Sapiens
MKSFLLVVNALALTLPFLAVEVQNQKQPACHENDERPFYQKTAPYVPMYYVPNSYPYYGTNLYQRRPAIAINNPYVPRTYYANPAVVRPHAQIPQRQYLPNSHPPTVVRRPNLHPSFIAIPPKKIQDKIIIPTINTIATVEPTPAPATEPTVDSVVTPEAFSESIITSTPETTTVAVTPPTA

SEQ ID NO: 3640 - protein, 141 aa, Homo Sapiens
MAQYLSTLLLLLATLAVALAWSPKEEDRIIPGGIYNADLNDEWVQRALHFAISEYNKATKDDYYRRPLRVLRARQQTVGGVNYFFDVEVGRTICTKSQPNLDTCAFHEQPELQKKQLCSFEIYEVPWENRRSLVKSRCQES

SEQ ID NO: 3641 - protein, 141 aa, Homo Sapiens; identical to SEQ ID NO: 3640

SEQ ID NO: 3642 - protein, 103 aa, Homo Sapiens
MMAEPWQALQLLLAILLTLMALPYQARKKTFLSVHEVMAVENYAKDSLQWITDQYNKESDDKYHFRIFRVLKVQRQQVNCFFSVFAVPWFEQYKILNKSCSSD

SEQ ID NO: 3643 - protein, 138 aa, Homo Sapiens
MMAEPWQALQLLLAILLTLMALPYQARKKTFLSVHEVMAVENYAKDSLQWITDQYNKESDDKYHFRIFRVLKVQRQVTDHLEYHLNVEMQWTTCQKPETTNCVPQERELHKQVNCFFSVFAVPWFEQYKILNKSCSSD

SEQ ID NO: 3644 - protein, 141 aa, Homo Sapiens
MAWPLCTLLLLLATQAVALAWSPQEEDRIIEGGIYDADLNDERVQRALHFVISEYNKATEDEYYRRLLRVLRAREQIVGGVNYFFDIEVGRTICTKSQPNLDTCAFHEQPELQKKQLCSFQIYEVPWEDRMSLVNSRCQEA

SEQ ID NO: 3645 - protein, 146 aa, Homo Sapiens
MAGPLRAPLLLLAILAVALAVSPAAGSSPGKPPRLVGGPMDASVEEEGVRRALDFAVGEYNKASNDMYHSRALQVVRARKQIVAGVNYFLDVELGRTTCTKTQPNLDNCPFHDQPHLKRKAFCSFQIYAVPWQGTMTLSKSTCQDA

SEQ ID NO: 3646 - protein, 146 aa, Homo Sapiens; identical to SEQ ID NO: 3645

SEQ ID NO: 3647 - protein, 146 aa, Homo Sapiens; identical to SEQ ID NO: 3645

SEQ ID NO: 3648 - protein, 141 aa, Homo Sapiens
MARPLCTLLLLMATLAGALASSSKEENRIIPGGIYDADLNDEWVQRALHFAISEYNKATEDEYYRRPLQVLRAREQTFGGVNYFFDVEVGRTICTKSQPNLDTCAFHEQPELQKKQLCSFEIYEVPWEDRMSLVNSRCQEA

SEQ ID NO: 3649 - protein, 142 aa, Homo Sapiens
MMWPMHTPLLLLTALMVAVAGSASAQSRTLAGGIHATDLNDKSVQCALDFAISEYNKVINKDEYYSRPLQVMAAYQQIVGGVNYYFNVKFGRTTCTKSQPNLDNCPFNDQPKLKEEEFCSFQINEVPWEDKISILNYKCRKV

SEQ ID NO: 3650 - protein, 149 aa, Homo Sapiens
MARSNLPLALGLALVAFCLLALPRDARARPQERMVGELRDLSPDDPQVQKAAQAAVASYNMGSNSIYYFRDTHIIKAQSQLVAGIKYFLTMEMGSTDCRKTRVTGDHVDLTTCPLAAGAQQEKLRCDFEVLVVPWQNSSQLLKHNCVQM

SEQ ID NO: 3651 - protein, 145 aa, Homo Sapiens
MRAAGTLLAFCCLVLSTTGGPSPDTCSQDLNSRVKPGFPKTIKTNDPGVLQAARYSVEKFNNCTNDMFLFKESRITRALVQIVKGLKYMLEVEIGRTTCKKNQHLRLDDCDFQTNHTLKQTLSCYSEVWVVPWLQHFEVPVLRCH

SEQ ID NO: 3652 - protein, 134 aa, Homo Sapiens
MPRCRWLSLILLTIPLALVARKDPKKNETGVLRKLKPVNASNANVKQCLWFAMQEYNKESEDKYVFLVVKTLQAQLQVTNLLEYLIDVEIARSDCRKPLSTNEICAIQENSKLKRKLSCSFLVGALPWNGEFTV

SEQ ID NO: 3653 - protein, 142 aa, Homo Sapiens
MPRCRWLSLILLTIPLALVARKDPKKNETGVLRKLKPVNASNANVKQCLWFAMQEYNKESEDKYVFLVVKTLQAQLQVTNLLEYLIDVEIARSDCRKPLSTNEICAIQENSKLKRKLSCSFLVGALPWNGEFTVMEKKCEDA

SEQ ID NO: 3654 - protein, 159 aa, Homo Sapiens
MSSPQRRKAMPWALSLLLMGFQLLVTYAWCSEEEMGGNNKIVQDPMFLATVEFALNTFNVQSKEEHAYRLLRVLSSWREDSMDRKWRGKMVFSMNLQLRQTVCRKFEDDIDNCPFQESLELNNVRQGISFPQVHSCGCCMGCGVGTGAADKAIPRDKGK

SEQ ID NO: 3655 - protein, 147 aa, Homo Sapiens
MLGLPWKGGLSWALLLLLLGSQILLIYAWHFHEQRDCDEHNVMARYLPATVEFAVHTFNQQSKDYYAYRLGHILNSWKEQVESKTVFSMELLLGRTRCGKFEDDIDNCHFQESTELNNTFTCFFTISTRPWMTQFSLLNKTCLEGFH

SEQ ID NO: 3656 - protein, 145 aa, Homo Sapiens
MGIGCWRNPLLLLIALVLSAKLGHFQRWEGFQQKLMSKKNMNSTLNFFIQSYNNASNDTYLYRVQRLIRSQMQLTTGVEYIVTVKIGWTKCKRNDTSNSSCPLQSKKLRKSLICESLIYTMPWINYFQLWNNSCLEAEHVGRNLR

SEQ ID NO: 3657 - protein, 145 aa, Homo Sapiens; identical to SEQ ID NO: 3656

SEQ ID NO: 3658 - protein, 37 aa, Homo Sapiens
MNSTLNFFIQSYNNASNDTYLYRVQRLIRSQMQQVHC

SEQ ID NO: 3659 - protein, 242 aa, Homo Sapiens
MLRLLRLALAFYGRTADPAERQGPQQQGLPQGDTQLTTVQGVVTSFCGDYGMIDESIYFSSDVVTGNVPLKVGQKVNVVVEEDKPHYGLRAIKVDVVPRHLYGAGPSDSGTRVLIGCVTSINEDNIYISNSIYFSIAIVSEDFVPYKGDLLEVEYSTEPGISNIKATSVKPIRCIHTEEVCITSVHGRNGVIDYTIFFTLDSVKLPDGYVPQVDDIVNVVMVESIQFCFIWRAISITPVHKS

SEQ ID NO: 3660 - protein, 264 aa, Homo Sapiens
MLRLLRLALAFYGRTADPAERQGPQQQGLPQGDTQLTTVQGVVTSFCGDYGMIDESIYFSSDVVTGNVPLKVGQKVNVVVEEDKPHYGLRAIKVDVVPRHLYGAGPSDSGTRVLIGCVTSINEDNIYISNSIYFSIAIVSEDFVPYKGDLLEVEYSTEPGISNIKATSVKPIRCIHTEEVCITSVHGRNGVIDYTIFFTLDSVKLPDGYVPQVDDIVNVVMVESIQFCFIWRAISITPVHKSSSGFQDDGGLGRPKRERRSQSI

SEQ ID NO: 3661 - protein, 385 aa, Homo Sapiens
MSRPQLRRWRLVSSPPSGVPGLALLALLALLALRLAAGTDCPCPEPELCRPIRHHPDFEVFVFDVGQKTWKSYDWSQITTVATFGKYDSELMCYAHSKGARVVLKGDVSLKDIIDPAFRASWIAQKLNLAKTQYMDGINIDIEQEVNCLSPEYDALTALVKETTDSFHREIEGSQVTFDVAWSPKNIDRRCYNYTGIADACDFLFVMSYDEQSQIWSECIAAANAPYNQTLTGYNDYIKMSINPKKLVMGVPWYGYDYTCLNLSEDHVCTIAKVPFRGAPCSDAAGRQVPYKTIMKQINSSISGNLWDKDQRAPYYNYKDPAGHFHQVWYDNPQSISLKATYIQNYRLRGIGMWNANCLDYSGDAVAKQQTEEMWEVLKPKLLQR

SEQ ID NO: 3662 - protein, 77 aa, Homo Sapiens
MSRPQLRRWRLVSSPPSGVPGLALLALLALLALRLAAGTDCPCPEPELCRPIRHHPDFEVSAFLCSSRSGLQGTKRS

SEQ ID NO: 3663 - protein, 77 aa, Homo Sapiens; identical to SEQ ID NO: 3662

SEQ ID NO: 3664 - protein, 349 aa, Homo Sapiens
MTAASMGPVRVAFVVLLALCSRPAVGQNCSGPCRCPDEPAPRCPAGVSLVLDGCGCCRVCAKQLGELCTERDPCDPHKGLFCHFGSPANRKIGVCTAKDGAPCIFGGTVYRSGESFQSSCKYQCTCLDGAVGCMPLCSMDVRLPSPDCPFPRRVKLPGKCCEEWVCDEPKDQTVVGPALAAYRLEDTFGPDPTMIRANCLVQTTEWSACSKTCGMGISTRVTNDNASCRLEKQSRLCMVRPCEADLEENIKKGKKCIRTPKISKPIKFELSGCTSMKTYRAKFCGVCTDGRCCTPHRTTTLPVEFKCPDGEVMKKNMMFIKTCACHYNCPGDNDIFESLYYRKMYGDMA

SEQ ID NO: 3665 - protein, 243 aa, Homo Sapiens
MRPQGPAASPQRLRGLLLLLLLQLPAPSSASEIPKGKQKAQLRQREVVDLYNGMCLQGPAGVPGRDGSPGANGIPGTPGIPGRDGFKGEKGECLRESFEESWTPNYKQCSWSSLNYGIDLGKIAECTFTKMRSNSALRVLFSGSLRLKCRNACCQRWYFTFNGAECSGPLPIEAIIYLDQGSPEMNSTINIHRTSSVEGLCEGIGAGLVDVAIWVGTCSDYPKGDASTGWNSVSRIIIEELPK

SEQ ID NO: 3666 - protein, 147 aa, Homo Sapiens
MRPQGPAASPQRLRGLLLLLLLQLPAPSSASEIPKGKQKAQLRQREVVDLYNGMCLQGPAGVPGRDGSPGANGIPGTPGIPGRDGFKGEKGECLRESFEESWTPNYKQCSWSSLNYGIDLGKIAVSLNYFKIEARFKGFHILVLIFR

SEQ ID NO: 3667 - protein, 113 aa, Homo Sapiens
MRSNSALRVLFSGSLRLKCRNACCQRWYFTFNGAECSGPLPIEAIIYLDQGSPEMNSTINIHRTSSVEGLCEGIGAGLVDVAIWVGTCSDYPKGDASTGWNSVSRIIIEELPK

SEQ ID NO: 3668 - protein, 229 aa, Homo Sapiens
MWPPGRSITVKLREKTVSRKLEMNGPSAFQGLICGKYNGMCLQGPAGVPGRDGSPGANGIPGTPGIPGRDGFKGEKGECLRESFEESWTPNYKQCSWSSLNYGIDLGKIAECTFTKMRSNSALRVLFSGSLRLKCRNACCQRWYFTFNGAECSGPLPIEAIIYLDQGSPEMNSTINIHRTSSVEGLCEGIGAGLVDVAIWVGTCSDYPKGDASTGWNSVSRIIIEELPK

SEQ ID NO: 3669 - protein, 174 aa, Homo Sapiens
MACLGFQRHKAQLNLATRTWPCTLLFFLLFIPVFCKAMHVAQPAVVLASSRGIASFVCEYASPGKATEVRVTVLRQADSQVTEVCAATYMMGNELTFLDDSICTGTSSGNQVNLTIQGLRAMDTGLYICKVELMYPPPYYLGIGNGTQIYVIAKEKKPSYNRGLCENAPNRARM

SEQ ID NO: 3670 - protein, 223 aa, Homo Sapiens
MACLGFQRHKAQLNLATRTWPCTLLFFLLFIPVFCKAMHVAQPAVVLASSRGIASFVCEYASPGKATEVRVTVLRQADSQVTEVCAATYMMGNELTFLDDSICTGTSSGNQVNLTIQGLRAMDTGLYICKVELMYPPPYYLGIGNGTQIYVIDPEPCPDSDFLLWILAAVSSGLFFYSFLLTAVSLSKMLKKRSPLTTGVYVKMPPTEPECEKQFQPYFIPIN

SEQ ID NO: 3671 - protein, 79 aa, Homo Sapiens
MACLGFQRHKAQLNLATRTWPCTLLFFLLFIPVFCKAMHVAQPAVVLASSRGIASFVSKEKKPSYNRGLCENAPNRARM

SEQ ID NO: 3672 - protein, 137 aa, Homo Sapiens
MHVAQPAVVLASSRGIASFVCEYASPGKATEVRVTVLRQADSQVTEVCAATYMMGNELTFLDDSICTGTSSGNQVNLTIQGLRAMDTGLYICKVELMYPPPYYLGIGNGTQIYVIAKEKKPSYNRGLCENAPNRARM

SEQ ID NO: 3673 - protein, 53 aa, Homo Sapiens
MIRNWLTIFILFPLKLVEKCESSVSLTVPPVVKLENGSSTNVSLTLRLWCLLE

SEQ ID NO: 3674 - protein, 75 aa, Homo Sapiens
MIRNWLTIFILFPLKLVEKCESSVSLTVPPVVKLENGSSTNVSLTLRPPLNATLVITFEITFRSKNITILELPDE

SEQ ID NO: 3675 - protein, 122 aa, Homo Sapiens
MIRNWLTIFILFPLKLVEKCESSVSLTVPPVVKLENGSSTNVSLTLRPPLNATLVITFEITFRSKNITILELPDELVEAGGEECRDEISSHEAHQDGLQISSEPPRKQTGVKHDQSPACGNL

SEQ ID NO: 3676 - protein, 163 aa, Homo Sapiens
MIRNWLTIFILFPLKLVEKCESSVSLTVPPVVKLENGSSTNVSLTLRPPLNATLVITFEITFRSKNITILELPDEVVVPPGVTNSSFQVTSQNVGQLTVYLHGNHSNQTGPRIRFLVIRSSAISIINQVIGWIYFVAWSISFYPQVIMNWRRKSVIGLSFDFV

SEQ ID NO: 3677 - protein, 367 aa, Homo Sapiens
MIRNWLTIFILFPLKLVEKCESSVSLTVPPVVKLENGSSTNVSLTLRPPLNATLVITFEITFRSKNITILELPDEVVVPPGVTNSSFQVTSQNVGQLTVYLHGNHSNQTGPRIRFLVIRSSAISIINQVIGWIYFVAWSISFYPQVIMNWRRKSVIGLSFDFVALNLTGFVAYSVFNIGLLWVPYIKEQFLLKYPNGVNPVNSNDVFFSLHAVVLTLIIIVQCCLYERGGQRVSWPAIGFLVLAWLFAFVTMIVAAVGVTTWLQFLFCFSYIKLAVTLVKYFPQAYMNFYYKSTEGWSIGNVLLDFTGGSFSLLQMFLQSYNNDQWTLIFGDPTKFGLGVFSIVFDVVFFIQHFCLYRKRPGYDQLN

SEQ ID NO: 3678 - protein, 400 aa, Homo Sapiens
MIRNWLTIFILFPLKLVEKCESSVSLTVPPVVKLENGSSTNVSLTLRPPLNATLVITFEITFRSKNITILELPDEVVVPPGVTNSSFQVTSQNVGQLTVYLHGNHSNQTGPRIRFLVIRSSAISIINQVIGWIYFVAWSISFYPQVIMNWRRKSVIGLSFDFVALNLTGFVAYSVFNIGLLWVPYIKEQFLLKYPNGVNPVNSNDVFFSLHAVVLTLIIIVQCCLYERGGQRVSWPAIGFLVLAWLFAFVTMIVAAVGVTTWLQFLFCFSYIKLAVTLVKYFPQAYMNFYYKSTEGWSIGNVLLDFTGGSFSLLQMFLQSYNNDQWTLIFGDPTKFGLGVFSIVFDVVFFIQHFCLYRKRPGLQAARTGSGSRLRQDWAPSLQPKALPQTTSVSASSLKG

SEQ ID NO: 3679 - protein, 20 aa, Homo Sapiens
MNWRRKSVIGLSFDFVALNL

SEQ ID NO: 3680 - protein, 28 aa, Homo Sapiens
MNWRRKSVIGLSFDFVALNLTGFVAYSV

SEQ ID NO: 3681 - protein, 263 aa, Homo Sapiens
MASLWLLSCFSLVGAAFGCGVPAIHPVLSGLSRIVNGEDAVPGSWPWQVSLQDKTGFHFCGGSLISEDWVVTAAHCGVRTSDVVVAGEFDQGSDEENIQVLKIAKVFKNPKFSILTVNNDITLLKLATPARFSQTVSAVCLPSADDDFPAGTLCATTGWGKTKYNANKTPDKLQQAALPLLSNAECKKSWGRRITDVMICAGASGVSSCMGDSGGPLVCQKDGAWTLVGIVSWGSDTCSTSSPGVYARVTKLIPWVQKILAAN

SEQ ID NO: 3682 - protein, 182 aa, Homo Sapiens
MCQGGPELASVDWGRTGRAARRQVRPRWVWGLSPYSPHSPPGCGVPAIHPVLSGLSRIVNGEDAVPGSWPWQVSLQDKTGFHFCGGSLISEDWVVTAAHCGVRTSDVVVAGEFDQGSDEENIQVLKIAKVFKNPKFSILTVNNDITLLKLATPARFSQTVSAVCLPSADDDFPAGTLCATTG

SEQ ID NO: 3683 - protein, 16 aa, Homo Sapiens
  misc_feature (1)..(1): Xaa can be any naturally occurring amino acid
XVTKLIPWVQKILAAN

SEQ ID NO: 3684 - protein, 114 aa, Homo Sapiens
DKTGFHFCGGSLISEDWVVTAAHCGVRTSDVVVAGEFDQGSDEENIQVLKIAKVFKNPKFSILTVNNDITLLKLATPARFSQTVSAVCLPSADDDFPAGTLCATTGWGKTKYNG

SEQ ID NO: 3685 - protein, 168 aa, Homo Sapiens
EFDQGSDEENIQVLKIAKVFKNPKFSILTVNNDITLLKLATPARFSQTVSAVCLPSADDDFPAGTLCATTGWGKTKYNANKTPDKLQQAALPLLSNAECKKSWGRRITDVMICAGGDSGGPLVCQKDGAWTLVGIVSWGSRTCSTTTPAVYARVAKLIPWVQKILAAN

SEQ ID NO: 3686 - protein, 263 aa, Homo Sapiens
MAFLWLLSCWALLGTTFGCGVPAIHPVLSGLSRIVNGEDAVPGSWPWQVSLQDKTGFHFCGGSLISEDWVVTAAHCGVRTSDVVVAGEFDQGSDEENIQVLKIAKVFKNPKFSILTVNNDITLLKLATPARFSQTVSAVCLPSADDDFPAGTLCATTGWGKTKYNANKTPDKLQQAALPLLSNAECKKSWGRRITDVMICAGASGVSSCMGDSGGPLVCQKDGAWTLVGIVSWGSRTCSTTTPAVYARVAKLIPWVQKILAAN

SEQ ID NO: 3687 - protein, 137 aa, Homo Sapiens
VAGEFDQGSDEENIQVLKIAKVFKNPKFSILTVNNDITLLKLATPARFSQTVSAVCLPSADDDFPAGTLCATTGWGKTKYNANKTPDKLQQAALPLLSNAECKKSWGRRITDVMICAGASGVSSCMVRLALPRPWPG

SEQ ID NO: 3688 - protein, 268 aa, Homo Sapiens [sequence omitted]

SEQ ID NO: 3689 - protein, 69 aa, Homo Sapiens
MLGITVLAALLACATPGPTVWPWERTTWRWKTKKDPCLWVWTPSTSTRDGMPSCCAMILPSSSLQSMWS

SEQ ID NO: 3690 - protein, 190 aa, Homo Sapiens
MLLLSLTLSLVLLGSSWGCGIPAIKPALSFSQRIVNGENAVLGSWPWQVSLQDSSGFHFCGGSLISQSWVVTAAHCNVSPGRHFVVLGEYDRSSNAEPLQVLSVSRAITHPSWNSTTMNNDVTLLKLASPAQYTTRISPVCLASSNEALLSARRETHGCLLVLSPGAPKTAMCAHLLCILELASSAPGST

SEQ ID NO: 3691 - protein, 264 aa, Homo Sapiens
MLLLSLTLSLVLLGSSWGCGIPAIKPALSFSQRIVNGENAVLGSWPWQVSLQDSSGFHFCGGSLISQSWVVTAAHCNVSPGRHFVVLGEYDRSSNAEPLQVLSVSRAITHPSWNSTTMNNDVTLLKLASPAQYTTRISPVCLASSNEALTEGLTCVTTGWGRLSGVGNVTPAHLQQVALPLVTVNQCRQYWGSSITDSMICAGGAGASSCQGDSGGPLVCQKGNTWVLIGIVSWGTKNCNVRAPAVYTRVSKFSTWINQVIAYN

SEQ ID NO: 3692 - protein, 190 aa, Homo Sapiens
MLLLSLTLSLVLLGSSWGQQRLPLLRWFSHQPVLGGHCCPLQCQVLSVSRVSAWAADTEEKWAVQAITHPSWNSTTMNNDVTLLKLASPAQYTTRISPVCLASSNEALTEGLTCVTTGWGRLSGVGNVTPAHLQQVALPLVTVNQCRQYWGSSITDSMICAGGAGASSCQGDSGGPLVCQKGNTWVLIGI

SEQ ID NO: 3693 - protein, 110 aa, Homo Sapiens
MIRAAPPPLFLLLLLLLLLVSWASRGEAAPDQDEIQRLPGLAKQPSFRQYSGYLKGSGSKHLHYWFVESQKDPENSPVVLWLNGGPGCSSLDGLLTEHGPFLVQPDGVTL

SEQ ID NO: 3694 - protein, 480 aa, Homo Sapiens
MIRAAPPPLFLLLLLLLLLVSWASRGEAAPDQDEIQRLPGLAKQPSFRQYSGYLKGSGSKHLHYWFVESQKDPENSPVVLWLNGGPGCSSLDGLLTEHGPFLVQPDGVTLEYNPYSWNLIANVLYLESPAGVGFSYSDDKFYATNDTEVAQSNFEALQDFFRLFPEYKNNKLFLTGESYAGIYIPTLAVLVMQDPSMNLQGLAVGNGLSSYEQNDNSLVYFAYYHGLLGNRLWSSLQTHCCSQNKCNFYDNKDLECVTNLQEVARIVGNSGLNIYNLYAPCAGGVPSHFRYEKDTVVVQDLGNIFTRLPLKRMWHQALLRSGDKVRMDPPCTNTTAASTYLNNPYVRKALNIPEQLPQWDMCNFLVNLQYRRLYRSMNSQYLKLLSSQKYQILLYNGDVDMACNFMGDEWFVDSLNQKMEVQRRPWLVKYGDSGEQIAGFVKEFSHIAFLTIKGAGHMVPTDKPLAAFTMFSRFLNKQPY

SEQ ID NO: 3695 - protein, 480 aa, Homo Sapiens; identical to SEQ ID NO: 3694

SEQ ID NO: 3696 - protein, 480 aa, Homo Sapiens; identical to SEQ ID NO: 3694

SEQ ID NO: 3697 - protein, 82 aa, Homo Sapiens
MTSSPRAPPGEQGRGGAEMIRAAPPPLFLLLLLLLLLVSWASRGEAAPDQDEIQRLPGLAKQPSFRQYSGYLKGSGSKHLHY

SEQ ID NO: 3698 - protein, 481 aa, Homo Sapiens
MTSSPRAPPGEQGRGGAEMIRAAPPPLFLLLLLLLLLVSWASRGEAAPDQDEIQRLPGLAKQPSFRQYSGYLKGSGSKHLHYWFVESQKDPENSPVVLWLNGGPGCSSLDGLLTEHGPFLIANVLYLESPAGVGFSYSDDKFYATNDTEVAQSNFEALQDFFRLFPEYKNNKLFLTGESYAGIYIPTLAVLVMQDPSMNLQGLAVGNGLSSYEQNDNSLVYFAYYHGLLGNRLWSSLQTHCCSQNKCNFYDNKDLECVTNLQEVARIVGNSGLNIYNLYAPCAGGVPSHFRYEKDTVVVQDLGNIFTRLPLKRMWHQALLRSGDKVRMDPPCTNTTAASTYLNNPYVRKALNIPEQLPQWDMCNFLVNLQYRRLYRSMNSQYLKLLSSQKYQILLYNGDVDMACNFMGDEWFVDSLNQKMEVQRRPWLVKYGDSGEQIAGFVKEFSHIAFLTIKGAGHMVPTDKPLAAFTMFSRFLNKQPY

SEQ ID NO: 3699 - protein, 498 aa, Homo Sapiens
MTSSPRAPPGEQGRGGAEMIRAAPPPLFLLLLLLLLLVSWASRGEAAPDQDEIQRLPGLAKQPSFRQYSGYLKGSGSKHLHYWFVESQKDPENSPVVLWLNGGPGCSSLDGLLTEHGPFLVQPDGVTLEYNPYSWNLIANVLYLESPAGVGFSYSDDKFYATNDTEVAQSNFEALQDFFRLFPEYKNNKLFLTGESYAGIYIPTLAVLVMQDPSMNLQGLAVGNGLSSYEQNDNSLVYFAYYHGLLGNRLWSSLQTHCCSQNKCNFYDNKDLECVTNLQEVARIVGNSGLNIYNLYAPCAGGVPSHFRYEKDTVVVQDLGNIFTRLPLKRMWHQALLRSGDKVRMDPPCTNTTAASTYLNNPYVRKALNIPEQLPQWDMCNFLVNLQYRRLYRSMNSQYLKLLSSQKYQILLYNGDVDMACNFMGDEWFVDSLNQKMEVQRRPWLVKYGDSGEQIAGFVKEFSHIAFLTIKGAGHMVPTDKPLAAFTMFSRFLNKQPY

SEQ ID NO: 3700 - protein, 231 aa, Homo Sapiens
MTSSPRAPPGEQGRGGAEMIRAAPPPLFLLLLLLLLLVSWASRGEAAPDQDEIQRLPGLAKQPSFRQYSGYLKGSGSKHLHYWFVESQKDPENSPVVLWLNGGPGCSSLDGLLTEHGPFLVQPDGVTLEYNPYSWNLIANVLYLESPAGVGFSYSDDKFYATNDTEVAQSNFEALQDFFRLFPEYKNNKLFLTGESYAGIYIPTLAVLVMQDPSMNLQVQGAGCGQWTLLL

SEQ ID NO: 3701 - protein, 202 aa, Homo Sapiens
QDFFRLFPEYKNNKLFLTGESYAGIYIPTLAVLVMQDPSMNLQGLAVGNGLSSYEQNDNSLVYFAYYHGLLGNRLWSSLQTHCCSQNKCNFYDNKDLECVTNLQEVARIVGNSGLNIYNLYAPCAGGVPSHFRTLLWSRIWATSSLACHSSGCGIRHCCAQGIKCAWTPPAPTQQLLPPTSTTRTCGRPSTSRSSCHNGTCA

SEQ ID NO: 3702 - protein, 21 aa, Homo Sapiens
MWQLWASLCCLLVLANARSRP

SEQ ID NO: 3703 - protein, 32 aa, Homo Sapiens
MWQLWASLCCLLVLANARSRPSFHPLSDELVN

SEQ ID NO: 3704 - protein, 55 aa, Homo Sapiens
MWQLWASLCCLLVLANARSRPSFHPLSDELVNYVNKRNTTWQAGHNFYNVDMSYL

SEQ ID NO: 3705 - protein, 68 aa, Homo Sapiens
MWQLWASLCCLLVLANARSRPSFHPLSDELVNYVNKRNTTWQAGHNFYNVDMSYLKRLCGTFLGGPKP

SEQ ID NO: 3706 - protein, 70 aa, Homo Sapiens
MWQLWASLCCLLVLANARSRPSFHPLSDELVNYVNKRNTTWQAGHNFYNVDMSYLKRLCGTFLGGPKPPQ

SEQ ID NO: 3707 - protein, 70 aa, Homo Sapiens; identical to SEQ ID NO: 3706

SEQ ID NO: 3708 - protein, 92 aa, Homo Sapiens
MWQLWASLCCLLVLANARSRPSFHPLSDELVNYVNKRNTTWQAGHNFYNVDMSYLKRLCGTFLGGPKPPQRVMFTEDLKLPASFDAREQWPQ

SEQ ID NO: 3709 - protein, 98 aa, Homo Sapiens
MWQLWASLCCLLVLANARSRPSFHPLSDELVNYVNKRNTTWQAGHNFYNVDMSYLKRLCGTFLGGPKPPQRVMFTEDLKLPASFDAREQWPQCPTIKE

SEQ ID NO: 3710 - protein, 101 aa, Homo Sapiens
MWQLWASLCCLLVLANARSRPSFHPLSDELVNYVNKRNTTWQAGHNFYNVDMSYLKRLCGTFLGGPKPPQRVMFTEDLKLPASFDAREQWPQCPTIKEIRD

SEQ ID NO: 3711 - protein, 136 aa, Homo Sapiens
MWQLWASLCCLLVLANARSRPSFHPLSDELVNYVNKRNTTWQAGHNFYNVDMSYLKRLCGTFLGGPKPPQRVMFTEDLKLPASFDAREQWPQCPTIKEIRDQGSCGSCWAFGAVEAISDRICIHTNAHVSVEVSAE

SEQ ID NO: 3712 - protein, 143 aa, Homo Sapiens
MWQLWASLCCLLVLANARSRPSFHPLSDELVNYVNKRNTTWQAGHNFYNVDMSYLKRLCGTFLGGPKPPQRVMFTEDLKLPASFDAREQWPQCPTIKEIRDQGSCGSCWAFGAVEAISDRICIHTNAHVSVEVSAEDLLTCCG

SEQ ID NO: 3713 - protein, 143 aa, Homo Sapiens; identical to SEQ ID NO: 3712

SEQ ID NO: 3714 - protein, 149 aa, Homo Sapiens
MWQLWASLCCLLVLANARSRPSFHPLSDELVNYVNKRNTTWQAGHNFYNVDMSYLKRLCGTFLGGPKPPQRVMFTEDLKLPASFDAREQWPQCPTIKEIRDQGSCGSCWAFGAVEAISDRICIHTNAHVSVEVSAEDLLTCCGSMCGDG

SEQ ID NO: 3715 - protein, 165 aa, Homo Sapiens
MWQLWASLCCLLVLANARSRPSFHPLSDELVNYVNKRNTTWQAGHNFYNVDMSYLKRLCGTFLGGPKPPQRVMFTEDLKLPASFDAREQWPQCPTIKEIRDQGSCGSCWAFGAVEAISDRICIHTNAHVSVEVSAEDLLTCCGSMCGDGCNGGYPAEAWNFWTRK

SEQ ID NO: 3716 - protein, 170 aa, Homo Sapiens
MWQLWASLCCLLVLANARSRPSFHPLSDELVNYVNKRNTTWQAGHNFYNVDMSYLKRLCGTFLGGPKPPQRVMFTEDLKLPASFDAREQWPQCPTIKEIRDQGSCGSCWAFGAVEAISDRICIHTNAHVSVEVSAEDLLTCCGSMCGDGCNGGYPAEAWNFWTRKGLVSG

SEQ ID NO: 3717 - protein, 175 aa, Homo Sapiens
MWQLWASLCCLLVLANARSRPSFHPLSDELVNYVNKRNTTWQAGHNFYNVDMSYLKRLCGTFLGGPKPPQRVMFTEDLKLPASFDAREQWPQCPTIKEIRDQGSCGSCWAFGAVEAISDRICIHTNAHVSVEVSAEDLLTCCGSMCGDGCNGGYPAEAWNFWTRKGLVSGGLYES

SEQ ID NO: 3718 - protein, 339 aa, Homo Sapiens
MWQLWASLCCLLVLANARSRPSFHPLSDELVNYVNKRNTTWQAGHNFYNVDMSYLKRLCGTFLGGPKPPQRVMFTEDLKLPASFDAREQWPQCPTIKEIRDQGSCGSCWAFGAVEAISDRICIHTNAHVSVEVSAEDLLTCCGSMCGDGCNGGYPAEAWNFWTRKGLVSGGLYESHVGCRPYSIPPCEHHVNGSRPPCTGEGDTPKCSKICEPGYSPTYKQDKHYGYNSYSVSNSEKDIMAEIYKNGPVEGAFSVYSDFLLYKSGVYQHVTGEMMGGHAIRILGWGVENGTPYWLVANSWNTDWGDNGFFKILRGQDHCGIESEVVAGIPRTDQYWEKI

SEQ ID NO: 3719 - protein, 339 aa, Homo Sapiens; identical to SEQ ID NO: 3718

SEQ ID NO: 3720 - protein, 339 aa, Homo Sapiens; identical to SEQ ID NO: 3718

SEQ ID NO: 3721 - protein, 339 aa, Homo Sapiens; identical to SEQ ID NO: 3718

SEQ ID NO: 3722 - protein, 339 aa, Homo Sapiens; identical to SEQ ID NO: 3718

SEQ ID NO: 3723 - protein, 339 aa, Homo Sapiens; identical to SEQ ID NO: 3718

SEQ ID NO: 3724 - protein, 339 aa, Homo Sapiens; identical to SEQ ID NO: 3718

SEQ ID NO: 3725 - protein, 110 aa, Homo Sapiens
MWQLWASLCCLLVLANARSRPSFHPLSDELVNYVNKRNTTWQAGHNFYNVDMSYLKRLCGTFLGGPKPPQRVMFTEDLKLPASFDAREQWPQCPTIKEIRDQGSCGSCWL

SEQ ID NO: 3726 - protein, 76 aa, Homo Sapiens
SGVYQHVTGEMMGGHAIRILGWGVENGTPYWLVANSWNTDWGDNGFFKILRGQDHCGIESEVVAGIPRTDQYWEKI

SEQ ID NO: 3727 - protein, 141 aa, Homo Sapiens
MGAGPSLLLAALLLLLSGDGAVRCDTPANCTYLDLLGTWVFQVGSSGSQRDVNCSVMGPQEKKVVVYLQKLDTAYDDLGNSGHFTIIYNQGFEIVLNDYKWFAFFKDVTDFISHLFMQLGTVGIYDLPHLRNKLAMNRRWG

SEQ ID NO: 3728 - protein, 137 aa, Homo Sapiens
MGAGPSLLLAALLLLLSGDGAVRCDTPANCTYLDLLGTWVFQVGSSGSQRDVNCSVMGPQEKKVVVYLQKLDTAYDDLGNSGHFTIIYNQGFEIVLNDYKWFAFFKDVTDFISHLFMQLGTVGIYDLPHLRNKLVIK

SEQ ID NO: 3729 - protein, 463 aa, Homo Sapiens
MGAGPSLLLAALLLLLSGDGAVRCDTPANCTYLDLLGTWVFQVGSSGSQRDVNCSVMGPQEKKVVVYLQKLDTAYDDLGNSGHFTIIYNQGFEIVLNDYKWFAFFKYKEEGSKVTTYCNETMTGWVHDVLGRNWACFTGKKVGTASENVYVNIAHLKNSQEKYSNRLYKYDHNFVKAINAIQKSWTATTYMEYETLTLGDMIRRSGGHSRKIPRPKPAPLTAEIQQKILHLPTSWDWRNVHGINFVSPVRNQASCGSCYSFASMGMLEARIRILTNNSQTPILSPQEVVSCSQYAQGCEGGFPYLIAGKYAQDFGLVEEACFPYTGTDSPCKMKEDCFRYYSSEYHYVGGFYGGCNEALMKLELVHHGPMAVAFEVYDDFLHYKKGIYHHTGLRDPFNPFELTNHAVLLVGYGTDSASGMDYWIVKNSWGTGWGENGYFRIRRGTDECAIESIAVAATPIPKL

SEQ ID NO: 3730 - protein, 36 aa, Homo Sapiens
  misc_feature (1)..(1): Xaa can be any naturally occurring amino acid
XDVTDFISHLFMQLGTVGIYDLPHLRNKLAMNRRWG

SEQ ID NO: 3731 - protein, 245 aa, Homo Sapiens
  misc_feature (1)..(1): Xaa can be any naturally occurring amino acid
XVVDSPLARSARLPGPQEKKVVVYLQKLDTAYDDLGNSGHFTIIYNQGFEIVLNDYKWFAFFKYKEEGSKVTTYCNETMTGWVHDVLGRNWACFTGKKVGTASENVYVNIAHLKNSQEKYSNRLYKYDHNFVKAINAIQKSWTATTYMEYETLTLGDMIRRSGGHSRKIPRPKPAPLTAEIQQKILHLPTSWDWRNVHGINFVSPVRNQASCGSCYSFASMGMLEARIRILTNNSQTPILSPQEV

SEQ ID NO: 3732 - protein, 299 aa, Homo Sapiens
MPRPVVDRIPLHKFTSIRRTMSEVGGSVEDLIAKGPVSKYSQAVPAVTEGPIPEVLKNYMDAQYYGEIGIGTPPQCFTVVFDTGSSNLWVPSIHCKLLDIACWIHHKYNSDKSSTYVKNGTSFDIHYGSGSLSGYLSQDTVSVPCQSASSASALGGVKVERQVFGEATKQPGITFIAAKFDGILGMAYPRISVNNVLPVFDNLMQQKLVDQNIFSFYLSRDPDAQPGGELMLGGTDSKYYKGSLSYLNVTRKAYWQVHLDQVEVASGLTLCKEGCEAIVDTGTSLMVGPVDEVRELQKA

SEQ ID NO: 3733 - protein, 405 aa, Homo Sapiens
MQPSSLLPLALCLLAAPASALVRIPLHKFTSIRRTMSEVGGSVEDLIAKGPVSKYSQAVPAVTEGPIPEAQYYGEIGIGTPPQCFTVVFDTGSSNLWVPSIHCKLLDIACWIHHKYNSDKSSTYVKNGTSFDIHYGSGSLSGYLSQDTVSVPCQSASSASALGGVKVERQVFGEATKQPGITFIAAKFDGILGMAYPRISVNNVLPVFDNLMQQKLVDQNIFSFYLSRDPDAQPGGELMLGGTDSKYYKGSLSYLNVTRKAYWQVHLDQVEVASGLTLCKEGCEAIVDTGTSLMVGPVDEVRELQKAIGAVPLIQGEYMIPCEKVSTLPAITLKLGGKGYKLSPEDYTLKVSQAGKTLCLSGFMGMDIPPPSGPLWILGDVFIGRYYTVFDRDNNRVGFAEAARL

SEQ ID NO: 3734 - protein, 412 aa, Homo Sapiens
MQPSSLLPLALCLLAAPASALVRIPLHKFTSIRRTMSEVGGSVEDLIAKGPVSKYSQAVPAVTEGPIPEVLKNYMDAQYYGEIGIGTPPQCFTVVFDTGSSNLWVPSIHCKLLDIACWIHHKYNSDKSSTYVKNGTSFDIHYGSGSLSGYLSQDTVSVPCQSASSASALGGVKVERQVFGEATKQPGITFIAAKFDGILGMAYPRISVNNVLPVFDNLMQQKLVDQNIFSFYLSRDPDAQPGGELMLGGTDSKYYKGSLSYLNVTRKAYWQVHLDQVEVASGLTLCKEGCEAIVDTGTSLMVGPVDEVRELQKAIGAVPLIQGEYMIPCEKVSTLPAITLKLGGKGYKLSPEDYTLKVSQAGKTLCLSGFMGMDIPPPSGPLWILGDVFIGRYYTVFDRDNNRVGFAEAARL

SEQ ID NO: 3735 - protein, 276 aa, Homo Sapiens
MQPSSLLPLALCLLAAPASALVRIPLHKFTSIRRTMSEVGGSVEDLIAKGPVSKYSQAVPAVTEGPIPEVLKNYMDAQYYGEIGIGTPPQCFTVVFDTGSSNLWVPSIHCKLLDIACWIHHKYNSDKSSTYVKNGTSFDIHYGSGSLSGYLSQDTVSVPCQSASSASALGGVKVERQVFGEATKQPGITFIAAKFDGILGMAYPRISVNNVLPVFDNLMQQKLVDQNIFSFYLSRDPDAQPGGELMLGGTDSKYYKGSLSYLNVTRKAYWQVHLDQ

SEQ ID NO: 3736 - protein, 406 aa, Homo Sapiens
MQPSSLLPLALCLLAAPASALVRIPLHKFTSIRRTMSEVGGSVEDLIAKGPVSKYSQAVPAVTEGPIPEVLKNYMDAQYYGEIGIGTPPQCFTVVFDTGSSNLWVPSIHCKLLDIACWIHHKYNSDKSSTYVKNGTSFDIHYGSGSLSGYLSQDTVSVPCQSASSASALGGVKVERQVFGEATKQPGITFIAAKFDGILGMAYPRISVNNVLPVFDNLMQQKLVDQNIFSFYLSRDPDAQPGGELMLGGTDSKYYKGSLSYLNVTRKAYWVEVASGLTLCKEGCEAIVDTGTSLMVGPVDEVRELQKAIGAVPLIQGEYMIPCEKVSTLPAITLKLGGKGYKLSPEDYTLKVSQAGKTLCLSGFMGMDIPPPSGPLWILGDVFIGRYYTVFDRDNNRVGFAEAARL

SEQ ID NO: 3737 - protein, 405 aa, Homo Sapiens
MQPSSLLPLALCLLAAPASALVRIPLHKFTSIRRTMSEVGGSVEDLIAKGPVSKYSQAVPAVTEGPIPEVLKNYMDAQYYGEIGIGTPPQCFTVVFDTGSSNLWVPSIHCKLLDIACWIHHKYNSDKSSTYVKNGTSFDIHYGSGSLSGYLSQDTVSVPCQSASSASALGGVKVERQVFGEATKQPGITFIAAKFDGILGMAYPRISVNNVLPVFDNLMQQKLVDQNIFSFYLSRDPDAQPGGELMLGGTDSKYYKGSLSYLNVTRKAYWQVHLDQVEVASGLTLCKEGCEAIVDTGTSLMVGPVDEVRELQKAIGAVPLIQGEVSTLPAITLKLGGKGYKLSPEDYTLKVSQAGKTLCLSGFMGMDIPPPSGPLWILGDVFIGRYYTVFDRDNNRVGFAEAARL

SEQ ID NO: 3738 - protein, 409 aa, Homo Sapiens
MQPSSLLPLALCLLAAPASALVRIPLHKFTSIRRTMSEVGGSVEDLIAKGPVSKYSQAVPAVTEGPIPEVLKNYMDAQYYGEIGIGTPPQCFTVVFDTGSSNLWVPSIHCKLLDIACWIHHKYNSDKSSTYVKNGTSFDIHYGSGSLSGYLSQDTVSVPCQSASSASALGGVKVERQVFGEATKQPGITFIAAKFDGILGMAYPRISVNNVLPVFDNLMQQKLVDQNIFSFYLSRDPDAQPGGELMLGGTDSKYYKGSLSYLNVTRKAYWQVHLDQVEVASGLTLCKEGCEAIVDTGTSLMVGPVDEVRELQKAIGAVPLIQGEYMIPCEKVSTLPAITLKLGGKGYKLSPEDYTLKAGKTLCLSGFMGMDIPPPSGPLWILGDVFIGRYYTVFDRDNNRVGFAEAARL

SEQ ID NO: 3739 - protein, 410 aa, Homo Sapiens
MQPSSLLPLALCLLAAPASALVRIPLHKFTSIRRTMSEVGGSVEDLIAKGPVSKYSQAVPAVTEGPIPEVLKNYMDYYGEIGIGTPPQCFTVVFDTGSSNLWVPSIHCKLLDIACWIHHKYNSDKSSTYVKNGTSFDIHYGSGSLSGYLSQDTVSVPCQSASSASALGGVKVERQVFGEATKQPGITFIAAKFDGILGMAYPRISVNNVLPVFDNLMQQKLVDQNIFSFYLSRDPDAQPGGELMLGGTDSKYYKGSLSYLNVTRKAYWQVHLDQVEVASGLTLCKEGCEAIVDTGTSLMVGPVDEVRELQKAIGAVPLIQGEYMIPCEKVSTLPAITLKLGGKGYKLSPEDYTLKVSQAGKTLCLSGFMGMDIPPPSGPLWILGDVFIGRYYTVFDRDNNRVGFAEAARL

SEQ ID NO: 3740 - protein, 94 aa, Homo Sapiens
MSEVGGSVEDLIAKGPVSKYSQAVPAVTEGPIPEVLKNYMDAQYYGEIGIGTPPQCFTVVFDTGSSNLWVPSIHCKLLDIACWIHHKYNSDKSS

SEQ ID NO: 3741 - protein, 199 aa, Homo Sapiens
MSEVGGSVEDLIAKGPVSKYSQAVPAVTEGPIPEVLKNYMDAQYYGEIGIGTPPQCFTVVFDTGSSNLWVPSIHCKLLDIACWIHHKYNSDKSSTYVKNGTSFDIHYGSGSLSGYLSQDTVSVPCQSASSASALGGVKVERQVFGEATKQPGITFIAAKFDGILGMAYPRISVNNVLPVFDNLMQQKLVDQNIFSFYLS

SEQ ID NO: 3742 - protein, 189 aa, Homo Sapiens
NVTRKAYWQVHLDQSPEGRRVQPSQGRGSQGGALGPQGTLQSRQGLHALTPRRVEVASGLTLCKEGCEAIVDTGTSLMVGPVDEVRELQKAIGAVPLIQGEYMIPCEKVSTLPAITLKLGGKGYKLSPEDYTLKVSQAGKTLCLSGFMGMDIPPPSGPLWILGDVFIGRYYTVFDRDNNRVGFAEAARL

SEQ ID NO: 3743 - protein, 396 aa, Homo Sapiens
MKTLLLLLLVLLELGEAQGSLHRVPLRRHPSLKKKLRARSQLSEFWKSHNLDMIQFTESCSMDQSAKEPLINYLDMEYFGTISIGSPPQNFTVIFDTGSSNLWVPSVYCTSPACKTHSRFQPSQSSTYSQPGQSFSIQYGTGSLSGIIGADQVSVEGLTVVGQQFGESVTEPGQTFVDAEFDGILGLGYPSLAVGGVTPVFDNMMAQNLVDLPMFSVYMSSNPEGGAGSELIFGGYDHSHFSGSLNWVPVTKQAYWQIALDNIQVGGTVMFCSEGCQAIVDTGTSLITGPSDKIKQLQNAIGAAPVDGEYAVECANLNVMPDVTFTINGVPYTLSPTAYTLLDFVDGMQFCSSGFQGLDIHPPAGPLWILGDVFIRQFYSVFDRGNNRVGLAPAVP

SEQ ID NO: 3744 - protein, 363 aa, Homo Sapiens
MKTLLLLLLVLLELGEAQGSLHRVPLRRHPSLKKKLRARSQLSEFWKSHNLDMIQFTESCSMDQSAKEPLINYLDMEYFGTISIGSPPQNFTVIFDTGSSNLWVPSVYCTSPACKTHSRFQPSQSSTYSQPGQSFSIQYGTGSLSGIIGADQVSVEGLTVVGQQFGESVTEPGQTFVDAEFDGILGLGYPSLAVGGVTPVFDNMMAQNLVDLPMFSVYMSSNPEGGAGSELIFGGYDHSHFSGSLNWVPVTKQAYWQIALDNMLWSVPTLTSCRMSPSPLTESPIPSAQLPTPYWTSWMECSSAAVAFKDLTSTLQLGPSGSWGMSSFDSFTQSLTVGITVWDWPQQSPKEGPCVCACLSDRP

SEQ ID NO: 3745 - protein, 484 aa, Homo Sapiens [sequence omitted]

SEQ ID NO: 3746 - protein, 120 aa, Homo Sapiens
MVCRLPVSKKTLLCSFQVLDELGRHVLLRKDCGPVDTKVPGAGEPKSAFTQGSAMISSLSQNHPDNRNETFSSVISLLNEDPLSQDLPVKMASIFKNFVITYNRTYESKEEARWRLSVFV

SEQ ID NO: 3747 - protein, 283 aa, Homo Sapiens
  misc_feature (1)..(1): Xaa can be any naturally occurring amino acid
XQNHPDNRNETFSSVISLLNEDPLSQDLPVKMASIFKNFVITYNRTYESKEARWRLSVFVNNMVRAQKIQALDRGTAQYGVTKFSDLTEEEFRTIYLNTLLRKEPGNKMKQAKSVGDLAPPEWDWRSKGAVTKVKDQGMCGSCWAFSVTGNVEGQWFLNQGTLLSLSEQELLDCDKMDKACMGGLPSNAYSAIKNLGGLETEDDYSYQGHMQSCNFSAEKAKVYINDSVELSQNEQKLAAWLAKRGPISVAINAFGMQFYRHGISRPLRPLCSPWLIDHAVLL

SEQ ID NO: 3748 - protein, 82 aa, Homo Sapiens
  misc_feature (1)..(1): Xaa can be any naturally occurring amino acid
XRTIYLNTLLRKEPGNKMKQAKSVGDLAPPEWDWRSKGAVTKVKDQGMCGSCWAFSVTGNVEGQWFLNQGTLLSLSEQALGL

SEQ ID NO: 3749 - protein, 255 aa, Homo Sapiens
MQPLLLLLAFLLPTGAEAGEIIGGRESRPHSRPYMAYLQIQSPAGQSRCGGFLVREDFVLTAAHCWGSNINVTLGAHNIQRRENTQQHITARRAIRHPQYNQRTIQNDIMLLQLSRRVRRNRNVNPVALPRAQEGLRPGTLCTVAGWGRVSMRRGTDTLREVQLRVQRDRQCLRIFGSYDPRRQICVGDRRERKAAFKGDSGGPLLCNNVAHGIVSYGKSSGVPPEVFTRVSSFLPWIRTTMRSFKLLDQMETPL

SEQ ID NO: 3750 - protein, 134 aa, Homo Sapiens
MALNQFSDMSFAEIKHKYLWSEPQNCSATKSNYLRGTGPYPPSVDWRKKGNFVSPVKNQGACGSCWTFSTTGALESAIAIATGKMLSLAEQQLVDCAQDFNNHGCQGGLPSQAFEYILYNKGIMGEDTYPYQGK

SEQ ID NO: 3751 - protein, 323 aa, Homo Sapiens
MWATLPLLCAAELCVNSLEKFHFKSWMSKHRKTYSTEEYHHRLQTFASNWRKINAHNNGNHTFKMALNQFSDMSFAEIKHKYLWSEPQNCSATKSNYLRGTGPYPPSVDWRKKGNFVSPVKNQGACGSCWTFSTTGALESAIAIATGKMLSLAEQQLVDCAQDFNNHGCQGGLPSQAFEYILYNKGIMGEDTYPYQGKDGYCKFQPGKAIGFVKDVANITIYDEEAMVEAVALYNPVSFAFEVTQDFMMYRTGIYSSTSCHKTPDKVNHAVLAVGYGEKNGIPYWIVKNSWGPQWGMNGYFLIERGKNMCGLAACASYPIPLV

SEQ ID NO: 3752 - protein, 335 aa, Homo Sapiens
MWATLPLLCAGAWLLGVPVCGAAELCVNSLEKFHFKSWMSKHRKTYSTEEYHHRLQTFASNWRKINAHNNGNHTFKMALNQFSDMSFAEIKHKYLWSEPQNCSATKSNYLRGTGPYPPSVDWRKKGNFVSPVKNQGACGSCWTFSTTGALESAIAIATGKMLSLAEQQLVDCAQDFNNHGCQGGLPSQAFEYILYNKGIMGEDTYPYQGKDGYCKFQPGKAIGFVKDVANITIYDEEAMVEAVALYNPVSFAFEVTQDFMMYRTGIYSSTSCHKTPDKVNHAVLAVGYGEKNGIPYWIVKNSWGPQWGMNGYFLIERGKNMCGLAACASYPIPLV

SEQ ID NO: 3753 - protein, 62 aa, Homo Sapiens
MWATLPLLCAGAWLLGVPVCGAAELCVNSLEKFHFKSWMSKKTKAHCVLVAESVGEHQCMCF

SEQ ID NO: 3754 - protein, 41 aa, Homo Sapiens
MWATLPLLCAGAWLLGVPVCGAAELCVNSLGTQRARRPRGC

SEQ ID NO: 3755 - protein, 118 aa, Homo Sapiens
MWATLPLLCAGAWLLGVPVCGAAELCVNSLVAGLSPPLGPWSLRSPSQPERCCPWRNSSWWTAPRTSIITAAKGVSPARLSSISCTTRGSWVKTPTPTRARMVIASSNLERPSALSRM

SEQ ID NO: 3756 - protein, 258 aa, Homo Sapiens
MHKENEEIYNVSENRKHCPIFPCPLLTRSGKVPEFRHEREERLEEMIRRQNLDGNLSFVMWGLKVLLLPVVSFALYPEEILDTHWELWKKTHRKQYNNKVDEISRRLIWEKNLKYISIHNLEASLGVHTYELAMNHLGDMTSEEVVQKMTGLKVPLSHSRSNDTLYIPEWEGRAPDSVDYRKKGYVTPVKNQGQCGSCWAFSSVGALEGQLKKKTGKLLNLSPQNLVDCVSENDGCGGGYMTNAFQYVQKNRGIDSED

SEQ ID NO: 3757 - protein, 329 aa, Homo Sapiens
MWGLKVLLLPVVSFALYPEEILDTHWELWKKTHRKQYNNKVDEISRRLIWEKNLKYISIHNLEASLGVHTYELAMNHLGDMTSEEVVQKMTGLKVPLSHSRSNDTLYIPEWEGRAPDSVDYRKKGYVTPVKNQGQCGSCWAFSSVGALEGQLKKKTGKLLNLSPQNLVDCVSENDGCGGGYMTNAFQYVQKNRGIDSEDAYPYVGQEESCMYNPTGKAAKCRGYREIPEGNEKALKRAVARVGPVSVAIDASLTSFQFYSKGVYYDESCNSDNLNHAVLAVGYGIQKGNKHWIIKNSWGENWGNKGYILMARNKNNACGIANLASFPKM

SEQ ID NO: 3758 - protein, 333 aa, Homo Sapiens [sequence omitted]

SEQ ID NO: 3759 - protein, 333 aa, Homo Sapiens [sequence omitted]

SEQ ID NO: 3760 - protein, 225 aa, Homo Sapiens
MNPTLILAAFCLGIASATLTFDHSLEAQWTKWKAMHNRLYGMNEEGWRRAVWEKNMKMIELHNQEYREGKHSFTMAMNAFGDMTSEEFRQVMNGFQNRKPRKGKVFQEPLFYEAPRSVDWREKGYVTPVKNQGQCGSCWAFSATGALEGQMFRKTGRLISLSEQNLVDCSGPQGNEGCNGGLMDYAFQYVQDNGGLDSEESYPYEATVSGAPCHHSSSAFGRWTL

SEQ ID NO: 3761 - protein, 321 aa, Homo Sapiens
MDVRALPWLPWLLWLLCRGGGDADSRAPFTPTWPRSREREAAAFRESLNRHRYLNSLFPSENSTAFYGINQFSYLFPEEFKAIYLRSKPSKFPRYSAEVHMSIPNVSLPLRFDWRDKQVVTQVRNQQMCGGCWAFSVVGAVESAYAIKGKPLEDLSVQQVIDCSYNNYGCNGGSTLNALNWLNKMQVKLVKDSEYPFKAQNGLCHYFSGSHSGFSIKGYSAYDFSDQEDEMAKALLTFGPLVVIVDAVSWQDYLGGIIQHHCSSGEANHAVLITGFDKTGSTPYWIVRNSWGSSWGVDGYAHVKMGSNVCGIADSVSSIFV

SEQ ID NO: 3762 - protein, 117 aa, Homo Sapiens
IIDNKGIDSDASYPYKAMDQKCQYDSKYRAATCSKYTELPYGREDVLKEAVANKGPVSVGVDARHPSFFLYRSDGVLLCCQAGVRWHDLSSLQPLPPGFKQFSCLSLLSSWDYRCLL

SEQ ID NO: 3763 - protein, 281 aa, Homo Sapiens
MKRLVCVLLVCSSAVAQLHKDPTLDHHWHLWKKTYGKQYKEKNEEAVRRLIWEKNLKFVMLHNLEHSMGMHSYDLGMNHLGDMGSCGACWAFSAVGALEAQLKLKTGKLVSLSAQNLVDCSTEKYGNKGCNGGFMTTAFQYIIDNKGIDSDASYPYKAMDQKCQYDSKYRAATCSKYTELPYGREDVLKEAVANKGPVSVGVDARHPSFFLYRSGVYYEPSCTQNVNHGVLVVGYGDLNGKEYWLVKNSWGHNFGEEGYIRMARNKGNHCGIASFPSYPEI

SEQ ID NO: 3764 - protein, 331 aa, Homo Sapiens
MKRLVCVLLVCSSAVAQLHKDPTLDHHWHLWKKTYGKQYKEKNEEAVRRLIWEKNLKFVMLHNLEHSMGMHSYDLGMNHLGDMTSEEVMSLMSSLRVPSQWQRNITYKSNPNRILPDSVDWREKGCVTEVKYQGSCGACWAFSAVGALEAQLKLKTGKLVSLSAQNLVDCSTEKYGNKGCNGGFMTTAFQYIIDNKGIDSDASYPYKAMDQKCQYDSKYRAATCSKYTELPYGREDVLKEAVANKGPVSVGVDARHPSFFLYRSGVYYEPSCTQNVNHGVLVVGYGDLNGKEYWLVKNSWGHNFGEEGYIRMARNKGNHCGIASFPSYPEI

SEQ ID NO: 3765 - protein, 96 aa, Homo Sapiens
  misc_feature (1)..(1): Xaa can be any naturally occurring amino acid
XVLKEAVANKGPVSVGVDARHPSFFLYRSGVYYEPSCTQNVNHGVLVVGYGDLNGKEYWLVKNSWGHNFGEEGYIRMARNKGNHCGIASFPSYPEI

SEQ ID NO: 3766 - protein, 5 aa, Homo Sapiens
  misc_feature (1)..(1): Xaa can be any naturally occurring amino acid
XYPEI

SEQ ID NO: 3767 - protein, 334 aa, Homo Sapiens
MNLSLVLAAFCLGIASAVPKFDQNLDTKWYQWKATHRRLYGANEEGWRRAVWEKNMKMIELHNGEYSQGKHGFTMAMNAFGDMTNEEFRQMMGCFRNQKFRKGKVFREPLFLDLPKSVDWRKKGYVTPVKNQKQCGSCWAFSATGALEGQMFRKTGKLVSLSEQNLVDCSRPQGNQGCNGGFMARAFQYVKENGGLDSEESYPYVAVDEICKYRPENSVANDTGFTVVAPGKEKALMKAVATVGPISVAMDAGHSSFQFYKSGIYFEPDCSSKNLDHGVLVVGYGFEGANSNNSKYWLVKNSWGPEWGSNGYVKIAKDKNNHCGIATAASYPNV

SEQ ID NO: 3768 - protein, 334 aa, Homo Sapiens; identical to SEQ ID NO: 3767

SEQ ID NO: 3769 - protein, 211 aa, Homo Sapiens
ALTAHPSCLLALLVAGLAQGIRGPLRAQDLGPQPLELKEAFKLFQIQFNRSYLSPEEHAHRLDIFAHNLAQAQRLQEEDLGTAEFGVTPFSDLTEEEFGQLYGYRRAAGGVPSMGREIRSEEPEESVPFSCDWRKVASAISPIKDQKNCNCCWAMAAAGNIETLWRISFWDFVDVSVQGGLASEKDYPFQGKVRAHRCHPKKYQKVAWIQD

SEQ ID NO: 3770 - protein, 376 aa, Homo Sapiens
MALTAHPSCLLALLVAGLAQGIRGPLRAQDLGPQPLELKEAFKLFQIQFNRSYLSPEEHAHRLDIFAHNLAQAQRLQEEDLGTAEFGVTPFSDLTEEEFGQLYGYRRAAGGVPSMGREIRSEEPEESVPFSCDWRKVASAISPIKDQKNCNCCWAMAAAGNIETLWRISFWDFVDVSVQELLDCGRCGDGCHGGFVWDAFITVLNNSGLASEKDYPFQGKVRAHRCHPKKYQKVAWIQDFIMLQNNEHRIAQYLATYGPITVTINMKPLQLYRKGVIKATPTTCDPQLVDHSVLLVGFGSVKSEEGIWAETVSSQSQPQPPHPTPYWILKNSWGAQWGEKGYFRLHRGSNTCGITKFPLTARVQKPDMKPRVSCPP

SEQ ID NO: 3771 - protein, 364 aa, Homo Sapiens
MALTAHPSCLLALLVAGLAQGIRGPLRAQDLGPQPLELKEAFKLFQIQFNRSYLSPEEHAHRLDIFAHNLAQAQRLQEEDLGTAEFGVTPFSDLTEEEFGQLYGYRRAAGGVPSMGREIRSEEPEESVPFSCDWRKVASAISPIKDQKNCNCCWAMAAAGNIETLWRISFWDFVDVSVQELLDCGRCGDGCHGGFVWDAFITVLNNSGLASEKDYPFQGKVRAHRCHPKKYQKVAWIQDFIMLQNNEHRIAQYLATYGPITVTINMKPLQLYRKGVIKATPTTCDPQLVDHSVLLVGFGSVKSEEGIWAETVSSQSQPQPPHPTPYWILKNSWGAQWGEKVSVIYWGRGQGRTGLFPPSRPYVP

SEQ ID NO: 3772 - protein, 303 aa, Homo Sapiens
MARRGPGWRPLLLLVLLAGAAQGGLYFRRGQTCYRPLRGDGLAPLGRSTYPRPHEYLSPADLPKSWDWRNVDGVNYASITRNQHIPQYCGSCWAHASTSAMADRINIKRKGAWPSTLLSVQNVIDCGNAGSCEGGNDLSVWDYAHQHGIPDETCNNYQAKDQECDKFNQCGTCNEFKECHAIRNYTLWRVGDYGSLSGREKMMAEIYANGPISCGIMATERLANYTGGIYAEYQDTTYINHVVSVAGWGISDGTEYWIVRNSWGEPWGERGWLRIVTSTYKDGKGARYNLAIEEHCTFGDPIV

SEQ ID NO: 3773 - protein, 3623 aa, Homo Sapiens
MMNMSLPFLWSLLTLLIFAEVNGEAGELELQRQKRSINLQQPRMATERGNLVFLTGSAQNIEFRTGSLGKIKLNDEDLSECLHQIQKNKEDIIELKGSAIGLPQNISSQIYQLNSKLVDLERKFQGLQQTVDKKVCSSNPCQNGGTCLNLHDSFFCICPPQWKGPLCSADVNECEIYSGTPLSCQNGGTCVNTMGSYSCHCPPETYGPQCASKYDDCEGGSVARCVHGICEDLMREQAGEPKYSCVCDAGWMFSPNSPACTLDRDECSFQPGPCSTLVQCFNTQGSFYCGACPTGWQGNGYICEDINECEINNGGCSVAPPVECVNTPGSSHCQACPPGYQGDGRVCTLTDICSVSNGGCHPDASCSSTLGSLPLCTCLPGYTGNGYGPNGCVQLSNICLSHPCLNGQCIDTVSGYFCKCDSGWTGVNCTENINECLSNPCLNGGTCVDGVDSFSCECTRLWTGALCQVPQQVCGESLSGINGSFSYRSPDVGYVHDVNCFWVIKTEMGKVLRITFTFFRLESMDNCPHEFLQVYDGDSSSAFQLGRFCGSSLPHELLSSDNALYFHLYSEHLRNGRGFTVRWETQQPECGGILTGPYGSIKSPGYPGNYPPGRDCVWIVVTSPDLLVTFTFGTLSLEHHDDCNKDYLEIRDGPLYQDPLLGKFCTTFSVPPLQTTGPFARIHFHSDSQISDQGFHITYLTSPSDLRCGGNYTDPEGELFLPELSGPFTHTRQCVYMMKQPQGEQIQINFTHVELQCQSDSSQNYIEVRDGETLLGKVCGNGTISHIKSITNSVWIRFKIDASVEKASFRAVYQVACGDELTGEGVIRSPFFPNVYPGERTCRWTIHQPQSQVILLNFTVFEIGSSAHCETDYVEIGSSSILGSPENKKYCGTDIPSFITSVYNFLYVTFVKSSSTENHGFMAKFSAEDLACGEILTESTGTIQSPGHPNVYPHGINCTWHILVQPNHLIHLMFETFHLEFHYNCTNDYLEVYDTDSETSLGRYCGKSIPPSLTSSGNSLMLVFVTDSDLAYEGFLINYEAISAATACLQDYTDDLGTFTSPNFPNNYPNNWECIYRITVRTGQLIAVHFTNFSLEEAIGNYYTDFLEIRDGGYEKSPLLGIFYGSNLPPTIISHSNKLWLKFKSDQIDTRSGFSAYWDGSSTGCGGNLTTSSGTFISPNYPMPYYHSSECYWWLKSSHGSAFELEFKDFHLEHHPNCTLDYLAVYDGPSSNSHLLTQLCGDEKPPLIRSSGDSMFIKLRTDEGQQGRGFKAEYRQTCENVVIVNQTYGILESIGYPNPYSENQHCNWTIRATTGNTVNYTFLAFDLEHHINCSTDYLELYDGPRQMGRYCGVDLPPPGSTTSSKLQVLLLTDGVGRREKGFQMQWFVYGCGGELSGATGSFSSPGFPNRYPPNKECIWYIRTDPGSSIQLTIHDFDVEYHSRCNFDVLEIYGGPDFHSPRIAQLCTQRSPENPMQVSSTGNELAIRFKTDLSINGRGFNASWQAVTGGCGGIFQAPSGEIHSPNYPSPYRSNTDCSWVIRVDRNHRVLLNFTDFDLEPQDSCIMAYDGLSSTMSRLARTCGREQLANPIVSSGNSLFLRFQSGPSRQNRGFRAQFRQACGGHILTSSFDTVSSPRFPANYPNNQNCSWIIQAQPPLNHITLSFTHFELERSTTCARDFVEILDGGHEDAPLRGRYCGTDMPHPITSFSSALTLRFVSDSSISAGGFHTTVTASVSACGGTFYMAEGIFNSPGYPDIYPPNVECVWNIVSSPGNRLQLSFISFQLEDSQDCSRDFVEIREGNATGHLVGRYCGNSFPLNYSSIVGHTLWVRFISDGSGSGTGFQATFMKIFGNDNIVGTHGKVASPFWPENYPHNSNYQWTVNVNASHVVHGRILEMDIEEIQNCYYDKLRIYDGPSIHARLIGAYCGTQTESFSSTGNSLTFHFYSDSSISGKGFLLEWFAVDAPDGVLPTIAPGACGGFLRTGDAPVFLFSPGWPDSYSNRVDCTWLIQAPDSTVELNILSLDIESHRTCAYDSLVIRDGDNNLAQQLAVLCGREIPGPIRSTGEYMFIRFTSDSSVTRAGFNASFHKSCGGYLHADRGIITSPKYPETYPSNLNCSWHVLVQSGLTIAVHFEQPFQIPNGDSSCNQGDYLVLRNGPDICSPPLGPPGGNGHFCGSHASSTLFTSDNQMFVQFISDHSNEGQGFKIKYEAKSLACGGNVYIHDADSAGYVTSPNHPHNYPPHADCIWILAAPPETRIQLQFEDRFDIEVTPNCTSNYLELRDGVDSDAPILSKFCGTSLPSSQWSSGEVMYLRFRSDNSPTHVGFKAKYSIAQCGGRVPGQSGVVESIGHPTLPYRDNLFCEWHLQGLSGHYLTISFEDFNLQNSSGCEKDFVEIWDNHTSGNILGRYCGNTIPDSIDTSSNTAVVRFVTDGSVTASGFRLRFESSMEECGGDLQGSIGTFTSPNYPNPNPHGRICEWRITAPEGRRITLMFNNLRLATHPSCNNEHVIVFNGIRSNSPQLEKLCSSVNVSNEIKSSGNTMKVIFFTDGSRPYGGFTASYTSSEDAVCGGSLPNTPEGNFTSPGYDGVRNYSRNLNCEWTLSNPNQGNSSISIHFEDFYLESHQDCQFDVLEFRVGDADGPLMWRLCGPSKPTLPLVIPYSQVWIHFVTNERVEHIGFHAKYSFTDCGGIQIGDSGVITSPNYPNAYDSLTHCSSLLEAPQGHTITLTFSDFDIEPHTTCAWDSVTVRNGGSPESPIIGQYCGNSNPRTIQSGSNQLVVTFNSDHSLQGGGFYATWNTQTLGCGGIFHSDNGTIRSPHWPQNFPENSRCSWTAITHKSKHLEISFDNNFLIPSGDGQCQNSFVKVWAGTEEVDKALLATGCGNVAPGPVITPSNTFTAVFQSQEAPAQGFSASFVSRCGSNFTGPSGYIISPNYPKQYDNNMNCTYVIEANPLSVVLLTFVSFHLEARSAVTGSCVNDGVHIIRGYSVMSTPFATVCGDEMPAPLTIAGPVLLNFYSNEQITDFGFKFSYRIISCGGVFNFSSGIITSPAYSYADYPNDMHCLYTITVSDDKVIELKFSDFDVVPSTSCSHDYLAIYDGANTSDPLLGKFCGSKRPPNVKSSNNSMLLVFKTDSFQTAKGWKMSFRQTLGPQQGCGGYLTGSNNTFASPDSDSNGMYDKNLNCVWIIIAPVNKVIHLTFNTFALEAASTRQRCLYDYVKLYDGDSENANLAGTFCGSTVPAPFISSGNFLTVQFISDLTLEREGFNATYTIMDMPCGGTYNATWTPQNISSPNSSDPDVPFSICTWVIDSPPHQQVKITVWALQLTSQDCTQNYLQLQDSPQGHGNSRFQFCGRNASAVPVFYSSMSTAMVIFKSGVVNRNSRMSFTYQIADCNRDYHKAFGNLRSPGWPDNYDNDKDCTVTLTAPQNHTISLFFHSLGIENSVECRNDFLEVRNGSNSNSPLLGKYCGTLLPNPVFSQNNELYLRFKSDSVTSDRGYEIIWTSSPSGCGGTLYGDRGSFTSPGYPGTYPNNTYCEWVLVAPAGRLVTINFYFISIDDPGDCVQNYLTLYDGPNASSPSSGPYCGGDTSIAPFVASSNQVFIKFHADYARRPSAFRLTWDS

SEQ ID NO: 3774 - protein, 170 aa, Homo Sapiens
MMNMSLPFLWSLLTLLIFAEVNGEAGELELQRQKRSINLQQPRMATERGNLVFLTGSAQNIEFRTGSLGKIKLNDEDLSECLHQIQKNKEDIIELKGSAIGLPQNISSQIYQLNSKLVDLERKFQGLQQTVDKKVCSSNPCQNGGTCLNLHDSFFCICPPQWKVSHLLFG

SEQ ID NO: 3775 - protein, 105 aa, Homo Sapiens
NSKLVDLERKFQGLQQTVDKKVCSSNPCQNGGTCLNLHDSFFCICPPQWKGPLCSADVNECEIYSGTPLSCQNGGTCVNTMGSYRNPCSNIPKEPEEGSRDWHRE

SEQ ID NO: 3776 - protein, 88 aa, Homo Sapiens
STGNELAIRFKTDLSINGRGFNASWQAVTGGCGGIFQAPSGEIHSPNYPSPYRSNTDCSWVIRVDRNHRVLLNFTDFDLEPQDSCIMV

SEQ ID NO: 3777 - protein, 198 aa, Homo Sapiens
MIGSGLAGSGGAGGPSSTVTWCALFSNHVAATQASLLLSFVWMPALLPVASRLLLLPRVLLTMASGSPPTQPSPASDSGSGYVPGSVSAAFVTCPNEKVAKEIARAVVEKRLAACVNLIPQITSIYEWKGKIEEDSEVLMMIKTQSSLVPALTDFVRSVHPYEVAEVIALPVEQGNFPYLQWVRQVTESVSDSITVLP

SEQ ID NO: 3778 - protein, 135 aa, Homo Sapiens
MPALLPVASRLLLLPRVLLTMASGSPPTQPSPASDSGSGYVPGSVSAAFVTCPNEKVAKEIARAVVEKRLAACVNLIPQITSIYEWKGKIEEDSEVLMMIKTQSSLVPALTDFVRSVHPYEVAESCHDEPCSCSS

SEQ ID NO: 3779 - protein, 156 aa, Homo Sapiens
MPALLPVASRLLLLPRVLLTMASGSPPTQPSPASDSGSGYVPGSVSAAFVTCPNEKVAKEIARAVVEKRLAACVNLIPQITSIYEWKGKIEEDSEVLMMIKTQSSLVPALTDFVRSVHPYEVAEVIALPVEQGNFPYLQWVRQVTESVSDSITVLP

SEQ ID NO: 3780 - protein, 156 aa, Homo Sapiens; identical to SEQ ID NO: 3779

SEQ ID NO: 3781 - protein, 156 aa, Homo Sapiens; identical to SEQ ID NO: 3779

SEQ ID NO: 3782 - protein, 156 aa, Homo Sapiens; identical to SEQ ID NO: 3779

SEQ ID NO: 3783 - protein, 155 aa, Homo Sapiens
MSGGRAPAVLLGGVASLLLSFVWMPALLPVASRLLLLPRVLLTMASGSPPTQPSPASDSGSGYVPGSVSAAFVTCPNEKVAKEIARAVVEKRLAACVNLIPQITSIYEWKGKIEEDSEVLMFCAPLRSGRGNCIACGTGELSVPAVGAPGHRVSF

SEQ ID NO: 3784 - protein, 179 aa, Homo Sapiens
MSGGRAPAVLLGGVASLLLSFVWMPALLPVASRLLLLPRVLLTMASGSPPTQPSPASDSGSGYVPGSVSAAFVTCPNEKVAKEIARAVVEKRLAACVNLIPQITSIYEWKGKIEEDSEVLMMIKTQSSLVPALTDFVRSVHPYEVAEVIALPVEQGNFPYLQWVRQVTESVSDSITVLP

SEQ ID NO: 3785 - protein, 42 aa, Homo Sapiens
MSGGRAPAVLLGGVVSDRPRPAPSGPRSLDRYPHPKSQRLAP

SEQ ID NO: 3786 - protein, 111 aa, Homo Sapiens
  misc_feature (1)..(1): Xaa can be any naturally occurring amino acid
XSSTVTWCALFSNHVAATQASLLLSFVWMPALLPVASRLLLLPRVLLTMASGSPPTQPSPASDSGSGYVPGSVSAAFVTCPNEKVAKEIARAVVEKRLAACVNLIPQITSM

SEQ ID NO: 3787 - protein, 55 aa, Homo Sapiens
MAPISLSWLLRLATFCHLTVLLAAWRRDSTGCSVPTRRSNGSRTRCSIWTARLLP

SEQ ID NO: 3788 - protein, 397 aa, Homo Sapiens
MAPISLSWLLRLATFCHLTVLLAGQHHGVTKCNITCSKMTSKIPVALLIHYQQNQASCGKRAIILETRQHRLFCADPKEQWVKDAMQHLDRQAAALTRNGGTFEKQIGEVKPRTTPAAGGMDESVVLEPEATGESSSLEPTPSSQEAQRALGTSPELPTGVTGSSGTRLPPTPKAQDGGPVGTELFRVPPVSTAATWQSSAPHQPGPSLWAEAKTSEAPSTQDPSTQASTASSPAPEENAPSEGQRVWGQGQSPRPENSLEREEMGPVPAHTDAFQDWGPGSMAHVSVVPVSSEGTPSREPVASGSWTPKAEEPIHATMDPQRLGVLITPVPDAQAATRRQAVGLLAFLGLLFCLGVAMFTYQSLQGCPRKMAGEMAEGLRYIPRSCGSNSYVLVPV

SEQ ID NO: 3789 - protein, 403 aa, Homo Sapiens
MAPISLSWLLRLATFCHLTVLLAGTSLNSGQHHGVTKCNITCSKMTSKIPVALLIHYQQNQASCGKRAIILETRQHRLFCADPKEQWVKDAMQHLDRQAAALTRNGGTFEKQIGEVKPRTTPAAGGMDESVVLEPEATGESSSLEPTPSSQEAQRALGTSPELPTGVTGSSGTRLPPTPKAQDGGPVGTELFRVPPVSTAATWQSSAPHQPGPSLWAEAKTSEAPSTQDPSTQASTASSPAPEENAPSEGQRVWGQGQSPRPENSLEREEMGPVPAHTDAFQDWGPGSMAHVSVVPVSSEGTPSREPVASGSWTPKAEEPIHATMDPQRLGVLITPVPDAQAATRRQAVGLLAFLGLLFCLGVAMFTYQSLQGCPRKMAGEMAEGLRYIPRSCGSNSYVLVPV

SEQ ID NO: 3790 - protein, 359 aa, Homo Sapiens
MTSKIPVALLIHYQQNQASCGKRAIILETRQHRLFCADPKEQWVKDAMQHLDRQAAALTRNGGTFEKQIGEVKPRTTPAAGGMDESVVLEPEATGESSSLEPTPSSQEAQRALGTSPELPTGVTGSSGTRLPPTPKAQDGGPVGTELFRVPPVSTAATWQSSAPHQPGPSLWAEAKTSEAPSTQDPSTQASTASSPAPEENAPSEGQRVWGQGQSPRPENSLEREEMGPVPAHTDAFQDWGPGSMAHVSVVPVSSEGTPSREPVASGSWTPKAEEPIHATMDPQRLGVLITPVPDAQAATRRQAVGLLAFLGLLFCLGVAMFTYQSLQGCPRKMAGEMAEGLRYIPRSCGSNSYVLVPV

SEQ ID NO: 3791 - protein, 89 aa, Homo Sapiens
MALLLCFVLLCGVVDFARSLSITTPEEMIEKAKGETAYLPCKFTLSPEDQGPLDIEWLISPADNQKVDQVGRCATSKEPYVHCQKLHRQ

SEQ ID NO: 3792 - protein, 200 aa, Homo Sapiens
MALLLCFVLLCGVVDFARSLSITTPEEMIEKAKGETAYLPCKFTLSPEDQGPLDIEWLISPADNQKVDQVIILYSGDKIYDDYYPDLKGRVHFTSNDLKSGDASINVTNLQLSDIGTYQCKVKKAPGVANKKIHLVVLGKMCHLQRAVRPLPEATSAVIIHPWGPCLLPTWKDIPRLSITKYQVKTLNALLRVRLSHLLR

SEQ ID NO: 3793 - protein, 365 aa, Homo Sapiens
MALLLCFVLLCGVVDFARSLSITTPEEMIEKAKGETAYLPCKFTLSPEDQGPLDIEWLISPADNQKVDQVIILYSGDKIYDDYYPDLKGRVHFTSNDLKSGDASINVTNLQLSDIGTYQCKVKKAPGVANKKIHLVVLVKPSGARCYVDGSEEIGSDFKIKCEPKEGSLPLQYEWQKLSDSQKMPTSWLAEMTSSVISVKNASSEYSGTYSCTVRNRVGSDQCLLRLNVVPPSNKAGLIAGAIIGTLLALALIGLIIFCCRKKRREEKYEKEVHHDIREDVPPPKSRTSTARSYIGSNHSSLGSMSPSNMEGYSKTQYNQVPSEDFERTPQSPTLPPAKVAAPNLSRMGAIPVMIPAQSKDGSIV

SEQ ID NO: 3794 - protein, 352 aa, Homo Sapiens
MALLLCFVLLCGVVDFARSLSITTPEEMIEKAKGETAYLPCKFTLSPEDQGPLDIEWLISPADNQKVDQVIILYSGDKIYDDYYPDLKGRVHFTSNDLKSGDASINVTNLQLSDIGTYQCKVKKAPGVANKKIHLVVLVKPSGARCYVDGSEEIGSDFKIKCEPKEGSLPLQYEWQKLSDSQKMPTSWLAEMTSSVISVKNASSEYSGTYSCTVRNRVGSDQCLLRLNVVPPSNKAGLIAGAIIGTLLALALIGLIIFCCRKKRREEKYEKEVHHDIREDVPPPKSRTSTARSYIGSNHSSLGSMSPSNMEGYSKTQYNQVPSEDFERTPQSPTLPPAKFKYPYKTDGITVV

SEQ ID NO: 3795 - protein, 252 aa, Homo Sapiens
MALLLCFVLLCGVVDFARSLSITTPEEMIEKAKGETAYLPCKFTLSPEDQGPLDIEWLISPADNQKVDQVIILYSGDKIYDDYYPDLKGRVHFTSNDLKSGDASINVTNLQLSDIGTYQCKVKKAPGVANKKIHLVVLVKPSGARCYVDGSEEIGSDFKIKCEPKEGSLPLQYEWQKLSDSQKMPTSWLAGKMCHLQRAVRPLPEATSAVIIHPWGPCLLPTWKDIPRLSITKYQVKTLNALLRVRLSHLLR

SEQ ID NO: 3796 - protein, 107 aa, Homo Sapiens
MARAALSAAPSNPRLLRVALLLLLLVAAGRRAAGASVATELRCQCLQTLQGIHPKNIQSVNVKSPGPHCAQTEVIATLKNGRKACLNPASPIVKKIIEKMLNSDKSN

SEQ ID NO: 3797 - protein, 98 aa, Homo Sapiens
MNQTAILICCLIFLTLSGIQGVPLSRTVRCTCISISNQPVNPRSLEKLEIIPASQFCPRVEIIATMKKKGEKRCLNPESKAIKNLLKAVSKERSKRSP

SEQ ID NO: 3798 - protein, 94 aa, Homo Sapiens
MSVKGMAIALAVILCATVVQGFPMFKRGRCLCIGPGVKAVKVADIEKASIMYPSNNCDKIEVIITLKENKGQRCLNPKSKQARLIIKKVERKNF

SEQ ID NO: 3799 - protein, 94 aa, Homo Sapiens; identical to SEQ ID NO: 3798

SEQ ID NO: 3800 - protein, 89 aa, Homo Sapiens
MNAKVVVVLVLVLTALCLSDGKPVSLSYRCPCRFFESHVARANVKHLKILNTPNCALQIVARLKNNNRQVCIDPKLKWIQEYLEKALNK

SEQ ID NO: 3801 - protein, 119 aa, Homo Sapiens
MNAKVVVVLVLVLTALCLSDGKPVSLSYRCPCRFFESHVARANVKHLKILNTPNCALQIVARLKNNNRQVCIDPKLKWIQEYLEKALNKGRREEKVGKKEKIGKKKRQKKRKAAQKRKN

SEQ ID NO: 3802 - protein, 93 aa, Homo Sapiens
MNAKVVVVLVLVLTALCLSDGKPVSLSYRCPCRFFESHVARANVKHLKILNTPNCALQIVARLKNNNRQVCIDPKLKWIQEYLEKALNKRFKM

SEQ ID NO: 3803 - protein, 140 aa, Homo Sapiens
MNAKVVVVLVLVLTALCLSDGKPVSLSYRCPCRFFESHVARANVKHLKILNTPNCALQIVARLKNNNRQVCIDPKLKWIQEYLEKALNNLISAAPAGKRVIAGARALHPSPPRACPTARALCEIRLWPPPEWSWPSPGDV

SEQ ID NO: 3804 - protein, 103 aa, Homo Sapiens
MNAKVVVVLVLVLTALCLSDGKPVSLSYRCPCRFFESHYCTCLIRVSFHGATPLTQGSWVLYSLSCAGGETGLREPGPMVSPRVESHQEGRLGVPGPVNLGKA

SEQ ID NO: 3805 - protein, 103 aa, Homo Sapiens; identical to SEQ ID NO: 3804

SEQ ID NO: 3806 - protein, 109 aa, Homo Sapiens
MKFISTSLLLMLLVSSLSPVQGVLEVYYTSLRCRCVQESSVFIPRRFIDRIQILPRGNGCPRKEIIVWKKNKSIVCVDPQAEWIQRMMEVLRKRSSSTLPVPVFKRKIP

SEQ ID NO: 3807 - protein, 99 aa, Homo Sapiens
MRLLAAALLLLLLALYTARVDGSKCKCSRKGPKIRYSDVKKLEMKPKYPHCEEKMVIITTKSVSRYRGQEHCLHPKLQSTKRFIKWYNAWNEKRRVYEE

SEQ ID NO: 3808 - protein, 111 aa, Homo Sapiens
MSLLPRRAPPVSMRLLAAALLLLLLALYTARVDGSKCKCSRKGPKIRYSDVKKLEMKPKYPHCEEKMVIITTKSVSRYRGQEHCLHPKLQSTKRFIKWYNAWNEKRRVYEE

SEQ ID NO: 3809 - protein, 62 aa, Homo Sapiens
MKVLISSLLLLLPLMLMSMVSSSLNPGVARGHRDRGQASRRWLQEGGQECECKAMLLFQIGS

SEQ ID NO: 3810 - protein, 119 aa, Homo Sapiens
MKVLISSLLLLLPLMLMSMVSSSLNPGVARGHRDRGQASRRWLQEGGQECECKDWFLRAPRRKFMTVSGLPKKQCPCDHFKGNVKKTRHQRHHRKPNKHSRACQQFLKQCQLRSFALPL

SEQ ID NO: 3811 - protein, 107 aa, Homo Sapiens
MARATLSAAPSNPRLLRVALLLLLLVAASRRAAGAPLATELRCQCLQTLQGIHLKNIQSVKVKSPGPHCAQTEVIATLKNGQKACLNPASPMVKKIIEKMLKNGKSN

SEQ ID NO: 3812 - protein, 107 aa, Homo Sapiens
MAHATLSAAPSNPRLLRVALLLLLLVAASRRAAGASVVTELRCQCLQTLQGIHLKNIQSVNVRSPGPHCAQTEVIATLKNGKKACLNPASPMVQKIIEKILNKGSTN

SEQ ID NO: 3813 - protein, 114 aa, Homo Sapiens
MSLLSSRAARVPGPSSSLCALLVLLLLLTQPGPIASAGPAAAVLRELRCVCLQTTQGVHPKMISNLQVFAIGPQCSKVEVVASLKNGKEICLDPEAPFLKKVIQKILDGGNKEN

SEQ ID NO: 3814 - protein, 113 aa, Homo Sapiens
MSLPSSRAARVPGPSGSLCALLALLLLLTPPGPLASAGPVSAVLTELRCTCLRVTLRVNPKTIGKLQVFPAGPQCSKVEVVASLKNGKQVCLDPEAPFLKKVIQKILDRYLSL

SEQ ID NO: 3815 - protein, 114 aa, Homo Sapiens
MSLPSSRAARVPGPSGSLCALLALLLLLTPPGPLASAGPVSAVLTELRCTCLRVTLRVNPKTIGKLQVFPAGPQCSKVEVVASLKNGKQVCLDPEAPFLKKVIQKILDSGNKKN

SEQ ID NO: 3816 - protein, 95 aa, Homo Sapiens
MTSKLAVALLAAFLISAALCEGAVLPRSAKELRCQCIKTYSKPFHPKFIKELRVIESGPHCANTEIIVKLSDGRELCLDPKENWVQRVVEKFLKR

SEQ ID NO: 3817 - protein, 99 aa, Homo Sapiens
MTSKLAVALLAAFLISAALCEGAVLPRSAKELRCQCIKTYSKPFHPKFIKELRVIESGPHCANTEIIVKLSDGRELCLDPKENWVQRVVEKFLKRAENS

SEQ ID NO: 3818 - protein, 125 aa, Homo Sapiens
MKKSGVLFLLGIILLVLIGVQGTPVVRKGRCSCISTNQGTIHLQSLKDLKQFAPSPSCEKIEIIATLKNGVQTCLNPDSADVKELIKKWEKQVSQKKKQKNGKKHQKKKVLKVRKSQRSRQKKTT

SEQ ID NO: 3819 - protein, 182 aa, Homo Sapiens
MEPQLGPEAAALRPGWLALLLWVSALSCSFSLPASSLSSLVPQVRTSYNFGRTFLGLDKCNACIGTSICKKFFKEEIRSDNWLASHLGLPPDSLLSYPANYSDDSKIWRPVEIFRLVSKYQNEISDRRICASASAPKTCSIERVLRKTERFQKWLQAKRLTPDLVQDCHQGQRELKFLCMLR

SEQ ID NO: 3820 - protein, 433 aa, Homo Sapiens
MEPQLGPEAAALRPGWLALLLWVSALSCSFSLPASSLSSLVPQVRTSYNFGRTFLGLDKCNACIGTSICKKFFKEEIRSDNWLASHLGLPPDSLLSYPANYSDDSKIWRPVEIFRLVSKYQNEISDRRICASASAPKTCSIERVLRKTERFQKWLQAKRLTPDLVQGLASPLLRCPSQRLLDRVVRRYAEVADAGSIFMDHFTDRDKLRLLYTLAVNSHPILLQIFPGAEGWPLPKYLGSCGRFLVSTSTRPLQEFYDAPPDQAADLAYQLLGVLESLRSNDLNYFFYFTHIDAGMFGVFNNGHLFIRDASAVGVIDKQEGSQEANRAGENKDIFSCLVSGCQAQLPSCESISEKQSLVLVCQKLLPRLLQGRFPSPVQDDIDSILVQCGDSIRPDPEVLGAASQLKDILRPLRTCDSRFAYRYPDCKYNDKF

SEQ ID NO: 3821 - protein, 264 aa, Homo Sapiens
MLRCGGRGLLLGLAVAAAAVMAARLMGWWGPRAGFRLFIPEELSRYRGGPGDPGLYLALLGRVYDVSSGRRHYEPGSHYSGFAGRDASRAFVTGDCSEAGLVDDVSDLSAAEMLTLHNWLSFYEKNYVCVGRVTGRFYGEDGLPTPALTQVEAAITRGLEANKLQLQEKQTFPPCNAEWSSARGSRLWCSQKSGGVSRDWIGVPRKLYKPGAKEPRCVCVRTTGPPSGQMPDNPPHRNRGDLDHPNLAEYTGCPPLAITCSFPL

SEQ ID NO: 3822 - protein, 106 aa, Homo Sapiens
MLTLHNWLSFYEKNYVCVGRVTGRFYGEDGLPTPALTQVEAAITRGLEANKLQLQEKQTFPPCNAEWSSARGSRLWCSQKRGFNSSLALASGSLKHACHRLILQFL

SEQ ID NO: 3823 - protein, 152 aa, Homo Sapiens
MLTLHNWLSFYEKNYVCVGRVTGRFYGEDGLPTPALTQVEAAITRGLEANKLQLQEKQTFPPCNAEWSSARGSRLWCSQKSGGVSRDWIGVPRKLYKPGAKEPRCVCVRTTGPPSGQMPDNPPHRNRGDLDHPNLAEYTGCPPLAITCSFPL

SEQ ID NO: 3824 - protein, 152 aa, Homo Sapiens; identical to SEQ ID NO: 3823

SEQ ID NO: 3825 - protein, 42 aa, Homo Sapiens
MAPKPGAEWSTALSHLVLGVVSLHAAVSTAEASRGAAAGFLL

SEQ ID NO: 3826 - protein, 362 aa, Homo Sapiens
MAPKPGAEWSTALSHLVLGVVSLHAAVSTAEASRGAAAGFLLQVLAATTTLAPGLSTHEDCLAGAWVATVIGLPLLAFDFHWCTNGHLMCAGCFIHLLADARLKEEQATCPNCRCEISKSLCCRNLAVEKAVSELPSECGFCLRQFPRSLLERHQKEECQDRVTQCKYKRIGCPWHGPFHELTVHEAACAHPTKTGSELMEILDGMDQSHRKEMQLYNSIFSLLSFEKIGYTEVQFRPYRTDDFITRLYYETPRFTVLNQTWVLKARVNDSERNPNLSCKRTLSFQLLLKSKVTAPLECSFLLLKGPYDDVRISPVIYHFVFTNESNETDYVPLPIIDSVECNKLLAAKNINLRLFLFQIQK

SEQ ID NO: 3827 - protein, 144 aa, Homo Sapiens
MAPKPGAEWSTALSHLVLGVVSLHAAVSTAEASRGAAAGFLLQVLAATTTLAPGLSTHEDCLAGAWVATVIGLPLLAFDFHWVNGDRSSANLLLGGGMVLAVAGGHLGPEGRSVAGQAMLLVVAVTILIVAVFTANTYGMWGGA

SEQ ID NO: 3828 - protein, 192 aa, Homo Sapiens
MAPKPGAEWSTALSHLVLGVVSLHAAVSTAEASRGAAAGFLLQVLAATTTLAPGLSTHEDCLAGAWVATVIGLPLLAFDFHWVNGDRSSANLLLGGGMVLAVAGGHLGPEGRSVAGQAMLLVVAVTILIVAVFTANTYGMWGGAMLGVAGLLSRLEEDRLLLLPKEDVCRWALAVGSWAYCRALHTQRLQWE

SEQ ID NO: 3829 - protein, 192 aa, Homo Sapiens; identical to SEQ ID NO: 3828

SEQ ID NO: 3830 - protein, 192 aa, Homo Sapiens; identical to SEQ ID NO: 3828

SEQ ID NO: 3831 - protein, 246 aa, Homo Sapiens
MAPKPGAEWSTALSHLVLGVVSLHAAVSTAECTNGHLMCAGCFIHLLADARLKEEQATCPNCRCEISKSLCCRNLAVEKAVSELPSECGFCLRQFPRSLLERHQKEECQDRVTQCKYKRIGCPWHGPFHELTVHEAACAHPTKTGSELMEILDGMDQSHRKEMQLYNSIFSLLSFEKIGYTEVQFRPYRTDDFITRLYYETPRFTVLNQTWVLKARVNDSERNPNLSCKRTLSFQLLLKSKVTAPL

SEQ ID NO: 3832 - protein, 404 aa, Homo Sapiens
MSGAEEAGGGGPAAGPAGSVPAGVGVGVGAGPGAAAGQAAAAALGEAAGPGLPDEAGLAGARQLQLQEAAGDPDAPPKKRLRAAEAAEAAAAAAAAGSGKLEERLYSVLCCTVCLDLPKASVYQCTNGHLMCAGCFIHLLADARLKEEQATCPNCRCEISKSLCCRNLAVEKAVSELPSECGFCLRQFPRSLLERHQKEECQDRVTQCKYKRIGCPWHGPFHELTVHEAACAHPTKTGSELMEILDGMDQSHRKEMQLYNSIFSLLSFEKIGYTEVQFRPYRTDDFITRLYYETPRFTVLNQTWVLKARVNDSERNPNLSCKRTLSFQLLLKSKVTAPLECSFLLLKGPYDDVRISPVIYHFVFTNESNETDYVPLPIIDSVECNKLLAAKNINLRLFLFQIQK

SEQ ID NO: 3833 - protein, 479 aa, Homo Sapiens
MWELVALLLLTLAYLFWPKRRCPGAKYPKSLLSLPLVGSLPFLPRHGHMHNNFFKLQKKYGPIYSVRMGTKTTVIVGHHQLAKEVLIKKGKDFSGRPQMATLDIASNNRKGIAFADSGAHWQLHRRLAMATFALFKDGDQKLEKIICQEISTLCDMLATHNGQSIDISFPVFVAVTNVISLICFNTSYKNGDPELNVIQNYNEGIIDNLSKDSLVDLVPWLKEKFRSDSITNMLDTLMQAKMNSDNGNAGPDQDSELLSDNHILTTIGDIFGAGVETTTSVVKWTLAFLLHNPQVKKKLYEEIDQNVGFSRTPTISDRNRLLLLEATIREVLRLRPVAPMLIPHKANVDSSIGEFAVDKGTEVIINLWALHHNEKEWHQPDQFMPERFLNPAGTQLISPSVSYLPFGAGPRSCIGEILARQELFLIMAWLLQRFDLEVPDDGQLPSLEGIPKVVFLIDSFKVKIKVRQAWREAQAEGST

SEQ ID NO: 3834 - protein, 508 aa, Homo Sapiens
MWELVALLLLTLAYLFWPKRRCPGAKYPKSLLSLPLVGSLPFLPRHGHMHNNFFKLQKKYGPIYSVRMGTKTTVIVGHHQLAKEVLIKKGKDFSGRPQMATLDIASNNRKGIAFADSGAHWQLHRRLAMATFALFKDGDQKLEKIICQEISTLCDMLATHNGQSIDISFPVFVAVTNVISLICFNTSYKNGDPELNVIQNYNEGIIDNLSKDSLVDLVPWLKIFPNKTLEKLKSHVKIRNDLLNKILENYKEKFRSDSITNMLDTLMQAKMNSDNGNAGPDQDSELLSDNHILTTIGDIFGAGVETTTSVVKWTLAFLLHNPQVKKKLYEEIDQNVGFSRTPTISDRNRLLLLEATIREVLRLRPVAPMLIPHKANVDSSIGEFAVDKGTEVIINLWALHHNEKEWHQPDQFMPERFLNPAGTQLISPSVSYLPFGAGPRSCIGEILARQELFLIMAWLLQRFDLEVPDDGQLPSLEGIPKVVFLIDSFKVKIKVRQAWREAQAEGST

SEQ ID NO: 3835 - protein, 509 aa, Homo Sapiens
MWELVALLLLTLAYLFWPKRRCPGAKYPKSLLSLPLVGSLPFLPRHGHMHNNFFKLQKKYGPIYSVRMGTKTTVIVGHHQLAKEVLIKKGKDFSGRPQMATLDIASNNRKGIAFADSGAHWQLHRRLAMATFALFKDGDQKLEKIICQEISTLCDMLATHNGQSIDISFPVFVAVTNVISLICFNTSYKNGDPELNVIQNYNEGIIDNLSKDSLVDLVPWLKIFPNKTLEKLKSHVKIRNDLLNKILENYKEKFRSDSITNMLDTLMQAKMNSDNGNAGPDQDSELLSDNHILTTIGDIFGAGVETTTSVVKWTLAFLLHNPQVKKKLYEEIDQNVGFSRTPTISDRNRLLLLEATIREVLRLRPVAPMLIPHKANVDSSSIGEFAVDKGTEVIINLWALHHNEKEWHQPDQFMPERFLNPAGTQLISPSVSYLPFGAGPRSCIGEILARQELFLIMAWLLQRFDLEVPDDGQLPSLEGIPKVVFLIDSFKVKIKVRQAWREAQAEGST

SEQ ID NO: 3836 - protein, 407 aa, Homo Sapiens
MWELVALLLLTLAYLFWPKRRCPGAKYPKSLLSLPLVGSLPFLPRHGHMHNNFFKLQKKYGPIYSVRMGTKTTVIVGHHQLAKEVLIKKGKDFSGRPQMATLDIASNNRKGIAFADSGAHWQLHRRLAMATFALFKDGDQKLEKIICQEISTLCDMLATHNGQSIDISFPVFVAVTNVISLICFNTSYKNGDPELNVIQNYNEGIIDNLSKDSLVDLVPWLKVKKKLYEEIDQNVGFSRTPTISDRNRLLLLEATIREVLRLRPVAPMLIPHKANVDSSIGEFAVDKGTEVIINLWALHHNEKEWHQPDQFMPERFLNPAGTQLISPSVSYLPFGAGPRSCIGEILARQELFLIMAWLLQRFDLEVPDDGQLPSLEGIPKVVFLIDSFKVKIKVRQAWREAQAEGST

SEQ ID NO: 3837 - protein, 356 aa, Homo Sapiens
MWELVALLLLTLAYLFWPKRRCPGAKYPKSLLSLPLVGSLPFLPRHGHMHNNFFKLQKKYGPIYSVRMGTKTTVIVGHHQLAKEVLIKKGKDFSGRPQMEKFRSDSITNMLDTLMQAKMNSDNGNAGPDQDSELLSDNHILTTIGDIFGAGVETTTSVVKWTLAFLLHNPQVKKKLYEEIDQNVGFSRTPTISDRNRLLLLEATIREVLRLRPVAPMLIPHKANVDSSIGEFAVDKGTEVIINLWALHHNEKEWHQPDQFMPERFLNPAGTQLISPSVSYLPFGAGPRSCIGEILARQELFLIMAWLLQRFDLEVPDDGQLPSLEGIPKVVFLIDSFKVKIKVRQAWREAQAEGST

SEQ ID NO: 3838 - protein, 192 aa, Homo Sapiens
MIFSLASCIITAKLCTWAICFLTTSEEVQKKLYEEINQVFGNGPVTPEKIEQLRYCQHVLCETVRTAKLTPVSAQLQDIEGKIDRFIIPRETLVLYALGVVLQDPNTWPSPHKFDPDRFDDELVMKTFSSLGFSGTQECPELRFAYMVTTVLLSVLVKRLHLLSVEGQVIETKYELVTSSREEAWITVSKRY

SEQ ID NO: 3839 - protein, 258 aa, Homo Sapiens
MLDFAIFAVTFLLALVGAVLYLYPASRQAAGIPGITPTEEKDGNLPDIVNSGSLHEFLVNLHERYGPVVSFWFGRRLVVSLGTVDVLKQHINPNKTSDPFETMLKSLLRYQSGGGSVSENHMRKKLYENGVTDSLKSNFALLLKLSEELLDKWLSYPETQHVPLSQHMLGFAMKSVTQMVMGSTFEDDQEVIRFQKNHGTILEDSMIFSLASCIITAKLCTWAICFLTTSEEVQKKLYEEINQVFGNGPVTPEKIEQL

SEQ ID NO: 3840 - protein, 470 aa, Homo Sapiens
MLDFAIFAVTFLLALVGAVLYLYPASRQAAGIPGITPTEEKDGNLPDIVNSGSLHEFLVNLHERYGPVVSFWFGRRLVVSLGTVDVLKQHINPNKTSDPFETMLKSLLRYQSGGGSVSENHMRKKLYENGVTDSLKSNFALLLKLSEELLDKWLSYPETQHVPLSQHMLGFAMKSVTQMVMGSTFEDDQEVIRFQKNHGTLCIFTYFQVWSEIGKGFLDGSLDKNMTRKKQYEDALMQLESVLRNIIKERKGRNFSQHIFIDSLVQGNLNDQQILEDSMIFSLASCIITAKLCTWAICFLTTSEEVQKKLYEEINQVFGNGPVTPEKIEQLRYCQHVLCETVRTAKLTPVSAQLQDIEGKIDRFIIPRETLVLYALGVVLQDPNTWPSPHKFDPDRFDDELVMKTFSSLGFSGTQECPELRFAYMVTTVLLSVLVKRLHLLSVEGQVIETKYELVTSSREEAWITVSKRY

SEQ ID NO: 3841 - protein, 208 aa, Homo Sapiens
MLDFAIFAVTFLLALVGAVLYLYPASRQAAGIPGITPTEEKDGNLPDIVNSGSLHEFLVNLHERYGPVVSFWFGRRLVVSLGTVDVLKQHINPNKTSDPFETMLKSLLRYQSGGGSVSENHMRKKLYENGVTDSLKSNFALLLKLSEELLDKWLSYPETQHVPLSQHMLGFAMKSVTQMVMGSTFEDDQEVIRFQKNHGTPSCNWSLF

SEQ ID NO: 3842 - protein, 462 aa, Homo Sapiens
MLDFAIFAVTFLLALVGAVLYLYPASRQAAGIPGITPTEEKDGNLPDIVNSGSLHEFLVNLHERYGPVVSFWFGRRLVVSLGTVDVLKQHINPNKTSDPFETMLKSLLRYQSGGGSVSENHMRKKLYENGVTDSLKSNFALLLKLSEELLDKWLSYPETQHVPLSQHMLGFAMKSVTQMVMGSTFEDDQEVIRFQKNHGTVWSEIGKGFLDGSLDKNMTRKKQYEDALMQLESVLRNIIKERKGRNFSQHIFIDSLVQGNLNDQQILEDSMIFSLASCIITAKLCTWAICFLTTSEEVQKKLYEEINQVFGNGPVTPEKIEQLRYCQHVLCETVRTAKLTPVSAQLQDIEGKIDRFIIPRETLVLYALGVVLQDPNTWPSPHKFDPDRFDDELVMKTFSSLGFSGTQECPELRFAYMVTTVLLSVLVKRLHLLSVEGQVIETKYELVTSSREEAWITVSKRY

SEQ ID NO: 3843 - protein, 44 aa, Homo Sapiens
MLDFAIFAVTFLLALVGAVLYLYPASRQAAGIPGITPTEENGPF

SEQ ID NO: 3844 - protein, 44 aa, Homo Sapiens; identical to SEQ ID NO: 3843

SEQ ID NO: 3845 - protein, 78 aa, Homo Sapiens
MLLLGLLLLLPLLAGARLLWNWWKLRSLHLPPLAPGFLHLLQPDLPIYLLGLTQKFGPIYRLHLGLQAPTSSCRQAGV

SEQ ID NO: 3846 - protein, 465 aa, Homo Sapiens
MLLLGLLLLLPLLAGARLLWNWWKLRSLHLPPLAPGFLHLLQPDLPIYLLGLTQKFGPIYRLHLGLQDKLVSRNYPDLSLGDYSLLWKAHKKLTRSALLLGIRDSMEPVVEQLTQEFCERMRAQPGTPVAIEEEFSLLTCSIICYLTFGDKIKDDNLMPAYYKCIQEVLKTWSHWSIQIVDVIPFLRFFPNPGLRRLKQAIEKRDHIVEMQLRQHKESLVAGQWRDMMDYMLQGVAQPSMEEGSGQLLEGHVHMAAVDLLIGGTETTANTLSWAVVFLLHHPEIQQRLQEELDHELGPGASSSRVPYKDRARLPLLNATIAEVLRLRPVVPLALPHRTTRPSSISGYDIPEGTVIIPNLQGAHLDETVWERPHEFWPDRFLEPGKNSRALAFGCGARVCLGEPLARLELFVVLTRLLQAFTLLPSGDALPSLQPLPHCSVILKMQPFQVRLQPRGMGAHSPGQSQ

SEQ ID NO: 3847 - protein, 186 aa, Homo Sapiens
MLLLGLLLLLPLLAGARLLWNWWKLRSLHLPPLAPGFLHLLQPDLPIYLLGLTQKFGPIYRLHLGLQDVVVLNSKRTIEEAMVKKWADFAGRPEPLTFPTLQPPPPPADKLVSRNYPDLSLGDYSLLWKAHKKLTRSALLLGIRDSMEPVVEQLTQEFCERMRAQPGTPVAIEEEFSLLTCSIICY

SEQ ID NO: 3848 - protein, 108 aa, Homo Sapiens
MLLLGLLLLLPLLAGARLLWNWWKLRSLHLPPLAPGFLHLLQPDLPIYLLGLTQKFGPIYRLHLGLQDVVVLNSKRTIEEAMVKKWADFAGRPEPLTSPTSSCRQAGV

SEQ ID NO: 3849 - protein, 495 aa, Homo Sapiens
MLLLGLLLLLPLLAGARLLWNWWKLRSLHLPPLAPGFLHLLQPDLPIYLLGLTQKFGPIYRLHLGLQDVVVLNSKRTIEEAMVKKWADFAGRPEPLTYKLVSRNYPDLSLGDYSLLWKAHKKLTRSALLLGIRDSMEPVVEQLTQEFCERMRAQPGTPVAIEEEFSLLTCSIICYLTFGDKIKDDNLMPAYYKCIQEVLKTWSHWSIQIVDVIPFLRFFPNPGLRRLKQAIEKRDHIVEMQLRQHKESLVAGQWRDMMDYMLQGVAQPSMEEGSGQLLEGHVHMAAVDLLIGGTETTANTLSWAVVFLLHHPEIQQRLQEELDHELGPGASSSRVPYKDRARLPLLNATIAEVLRLRPVVPLALPHRTTRPSSISGYDIPEGTVIIPNLQGAHLDETVWERPHEFWPDRFLEPGKNSRALAFGCGARVCLGEPLARLELFVVLTRLLQAFTLLPSGDALPSLQPLPHCSVILKMQPFQVRLQPRGMGAHSPGQSQ

SEQ ID NO: 3850 - protein, 495 aa, Homo Sapiens; identical to SEQ ID NO: 3849

SEQ ID NO: 3851 - protein, 495 aa, Homo Sapiens; identical to SEQ ID NO: 3849

SEQ ID NO: 3852 - protein, 190 aa, Homo Sapiens
MLLLGLLLLLPLLAGARLLWNWWKLRSLHLPPLAPGFLHLLQPDLPIYLLGLTQKFGPIYRLHLGLQDVVVLNSKRTIEEAMVKKWADFAGRPEPLTYKLVSRNYPDLSLGDYSLLWKAHKKLTRSALLLGIRDSMEPVVEQLTQEFCERMRAQPGTPVAIEEEFSLLTCSIICYLTFGDKIKEVLKTWS

SEQ ID NO: 3853 - protein, 321 aa, Homo Sapiens
MAIRVLLGFSIPEEDLGHLFEVYQQFVDNVFSLPVDLPFSGYRRGIQARQILQKGLEKAIREKLQCTQGKDYLDALDLLIESSKEHGKEMTMQELKDGTLELIFAAYATTASASTSLIMQLLKHPTVLEKLRDELRAHGILHSGGCPCEGTLRLDTLSGLRYLDCVIKEVMRLFTPISGGYRTVLQTFELDGFQIPKGWSVMYSIRDTHDTAPVFKDVNVFDPDRFSQARSEDKDGRFHYLPFGGGVRTCLGKHLAKLFLKVLAVELASTSRFELATRTFPRITLVPVLHPVDGLSVKFFGLDSNQNEILPETEAMLSATV

SEQ ID NO: 3854 - protein, 172 aa, Homo Sapiens
MKNKTCVLVCVSVFGGERGQVTVPRVGVRRPSLAGPLQKCTLRETRVWLPQGSGFQSSRREKYGNVFKTHLLGRPLIRVTGAENVRKILMGEHHLVSTEWPRSTRMLLGPNTVSNSIGDIHRNKRKVFSKIFSHEALESYLPKIQLVIQDTLRAWSSHPEAINVYQEAQKLT

SEQ ID NO: 3855 - protein, 512 aa, Homo Sapiens
MLFEGLDLVSALATLAACLVSVTLLLAVSQQLWQLRWAATRDKSCKLPIPKGSMGFPLIGETGHWLLQGSGFQSSRREKYGNVFKTHLLGRPLIRVTGAENVRKILMGEHHLVSTEWPRSTRMLLGPNTVSNSIGDIHRNKRKVFSKIFSHEALESYLPKIQLVIQDTLRAWSSHPEAINVYQEAQKLTFRMAIRVLLGFSIPEEDLGHLFEVYQQFVDNVFSLPVDLPFSGYRRGIQARQILQKGLEKAIREKLQCTQGKDYLDALDLLIESSKEHGKEMTMQELKDGTLELIFAAYATTASASTSLIMQLLKHPTVLEKLRDELRAHGILHSGGCPCEGTLRLDTLSGLRYLDCVIKEVMRLFTPISGGYRTVLQTFELDGFQIPKGWSVMYSIRDTHDTAPVFKDVNVFDPDRFSQARSEDKDGRFHYLPFGGGVRTCLGKHLAKLFLKVLAVELASTSRFELATRTFPRITLVPVLHPVDGLSVKFFGLDSNQNEILPETEAMLSATV

SEQ ID NO: 3856 - protein, 182 aa, Homo Sapiens
MLFEGLDLVSALATLAACLVSVTLLLAVSQQLWQLRWAATRDKSCKLPIPKGSMGFPLIGETGHWLLQVFSKIFSHEALESYLPKIQLVIQDTLRAWSSHPEAINVYQEAQKLTFRMAIRVLLGFSIPEEDLGHLFEVYQQFVDNVFSLPVDLPFSGYRRGIQARQILQKGLEKAIREKLQC

SEQ ID NO: 3857 - protein, 437 aa, Homo Sapiens
MLFEGLDLVSALATLAACLVSVTLLLAVSQQLWQLRWAATRDKSCKLPIPKGSMGFPLIGETGHWLLQVFSKIFSHEALESYLPKIQLVIQDTLRAWSSHPEAINVYQEAQKLTFRMAIRVLLGFSIPEEDLGHLFEVYQQFVDNVFSLPVDLPFSGYRRGIQARQILQKGLEKAIREKLQCTQGKDYLDALDLLIESSKEHGKEMTMQELKDGTLELIFAAYATTASASTSLIMQLLKHPTVLEKLRDELRAHGILHSGGCPCEGTLRLDTLSGLRYLDCVIKEVMRLFTPISGGYRTVLQTFELDGFQIPKGWSVMYSIRDTHDTAPVFKDVNVFDPDRFSQARSEDKDGRFHYLPFGGGVRTCLGKHLAKLFLKVLAVELASTSRFELATRTFPRITLVPVLHPVDGLSVKFFGLDSNQNEILPETEAMLSATV

SEQ ID NO: 3858 - protein, 494 aa, Homo Sapiens
MLASGMLLVALLVCLTVMVLMSVWQQRKSKGKLPPGPTPLPFIGNYLQLNTEQMYNSLMKISERYGPVFTIHLGPRRVVVLCGHDAVREALVDQAEEFSGRGEQATFDWVFKGYGVVFSNGERAKQLRRFSIATLRDFGVGKRGIEERIQEEAGFLIDALRGTGGANIDPTFFLSRTVSNVISSIVFGDRFDYKDKEFLSLLRMMLGIFQFTSTSTGQLYEMFSSVMKHLPGPQQQAFQLLQGLEDFIAKKVEHNQRTLDPNSPRDFIDSFLIRMQEEEKNPNTEFYLKNLVMTTLNLFIGGTETVSTTLRYGFLLLMKHPEVEAKVHEEIDRVIGKNRQPKFEDRAKMPYMEAVIHEIQRFGDVIPMSLARRVKKDTKFRDFFLPKGTEVYPMLGSVLRDPSFFSNPQDFNPQHFLNEKGQFKKSDAFVPFSIGKRNCFGEGLARMELFLFFTTVMQNFRLKSSQSPKDIDVSPKHVGFATIPRNYTMSFLPR

SEQ ID NO: 3859 - protein, 65 aa, Homo Sapiens
MLASGMLLVALLVCLTVMVLMSVWQQRKSKGKLPPGPTPLPFIGNYLQLNTEQMYNSLMKVSQDQ

SEQ ID NO: 3860 - protein, 80 aa, Homo Sapiens
MLASGLLLVALLACLTVMVLMSVWQQRKSRGKLPPGPTPLPFIGNYLQLNTEHICDSIMKAWRSATGSAPSSSCALPSPP

SEQ ID NO: 3861 - protein, 494 aa, Homo Sapiens
MLASGLLLVALLACLTVMVLMSVWQQRKSRGKLPPGPTPLPFIGNYLQLNTEHICDSIMKFSECYGPVFTIHLGPRRVVVLCGHDAVREALVDQAEEFSGRGEQATFDWVFKGYGVAFSNGERAKQLLRFAIATLRDFGVGKRGIEERIQEESGFLIEAIRSTHGANIDPTFFLSRTVSNVISSIVFGDRFDYEDKEFLSLLSMMLGIFQFTSTSTGQLYEMFSSVMKHLPGPQQQAFKLLQGLEDFIAKKVEHNQRTLDPNSPQDFIDSFLIHMQEEEKNPNTEFYLKNLMMSTLNLFIAGTETVSTTLRYGFLLLMKHPEVEAKVHEEIDRVIGKNRQPKFEDRTKMPYMEAVIHEIQRFGDVIPMSLARRVKKDTKFRDFFLPKGTEVFPMLGSVLRDPSFFSNPQDFNPQHFLDDKGQFKKSDAFVPFSIGKRNCFGEGLARMELFLFFTTVMQNFRLKSSQSPKDIDVSPKHVVFATIPRNYTMSFLPR

SEQ ID NO: 3862 - protein, 443 aa, Homo Sapiens
MLASGLLLVALLACLTVMVLMSVWQQRKSRGKLPPGPTPLPFIGNYLQLNTEHICDSIMKVSQGVAFSNGERAKQLLRFAIATLRDFGVGKRGIEERIQEESGFLIEAIRSTHGANIDPTFFLSRTVSNVISSIVFGDRFDYEDKEFLSLLSMMLGIFQFTSTSTGQLYEMFSSVMKHLPGPQQQAFKLLQGLEDFIAKKVEHNQRTLDPNSPQDFIDSFLIHMQEEEKNPNTEFYLKNLMMSTLNLFIAGTETVSTTLRYGFLLLMKHPEVEAKVHEEIDRVIGKNRQPKFEDRTKMPYMEAVIHEIQRFGDVIPMSLARRVKKDTKFRDFFLPKGTEVFPMLGSVLRDPSFFSNPQDFNPQHFLDDKGQFKKSDAFVPFSIGKRNCFGEGLARMELFLFFTTVMQNFRLKSSQSPKDIDVSPKHVVFATIPRNYTMSFLPR

SEQ ID NO: 3863 - protein, 491 aa, Homo Sapiens
MELSVLLFLALLTGLLLLLVQRHPNTHDRLPPGPRPLPLLGNLLQMDRRGLLKSFLRFREKYGDVFTVHLGPRPVVMLCGVEAIREALVDKAEAFSGRGKIAMVDPFFRGYGVIFANGNRWKVLRRFSVTTMRDFGMGKRSVEERIQEEAQCLIEELRKSKGALMDPTFLFQSITANIICSIVFGKRFHYQDQEFLKMLNLFYQTFSLISSVFGQLFELFSGFLKYFPGAHRQVYKNLQEINAYIGHSVEKHRETLDPSAPKDLIDTYLLHMEKEKSNAHSEFSHQNLNLNTLSLFFAGTETTSTTLRYGFLLMLKYPHVAERVYREIEQVIGPHRPPELHDRAKMPYTEAVIYEIQRFSDLLPMGVPHIVTQHTSFRGYIIPKDTEVFLILSTALHDPHYFEKPDAFNPDHFLDANGALKKTEAFIPFSLGKRICLGEGIARAELFLFFTTILQNFSMASPVAPEDIDLTPQECGVGKIPPTYQIRFLPR

SEQ ID NO: 3864 - protein, 491 aa, Homo Sapiens; identical to SEQ ID NO: 3863

SEQ ID NO: 3865 - protein, 255 aa, Homo Sapiens
MLCGVEAIREALVDKAEAFSGRGKIAMVDPFFRGYGVIFANGNRWKVLRRFSVTTMRDFGMGKRSVEERIQEEAQCLIEELRKSKERVYREIEQVIGPHRPPELHDRAKMPYTEAVIYEIQRFSDLLPMGVPHIVTQHTSFRGYIIPKDTEVFLILSTALHDPHYFEKPDAFNPDHFLDANGALKKTEAFIPFSLGKRICLGEGIARAELFLFFTTILQNFSMASPVAPEDIDLTPQECGVGKIPPTYQIRFLPR

SEQ ID NO: 3866 - protein, 194 aa, Homo Sapiens
  misc_feature (1)..(1): Xaa can be any naturally occurring amino acid
XPRPLPLLGNLLQMDRRGLLKSFLRFREKYGDVFTVHLGPRPVVMLCGVEAIREALVDKAEAFSGRGKIAMVDPFFRGYGVIFANGNRWKVLRRFSVTTMRDFGMGKRSVEERIQEEAQCLIEELRKSKGALMDPTFLFQSITANIICSIVFGKRFHYQDQEFLKMLNLFYQTFSLISSVFGQTESRCFIPAGV

SEQ ID NO: 3867 - protein, 431 aa, Homo Sapiens
MDPAVALVLCLSCLFLLSLWRQSSGRGRLPSGPTPLPIIGNILQLDVKDMSKSLTNFSKVYGPVFTVYFGLKPIVVLHGYEAVKEALIDHGEEFSGRGSFPVAEKVNKGLGILFSNGKRWKEIRRFCLMTLRNFGMGKRSIEDRVQEEARCLVEELRKTNASPCDPTFILGCAPCNVICSVIFHDRFDYKDQRFLNLMEKFNENLRILSSPWIQEKHNQQSEFTVESLIATVTDMFGAGTETTSTTLRYGLLLLLKYPEVTAKVQEEIECVVGRNRSPCMQDRSHMPYTDAVVHEIQRYIDLLPTNLPHAVTCDVKFKNYLIPKGTTIITSLTSVLHNDKEFPNPEMFDPGHFLDKSGNFKKSDYFMPFSAGKRMCMGEGLARMELFLFLTTILQNFNLKSQVDPKDIDITPIANAFGRVPPLYQLCFIPV

SEQ ID NO: 3868 - protein, 490 aa, Homo Sapiens
MDPAVALVLCLSCLFLLSLWRQSSGRGRLPSGPTPLPIIGNILQLDVKDMSKSLTNFSKVYGPVFTVYFGLKPIVVLHGYEAVKEALIDHGEEFSGRGSFPVAEKVNKGLGILFSNGKRWKEIRRFCLMTLRNFGMGKRSIEDRVQEEARCLVEELRKTNASPCDPTFILGCAPCNVICSVIFHDRFDYKDQRFLNLMEKFNENLRILSSPWIQVCNNFPALIDYLPGSHNKIAENFAYIKSYVLERIKEHQESLDMNSARDFIDCFLIKMEQEKHNQQSEFTVESLIATVTDMFGAGTETTSTTLRYGLLLLLKYPEVTAKVQEEIECVVGRNRSPCMQDRSHMPYTDAVVHEIQRYIDLLPTNLPHAVTCDVKFKNYLIPKGTTIITSLTSVLHNDKEFPNPEMFDPGHFLDKSGNFKKSDYFMPFSAGKRMCMGEGLARMELFLFLTTILQNFNLKSQVDPKDIDITPIANAFGRVPPLYQLCFIPV

SEQ ID NO: 3869 - protein, 490 aa, Homo Sapiens
MDPFVVLVLCLSCLLLLSIWRQSSGRGKLPPGPTPLPVIGNILQIDIKDVSKSLTNLSKIYGPVFTLYFGLERMVVLHGYEVVKEALIDLGEEFSGRGHFPLAERANRGFGIVFSNGKRWKEIRRFSLMTLRNFGMGKRSIEDRVQEEARCLVEELRKTKASPCDPTFILGCAPCNVICSIIFQKRFDYKDQQFLNLMEKLNENIRIVSTPWIQICNNFPTIIDYFPGTHNKLLKNLAFMESDILEKVKEHQESMDINNPRDFIDCFLIKMEKEKQNQQSEFTIENLVITAADLLGAGTETTSTTLRYALLLLLKHPEVTAKVQEEIERVIGRNRSPCMQDRGHMPYTDAVVHEVQRYIDLIPTSLPHAVTCDVKFRNYLIPKGTTILTSLTSVLHDNKEFPNPEMFDPRHFLDEGGNFKKSNYFMPFSAGKRICVGEGLARMELFLFLTFILQNFNLKSLIDPKDLDTTPVVNGFASVPPFYQLCFIPV

SEQ ID NO: 3870 - protein, 162 aa, Homo Sapiens
MDPFVVLVLCLSCLLLLSIWRQSSGRGKLPPGPTPLPVIGNILQIDIKDVSKSLTNLSKIYGPVFTLYFGLERMVVLHGYEVVKEALIDLGEEFSGRGHFPLAERANRGFGIVFSNGKRWKEIRRFSLMTLRNFGMGKRSIEDRVQEEARCLVEELRKTKGG

SEQ ID NO: 3871 - protein, 307 aa, Homo Sapiens
MAAKCCSTFFLGCEFSQFLPLFLLGIISSNGKRWKEIRRFSLTTLRNFGMGKRSIEDRVQEEAHCLVEELRKTKASPCDPTFILGCAPCNVICSVVFQKRFDYKDQNFLTLMKRFNENFRILNSPWIQVCNNFPLLIDCFPGTHNKVLKNVALTRSYIREKVKEHQASLDVNNPRDFIDCFLIKMEQEKDNQKSEFNIENLVGTVADLFVAGTETTSTTLRYGLLLLLKHPEVTAKVQEEIDHVIGRHRSPCMQDRSHMPYTDAVVHEIQRYSDLVPTGVPHAVTTDTKFRNYLIPKSFDNKIMLAA

SEQ ID NO: 3872 - protein, 490 aa, Homo Sapiens
MEPFVVLVLCLSFMLLFSLWRQSCRRRKLPPGPTPLPIIGNMLQIDVKDICKSFTNFSKVYGPVFTVYFGMNPIVVFHGYEAVKEALIDNGEEFSGRGNSPISQRITKGLGIISSNGKRWKEIRRFSLTTLRNFGMGKRSIEDRVQEEAHCLVEELRKTKASPCDPTFILGCAPCNVICSVVFQKRFDYKDQNFLTLMKRFNENFRILNSPWIQVCNNFPLLIDCFPGTHNKVLKNVALTRSYIREKVKEHQASLDVNNPRDFIDCFLIKMEQEKDNQKSEFNIENLVGTVADLFVAGTETTSTTLRYGLLLLLKHPEVTAKVQEEIDHVIGRHRSPCMQDRSHMPYTDAVVHEIQRYSDLVPTGVPHAVTTDTKFRNYLIPKGTTIMALLTSVLHDDKEFPNPNIFDPGHFLDKNGNFKKSDYFMPFSAGKRICAGEGLARMELFLFLTTILQNFNLKSVDDLKNLNTTAVTKGIVSLPPSYQICFIPV

SEQ ID NO: 3873 - protein, 393 aa, Homo Sapiens
MEPFVVLVLCLSFMLLFSLWRQSCRRRKLPPGPTPLPIIGNMLQIDVKDICKSFTNFSKVYGPVFTVYFGMNPIVVFHGYEAVKEALIDNGEEFSGRGNSPISQRITKGLGIISSNGKRWKEIRRFSLTTLRNFGMGKRSIEDRVQEEAHCLVEELRKTKASPCDPTFILGCAPCNVICSVVFQKRFDYKDQNFLTLMKRFNENFRILNSPWIQVCNNFPLLIDCFPGTHNKVLKNVALTRSYIREKVKEHQASLDVNNPRDFIDCFLIKMEQEKDNQKSEFNIENLVGTVADLFVAGTETTSTTLRYGLLLLLKHPEVTAKVQEEIDHVIGRHRSPCMQDRSHMPYTDAVVHEIQRYSDLVPTGVPHAVTTDTKFRNYLIPKSFDNKIMLAA

SEQ ID NO: 3874 - protein, 99 aa, Homo Sapiens
MEPFVVLVLCLSFMLLFSLWRQSCRRRKLPPGPTPLPIIGNMLQIDVKDICKSFTNVSLPYVPPANCKGNHFQQWKEMEGDPAFLPHNLAEFWDGEEEH

SEQ ID NO: 3875 - protein, 83 aa, Homo Sapiens
MEPFVVLVLCLSFMLLFSLWRQSCRRRKLPPGPTPLPIIGNMLQIDVKDICKSFTNVSLPYVPPANCKGSQKSMVLCSPCILA

SEQ ID NO: 3876 - protein, 388 aa, Homo Sapiens
MFLQPIAKGIISSNGKRWKEIRRFSLTTLRNFGMGKRSIEDRVQEEAHCLVEELRKTKASPCDPTFILGCAPCNVICSVVFQKRFDYKDQNFLTLMKRFNENFRILNSPWIQVCNNFPLLIDCFPGTHNKVLKNVALTRSYIREKVKEHQASLDVNNPRDFIDCFLIKMEQEKDNQKSEFNIENLVGTVADLFVAGTETTSTTLRYGLLLLLKHPEVTAKVQEEIDHVIGRHRSPCMQDRSHMPYTDAVVHEIQRYSDLVPTGVPHAVTTDTKFRNYLIPKGTTIMALLTSVLHDDKEFPNPNIFDPGHFLDKNGNFKKSDYFMPFSAGKRICAGEGLARMELFLFLTTILQNFNLKSVDDLKNLNTTAVTKGIVSLPPSYQICFIPV

SEQ ID NO: 3877 - protein, 420 aa, Homo Sapiens
MNPIVVFHGYEAVKEALIDNGEEFSGRGNSPISQRITKGLGIISSNGKRWKEIRRFSLTTLRNFGMGKRSIEDRVQEEAHCLVEELRKTKASPCDPTFILGCAPCNVICSVVFQKRFDYKDQNFLTLMKRFNENFRILNSPWIQVCNNFPLLIDCFPGTHNKVLKNVALTRSYIREKVKEHQASLDVNNPRDFIDCFLIKMEQEKDNQKSEFNIENLVGTVADLFVAGTETTSTTLRYGLLLLLKHPEVTAKVQEEIDHVIGRHRSPCMQDRSHMPYTDAVVHEIQRYSDLVPTGVPHAVTTDTKFRNYLIPKGTTIMALLTSVLHDDKEFPNPNIFDPGHFLDKNGNFKKSDYFMPFSAGKRICAGEGLARMELFLFLTTILQNFNLKSVDDLKNLNTTAVTKGIVSLPPSYQICFIPV

SEQ ID NO: 3878 - protein, 420 aa, Homo Sapiens; identical to SEQ ID NO: 3877

SEQ ID NO: 3879 - protein, 490 aa, Homo Sapiens [sequence omitted]

SEQ ID NO: 3880 - protein, 282 aa, Homo Sapiens
MDSLVVLVLCLSCLLLLSLWRQSSGRGKLPPGPTPLPVIGNILQIGIKDISKSLTNLSKVYGPVFTLYFGLKPIVVLHGYEAVKEALIDLGEEFSGRGIFPLAERANRGFGIVFSNGKKWKEIRRFSLMTLRNFGMGKRSIEDRVQEEARCLVEELRKTKASPCDPTFILGCAPCNVICSIIFHKRFDYKDQQFLNLMEKLNENIKILSSPWIQICNNFSPIIDYFPGTHNKLLKNVAFMKSYILEKVKEHQESMDMNNPQDFIDCFLMKMEKLKSRKRLNV

SEQ ID NO: 3881 - protein, 162 aa, Homo Sapiens
MDSLVVLVLCLSCLLLLSLWRQSSGRGKLPPGPTPLPVIGNILQIGIKDISKSLTNLSKVYGPVFTLYFGLKPIVVLHGYEAVKEALIDLGEEFSGRGIFPLAERANRGFGIVFSNGKKWKEIRRFSLMTLRNFGMGKRSIEDRVQEEARCLVEELRKTKGG

SEQ ID NO: 3882 - protein, 86 aa, Homo Sapiens
MSALGVTVALLVWAAFLLLVSMWRQVHSSWNLPPGPFPLPIIGNLFQLELKNIPKSFTRLAQRFGPVFTLYVGSQRMVVMHGYKAV

SEQ ID NO: 3883 - protein, 493 aa, Homo Sapiens
MSALGVTVALLVWAAFLLLVSMWRQVHSSWNLPPGPFPLPIIGNLFQLELKNIPKSFTRLAQRFGPVFTLYVGSQRMVVMHGYKAVKEALLDYKDEFSGRGDLPAFHAHRDRGIIFNNGPTWKDIRRFSLTTLRNYGMGKQGNESRIQREAHFLLEALRKTQGQPFDPTFLIGCAPCNVIADILFRKHFDYNDEKFLRLMYLFNENFHLLSTPWLQLYNNFPSFLHYLPGSHRKVIKNVAEVKEYVSERVKEHHQSLDPNCPRDLTDCLLVEMEKEKHSAERLYTMDGITVTVADLFFAGTETTSTTLRYGLLILMKYPEIEEKLHEEIDRVIGPSRIPAIKDRQEMPYMDAVVHEIQRFITLVPSNLPHEATRDTIFRGYLIPKGTVVVPTLDSVLYDNQEFPDPEKFKPEHFLNENGKFKYSDYFKPFSTGKRVCAGEGLARMELFLLLCAILQHFNLKPLVDPKDIDLSPIHIGFGCIPPRYKLCVIPRS

SEQ ID NO: 3884 - protein, 493 aa, Homo Sapiens; identical to SEQ ID NO: 3883

SEQ ID NO: 3885 - protein, 356 aa, Homo Sapiens
RPFPASHHREPLPVGIEEYSQVLHPGIIFNNGPTWKDIRRFSLTTLRNYGMGKQGNESRIQREAHFLLEALRKTQGQPFDPTFLIGCAPCNVIADILFRKHFDYNDEKFLRLMYLFNENFHLLSTPWLQLYNNFPSFLHYLPGSHRKVIKNVAEVKEYVSERVKEHHQSLDPNCPRDLTDCLLVEMEKEKHSAERLYTMDGITVTVADLFFAGTETTSTTLRYGLLILMKYPEIEEKLHEEIDRVIGPSRIPAIKDRQEMPYMDAVVHEIQRFITLVPSNLPHEATRDTIFRGYLIPKGTVVVPTLDSVLYDNQEFPDPEKFKPEHFLNENGKFKYSDYFKPFSTGKRVCAGEGLA

SEQ ID NO: 3886 - protein, 306 aa, Homo Sapiens
RPFPASHHREPLPVGIEEYSQVLHPGQPFDPTFLIGCAPCNVIADILFRKHFDYNDEKFLRLMYLFNENFHLLSTPWLQLYNNFPSFLHYLPGSHRKVIKNVAEVKEYVSERVKEHHQSLDPNCPRDLTDCLLVEMEKEKHSAERLYTMDGITVTVADLFFAGTETTSTTLRYGLLILMKYPEIEEKLHEEIDRVIGPSRIPAIKDRQEMPYMDAVVHEIQRFITLVPSNLPHEATRDTIFRGYLIPKGTVVVPTLDSVLYDNQEFPDPEKFKPEHFLNENGKFKYSDYFKPFSTGKRVCAGEGLA

SEQ ID NO: 3887 - protein, 43 aa, Homo Sapiens
  misc_feature (1)..(1): Xaa can be any naturally occurring amino acid
XGPFPLPIIGNLFQLELKNIPKSFTRESFLIMDLPGRTSGGFP

SEQ ID NO: 3888 - protein, 172 aa, Homo Sapiens
ARVQEEIDLVVGRARLPALKDRAAMPYTDAVIHEVQRFADIIPMNLPHRVTRDTAFRGFLIPKGTDVITLLNTVHYDPSQFLTPQEFNPEHFLDANQSFKKSPAFMPFSAGEGRNQSLSGPISTYIPHPNSTCQILSLLPSTHSQLWMHRDIHSSSQLCSYRQVVTKILVKQ

SEQ ID NO: 3889 - protein, 491 aa, Homo Sapiens
MDSISTAILLLLLALVCLLLTLSSRDKGKLPPGPRPLSILGNLLLLCSQDMLTSLTKLSKEYGSMYTVHLGPRRVVVLSGYQAVKEALVDQGEEFSGRGDYPAFFNFTKGNGIAFSSGDRWKVLRQFSIQILRNFGMGKRSIEERILEEGSFLLAELRKTEGEPFDPTFVLSRSVSNIICSVLFGSRFDYDDERLLTIIRLINDNFQIMSSPWGELYDIFPSLLDWVPGPHQRIFQNFKCLRDLIAHSVHDHQASLDPRSPRDFIQCFLTKMAEEKEDPLSHFHMDTLLMTTHNLLFGGTKTVSTTLHHAFLALMKYPKVQARVQEEIDLVVGRARLPALKDRAAMPYTDAVIHEVQRFADIIPMNLPHRVTRDTAFRGFLIPKGTDVITLLNTVHYDPSQFLTPQEFNPEHFLDANQSFKKSPAFMPFSAGRRLCLGESLARMELFLYLTAILQSFSLQPLGAPEDIDLTPLSSGLGNLPRPFQLCLRPR

SEQ ID NO: 3890 - protein, 320 aa, Homo Sapiens
MDSISTAILLLLLALVCLLLTLSSRDKGKLPPGPRPLSILGNLLLLCSQDMLTSLTKLSKEYGSMYTVHLGPRRVVVLSGYQAVKEALVDQGEEFSGRGDYPAFFNFTKGNGIAFSSGDRWKVLRQFSIQILRNFGMGKRSIEERILEEGSFLLAELRKTEGEPFDPTFVLSRSVSNIICSVLFGSRFDYDDERLLTIIRLINDNFQIMSSPWGELYDIFPSLLDWVPGPHQRIFQNFKCLRDLIAHSVHDHQASLDPRSPRDFIQCFLTKMAEEKEDPLSHFHMDTLLMTTHNLLFGGTKTPACRRRSTSWWDARGCRR

SEQ ID NO: 3891 - protein, 81 aa, Homo Sapiens
  misc_feature (1)..(1): Xaa can be any naturally occurring amino acid
XPHRVTRDTAFRGFLIPKGTDVITLLNTVHYDPSQFLTPQEFNPEHFLDANQSFKKSPAFMPFSAALDAQRHSFLLSTLLL

SEQ ID NO: 3892 - protein, 502 aa, Homo Sapiens
MLAAMGSLAAALWAVVHPRTLLLGTVAFLLAADFLKRRRPKNYPPGPWRLPFLGNFFLVDFEQSHLEVQLFVKKYGNLFSLELGDISAVLITGLPLIKEALIHMDQNFGNRPVTPMREHIFKKNGLIMSSGQAWKEQRRFTLTALRNFGLGKKSLEERIQEEAQHLTEAIKEENGQPFDPHFKINNAVSNIICSITFGERFEYQDSWFQQLLKLLDEVTYLEASKTCQLYNVFPWIMKFLPGPHQTLFSNWKKLKLFVSHMIDKHRKDWNPAETRDFIDAYLKEMSKHTGNPTSSFHEENLICSTLDLFFAGTETTSTTLRWALLYMALYPEIQEKVQAEIDRVIGQGQQPSTAARESMPYTNAVIHEVQRMGNIIPLNVPREVTVDTTLAGYHLPKGTMILTNLTALHRDPTEWATPDTFNPDHFLENGQFKKREAFMPFSIGKRACLGEQLARTELFIFFTSLMQKFTFRPPNNEKLSLKFRMGITISPVSHRLCAVPQV

SEQ ID NO: 3893 - protein, 268 aa, Homo Sapiens
MPCSSKRNFCRQTMPSFIHEDDKNGRLIEKASVNRKPQLPQHFVDAYLDEMDQGKNDPSSTFSKENLIFSVGELIIAGTETTTNVLRWAILFMALYPNIQGQVQKEIDLIMGPNGKPSWDDKCKMPYTEAVLHEVLRFCNIVPLGIFHATSEDAVVRGYSIPKGTTVITNLYSVHFDEKYWRDPEVFHPERFLDSSGYFAKKEALVPFSLGRRHCLGEHLARMEMFLFFTALLQRFHLHFPHELVPDLKPRLGMTLQPQPYLICAERR

SEQ ID NO: 3894 - protein, 37 aa, Homo Sapiens
MPCSSKRNFCRQTMPSFIHEDDKNGRLTQFQIWPRMG

SEQ ID NO: 3895 - protein, 37 aa, Homo Sapiens; identical to SEQ ID NO: 3894

SEQ ID NO: 3896 - protein, 37 aa, Homo Sapiens; identical to SEQ ID NO: 3894

SEQ ID NO: 3897 - protein, 501 aa, Homo Sapiens
MWKLWRAEEGAAALGGALFLLLFALGVRQLLKQRRPMGFPPGPPGLPFIGNIYSLAASSELPHVYMRKQSQVYGEIFSLDLGGISTVVLNGYDVVKECLVHQSEIFADRPCLPLFMKMTKMGGLLNSRYGRGWVDHRRLAVNSFRYFGYGQKSFESKILEETKFFNDAIETYKGRPFDFKQLITNAVSNITNLIIFGERFTYEDTDFQHMIELFSENVELAASASVFLYNAFPWIGILPFGKHQQLFRNAAVVYDFLSRLIEKASVNRKPQLPQHFVDAYLDEMDQGKNDPSSTFSKENLIFSVGELIIAGTETTTNVLRWAILFMALYPNIQGQVQKEIDLIMGPNGKPSWDDKCKMPYTEAVLHEVLRFCNIVPLGIFHATSEDAVVRGYSIPKGTTVITNLYSVHFDEKYWRDPEVFHPERFLDSSGYFAKKEALVPFSLGRRHCLGEHLARMEMFLFFTALLQRFHLHFPHELVPDLKPRLGMTLQPQPYLICAERR

SEQ ID NO: 3898 - protein, 32 aa, Homo Sapiens
  misc_feature (1)..(1): Xaa can be any naturally occurring amino acid
XQSEIFADRPCLPLFMKMTKMGVLERPRSVPS

SEQ ID NO: 3899 - protein, 73 aa, Homo Sapiens
AVCWDDDGQHHGRLYPPAPDEIPSCPKARRSSPSLAPSCMTPTSSSTQKSSTQTVSWMQMDGSGSMRRSCPSP

SEQ ID NO: 3900 - protein, 175 aa, Homo Sapiens
MEATGTWALLLALALLLLLTLALSGTRARGHLPPGPTPLPLLGNLLQLRPGALYSGLMREEQNPGTEFTNKNMLMTVIYLLFAGTMTVSTTVGYTLLLLMKYPHVQKWVREELNRELGAGQAPSLGDRTRLPYTDAVLHEAQRLLALVPMGIPRTLMRTTRFRGYTLPQGTEVFP

SEQ ID NO: 3901 - protein, 165 aa, Homo Sapiens
MEATGTWALLLALALLLLLTLALSGTRARGHLPPGPTPLPLLGNLLQLRPGALYSGLMRLSKKYGPVFTIYLGPWRPVVVLVGQEAVREALGGQAEEFSGRGTVAMLEGTFDGHGGTKPRHRIHQQEHADDSHLFAVCWDDDGQHHGRLYPPAPDEIPSCPKVGT

SEQ ID NO: 3902 - protein, 187 aa, Homo Sapiens
MEATGTWALLLALALLLLLTLALSGTRARGHLPPGPTPLPLLGNLLQLRPGALYSGLMRLSKKYGPVFTIYLGPWRPVVVLVGQEAVREALGGQAEEFSGRGTVAMLEGTFDGHGVFFSNGERWRQLRKFTMLALRDLGMGKREGEELIQAEARCLVETFQGTEGGTKPRHRIHQQEHADDSHLFAV

SEQ ID NO: 3903 - protein, 504 aa, Homo Sapiens
MEATGTWALLLALALLLLLTLALSGTRARGHLPPGPTPLPLLGNLLQLRPGALYSGLMRLSKKYGPVFTIYLGPWRPVVVLVGQEAVREALGGQAEEFSGRGTVAMLEGTFDGHGVFFSNGERWRQLRKFTMLALRDLGMGKREGEELIQAEARCLVETFQGTEGRPFDPSLLLAQATSNVVCSLLFGLRFSYEDKEFQAVVRAAGGTLLGVSSQGGQTYEMFSWFLRPLPGPHKQLLHHVSTLAAFTVRQVQQHQGNLDASGPARDLVDAFLLKMAQEEQNPGTEFTNKNMLMTVIYLLFAGTMTVSTTVGYTLLLLMKYPHVQKWVREELNRELGAGQAPSLGDRTRLPYTDAVLHEAQRLLALVPMGIPRTLMRTTRFRGYTLPQGTEVFPLLGSILHDPNIFKHPEEFNPDRFLDADGRFRKHEAFLPFSLGKRVCLGEGLAKAELFLFFTTILQAFSLESPCPPDTLSLKPTVSGLFNIPPAFQLQVRPTDLHSTTQTR

SEQ ID NO: 3904 - protein, 60 aa, Homo Sapiens
MLEGTFDGHGGTKPRHRIHQQEHADDSHLFAVCWDDDGQHHGRLYPPAPDEIPSCPKVGT

SEQ ID NO: 3905 - protein, 288 aa, Homo Sapiens
LQLHRPVLRKIEEVRAILRTLLEARRPHVCPGDPVCSYVDALIQQGQGDDPEGLFAEANAVACTLDMVMAGTETTSATLQWAALLMGRHPDVQGRVQEELDRVLGPGRTPRLEDQQALPYTSAVLHEVQRFITLLPHVPRCTAADTQLGGFLLPKGTPVIPLLTSVLLDETQWQTPGQFNPGHFLDANGHFVKREAFLPFSAGSEGGCGGCSCAPLGRSPPLPSRSRPGAAHSVPGHPPQAAASVLGSAWPGPSSSCCLPASCRGTACCPRLASVRPPWTPRPPGLLP

SEQ ID NO: 3906 - protein, 490 aa, Homo Sapiens
MALLLLLFLGLLGLWGLLCACAQDPSPAARWPPGPRPLPLVGNLHLLRLSQQDRSLMELSERYGPVFTVHLGRQKTVVLTGFEAVKEALAGPGQELADRPPIAIFQLIQRGGGIFFSSGARWRAARQFTVRALHSLGVGREPVADKILQELKCLSGQLDGYRGRPFPLALLGWAPSNITFALLFGRRFDYRDPVFVSLLGLIDEVMVLLGSPGLQLFNVYPWLGALLQLHRPVLRKIEEVRAILRTLLEARRPHVCPGDPVCSYVDALIQQGQGDDPEGLFAEANAVACTLDMVMAGTETTSATLQWAALLMGRHPDVQGRVQEELDRVLGPGRTPRLEDQQALPYTSAVLHEVQRFITLLPHVPRCTAADTQLGGFLLPKGTPVIPLLTSVLLDETQWQTPGQFNPGHFLDANGHFVKREAFLPFSAGRRVCVGERLARTELFLLFAGLLQRYRLLPPPGVSPASLDTTPARAFTMRPRAQALCAVPRP

SEQ ID NO: 3907 - protein, 408 aa, Homo Sapiens
MELSERYGPVFTVHLGRQKTVVLTGFEAVKEALAGPGQELADRPPIAIFQLIQRGGGIFFSSGARWRAARQFTVRALHSLGVGREPVADKILQELKCLSGQLDGYRGRPFPLALLGWAPSNITFALLFGRRFDYRDPVFVSLLGLIDEVMVLLGSPGLQLFNVYPWLGALLQLHRPVLRKIEEVRAILRTLLEARRPHVCPGDPVCSYVDALIQQGQGDDPEGLFAEANAVACTLDMVMAGTETTSATLQWAALLMGRHPDVQGRVQEELDRVLGPGRTPRLEDQQALPYTSAVLHEVQRFITLLPHVPRCTAADTQLGGFLLPKGTPVIPLLTSVLLDETQWQTPGQFNPGHFLDANGHFVKREAFLPFSAGQQPSGPGWGGTSRAPGVGRPQLRLPPLHPPPDLRF

SEQ ID NO: 3908 - protein, 96 aa, Homo Sapiens
MSPGLLLLGSAVLLAFGLCCTFVHRARSRYEHIPGPPRPSFLLGHLPCFWKKDEVGGRVLQDVFLDWAKKYGPVVRVNVFHKTSVIVTSPESVKFH

SEQ ID NO: 3909 - protein, 500 aa, Homo Sapiens
MSPGLLLLGSAVLLAFGLCCTFVHRARSRYEHIPGPPRPSFLLGHLPCFWKKDEVGGRVLQDVFLDWAKKYGPVVRVNVFHKTSVIVTSPESVKKFLMSTKYNKDSKMYRALQTVFGERLFGQGLVSECNYERWHKQRRVIDLAFSRSSLVSLMETFNEKAEQLVEILEAKADGQTPVSMQDMLTYTAMDILAKAAFGMETSMLLGAQKPLSQAVKLMLEGITASRNTLAKFLPGKRKQLREVRESIRFLRQVGRDWVQRRREALKRGEEVPADILTQILKAEEGAQDDEGLLDNFVTFFIAGHETSANHLAFTVMELSRQPEIVARLQAEVDEVIGSKRYLDFEDLGRLQYLSQVLKESLRLYPPAWGTFRLLEEETLIDGVRVPGNTPLLFSTYVMGRMDTYFEDPLTFNPDRFGPGAPKPRFTYFPFSLGHRSCIGQQFAQMEVKVVMAKLLQRLEFRLVPGQRFGLQEQATLKPLDPVLCTLRPRGWQPAPPPPPC

SEQ ID NO: 3910 - protein, 403 aa, Homo Sapiens
MSTKYNKDSKMYRALQTVFGERLFGQGLVSECNYERWHKQRRVIDLAFSRSSLVSLMETFNEKAEQLVEILEAKADGQTPVSMQDMLTYTAMDILAKAAFGMETSMLLGAQKPLSQAVKLMLEGITASRNTLAKFLPGKRKQLREVRESIRFLRQVGRDWVQRRREALKRGEEVPADILTQILKAEEGAQDDEGLLDNFVTFFIAGHETSANHLAFTVMELSRQPEIVARLQAEVDEVIGSKRYLDFEDLGRLQYLSQVLKESLRLYPPAWGTFRLLEEETLIDGVRVPGNTPLLFSTYVMGRMDTYFEDPLTFNPDRFGPGAPKPRFTYFPFSLGHRSCIGQQFAQMEVKVVMAKLLQRLEFRLVPGQRFGLQEQATLKPLDPVLCTLRPRGWQPAPPPPPC

SEQ ID NO: 3911 - protein, 164 aa, Homo Sapiens
RFLRQVGRDWVQRRREALKRGEEVPADILTQILKAEEGAQDDEGLLDNFVTFFIAGHETSANHLAFTVMELSRQPEIVARLQAEVDEVIGSKRYLDFEDLGRLQYLSQVLKESLRLYPPAWGTFRLLEEETLIDGVRVPGNTPLLEQCASQLLGHLPRSERAGL

SEQ ID NO: 3912 - protein, 51 aa, Homo Sapiens
  misc_feature (1)..(1): Xaa can be any naturally occurring amino acid
XPAREEEAAPGGPGEHSLPAPGGQGLGPAPPGSPEEGRGGSCRHPHTDSES

SEQ ID NO: 3913 - protein, 199 aa, Homo Sapiens
MFEGHDTTASGLSWVLYHLAKHPEYQEQCRQEVQELLKDREPIEIEWDDLAQLPFLTMCIKESLRLHPPVPVISRCCTQDFVLPDGRVIPKGIVCLINIIGIHYNPTVWPDPEVYDPFRFDQENIKERSPLAFIPFSAGPRNCIGQAFAMAEMKVVLALTLLHFRILPTHTEPRRKPELILRAEGGLWLRVEPLGANSQ

SEQ ID NO: 3914 - protein, 524 aa, Homo Sapiens
MPQLSLSWLGLGPVAASPWLLLLLVGGSWLLARVLAWTYTFYDNCRRLQCFPQPPKQNWFWGHQGLVTPTEEGMKTLTQLVTTYPQGFKLWLGPTFPLLILCHPDIIRPITSASAAVAPKDMIFYGFLKPWLGDGLLLSGGDKWSRHRRMLTPAFHFNILKPYMKIFNKSVNIMHDKWQRLASEGSARLDMFEHISLMTLDSLQKCVFSFESNCQEKPSEYIAAILELSAFVEKRNQQILLHTDFLYYLTPDGQRFRRACHLVHDFTDAVIQERRCTLPTQGIDDFLKNKAKSKTLDFIDVLLLSKDEDGKELSDEDIRAEADTFMFEGHDTTASGLSWVLYHLAKHPEYQEQCRQEVQELLKDREPIEIEWDDLAQLPFLTMCIKESLRLHPPVPVISRCCTQDFVLPDGRVIPKGIVCLINIIGIHYNPTVWPDPEVYDPFRFDQENIKERSPLAFIPFSAGPRNCIGQAFAMAEMKVVLALTLLHFRILPTHTEPRRKPELILRAEGGLWLRVEPLGANSQ

SEQ ID NO: 3915 - protein, 454 aa, Homo Sapiens
MPQLSLSWLGLGPVAASPWLLLLLVGGSWLLARVLAWTYTFYDNCRRLQCFPQPPKQNWFWGHQGLVTPTEEGMKTLTQLVTTYPQGFKLWLGPTFPLLILCHPDIIRPITSASAAVAPKDMIFYGFLKPWLGDGLLLSGGDKWSRHRRMLTPAFHFNILKPYMKIFNKSVNIMHDKWQRLASEGSARLDMFEHISLMTLDSLQKCVFSFESNCQEKPSEYIAAILELSAFVEKRNQQILLHTDFLYYLTPDGQRFRRACHLVHDFTDAVIQERRCTLPTQGIDDFLKNKAKSKTLDFIDVLLLSKDEDGKELSDEDIRAEADTFMFEGHDTTASGLSWVLYHLAKHPEYQEQCRQEVQELLKDREPIEIEWDDLAQLPFLTMCIKESLRLHPPVPVISRCCTQDFVLPDGRVIPKGLRPLPFRPREHQGEVTSGFYSLLGRAQKLHRAGVRHG

SEQ ID NO: 3916 - protein, 524 aa, Homo Sapiens; identical to SEQ ID NO: 3914

SEQ ID NO: 3917 - protein, 454 aa, Homo Sapiens; identical to SEQ ID NO: 3915

SEQ ID NO: 3918 - protein, 520 aa, Homo Sapiens
MSQLSLSWLGLWPVAASPWLLLLLVGASWLLAHVLAWTYAFYDNCRRLRCFPQPPRRNWFWGHQGMIHSSEEGLLYTQSLACTFGDMGCWWVGPWQAVIHIFLPTCIKPVLFAPAAIAPKDKFFYSFLEPWLGDGLLLSAGDKWSRHRRMLTPAFHFNILKPYMKIFNESVNIMHAKWQLLASEGSACLDMFEHISLMTLDSLQKCVFSFDSHCQEKPSEYIAAILELSALVSKRHHEILLHIDFLYYLTPDGQRFRRACRLVHDFTDAVIQERRRTLPSQGVDDFLQAKAKSKTLDFIDVLLLSKDEDGKKLSDEDIRAEADTFMFEGHDTTASGLSWVLYHLAKHPEYQERCRQEVQELLKDREPKEIEWDDLAHLPFLTMCMKESLRLHPPVPVISRHVTQDIVLPDGRVIPKGIICLISVFGTHHNPAVWPDPEVYDPFRFDPENIKERSPLAFIPFSAGPRNCIGQTFAMAEMKVVLALTLLRFRVLPDHTEPRRKPELVLRAEGGLWLRVEPLS

SEQ ID NO: 3919 - protein, 89 aa, Homo Sapiens
MSQLSLSWLGLWPVAASPWLLLLLVGASWLLAHVLAWTYAFYDNCRRLRCFPQPPRRNWFWGHQGMLPLHQRTSSSTASWSPGWGMGSC

SEQ ID NO: 3920 - protein, 154 aa, Homo Sapiens
MSQLSLSWLGLWPVAASPWLLLLLVGASWLLAHVLAWTYAFYDNCRRLRCFPQPPRRNWFWGHQGMVNPTEEGMRVLTQLVATYPQGFKVWMGPISPLLSLCHPDIIRSVINASAAIAPKDKFFYSFLEPWLGDGLLLSAGDKWSRHRRMLTPA

SEQ ID NO: 3921 - protein, 520 aa, Homo Sapiens
MSQLSLSWLGLWPVAASPWLLLLLVGASWLLAHVLAWTYAFYDNCRRLRCFPQPPRRNWFWGHQGMVNPTEEGMRVLTQLVATYPQGFKVWMGPISPLLSLCHPDIIRSVINASAAIAPKDKFFYSFLEPWLGDGLLLSAGDKWSRHRRMLTPAFHFNILKPYMKIFNESVNIMHAKWQLLASEGSACLDMFEHISLMTLDSLQKCVFSFDSHCQEKPSEYIAAILELSALVSKRHHEILLHIDFLYYLTPDGQRFRRACRLVHDFTDAVIQERRRTLPSQGVDDFLQAKAKSKTLDFIDVLLLSKDEDGKKLSDEDIRAEADTFMFEGHDTTASGLSWVLYHLAKHPEYQERCRQEVQELLKDREPKEIEWDDLAHLPFLTMCMKESLRLHPPVPVISRHVTQDIVLPDGRVIPKGIICLISVFGTHHNPAVWPDPEVYDPFRFDPENIKERSPLAFIPFSAGPRNCIGQTFAMAEMKVVLALTLLRFRVLPDHTEPRRKPELVLRAEGGLWLRVEPLS

SEQ ID NO: 3922 - protein, 74 aa, Homo Sapiens
  misc_feature (1)..(1): Xaa can be any naturally occurring amino acid
XWVLYHLAKHPEYQERCRQEVQELLKDREPKEIEWSTTPFALTQRTSRRGHLWLLFPSRQGPGTASGRRSRWRR

SEQ ID NO: 3923 - protein, 381 aa, Homo Sapiens [sequence omitted]

SEQ ID NO: 3924 - protein, 136 aa, Homo Sapiens
MRTPGPLPVLLLLLAGAPAARPTPPTCYSRMRALSQEITRDFNLLQVSEPSEPCVRYLPRLYLDIHNYCVLDKLRDFVASPPCWKVAQVDSLKDKARKLYTIMNSFCRRDLVFLLDDCNALEYPIPVTTVLPDRQR

SEQ ID NO: 3925 - protein, 76 aa, Homo Sapiens
  misc_feature (1)..(1): Xaa can be any naturally occurring amino acid
XPGPLPVLLLLLAGAPAARPTPPTCYSRMRALSQEITRDFNLLQVSEPSDLVFLLDDCNALEYPIPVTTVLPDRQR

SEQ ID NO: 3926 - protein, 92 aa, Homo Sapiens
  misc_feature (1)..(1): Xaa can be any naturally occurring amino acid
XTPGPLPVLLLLLAGAPAARPTPPTCYSRMRALSQEITRDFNLLQVSEPSEPCVRYLPRLYLDIHDLVFLLDDCNALEYPIPVTTVLPDRQR

SEQ ID NO: 3927 - protein, 78 aa, Homo Sapiens
GNTGMVGGSVPVFDEIILSTARMNRVLSFHSVSESPFYVLIETSGSNAGHDAEKLGHFLEHALGSGLVTDGTMATDQR

SEQ ID NO: 3928 - protein, 243 aa, Homo Sapiens
MLPRRPLAWPAWLLRGAPGAAGSWGRPVGPLARRGCCSAPGTPEVPLTRERYPVRRLPFSTVSKQDLAAFERIVPGGVVTDPEALQAPNVDWLRTLRGCSKVLLRPRTSEEVSHILRHCHERNLAVNPQGGNTGMVGGSVPVFDEIILSTARMNRVLSFHSVSGGLRPGGAEPVCGGTGLHHAAGLRSQGQLPHRGKRGNQRWRPAVSSIWLTAWDCPGPGSGAGRRHCPGLPDLPEEGQHGL

SEQ ID NO: 3929 - protein, 521 aa, Homo Sapiens
MLPRRPLAWPAWLLRGAPGAAGSWGRPVGPLARRGCCSAPGTPEVPLTRERYPVRRLPFSTVSKQDLAAFERIVPGGVVTDPEALQAPNVDWLRTLRGCSKVLLRPRTSEEVSHILRHCHERNLAVNPQGGNTGMVGGSVPVFDEIILSTARMNRVLSFHSVSGILVCQAGCVLEELSRYVEERDFIMPLDLGAKGSCHIGGNVATNAGGLRFLRYGSLHGTVLGLEVVLADGTVLDCLTSLRKDNTGYDLKQLFIGSEGTLGIITTVSILCPPKPRAVNVAFLGCPGFAEVLQTFSTCKGMLGEILSAFEFMDAVCMQLVGRHLHLASPVQESPFYVLIETSGSNAGHDAEKLGHFLEHALGSGLVTDGTMATDQRKVKMLWALRERITEALSRDGYVYKYDLSLPVERLYDIVTDLRARLGPHAKHVVGYGHLGDGNLHLNVTAEAFSPSLLAALEPHVYEWTAGQQGSVSAEHGVGFRKRDVLGYSKPPGALQLMQQLKALLDPKGILNPYKTLPSQA

SEQ ID NO: 3930 - protein, 320 aa, Homo Sapiens
MLPRRPLAWPAWLLRGAPGAAGSWGRPVGPLARRGCCSAPGTPEVPLTRERYPVRRLPFSTVSKQDLAAFERIVPGGVVTDPEALQAPNVDWLRTLRGCSKVLLRPRTSEEVSHILRHCHERNLAVNPQGGNTGMVGGSVPVFDEIILSTARMNRVLSFHSVSGILVCQAGCVLEELSRYVEERDFIMPLDLGAKGSCHIGGNVATNAGGLRFLRYGSLHGTVLGLEVVLADGTVLDCLTSLRKDNTGYDLKQLFIGSEGTLGIITTVSILCPPKPRAVNVAFLDAVGPEGKDHRGAEPGWLRVQVRPLPPCGAALRHRD

SEQ ID NO: 3931 - protein, 387 aa, Homo Sapiens
MVGGSVPVFDEIILSTARMNRVLSFHSVSGILVCQAGCVLEELSRYVEERDFIMPLDLGAKGSCHIGGNVATNAGGLRFLRYGSLHGTVLGLEVVLADGTVLDCLTSLRKDNTGYDLKQLFIGSEGTLGIITTVSILCPPKPRAVNVAFLGCPGFAEVLQTFSTCKGMLGEILSAFEFMDAVCMQLVGRHLHLASPVQESPFYVLIETSGSNAGHDAEKLGHFLEHALGSGLVTDGTMATDQRKVKMLWALRERITEALSRDGYVYKYDLSLPVERLYDIVTDLRARLGPHAKHVVGYGHLGDGNLHLNVTAEAFSPSLLAALEPHVYEWTAGQQGSVSAEHGVGFRKRDVLGYSKPPGALQLMQQLKALLDPKGILNPYKTLPSQA

SEQ ID NO: 3932 - protein, 90 aa, Homo Sapiens [sequence omitted]

SEQ ID NO: 3933 - protein, 152 aa, Homo Sapiens
  misc_feature (1)..(1): Xaa can be any naturally occurring amino acid
XHSVSGILVCQAGCVLEELSRYVEERDFIMPLDLGAKGSCHIGGNVATNAGGLRFLRYGSLHGTVLGLEVVLADGTVLDCLTSLRKDNTGYDLKQLFIGSEGTLGIITTVSILCPPKPRAVNVAFLGFLCSALIPLQLQSPVCRPPVVLGAR

SEQ ID NO: 3934 - protein, 318 aa, Homo Sapiens
  misc_feature (1)..(1): Xaa can be any naturally occurring amino acid
XSHANHRPICLSPRIWPGSASATSTVCSSSESFLPRGPPAVSLLLHGPPTVSFPPPWPTHHVLPSPVAHPPCPCLPPDMPLELPGPCCCPHCLCDSAPPSLPCPTLVQGASRPILILRAFPGPCHSVPCHDLKLQVGASPFRHGCPPSVRCPSRLIAGVPGCSVLSWSLGHSLSGIDSRMLWALRERITEALSRDGYVYKYDLSLPVERLYDIVTDLRARLGPHAKHVVGYGHLGDGNLHLNVTAEAFSPSLLAALEPHVYEWTAGQQGSVSAEHGVGFRKRDVLGYSKPPGALQLMQQLKALLDPKGILNPYKTLPS

SEQ ID NO: 3935 - protein, 189 aa, Homo Sapiens
  misc_feature (1)..(1): Xaa can be any naturally occurring amino acid
XSVFCSDPTPTAVTCVPPACGPGSPRPARLPHPALRTPGCPGFAEVLQTFSTCKGMLGEILSAFEFMDAVCMQLVGRHLHLASPVQESPFYVLIETSGSNAGHDAEKLGHFLEHALGSGLVTDGTMATDQRKVKMLWALRERITEALSRDGYVYKYDLSLPVERLYDIVTDLRARLGPHAKHVVGYGHL

SEQ ID NO: 3936 - protein, 9 aa, Homo Sapiens
MRMSVGLSL

SEQ ID NO: 3937 - protein, 15 aa, Homo Sapiens
MRMSVGLSLLLPLSG

SEQ ID NO: 3938 - protein, 41 aa, Homo Sapiens
MRMSVGLSLLLPLSGRTFLLLLSVVMAQSHWPSEPSEAVRD

SEQ ID NO: 3939 - protein, 52 aa, Homo Sapiens
MRMSVGLSLLLPLSGRTFLLLLSVVMAQSHWPSEPSEAVRDWENQLEASMHS

SEQ ID NO: 3940 - protein, 86 aa, Homo Sapiens
MRMSVGLSLLLPLSGRTFLLLLSVVMAQSHWPSEPSEAVRDWENQLEASMHSVLSDLHEAVPTVVGIPDGTAVVGRSFRVTIPTDL

SEQ ID NO: 3941 - protein, 88 aa, Homo Sapiens
MRMSVGLSLLLPLSGRTFLLLLSVVMAQSHWPSEPSEAVRDWENQLEASMHSVLSDLHEAVPTVVGIPDGTAVVGRSFRVTIPTDLIA

SEQ ID NO: 3942 - protein, 96 aa, Homo Sapiens
MRMSVGLSLLLPLSGRTFLLLLSVVMAQSHWPSEPSEAVRDWENQLEASMHSVLSDLHEAVPTVVGIPDGTAVVGRSFRVTIPTDLIASSGDIIKV

SEQ ID NO: 3943 - protein, 106 aa, Homo Sapiens
MRMSVGLSLLLPLSGRTFLLLLSVVMAQSHWPSEPSEAVRDWENQLEASMHSVLSDLHEAVPTVVGIPDGTAVVGRSFRVTIPTDLIASSGDIIKVSAAGKEALPS

SEQ ID NO: 3944 - protein, 117 aa, Homo Sapiens
MRMSVGLSLLLPLSGRTFLLLLSVVMAQSHWPSEPSEAVRDWENQLEASMHSVLSDLHEAVPTVVGIPDGTAVVGRSFRVTIPTDLIASSGDIIKVSAAGKEALPSWLHWDSQSHTL

SEQ ID NO: 3945 - protein, 895 aa, Homo Sapiens
MRMSVGLSLLLPLSGRTFLLLLSVVMAQSHWPSEPSEAVRDWENQLEASMHSVLSDLHEAVPTVVGIPDGTAVVGRSFRVTIPTDLIASSGDIIKVSAAGKEALPSWLHWDSQSHTLEGLPLDTDKGVHYISVSATRLGANGSHIPQTSSVFSIEVYPEDHSELQSVRTASPDPGEVVSSACAADEPVTVLTVILDADLTKMTPKQRIDLLHRMRSFSEVELHNMKLVPVVNNRLFDMSAFMAGPGNAKKVVENGALLSWKLGCSLNQNSVPDIHGVEAPAREGAMSAQLGYPVVGWHIANKKPPLPKRVRRQIHATPTPVTAIGPPTTAIQEPPSRIVPTPTSPAIAPPTETMAPPVRDPVPGKPTVTIRTRGAIIQTPTLGPIQPTRVSEAGTTVPGQIRPTMTIPGYVEPTAVATPPTTTTKKPRVSTPKPATPSTDSTTTTTRRPTKKPRTPRPVPRVTTKVSITRLETASPPTRIRTTTSGVPRGGEPNQRPELKNHIDRVDAWVGTYFEVKIPSDTFYDHEDTTTDKLKLTLKLREQQLVGEKSWVQFNSNSQLMYGLPDSSHVGKHEYFMHATDKGGLSAVDAFEIHVHRRPQGDRAPARFKAKFVGDPALVLNDIHKKIALVKKLAFAFGDRNCSTITLQNITRGSIVVEWTNNTLPLEPCPKEQIAGLSRRIAEDDGKPRPAFSNALEPDFKATSITVTGSGSCRHLQFIPVVPPRRVPSEAPPTEVPDRDPEKSSEDDVYLHTVIPAVVVAAILLIAGIIAMICYRKKRKGKLTLEDQATFIKKGVPIIFADELDDSKPPPSSSMPLILQEEKAPLPPPEYPNQSVPETTPLNQDTMGEYTPLRDEDPNAPPYQPPPPFTAPMEGKGSRPKNMTPYRSPPPYVPP

SEQ ID NO: 3946 - protein, 895 aa, Homo Sapiens; identical to SEQ ID NO: 3945

SEQ ID NO: 3947 - protein, 895 aa, Homo Sapiens; identical to SEQ ID NO: 3945

SEQ ID NO: 3948 - protein, 895 aa, Homo Sapiens; identical to SEQ ID NO: 3945

SEQ ID NO: 3949 - protein, 895 aa, Homo Sapiens; identical to SEQ ID NO: 3945

SEQ ID NO: 3950 - protein, 895 aa, Homo Sapiens; identical to SEQ ID NO: 3945

SEQ ID NO: 3951 - protein, 189 aa, Homo Sapiens
MLLGQLSTLLCLLSGALPTGSGRPEPQSPRPQSWAAANQTWALGPGALPPLVPASALGSWKAFLGLQKARQLGMGRLQRGQDEVAAVTLPLNPQEVIQGMCKAVPFVQVFSRPGCSAIRLRNHLCFGHCSSLYIPGSDPTPLVLCNSCMPARKRWAPVVLWCLTGSSASRRRVKISTMLIEGCHCSPKA

SEQ ID NO: 3952 - protein, 163 aa, Homo Sapiens
MPLTRQQGRLLVTLSPVRTDRQADRRTDKQMLLGQLSTLLCLLSGALPTGSGRPEPQSPRPQSWAAANQTWALGPGALPPLVPASALGSWKAFLGLQKARQLGMGRLQRGQDEVAAVTLPLNPQEVIQGMCKAVPFVQTRESRYVAQASLELLASSNPPTSAS

SEQ ID NO: 3953 - protein, 167 aa, Homo Sapiens
MFPDYGYGWFHTSLILEGKNYLQWLTERLTERGVKFFQRKVESFEEVAREGADVIVNCTGVWAGALQRDPLLQPGRGQIMKVDAPWMKHFILTHDPERGIYNSPYIIPGTQTVTLGGIFQLGNWSELNNIQDHNTIWEGCCRLEPTLKNARIIGERTGFRPVRPQIR

SEQ ID NO: 3954 - protein, 197 aa, Homo Sapiens
MRVVVIGAGVIGLSTALCIHERYHSVLQPLDIKVYADRFTPLTTTDVAAGLWQPYLSDPNNPQEADWSQQTFDYLLSHVHSPNAENLGLFLISGYNLFHEAIPDPSWKDTVLGFRKLTPRELDMFPDYGYGWFHTSLILEGKNYLQWLTERLTERGVKFFQRKVESFEEVAREGADVIVNCTGVWAGALQRDPLLQP

SEQ ID NO: 3955 - protein, 347 aa, Homo Sapiens
MRVVVIGAGVIGLSTALCIHERYHSVLQPLDIKVYADRFTPLTTTDVAAGLWQPYLSDPNNPQEADWSQQTFDYLLSHVHSPNAENLGLFLISGYNLFHEAIPDPSWKDTVLGFRKLTPRELDMFPDYGYGWFHTSLILEGKNYLQWLTERLTERGVKFFQRKVESFEEVAREGADVIVNCTGVWAGALQRDPLLQPGRGQIMKVDAPWMKHFILTHDPERGIYNSPYIIPGTQTVTLGGIFQLGNWSELNNIQDHNTIWEGCCRLEPTLKNARIIGERTGFRPVRPQIRLEREQLRTGPSNTEVIHNYGHGGYGLTIHWGCALEAAKLFGRILEEKKLSRMPPSHL

SEQ ID NO: 3956 - protein, 123 aa, Homo Sapiens
MRVVVIGAGVIGLSTALCIHERYHSVLQPLDIKVYADRFTPLTTTDVAAGLWQPYLSDPNNPQEADWSQQTFDYLLSHVHSPNAENLGLFLISGYNLFHEAIPLWLVPHKPNSGGKELSTVAD

SEQ ID NO: 3957 - protein, 281 aa, Homo Sapiens
MRVVVIGAGVIGLSTALCIHERYHSVLQPLDIKVYADRFTPLTTTDVAAGLWQPYLSDPNNPQEADWSQQTFDYLLSHVHSPNAENLGLFLISGYNLFHEAIPVAREGADVIVNCTGVWAGALQRDPLLQPGRGQIMKVDAPWMKHFILTHDPERGIYNSPYIIPGTQTVTLGGIFQLGNWSELNNIQDHNTIWEGCCRLEPTLKNARIIGERTGFRPVRPQIRLEREQLRTGPSNTEVIHNYGHGGYGLTIHWGCALEAAKLFGRILEEKKLSRMPPSHL

SEQ ID NO: 3958 - protein, 78 aa, Homo Sapiens
MRVVVIGAGVIGLSTALCIHERYHSVLQPLDIKVYADRFTPLTTTDVAAGLWQPYLSDPNNPQEATLPGRTQFWDFGS

SEQ ID NO: 3959 - protein, 73 aa, Homo Sapiens
MNSKGQYPTQPTYPVQPPGNPVYPQTLHLPQAPPYTDAPPAYSEGLPQSPPCQPHFLEPLCIFPWPSLWLLGL

SEQ ID NO: 3960 - protein, 207 aa, Homo Sapiens
MNSKGQYPTQPTYPVQPPGNPVYPQTLHLPQAPPYTDAPPAYSELYRPSFVHPGAATVPTMSAAFPGASLYLPMAQSVAVGPLGSTIPMAYYPVGPIYPPASTSWMPSQCCSACSHAGSQRPRNSAEGELLHGWFRWWLHHLVRNQGHLCAGKDITYLQHFSQCNCFSHINLKLQFRHMLLGCLSGAQTFRHFSNLIRNHVMVAVPP

SEQ ID NO: 3961 - protein, 168 aa, Homo Sapiens
MNSKGQYPTQPTYPVQPPGNPVYPQTLHLPQAPPYTDAPPAYSELYRPSFVHPGAATVPTMSAAFPGASLYLPMAQSVAVGPLGSTIPMAYYPVGPIYPPGSTVLVEGGYDAGARFGAGATAGNIPPPPPGCPPNAAQLAVMQGANVLVTQRKGNFFMGGSDGGYTIW

SEQ ID NO: 3962 - protein, 134 aa, Homo Sapiens
MNSKGQYPTQPTYPVQPPGNPVYPQTLHLPQAPPYTDAPPAYSELYRPSFVHPGAATVPTMSAAFPGASLYLPMAQSVAVGPLGSTIPMAYYPVGPIYPPGSTVLVEGGYDAGARFGAGATAGNIPVCVLKLGR

SEQ ID NO: 3963 - protein, 153 aa, Homo Sapiens
MNSKGQYPTQPTYPVQPPGNPVYPQTLHLPQAPPYTDAPPAYSELYRPSFVHPGAATVPTMSAAFPGASLYLPMAQSVAVGPLGSTIPMAYYPVGPIYPPGSTVLVEGGYDAGARFGAGATAGNIPVKEDQDHDREQGEEDNGDNNLERRGKM

SEQ ID NO: 3964 - protein, 146 aa, Homo Sapiens
MNSKGQYPTQPTYPVQPPGNPVYPQTLHLPQAPPYTDAPPAYSELYRPSFVHPGAATVPTMSAAIPMAYYPVGPIYPPGSTVLVEGGYDAGARFGAGATAGNIPPPPPGCPPNAAQLAVMQGANVLVTQRKGNFFMGGSDGGYTIW

SEQ ID NO: 3965 - protein, 86 aa, Homo Sapiens
MNSKGQYPTQPTYPVQPPGNPVYPQTLHLPQAPPYTDAPPAYSEPPPPGCPPNAAQLAVMQGANVLVTQRKGNFFMGGSDGGYTIW

SEQ ID NO: 3966 - protein, 136 aa, Homo Sapiens
MNSKGQYPTQPTYPVQPPGNPVYPQTLHLPQAPPYTDAPPAYSESVAVGPLGSTIPMAYYPVGPIYPPGSTVLVEGGYDAGARFGAGATAGNIPPPPPGCPPNAAQLAVMQGANVLVTQRKGNFFMGGSDGGYTIW

SEQ ID NO: 3967 - protein, 108 aa, Homo Sapiens
MSAAFPGASLYLPMAQSVAVGPLGSTIPMAYYPVGPIYPPGSTVLVEGGYDAGARFGAGATAGNIPPPPPGCPPNAAQLAVMQGANVLVTQRKGNFFMGGSDGGYTIW

SEQ ID NO: 3968 - protein, 617 aa, Homo Sapiens
MPALSRWASLPGPSMREAAFMYSTAVAIFLVILVAALQGSAPRESPLPYHIPLDPEGSLELSWNVSYTQEAIHFQLLVRRLKAGVLFGMSDRGELENADLVVLWTDGDTAYFADAWSDQKGQIHLDPQQDYQLLQVQRTPEGLTLLFKRPFGTCDPKDYLIEDGTVHLVYGILEEPFRSLEAINGSGLQMGLQRVQLLKPNIPEPELPSDACTMEVQAPNIQIPSQETTYWCYIKELPKGFSRHHIIKYEPIVTKGNEALVHHMEVFQCAPEMDSVPHFSGPCDSKMKPDRLNYCRHVLAAWALGAKAFYYPEEAGLAFGGPGSSRYLRLEVHYHNPLVIEGRNDSSGIRLYYTAKLRRFNAGIMELGLVYTPVMAIPPRETAFILTGYCTDKCTQLALPPSGIHIFASQLHTHLTGRKVVTVLVRDGREWEIVNQDNHYSPHFQEIRMLKKVVSVHPGDVLITSCTYNTEDRELATVGGFGILEEMCVNYVHYYPQTQLELCKSAVDAGFLQKYFHLINRFNNEDVCTCPQASVSQQFTSVPWNSFNRDVLKALYSFAPISMHCNKSSAVRFQGEWNLQPLPKVISTLEEPTPQCPTSQGRSPAGPTVVSIGGGKG

SEQ ID NO: 3969 - protein, 244 aa, Homo Sapiens
MREAAFMYSTAVAIFLVILVAALQGSAPRESPLPYHIPLDPEGSLELSWNVSYTQEAIHFQLLVRRLKAGVLFGMSDRGELENADLVVLWTDGDTAYFADGTVHLVYGILEEPFRSLEAINGSGLQMGLQRVQLLKPNIPEPELPSDACTMEVQAPNIQIPSQETTYWCYIKELPKGFSRHHIIKYEPIVTKGNEALVHHMEVFQCAPEMDSVPHFSGPCDSKMKPDRLNYCRHVLAAWALGAK

SEQ ID NO: 3970 - protein, 27 aa, Homo Sapiens
MAANLSRNGPALQEAYVRVVTEKSPTD

SEQ ID NO: 3971 - protein, 50 aa, Homo Sapiens
MAANLSRNGPALQEAYVRVVTEKSPTDWALFTYEGNSNDIRCCSCCRGPM

SEQ ID NO: 3972 - protein, 87 aa, Homo Sapiens
MAANLSRNGPALQEAYVRVVTEKSPTDWALFTYEGNSNDIRVAGTGDRRGRERCAEGSLCQPRQHHGQLPEGGPCDHQRTGRGGCGA

SEQ ID NO: 3973 - protein, 406 aa, Homo Sapiens
MAANLSRNGPALQEAYVRVVTEKSPTDWALFTYEGNSNDIRVAGTGEGGLEEMVEELNSGKVMYAFCRVKDPNSGLPKFVLINWGAHVTINARAEEDVEPECIMEKVAKASGANYSFHKESGRFQDVGPQAPVGSVYQKTNAVSEIKRVGKDSFWAKAEKEEENRRLEEKRRAEEAQRQLEQERRERELREAARREQRYQEQGGEASPQSRTWEQQQEVVSRNRNEQESAVHPREIFKQKERAMSTTSISSPQPGKLRSPFLQKQLTQPETHFGREPAAAISRPRADLPAEEPAPSTPPCLVQAEEEAVYEEPPEQETFYEQPPLVQQQGAGSEHIDHHIQGQGLSGQGLCARALYDYQAADDTEISFDPENLITGIEVIDEGWWRGYGPDGHFGMFPANYVELIE

SEQ ID NO: 3974 - protein, 430 aa, Homo Sapiens
MAANLSRNGPALQEAYVRVVTEKSPTDWALFTYEGNSNDIRVAGTGEGGLEEMVEELNSGKVMYAFCRVKDPNSGLPKFVLINWTGEGVNDVRKGACASHVSTMASFLKGAHVTINARAEEDVEPECIMEKVAKASGANYSFHKESGRFQDVGPQAPVGSVYQKTNAVSEIKRVGKDSFWAKAEKEEENRRLEEKRRAEEAQRQLEQERRERELREAARREQRYQEQGGEASPQRTWEQQQEVVSRNRNEQESAVHPREIFKQKERAMSTTSISSPQPGKLRSPFLQKQLTQPETHFGREPAAAISRPRADLPAEEPAPSTPPCLVQAEEEAVYEEPPEQETFYEQPPLVQQQGAGSEHIDHHIQGQGLSGQGLCARALYDYQAADDTEISFDPENLITGIEVIDEGWWRGYGPDGHFGMFPANYVELIE

SEQ ID NO: 3975 - protein, 431 aa, Homo Sapiens
MAANLSRNGPALQEAYVRVVTEKSPTDWALFTYEGNSNDIRVAGTGEGGLEEMVEELNSGKVMYAFCRVKDPNSGLPKFVLINWTGEGVNDVRKGACASHVSTMASFLKGAHVTINARAEEDVEPECIMEKVAKASGANYSFHKESGRFQDVGPQAPVGSVYQKTNAVSEIKRVGKDSFWAKAEKEEENRRLEEKRRAEEAQRQLEQERRERELREAARREQRYQEQGGEASPQSRTWEQQQEVVSRNRNEQESAVHPREIFKQKERAMSTTSISSPQPGKLRSPFLQKQLTQPETHFGREPAAAISRPRADLPAEEPAPSTPPCLVQAEEEAVYEEPPEQETFYEQPPLVQQQGAGSEHIDHHIQGQGLSGQGLCARALYDYQAADDTEISFDPENLITGIEVIDEGWWRGYGPDGHFGMFPANYVELIE

SEQ ID NO: 3976 - protein, 439 aa, Homo Sapiens
MAANLSRNGPALQEAYVRVVTEKSPTDWALFTYEGNSNDIRVAGTGEGGLEEMVEELNSGKVMYAFCRVKDPNSGLPKFVLINWTGEGVNDVRKGACASHVSTMASFLKGAHVTINARAEEDVEPECIMEKVAKASGANYSFHKESGRFQDVGPQAPVGSVYQKTNAVSEIKRVGKDSFWAKAEKEEENRRLEEKRRAEEAQRQLEQERRERELREAARREQRYQEQGGEASPQSRTWEQQQEVVSRNRNEQGSTCASLQESAVHPREIFKQKERAMSTTSISSPQPGKLRSPFLQKQLTQPETHFGREPAAAISRPRADLPAEEPAPSTPPCLVQAEEEAVYEEPPEQETFYEQPPLVQQQGAGSEHIDHHIQGQGLSGQGLCARALYDYQAADDTEISFDPENLITGIEVIDEGWWRGYGPDGHFGMFPANYVELIE

SEQ ID NO: 3977 - protein, 382 aa, Homo Sapiens
MAANLSRNGPALQEAYVRVVTEKSPTDWALFTYEGNSNDIRVAGTGEGGLEEMVEELNSGKVMYAFCRVKDPNSGLPKFVLINWTGEGVNDVRKGACASHVSTMASFLKGSVYQKTNAVSEIKRVGKDSFWAKAEKEEENRRLEEKRRAEEAQRQLEQERRERELREAARREQRYQEQGGEASPQSRTWEQQQEVVSRNRNEQESAVHPREIFKQKERAMSTTSISSPQPGKLRSPFLQKQLTQPETHFGREPAAAISRPRADLPAEEPAPSTPPCLVQAEEEAVYEEPPEQETFYEQPPLVQQQGAGSEHIDHHIQGQGLSGQGLCARALYDYQAADDTEISFDPENLITGIEVIDEGWWRGYGPDGHFGMFPANYVELIE

SEQ ID NO: 3978 - protein, 128 aa, Homo Sapiens
MAANLSRNGPALQEAYVRVVTEKSPTDWALFTYEGNSNDIRVAGTGEGGLEEMVEELNSGKVMYAFCRVKDPNSGLPKFVLINWTGEGVNDVRKGACASHVSTMASFLKVRPGGPCDHQRTGRGGCGA

SEQ ID NO: 3979 - protein, 62 aa, Homo Sapiens
MAANLSRNGPALQEAYVRVVTEKSPTDWALFTYEGNSNDIRVAGTGGGPCDHQRTGRGGCGA

SEQ ID NO: 3980 - protein, 31 aa, Homo Sapiens
MAANLSRNGPALQEAYVRVVTEKSPTDWGPM

SEQ ID NO: 3981 - protein, 40 aa, Homo Sapiens
MAANLSRNGPALQEAYVRVVTEKSPTDWWAARRARGSLYL

SEQ ID NO: 3982 - protein, 48 aa, Homo Sapiens
MAANLSRNGPALQEAYVRVVTEKSPTDWWAARRARVGPGAASGGSLYL

SEQ ID NO: 3983 - protein, 48 aa, Homo Sapiens; identical to SEQ ID NO: 3982

SEQ ID NO: 3984 - protein, 327 aa, Homo Sapiens
MASFLKGAHVTINARAEEDVEPECIMEKVAKASGANYSFHKESGRFQDVGPQAPVGSVYQKTNAVSEIKRVGKDSFWAKAEKEEENRRLEEKRRAEEAQRQLEQERRERELREAARREQRYQEQGGEASPQRTWEQQQEVVSRNRNEQESAVHPREIFKQKERAMSTTSISSPQPGKLRSPFLQKQLTQPETHFGREPAAAISRPRADLPAEEPAPSTPPCLVQAEEEAVYEEPPEQETFYEQPPLVQQQGAGSEHIDHHIQGQGLSGQGLCARALYDYQAADDTEISFDPENLITGIEVIDEGWWRGYGPDGHFGMFPANYVELIE

SEQ ID NO: 3985 - protein, 336 aa, Homo Sapiens
MKATAMTSAWLAQGGAHVTINARAEEDVEPECIMEKVAKASGANYSFHKESGRFQDVGPQAPVGSVYQKTNAVSEIKRVGKDSFWAKAEKEEENRRLEEKRRAEEAQRQLEQERRERELREAARREQRYQEQGGEASPQSRTWEQQQEVVSRNRNEQESAVHPREIFKQKERAMSTTSISSPQPGKLRSPFLQKQLTQPETHFGREPAAAISRPRADLPAEEPAPSTPPCLVQAEEEAVYEEPPEQETFYEQPPLVQQQGAGSEHIDHHIQGQGLSGQGLCARALYDYQAADDTEISFDPENLITGIEVIDEGWWRGYGPDGHFGMFPANYVELIE

SEQ ID NO: 3986 - protein, 359 aa, Homo Sapiens
  misc_feature (1)..(1): Xaa can be any naturally occurring amino acid
XATAMTSAWLAQGTGEGVNDVRKGACASHVSTMASFLKGAHVTINARAEEDVEPECIMEKVAKASGANYSFHKESGRFQDVGPQAPVGSVYQKTNAVSEIKRVGKDSFWAKAEKEEENRRLEEKRRAEEAQRQLEQERRERELREAARREQRYQEQGGEASPQRTWEQQQEVVSRNRNEQESAVHPREIFKQKERAMSTTSISSPQPGKLRSPFLQKQLTQPETHFGREPAAAISRPRADLPAEEPAPSTPPCLVQAEEEAVYEEPPEQETFYEQPPLVQQQGAGSEHIDHHIQGQGLSGQGLCARALYDYQAADDTEISFDPENLITGIEVIDEGWWRGYGPDGHFGMFPANYVELIE

SEQ ID NO: 3987 - protein, 138 aa, Homo Sapiens
  misc_feature (1)..(1): Xaa can be any naturally occurring amino acid
XKQKERAMSTTSISSPQPDLPAEEPAPSTPPCLVQAEEEAVYEEPPEQETFYEQPPLVQQQGAGSEHIDHHIQGQGLSGQGLCARALYDYQAADDTEISFDPENLITGIEVIDEGWWRGYGPDGHFGMFPANYVELIE

SEQ ID NO: 3988 - protein, 77 aa, Homo Sapiens
MRFMTLLFLTALAGALVCAYDPEAASAPGSGNHKQMDCLQLQKPPSETAKFLSSSTNLPRREKLVPSAKPPHTRGLV

SEQ ID NO: 3989 - protein, 110 aa, Homo Sapiens
MRFMTLLFLTALAGALVCAYDPEAASAPGSGNPCHEASAAQKENAGEDPGLARQAPKPRKQRSSLLEKGLDGAKKAVGGLGKLGKDAVEDLESVGKGAVHDVKDVLDSVL

SEQ ID NO: 3990 - protein, 121 aa, Homo Sapiens
MRFMTLLFLTALAGALVCAYDPEAASAPGSGNPCHEASAAQKENAGEDPGLARQAPKPRKQRSSLLEKGLDGAKKAVGGLGKLGKDAVEDLESVGKGGEERLVFGAPVNLTSIPLTSVSRP

SEQ ID NO: 3991 - protein, 100 aa, Homo Sapiens
MKATIILLLLAQVSWAGPFQQRGLFDFMLEDEASGIGPEVPDDRDFEPSLGPVCPFRCQCHLRVVQCSDLEKFGLEIPRALHLEDKSPERLKLSGWAKGE

SEQ ID NO: 3992 - protein, 98 aa, Homo Sapiens
MKATIILLLLAQVSWAGPFQQRGLFDFMLEDEASGIGPEVPDDRDFEPSLGPVCPFRCQCHLRVVQCSDLEKKYCNNLSSYNLYTTNCLILCRLFTHH

SEQ ID NO: 3993 - protein, 98 aa, Homo Sapiens; identical to SEQ ID NO: 3992

SEQ ID NO: 3994 - protein, 250 aa, Homo Sapiens
MKATIILLLLAQVSWAGPFQQRGLFDFMLEDEASGIGPEVPDDRDFEPSLGPVCPFRCQCHLRVVQCSDLELGTNPLKSSGIENGAFQGMKKLSYIRIADTNITSIPQGLPPSLTELHLDGNKISRVDAASLKGLNNLAKLGLSFNSISAVDNGSLANTPHLRELHLDNNKLTRVPGGLAEHKYIQVVYLHNNNISVVGSSDFCPPGHNTKKASYSGVSLFSNPVQYWEIQPSTFRCVYVRSAIQLGNYK

SEQ ID NO: 3995 - protein, 75 aa, Homo Sapiens
MKATIILLLLAQVSWAGPFQQRGLFDFMLEDEASGIGPEVPDDRDFEPSLGPVCPFRCQCHLRVVQCSDLGCLPS

SEQ ID NO: 3996 - protein, 119 aa, Homo Sapiens
MKATIILLLLAQVSWAGPFQQRGLFDFMLEDEASGIGPEVPDDRDFEPSLGPVCPFRCQCHLRVVQCSDLGLDKVPKDLPPDTTLLDLQNNKITEIKDGDFKNLKNLHALILVNNKISK

SEQ ID NO: 3997 - protein, 174 aa, Homo Sapiens
MKATIILLLLAQVSWAGPFQQRGLFDFMLEDEASGIGPEVPDDRDFEPSLGPVCPFRCQCHLRVVQCSDLGLDKVPKDLPPDTTLLDLQNNKITEIKDGDFKNLKNLHALILVNNKISKVSPGAFTPLVKLERLYLSKNQLKELPEKMPKTLQELRAHENEITKVRKVTFNGLN

SEQ ID NO: 3998 - protein, 178 aa, Homo Sapiens
MKATIILLLLAQVSWAGPFQQRGLFDFMLEDEASGIGPEVPDDRDFEPSLGPVCPFRCQCHLRVVQCSDLGLDKVPKDLPPDTTLLDLQNNKITEIKDGDFKNLKNLHALILVNNKISKVSPGAFTPLVKLERLYLSKNQLKELPEKMPKTLQELRAHENEITKVRKVTFNGLNQMIV

SEQ ID NO: 3999 - protein, 179 aa, Homo Sapiens
MKATIILLLLAQVSWAGPFQQRGLFDFMLEDEASGIGPEVPDDRDFEPSLGPVCPFRCQCHLRVVQCSDLGLDKVPKDLPPDTTLLDLQNNKITEIKDGDFKNLKNLHALILVNNKISKVSPGAFTPLVKLERLYLSKNQLKELPEKMPKTLQELRAHENEITKVRKVTFNGLNQMIVI

SEQ ID NO: 4000 - protein, 359 aa, Homo Sapiens
MKATIILLLLAQVSWAGPFQQRGLFDFMLEDEASGIGPEVPDDRDFEPSLGPVCPFRCQCHLRVVQCSDLGLDKVPKDLPPDTTLLDLQNNKITEIKDGDFKNLKNLHALILVNNKISKVSPGAFTPLVKLERLYLSKNQLKELPEKMPKTLQELRAHENEITKVRKVTFNGLNQMIVIELGTNPLKSSGIENGAFQGMKKLSYIRIADTNITSIPQGLPPSLTELHLDGNKISRVDAASLKGLNNLAKLGLSFNSISAVDNGSLANTPHLRELHLDNNKLTRVPGGLAEHKYIQVVYLHNNNISVVGSSDFCPPGHNTKKASYSGVSLFSNPVQYWEIQPSTFRCVYVRSAIQLGNYK

SEQ ID NO: 4001 - protein, 359 aa, Homo Sapiens; identical to SEQ ID NO: 4000

SEQ ID NO: 4002 - protein, 359 aa, Homo Sapiens; identical to SEQ ID NO: 4000

SEQ ID NO: 4003 - protein, 172 aa, Homo Sapiens
MKATIILLLLAQVSWAGPFQQRGLFDFMLEDEASGIGPEVPDDRDFEPSLGPVCPFRCQCHLRVVQCSDLGLDKVPKDLPPDTTLLDLQNNKITEIKDGDFKNLKNLHVVYLHNNNISVVGSSDFCPPGHNTKKASYSGVSLFSNPVQYWEIQPSTFRCVYVRSAIQLGNYK

SEQ ID NO: 4004 - protein, 177 aa, Homo Sapiens
MKATIILLLLAQVSWAGPFQQRGLFDFMLEDEASGIGPEVPDDRDFEPSLGPVCPFRCQCHLRVVQCSDLGLPPSLTELHLDGNKISRVDAASLKGLNNLAKLGLSFNSISAVDNGSLANTPHLRELHLDNNKLTRVPGGLAEHKYIQVVYLHNNNISVVGSSDFCPPGHNTKKASY

SEQ ID NO: 4005 - protein, 212 aa, Homo Sapiens
MKATIILLLLAQVSWAGPFQQRGLFDFMLEDEASGIGPEVPDDRDFEPSLGPVCPFRCQCHLRVVQCSDLGLPPSLTELHLDGNKISRVDAASLKGLNNLAKLGLSFNSISAVDNGSLANTPHLRELHLDNNKLTRVPGGLAEHKYIQVVYLHNNNISVVGSSDFCPPGHNTKKASYSGVSLFSNPVQYWEIQPSTFRCVYVRSAIQLGNYK

SEQ ID NO: 4006 - protein, 212 aa, Homo Sapiens; identical to SEQ ID NO: 4005

SEQ ID NO: 4007 - protein, 88 aa, Homo Sapiens
MKATIILLLLAQVSWAGPFQQRGLFDFMLEDEASGIGPEVPDDRDFEPSLGPVCPFRCQCHLRVVQCSDLVETGFHRVSQDGLDLLIS

SEQ ID NO: 4008 - protein, 52 aa, Homo Sapiens
  misc_feature (1)..(1): Xaa can be any naturally occurring amino acid
XDFCPPGHNTKKASYSGVSLFSNPVQYWEIQPSTFRCVYVRSAIQLGNYKKK

SEQ ID NO: 4009 - protein, 95 aa, Homo Sapiens
  misc_feature (1)..(1): Xaa can be any naturally occurring amino acid
XKISRVDAASLKGLNNLAKLGLSFNSISAVDNGSLANTPHLRELHLDNNKLTRVPGGLAEHKYIQVMQSHCLCEEYPKSKTPTLLMGCWEAGSSS

SEQ ID NO: 4010 - protein, 66 aa, Homo Sapiens
MNRRRKFLLASVLALQNSSFIYPSCQKCFSRIILVSKRILKTNLDKVQMPVTSYSNALTTKEKPKH

SEQ ID NO: 4011 - protein, 75 aa, Homo Sapiens
MNRRRKFLLASVLALQNSSFIYPSCQKCFSRIILVSKRSNCPKCGSTGESGNANYRYKLSLKVAESNKLFVITVF

SEQ ID NO: 4012 - protein, 76 aa, Homo Sapiens
MNRRRKFLLASVLALQNSSFIYPSCQKCFSRIILVSKRSNCPKCGSTGESGNANYRYKLSLKVAESNKLFVITVFG

SEQ ID NO: 4013 - protein, 120 aa, Homo Sapiens
MNRRRKFLLASVLALQNSSFIYPSCQKCFSRIILVSKRSNCPKCGSTGESGNANYRYKLSLKVAESNKLFVITVFGSCLDTFFGLTATGLHRILKTNLDKVQMPVTSYSNALTTKEKPKH

SEQ ID NO: 4014 - protein, 120 aa, Homo Sapiens; identical to SEQ ID NO: 4013

SEQ ID NO: 4015 - protein, 123 aa, Homo Sapiens
MNRRRKFLLASVLALQNSSFIYPSCQKCFSRIILVSKRSNCPKCGSTGESGNANYRYKLSLKVAESNKLFVITVFGSCLDTFFGLTATGLHRYIQDPNKIPETLDNDTTQNLLTKAVETCFVG

SEQ ID NO: 4016 - protein, 178 aa, Homo Sapiens
MNRRRKFLLASVLALQNSSFIYPSCQKCFSRIILVSKRSNCPKCGSTGESGNANYRYKLSLKVAESNKLFVITVFGSCLDTFFGLTATGLHRYIQDPNKIPETLDNDTTQNLLTKAVETCFVGQSFIFGVTNFENQPGQGSDASNFLQQCSDHKRKAKALVACQIVLPDPATQDAKTK

SEQ ID NO: 4017 - protein, 998 aa, Homo Sapiens
MNRRRKFLLASVLALQNSSFIYPSCQKCFSRIILVSKRSNCPKCGSTGESGNANYRYKLSLKVAESNKLFVITVFGSCLDTFFGLTATGLHRYIQDPNKIPETLDNDTTQNLLTKAVETCFVGQSFIFGVTNFENQPGQGSDASNFLQQCSDHKRKAKALVACQIVLPDPGIAGFTVIDYFHQLLQTFNFRKLQCDSQAPNNHLLALDHSNSDLSSIYTSDSTSDFFKSCSKDTFSKFWQPSLEFTCIVSQLTDNDDFSASEQSKAFGTLQQNRKSISIAEATGSSSCHDPIQDSWSLVSYMDKKSTAEKLGKELGLQAKELSAVHSSHHEIGVNDSNLFSLEMREPLESSNTKSFHSAVEIKNRSQHELPCFQHHGIDTPTSLQKRSACCPPSLLRLEETASSSQDGDPQIWDDLPFSESLNKFLAVLESEIAVTQADVSSRKHHVDNDIDKFHADHSRLSVTPQRTTGALHTPPIALRSSQVIVKANCSKDDFLFNCKGNLSPSVEKESQPDNKVEAVSVNHNGRDMSEYFLPNPYLSALSSSSKDLETIVTLKKTIRISPHRESDHSSLNNKYLNGCGEISVSEMNEKLTTLCYRKYNDVSDLCKLENKQYCRWSKNQDDSFTICRKLTYPLETLCNSPNRSTNTLKEMPWGHINNNVTQSYSIGYEGSYDASADLFDDIAKEMDIATEITKKSQDILLKWGTSLAESHPSESDFSLRSLSEDFIQPSQKLSLQSLSDSRHSRTCSPTPHFQSDSEYNFENSQDFVPCSQSTPISGFHQTRIHGINRAFKKPVFYSDLDGNYEKIRIFPENDKQQASPSCPKNIKTPSQKIRSPIVSGVSQPDVFNHYPFAECHETDSDEWVPPTTQKIFPSDMLGFQGIGLGKCLAAYHFPDQQELPRKKLKHIRQGTNKGLIKKKLKNMLAAVVTKKKTHKYNCKSSGWISKCPDIQVLAAPQLHPILGPDSCSEVKCCLPFSEKGPPSVCETRSAWSPELFS

SEQ ID NO: 4018 - protein, 998 aa, Homo Sapiens; identical to SEQ ID NO: 4017

SEQ ID NO: 4019 - protein, 225 aa, Homo Sapiens
MYQMSTLKSNKVIFQLKKNNFHQFRFFKRFIWSFALVAQAEVPWCNLGSLQPPHPRPRCEHMNRRRKFLLASVLALQNSSFIYPSCQKCFSRIILVSKRSNCPKCGSTGESGNANYRYKLSLKVAESNKLFVITVFGSCLDTFFGLTATGLHRYIQDPNKIPETLDNDTTQNLLTKAVETCFVGQSFIFGVTNFENQPGQGSDASNFLQQCSDHKRKAKALVACQ

SEQ ID NO: 4020 - protein, 439 aa, Homo Sapiens
MEPSTAARAWALFWLLLPLLGAVCASGPRTLVLLDNLNVRETHSLFFRSLKDRGFELTFKTADDPSLSLIKYGEFLYDNLIIFSPSVEDFGGNINVETISAFIDGGGSVLVAASSDIGDPLRELGSECGIEFDEEKTAVIDHHNYDISDLGQHTLIVADTENLLKAPTIVGKSSLNPILFRGVGMVADPDNPLVLDILTGSSTSYSFFPDKPITQYPHAVGKNTLLIAGLQARNNARVIFSGSLDFFSDSFFNSAVQKAAPGSQRYSQTGNYELAVALSRWVFKEEGVLRVGPVSHHRVGETAPPNAYTVTDLVEYSIVIQQLSNGKWVPFDGDDIQLEFVRIDPFVRTFLKKKGGKYSVQFKLPDVYGVFQFKVDYNRLGYTHLYSSTQVSVRPLQHTQYERFIPSAYPYYASAFSMMLGLFIFSIVFLHMKEKEKSD

SEQ ID NO: 4021 - protein, 155 aa, Homo Sapiens [sequence omitted]

SEQ ID NO: 4022 - protein, 456 aa, Homo Sapiens
MGYFRCARAGSFGRRRKMEPSTAARAWALFWLLLPLLGAVCASGPRTLVLLDNLNVRETHSLFFRSLKDRGFELTFKTADDPSLSLIKYGEFLYDNLIIFSPSVEDFGGNINVETISAFIDGGGSVLVAASSDIGDPLRELGSECGIEFDEEKTAVIDHHNYDISDLGQHTLIVADTENLLKAPTIVGKSSLNPILFRGVGMVADPDNPLVLDILTGSSTSYSFFPDKPITQYPHAVGKNTLLIAGLQARNNARVIFSGSLDFFSDSFFNSAVQKAAPGSQRYSQTGNYELAVALSRWVFKEEGVLRVGPVSHHRVGETAPPNAYTVTDLVEYSIVIQQLSNGKWVPFDGDDIQLEFVRIDPFVRTFLKKKGGKYSVQFKLPDVYGVFQFKVDYNRLGYTHLYSSTQVSVRPLQHTQYERFIPSAYPYYASAFSMMLGLFIFSIVFLHMKEKEKSD

SEQ ID NO: 4023 - protein, 456 aa, Homo Sapiens; identical to SEQ ID NO: 4022

SEQ ID NO: 4024 - protein, 41 aa, Homo Sapiens
MGPEALSSLLLLLLVASGDADMKGHFDPAKCRYALGMQDRT

SEQ ID NO: 4025 - protein, 51 aa, Homo Sapiens
MGPEALSSLLLLLLVASGDADMKGHFDPAKCRYALGMQDRTIPDSDISASS

SEQ ID NO: 4026 - protein, 51 aa, Homo Sapiens; identical to SEQ ID NO: 4025

SEQ ID NO: 4027 - protein, 55 aa, Homo Sapiens
MGPEALSSLLLLLLVASGDADMKGHFDPAKCRYALGMQDRTIPDSDISASSSWSD

SEQ ID NO: 4028 - protein, 58 aa, Homo Sapiens
MGPEALSSLLLLLLVASGDADMKGHFDPAKCRYALGMQDRTIPDSDISASSSWSDSTA

SEQ ID NO: 4029 - protein, 70 aa, Homo Sapiens
MGPEALSSLLLLLLVASGDADMKGHFDPAKCRYALGMQDRTIPDSDISASSSWSDSTAARHSRLESSDGD

SEQ ID NO: 4030 - protein, 73 aa, Homo Sapiens
MGPEALSSLLLLLLVASGDADMKGHFDPAKCRYALGMQDRTIPDSDISASSSWSDSTAARHSRLESSDGDGAW

SEQ ID NO: 4031 - protein, 78 aa, Homo Sapiens
MGPEALSSLLLLLLVASGDADMKGHFDPAKCRYALGMQDRTIPDSDISASSSWSDSTAARHSRLESSDGDGAWCPAGS

SEQ ID NO: 4032 - protein, 85 aa, Homo Sapiens
MGPEALSSLLLLLLVASGDADMKGHFDPAKCRYALGMQDRTIPDSDISASSSWSDSTAARHSRLESSDGDGAWCPAGSVFPKEEE

SEQ ID NO: 4033 - protein, 101 aa, Homo Sapiens
MGPEALSSLLLLLLVASGDADMKGHFDPAKCRYALGMQDRTIPDSDISASSSWSDSTAARHSRLESSDGDGAWCPAGSVFPKEEEYLQVDLQRLHLVALVG

SEQ ID NO: 4034 - protein, 112 aa, Homo Sapiens
MGPEALSSLLLLLLVASGDADMKGHFDPAKCRYALGMQDRTIPDSDISASSSWSDSTAARHSRLESSDGDGAWCPAGSVFPKEEEYLQVDLQRLHLVALVGTQGRHAGGLGK

SEQ ID NO: 4035 - protein, 115 aa, Homo Sapiens
MGPEALSSLLLLLLVASGDADMKGHFDPAKCRYALGMQDRTIPDSDISASSSWSDSTAARHSRLESSDGDGAWCPAGSVFPKEEEYLQVDLQRLHLVALVGTQGRHAGGLGKEFS

SEQ ID NO: 4036 - protein, 122 aa, Homo Sapiens
MGPEALSSLLLLLLVASGDADMKGHFDPAKCRYALGMQDRTIPDSDISASSSWSDSTAARHSRLESSDGDGAWCPAGSVFPKEEEYLQVDLQRLHLVALVGTQGRHAGGLGKEFSRSYRLRY

SEQ ID NO: 4037 - protein, 127 aa, Homo Sapiens
MGPEALSSLLLLLLVASGDADMKGHFDPAKCRYALGMQDRTIPDSDISASSSWSDSTAARHSRLESSDGDGAWCPAGSVFPKEEEYLQVDLQRLHLVALVGTQGRHAGGLGKEFSRSYRLRYSRDGR

SEQ ID NO: 4038 - protein, 132 aa, Homo Sapiens
MGPEALSSLLLLLLVASGDADMKGHFDPAKCRYALGMQDRTIPDSDISASSSWSDSTAARHSRLESSDGDGAWCPAGSVFPKEEEYLQVDLQRLHLVALVGTQGRHAGGLGKEFSRSYRLRYSRDGRRWMGW

SEQ ID NO: 4039 - protein, 138 aa, Homo Sapiens
MGPEALSSLLLLLLVASGDADMKGHFDPAKCRYALGMQDRTIPDSDISASSSWSDSTAARHSRLESSDGDGAWCPAGSVFPKEEEYLQVDLQRLHLVALVGTQGRHAGGLGKEFSRSYRLRYSRDGRRWMGWKDRWGQ

SEQ ID NO: 4040 - protein, 138 aa, Homo Sapiens; identical to SEQ ID NO: 4039

SEQ ID NO: 4041 - protein, 143 aa, Homo Sapiens
MGPEALSSLLLLLLVASGDADMKGHFDPAKCRYALGMQDRTIPDSDISASSSWSDSTAARHSRLESSDGDGAWCPAGSVFPKEEEYLQVDLQRLHLVALVGTQGRHAGGLGKEFSRSYRLRYSRDGRRWMGWKDRWGQEVISG

SEQ ID NO: 4042 - protein, 147 aa, Homo Sapiens
MGPEALSSLLLLLLVASGDADMKGHFDPAKCRYALGMQDRTIPDSDISASSSWSDSTAARHSRLESSDGDGAWCPAGSVFPKEEEYLQVDLQRLHLVALVGTQGRHAGGLGKEFSRSYRLRYSRDGRRWMGWKDRWGQEVISGNEDP

SEQ ID NO: 4043 - protein, 153 aa, Homo Sapiens
MGPEALSSLLLLLLVASGDADMKGHFDPAKCRYALGMQDRTIPDSDISASSSWSDSTAARHSRLESSDGDGAWCPAGSVFPKEEEYLQVDLQRLHLVALVGTQGRHAGGLGKEFSRSYRLRYSRDGRRWMGWKDRWGQEVISGNEDPEGVVLK

SEQ ID NO: 4044 - protein, 160 aa, Homo Sapiens
MGPEALSSLLLLLLVASGDADMKGHFDPAKCRYALGMQDRTIPDSDISASSSWSDSTAARHSRLESSDGDGAWCPAGSVFPKEEEYLQVDLQRLHLVALVGTQGRHAGGLGKEFSRSYRLRYSRDGRRWMGWKDRWGQEVISGNEDPEGVVLKDLGPPMV

SEQ ID NO: 4045 - protein, 170 aa, Homo Sapiens
MGPEALSSLLLLLLVASGDADMKGHFDPAKCRYALGMQDRTIPDSDISASSSWSDSTAARHSRLESSDGDGAWCPAGSVFPKEEEYLQVDLQRLHLVALVGTQGRHAGGLGKEFSRSYRLRYSRDGRRWMGWKDRWGQEVISGNEDPEGVVLKDLGPPMVARLVRFYPRA

SEQ ID NO: 4046 - protein, 243 aa, Homo Sapiens
MGPEALSSLLLLLLVASGDADMKGHFDPAKCRYALGMQDRTIPDSDISASSSWSDSTAARHSRLESSDGDGAWCPAGSVFPKEEEYLQVDLQRLHLVALVGTQGRHAGGLGKEFSRSYRLRYSRDGRRWMGWKDRWGQEVISGNEDPEGVVLKDLGPPMVARLVRFYPRADRVMSVCLRVELYGCLWRDCSMGVWASWQMVWWGWMTLGRVRSCGSGQAMTMWDGATTASPVAMWRWSLSLTG

SEQ ID NO: 4047 - protein, 243 aa, Homo Sapiens; identical to SEQ ID NO: 4046

SEQ ID NO: 4048 - protein, 209 aa, Homo Sapiens
MGPEALSSLLLLLLVASGDADMKGHFDPAKCRYALGMQDRTIPDSDISASSSWSDSTAARHSRLESSDGDGAWCPAGSVFPKEEEYLQVDLQRLHLVALVGTQGRHAGGLGKEFSRSYRLRYSRDGRRWMGWKDRWGQEVISGNEDPEGVVLKDLGPPMVARLVRFYPRADRVMSVCLRVELYGCLWRDGLLSYTAPVGQTMYLSEAVY

SEQ ID NO: 4049 - protein, 913 aa, Homo Sapiens
MGPEALSSLLLLLLVASGDADMKGHFDPAKCRYALGMQDRTIPDSDISASSSWSDSTAARHSRLESSDGDGAWCPAGSVFPKEEEYLQVDLQRLHLVALVGTQGRHAGGLGKEFSRSYRLRYSRDGRRWMGWKDRWGQEVISGNEDPEGVVLKDLGPPMVARLVRFYPRADRVMSVCLRVELYGCLWRDGLLSYTAPVGQTMYLSEAVYLNDSTYDGHTVGGLQYGGLGQLADGVVGLDDFRKSQELRVWPGYDYVGWSNHSFSSGYVEMEFEFDRLRAFQAMQVHCNNMHTLGARLPGGVECRFRRGPAMAWEGEPMRHNLGGNLGDPRARAVSVPLGGRVARFLQCRFLFAGPWLLFSEISFISDVVNNSSPALGGTFPPAPWWPPGPPPTNFSSLELEPRGQQPVAKAEGSPTAILIGCLVAIILLLLLIIALMLWRLHWRRLLSKAERRVLEEELTVHLSVPGDTILINNRPGPREPPPYQEPRPRGNPPHSAPCVPNGSALLLSNPAYRLLLATYARPPRGPGPPTPAWAKPTNTQAYSGDYMEPEKPGAPLLPPPPQNSVPHYAEADIVTLQGVTGGNTYAVPALPPGAVGDGPPRVDFPRSRLRFKEKLGEGQFGEVHLCEVDSPQDLVSLDFPLNVRKGHPLLVAVKILRPDATKNARNDFLKEVKIMSRLKDPNIIRLLGVCVQDDPLCMITDYMENGDLNQFLSAHQLEDKAAEGAPGDGQAAQGPTISYPMLLHVAAQIASGMRYLATLNFVHRDLATRNCLVGENFTIKIADFGMSRNLYAGDYYRVQGRAVLPIRWMAWECILMGKFTTASDVWAFGVTLWEVLMLCRAQPFGQLTDEQVIENAGEFFRDQGRQVYLSRPPACPQGLYELMLRCWSRESEQRPPFSQLHRFLAEDALNTV

SEQ ID NO: 4050 - protein, 876 aa, Homo Sapiens
MGPEALSSLLLLLLVASGDADMKGHFDPAKCRYALGMQDRTIPDSDISASSSWSDSTAARHSRLESSDGDGAWCPAGSVFPKEEEYLQVDLQRLHLVALVGTQGRHAGGLGKEFSRSYRLRYSRDGRRWMGWKDRWGQEVISGNEDPEGVVLKDLGPPMVARLVRFYPRADRVMSVCLRVELYGCLWRDGLLSYTAPVGQTMYLSEAVYLNDSTYDGHTVGGLQYGGLGQLADGVVGLDDFRKSQELRVWPGYDYVGWSNHSFSSGYVEMEFEFDRLRAFQAMQVHCNNMHTLGARLPGGVECRFRRGPAMAWEGEPMRHNLGGNLGDPRARAVSVPLGGRVARFLQCRFLFAGPWLLFSEISFISDVVNNSSPALGGTFPPAPWWPPGPPPTNFSSLELEPRGQQPVAKAEGSPTAILIGCLVAIILLLLLIIALMLWRLHWRRLLSKAERRVLEEELTVHLSVPGDTILINNRPGPREPPPYQEPRPRGNPPHSAPCVPNGSAYSGDYMEPEKPGAPLLPPPPQNSVPHYAEADIVTLQGVTGGNTYAVPALPPGAVGDGPPRVDFPRSRLRFKEKLGEGQFGEVHLCEVDSPQDLVSLDFPLNVRKGHPLLVAVKILRPDATKNARNDFLKEVKIMSRLKDPNIIRLLGVCVQDDPLCMITDYMENGDLNQFLSAHQLEDKAAEGAPGDGQAAQGPTISYPMLLHVAAQIASGMRYLATLNFVHRDLATRNCLVGENFTIKIADFGMSRNLYAGDYYRVQGRAVLPIRWMAWECILMGKFTTASDVWAFGVTLWEVLMLCRAQPFGQLTDEQVIENAGEFFRDQGRQVYLSRPPACPQGLYELMLRCWSRESEQRPPFSQLHRFLAEDALNTV

SEQ ID NO: 4051 - protein, 876 aa, Homo Sapiens; identical to SEQ ID NO: 4050

SEQ ID NO: 4052 - protein, 913 aa, Homo Sapiens; identical to SEQ ID NO: 4049

SEQ ID NO: 4053 - protein, 267 aa, Homo Sapiens
MGPEALSSLLLLLLVASGDADMKGHFDPAKCRYALGMQDRTIPDSDISASSSWSDSTAARHSRLESSDGDGAWCPAGSVFPKEEEYLQVDLQRLHLVALVGTQGRHAGGLGKEFSRSYRLRYSRDGRRWMGWKDRWGQEVISGNEDPEGVVLKDLGPPMVARLVRFYPRADRVMSVCLRVELYGCLWRDGLLSYTAPVGQTMYLSEAVYLNDSTYDGHTVGGLQYGGLGQLADGVVGLDDFRKSQELRVWPGYDYVGWSNHSFSSGY

SEQ ID NO: 4054 - protein, 876 aa, Homo Sapiens; identical to SEQ ID NO: 4050

SEQ ID NO: 4055 - protein, 767 aa, Homo Sapiens
MGPEALSSLLLLLLVASGDADMKGHFDPAKCRYALGMQDRTIPDSDISASSSWSDSTAARHSRLESSDGDGAWCPAGSVFPKEEEYLQVDLQRLHLVALVGTQGRHAGGLGKEFSRSYRLRYSRDGRRWMGWKDRWGQEVISGNEDPEGVVLKDLGPPMVARLVRFYPRADRVMSVCLRVELYGCLWRDGLLSYTAPVGQTMYLSEAVYLNDSTYDGHTVGGLQYGGLGQLADGVVGLDDFRKSQELRVWPGYDYVGWSNHSFSSGYVEMEFEFDRLRAFQAMQVHCNNMHTLGARLPGGVECRFRRGPAMAWEGEPMRHNLGGNLGDPRARAVSVPLGGRVARFLQCRFLFAGPWLLFSEISFISDVVNNSSPALGGTFPPAPWWPPGPPPTNFSSLELEPRGQQPVAKAEGSPTAILIGCLVAIILLLLLIIALMLWRLHWRRLLSKVLESHPRTRSPGLVGIRPTPLPVSPMALVHLCEVDSPQDLVSLDFPLNVRKGHPLLVAVKILRPDATKNARNDFLKEVKIMSRLKDPNIIRLLGVCVQDDPLCMITDYMENGDLNQFLSAHQLEDKAAEGAPGDGQAAQGPTISYPMLLHVAAQIASGMRYLATLNFVHRDLATRNCLVGENFTIKIADFGMSRNLYAGDYYRVQGRAVLPIRWMAWECILMGKFTTASDVWAFGVTLWEVLMLCRAQPFGQLTDEQVIENAGEFFRDQGRQVYLSRPPACPQGLYELMLRCWSRESEQRPPFSQLHRFLAEDALNTV

SEQ ID NO: 4056 - protein, 876 aa, Homo Sapiens; identical to SEQ ID NO: 4050

SEQ ID NO: 4057 - protein, 876 aa, Homo Sapiens; identical to SEQ ID NO: 4050

SEQ ID NO: 4058 - protein, 919 aa, Homo Sapiens
MGPEALSSLLLLLLVASGDADMKGHFDPAKCRYALGMQDRTIPDSDISASSSWSDSTAARHSRLESSDGDGAWCPAGSVFPKEEEYLQVDLQRLHLVALVGTQGRHAGGLGKEFSRSYRLRYSRDGRRWMGWKDRWGQEVISGNEDPEGVVLKDLGPPMVARLVRFYPRADRVMSVCLRVELYGCLWRDGLLSYTAPVGQTMYLSEAVYLNDSTYDGHTVGGLQYGGLGQLADGVVGLDDFRKSQELRVWPGYDYVGWSNHSFSSGYVEMEFEFDRLRAFQAMQVHCNNMHTLGARLPGGVECRFRRGPAMAWEGEPMRHNLGGNLGDPRARAVSVPLGGRVARFLQCRFLFAGPWLLFSEISFISDVVNNSSPALGGTFPPAPWWPPGPPPTNFSSLELEPRGQQPVAKAEGSPTAILIGCLVAIILLLLLIIALMLWRLHWRRLLSKAERRVLEEELTVHLSVPGDTILINNRPGPREPPPYQEPRPRGNPPHSAPCVPNGSALLLSNPAYRLLLATYARPPRGPGPPTPAWAKPTNTQAYSGDYMEPEKPGAPLLPPPPQNSVPHYAEADIVTLQGVTGGNTYAVPALPPGAVGDGPPRVDFPRSRLRFKEKLGEGQFGEVHLCEVDSPQDLVSLDFPLNVRKGHPLLVAVKILRPDATKNASFSLFSRNDFLKEVKIMSRLKDPNIIRLLGVCVQDDPLCMITDYMENGDLNQFLSAHQLEDKAAEGAPGDGQAAQGPTISYPMLLHVAAQIASGMRYLATLNFVHRDLATRNCLVGENFTIKIADFGMSRNLYAGDYYRVQGRAVLPIRWMAWECILMGKFTTASDVWAFGVTLWEVLMLCRAQPFGQLTDEQVIENAGEFFRDQGRQVYLSRPPACPQGLYELMLRCWSRESEQRPPFSQLHRFLAEDALNTV

SEQ ID NO: 4059 - protein, 286 aa, Homo Sapiens
MGPEALSSLLLLLLVASGDADMKGHFDPAKCRYALGMQDRTIPDSDISASSSWSDSTAARHSRLESSDGDGAWCPAGSVFPKEEEYLQVDLQRLHLVALVGTQGRHAGGLGKEFSRSYRLRYSRDGRRWMGWKDRWGQEVISGNEDPEGVVLKDLGPPMVARLVRFYPRADRVMSVCLRVELYGCLWRDGLLSYTAPVGQTMYLSEAVYLNDSTYDGHTVGGLQYGGLGQLADGVVGLDDFRKSQELRVWPGYDYVGWSNHSFSSGYVEMEFEFDRLRAFQAMQVH

SEQ ID NO: 4060 - protein, 913 aa, Homo Sapiens; identical to SEQ ID NO: 4049

SEQ ID NO: 4061 - protein, 35 aa, Homo Sapiens
MGPEALSSLLLLLLVASGDADMKGHFDPGPDHPRQ

SEQ ID NO: 4062 - protein, 35 aa, Homo Sapiens; identical to SEQ ID NO: 4061

SEQ ID NO: 4063 - protein, 196 aa, Homo Sapiens
MPHLASLFTASSRCCPHPLRPEGSGAMGPEALSSLLLLLLVASGDADMKGHFDPAKCRYALGMQDRTIPDSDISASSSWSDSTAARHSRLESSDGDGAWCPAGSVFPKEEEYLQVDLQRLHLVALVGTQGRHAGGLGKEFSRSYRLRYSRDGRRWMGWKDRWGQEVISGNEDPEGVVLKDLGPPMVARLVRFYPRA

SEQ ID NO: 4064 - protein, 894 aa, Homo Sapiens
MSLPRCCPHPLRPEGSGAMGPEALSSLLLLLLVASGDADMKGHFDPAKCRYALGMQDRTIPDSDISASSSWSDSTAARHSRLESSDGDGAWCPAGSVFPKEEEYLQVDLQRLHLVALVGTQGRHAGGLGKEFSRSYRLRYSRDGRRWMGWKDRWGQEVISGNEDPEGVVLKDLGPPMVARLVRFYPRADRVMSVCLRVELYGCLWRDGLLSYTAPVGQTMYLSEAVYLNDSTYDGHTVGGLQYGGLGQLADGVVGLDDFRKSQELRVWPGYDYVGWSNHSFSSGYVEMEFEFDRLRAFQAMQVHCNNMHTLGARLPGGVECRFRRGPAMAWEGEPMRHNLGGNLGDPRARAVSVPLGGRVARFLQCRFLFAGPWLLFSEISFISDVVNNSSPALGGTFPPAPWWPPGPPPTNFSSLELEPRGQQPVAKAEGSPTAILIGCLVAIILLLLLIIALMLWRLHWRRLLSKAERRVLEEELTVHLSVPGDTILINNRPGPREPPPYQEPRPRGNPPHSAPCVPNGSAYSGDYMEPEKPGAPLLPPPPQNSVPHYAEADIVTLQGVTGGNTYAVPALPPGAVGDGPPRVDFPRSRLRFKEKLGEGQFGEVHLCEVDSPQDLVSLDFPLNVRKGHPLLVAVKILRPDATKNARNDFLKEVKIMSRLKDPNIIRLLGVCVQDDPLCMITDYMENGDLNQFLSAHQLEDKAAEGAPGDGQAAQGPTISYPMLLHVAAQIASGMRYLATLNFVHRDLATRNCLVGENFTIKIADFGMSRNLYAGDYYRVQGRAVLPIRWMAWECILMGKFTTASDVWAFGVTLWEVLMLCRAQPFGQLTDEQVIENAGEFFRDQGRQVYLSRPPACPQGLYELMLRCWSRESEQRPPFSQLHRFLAEDALNTV

SEQ ID NO: 4065 - protein, 69 aa, Homo Sapiens
MVARLVRFYPRADRVMSVCLRVELYGCLWRDGLLSYTAPVGQTMYLSEAVYLNDSTYDGHTVGGLQYGG

SEQ ID NO: 4066 - protein, 493 aa, Homo Sapiens
SEAVYLNDSTYDGHTVGGLQYGGLGQLADGVVGLDDFRKSQELRVWPGYDYVGWSNHSFSSGYVEMEFEFDRLRAFQAMQVHCNNMHTLGARLPGGVECRFRRGPAMAWEGEPMRHNLGGNLGDPRARAVSVPLGGRVARFLQCRFLFAGPWLLFSEISFISDVVNNSSPALGGTFPPAPWWPPGPPPTNFSSLELEPRGQQPVAKAEGSPTAILIGCLVAIILLLLLIIALMLWRLHWRRLLSKVLESHPRTRSPGLVGIRPTPLPVSPMALRCCSPIQPTASFWPLTPVPLEARAPPHPPGPNPPTPRGVTGGNTYAVPALPPGAVGDGPPRVDFPRSRLRFKEKLGEGQFGEVHLCEVDSPQDLVSLDFPLNVRKGHPLLVAVKILRPDATKNARNDFLKEVKIMSRLKDPNIIRLLGVCVQDDPLCMITDYMENGDLNQFLSAHQLEDKAAEGAPGDGQAAQGPTISYPMLLHVAAQIASGMRYLATLN

SEQ ID NO: 4067 - protein, 172 aa, Homo Sapiens
  misc_feature (1)..(1): Xaa can be any naturally occurring amino acid
XNNRPGPREPPPYQEPRPRGNPPHSAPCVPNGSAYSGDYMEPEKPGAPLLPPPPQNSVPHYAEADIVTLQGVTGGNTYAVPALPPGAVGDGPPRVDFPRSRLRFKEKLGEGQFGEVHLCEVDSPQDLVSLDFPLNVRKGHPLLVAVKILRPDATKNASFSLFSRNDFLKEVK

SEQ ID NO: 4068 - protein, 277 aa, Homo Sapiens
  misc_feature (1)..(1): Xaa can be any naturally occurring amino acid
XRKGHPLLVAVKILRPDATKNARNDFLKEVKIMSRLKDPNIIRLLGVCVQDDPLCMITDYMENGDLNQFLSAHQLEDKAAEGAPGDGQAAQGPTISYPMLLHVAAQIASGMRYLATLNFVHRDLATRNCLVGENFTIKIADFGMSRNLYAGDYYRVQGRAVLPIRWMAWECILMGKFTTASDVWAFGVTLWEVLMLCRAQPFGQLTDEQVIENAGEFFRDQGRQVRVEEREDGSEAGDRRGRVVILETKEYLFPDSHPHCHNAGVPVPAACLPAGPI

SEQ ID NO: 4069 - protein, 196 aa, Homo Sapiens
  misc_feature (1)..(1): Xaa can be any naturally occurring amino acid
XSLLLLLLVASGDADMKGHFDPAKCRYALGMQDRTIPDSDISASSSWLESSDGDGAWCPAGSVFPKEEEYLQVDLQRLHLVALVGTQGRHAGGLGKEFSRSYRLRYSRDGRRWMGWKDRWGQEVISGNEDPEGVVLKDLGPPMVARLVRFYPRADRVMSVCLRVELYGCLWRDGLLSYTAPVGQTMYLSEAVYLND

SEQ ID NO: 4070 - protein, 166 aa, Homo Sapiens
LKVDDSNTRILIGCLVAIIFILLAIIVIILWRQFWQKMLEKASRRMLDDEMTVSLSLPSDSSMFNNNRSSSPSEQGSNSTYDRIFPLRPDYQEPSRLIRKLPEFAPGEEESGEDDVVGRVSREKPQQASGRYDTPAPSSLHLFLVSANLLRSPHSLSRFGLPLLLA

SEQ ID NO: 4071 - protein, 130 aa, Homo Sapiens
MILIPRMLLVLFLLLPILSSAKAQVNPAICRYPLGMSGGQIPDEDITASSQWSESTAAKYGRLDSEEGDGAWCPEIPVEPDDLKEFLQIDLHTLHFITLVGTQGRHAGGHGIEFAPMYKINYSRDGTRWI

SEQ ID NO: 4072 - protein, 148 aa, Homo Sapiens
MILIPRMLLVLFLLLPILSSAKAQVNPAICRYPLGMSGGQIPDEDITASSQWSESTAAKYGRLDSEEGDGAWCPEIPVEPDDLKEFLQIDLHTLHFITLVGTQGRHAGGHGIEFAPMYKINYSRDGTRWISWRNRHGKQVLDGNSNPY

SEQ ID NO: 4073 - protein, 855 aa, Homo Sapiens
MILIPRMLLVLFLLLPILSSAKAQVNPAICRYPLGMSGGQIPDEDITASSQWSESTAAKYGRLDSEEGDGAWCPEIPVEPDDLKEFLQIDLHTLHFITLVGTQGRHAGGHGIEFAPMYKINYSRDGTRWISWRNRHGKQVLDGNSNPYDIFLKDLEPPIVARFVRFIPVTDHSMNVCMRVELYGCVWLDGLVSYNAPAGQQFVLPGGSIIYLNDSVYDGAVGYSMTEGLGQLTDGVSGLDDFTQTHEYHVWPGYDYVGWRNESATNGYIEIMFEFDRIRNFTTMKVHCNNMFAKGVKIFKEVQCYFRSEASEWEPNAISFPLVLDDVNPSARFVTVPLHHRMASAIKCQYHFADTWMMFSEITFQSDAAMYNNSEALPTSPMAPTTYDPMLKVDDSNTRILIGCLVAIIFILLAIIVIILWRQFWQKMLEKASRRMLDDEMTVSLSLPSDSSMFNNNRSSSPSEQGSNSTYDRIFPLRPDYQEPSRLIRKLPEFAPGEEESGCSGVVKPVQPSGPEGVPHYAEADIVNLQGVTGGNTYSVPAVTMDLLSGKDVAVEEFPRKLLTFKEKLGEGQFGEVHLCEVEGMEKFKDKDFALDVSANQPVLVAVKMLRADANKNARNDFLKEIKIMSRLKDPNIIHLLAVCITDDPLCMITEYMENGDLNQFLSRHEPPNSSSSDVRTVSYTNLKFMATQIASGMKYLSSLNFVHRDLATRNCLVGKNYTIKIADFGMSRNLYSGDYYRIQGRAVLPIRWMSWESILLGKFTTASDVWAFGVTLWETFTFCQEQPYSQLSDEQVIENTGEFFRDQGRQTYLPQPAICPDSVYKLMLSCWRRDTKNRPSFQEIHLLLLQQGDE

SEQ ID NO: 4074 - protein, 855 aa, Homo Sapiens; identical to SEQ ID NO: 4073

SEQ ID NO: 4075 - protein, 171 aa, Homo Sapiens
  misc_feature (1)..(1): Xaa can be any naturally occurring amino acid
XIFILLAIIVIILWRQFWQKMLEKASRRMLDDEMTVSLSLPSDSSMFNNNRSSSPSEQGSNSTYDRIFPLRPDYQEPSRLIRKLPEFAPGEEESGCSGVVKPVQPSGPEGVPHYAEADIVNLQGVTGGNTYSVPAVTMDLLSGKDVAVEEFPRKLLTFKEKLGEGQFGEVS

SEQ ID NO: 4076 - protein, 166 aa, Homo Sapiens
MPFLELDTNLPANRVPAGLEKRLCAAAASILGKPADRVNVTVRPGLAMALSGSTEPCAQLSISSIGVVGTAEDNRSHSAHFFEFLTKELALGQDRFQVKFTGDSQSSERPLAWMSRHLLSGSCIAGGPQTNLEMNHLQLATSSSVNTGEKTSLPHKKRLQPKPGVL

SEQ ID NO: 4077 - protein, 118 aa, Homo Sapiens
MPFLELDTNLPANRVPAGLEKRLCAAAASILGKPADRVNVTVRPGLAMALSGSTEPCAQLSISSIGVVGTAEDNRSHSAHFFEFLTKELALGQDRILIRFFPLESWQIGKIGTVMTFL

SEQ ID NO: 4078 - protein, 118 aa, Homo Sapiens; identical to SEQ ID NO: 4077

SEQ ID NO: 4079 - protein, 107 aa, Homo Sapiens
MPFLELDTNLPANRVPAGLEKRLCAAAASILGKPADRVNVTVRPGLAMALSGSTEPCAQLSISSIGVVGTAEDNRSHSAHFFEFLTKELALGQDRQVPGEVHGRLTE

SEQ ID NO: 4080 - protein, 132 aa, Homo Sapiens
MQLFLLAVSVPLPAMPFLELDTNLPANRVPAGLEKRLCAAAASILGKPADRVNVTVRPGLAMALSGSTEPCAQLSISSIGVVGTAEDNRSHSAHFFEFLTKELALGQDRILIRFFPLESWQIGKIGTVMTFL

SEQ ID NO: 4081 - protein, 50 aa, Homo Sapiens
  misc_feature (1)..(1): Xaa can be any naturally occurring amino acid
XKDLPPPQEASATQTWRSVTELKFPLGILIRFFPLESWQIGKIGTVMTFL

SEQ ID NO: 4082 - protein, 729 aa, Homo Sapiens
LPTGFVAPILCVLLPSPTREAATVASATGDSASERESAAPAAAPTAEAPPPSVVTRPEPQALPSPAIRAPLPDLYPFGTMRGGGFGDRDRDRDRGGFGARGGGGLPPKKFGNPGERLRKKKWDLSELPKFEKNFYVEHPEVARLTPYEVDELRRKKEITVRGGDVCPKPVFAFHHANFPQYVMDVLMDQHFTEPTPIQCQGFPLALSGRDMVGIAQTGSGKTLAYLLPAIVHINHQPYLERGDGPICLVLAPTRELAQQVQQVADDYGKCSRLKSTCIYGGAPKGPQIRDLERGVEICIATPGRLIDFLESGKTNLRRCTYLVLDEADRMLDMGFEPQIRKIVDQIRPDRQTLMWSATWPKEVRQLAEDFLRDYTQINVGNLELSANHNILQIVDVCMESEKDHKLIQLMEEIMAEKENKTIIFVETKRRCDDLTRRMRRDGWPAMCIHGDKSQPERDWVLNEFRSGKAPILIATDVASRGLDVEDVKFVINYDYPNSSEDYVHRIGRTARSTNKGTAYTFFTPGNLKQARELIKVLEEANQAINPKLMQLVDHRGGGGGGGGRSRYRTTSSANNPNLMYQDECDRRLRGVKDGGRRDSASYRDRSETDRAGYANGSGYGSPNSAFGAQAGQYTYGQGTYGAAAYGTSSYTAQEYGAGTYGASSTTSTGRSSQSSSQQFSGIGRSGQQPQPLMSQQFAQPPGATNMIGYMGQTAYQYPPPPPPPPPSRK

SEQ ID NO: 4083 - protein, 731 aa, Homo Sapiens
LPTGFVAPILCVLLPSPTREAATVASATGDSASERESAAPAAAPTAEAPPPSVVTRPEPQALPSPAIRAPLPDLYPFGTMRGGGFGDRDRDRDRGGFGARGGGGLPPKKFGNPGERLRKKKWDLSELPKFEKNFYVEHPEVARLTPYEVDELRRKKEITVRGGDVCPKPVFAFHHANFPQYVMDVLMDQHFTEPTPIQCQGFPLALSGRDMVGIAQTGSGKTLAYLLPAIVHINHQPYLERGDGPICLVLAPTRELAQQVQQVADDYGKCSRLKSTCIYGGAPKGPQIRDLERGVEICIATPGRLIDFLESGKTNLRRCTYLVLDEADRMLDMGFEPQIRKIVDQIRPDRQTLMWSATWPKEVRQLAEDFLRDYTQINVGNLELSANHNILQIVDVCMESEKDHKLIQLMEEIMAEKENKTIIFVETKRRCDDLTRRMRRDGWPAMCIHGDKSQPERDWVLNEFRSGKAPILIATDVASRGLDVEDVKFVINYDYPNSSEDYVHRIGRTARSTNKGTAYTFFTPGNLKQARELIKVLEEANQAINPKLMQLVDHRGGGGGGGKGGRSRYRTTSSANNPNLMYQDECDRRLRGVKDGGRRDSASYRDRSETDRAGYANGSGYGSPNSAFGAQAGQYTYGQGTYGAAAYGTSSYTAQEYGAGTYGASSTTSTGRSSQSSSQQFSGIGRSGQQPQPLMSQQFAQPPGATNMIGYMGQTAYQYPPPPPPPPPSRK

SEQ ID NO: 4084 - protein, 729 aa, Homo Sapiens; identical to SEQ ID NO: 4082

SEQ ID NO: 4085 - protein, 731 aa, Homo Sapiens; identical to SEQ ID NO: 4083

SEQ ID NO: 4086 - protein, 56 aa, Homo Sapiens
  misc_feature (1)..(1): Xaa can be any naturally occurring amino acid
XWPAMCIHGDKSQPERDWVLNEFRSGKAPILIATDVASRGLGSPALGNQMGLQRSI

SEQ ID NO: 4087 - protein, 138 aa, Homo Sapiens
MAAAFEASGALAAVATAMPAEHVAVQVPAPEPTPGPVRILRTAQDLSSPRTRTGDVLLAEPADFESLLLSRPVLEGLRAAGFERPSPVQLKAIPLGRCGLDLIVQAKSGTGKTCVFSTIALDSLVLENLSTQAELSNS

SEQ ID NO: 4088 - protein, 824 aa, Homo Sapiens
MAAAFEASGALAAVATAMPAEHVAVQVPAPEPTPGPVRILRTAQDLSSPRTRTGDVLLAEPADFESLLLSRPVLEGLRAAGFERPSPVQLKAIPLGRCGLDLIVQAKSGTGKTCVFSTIALDSLVLENLSTQILILAPTREIAVQIHSVITAIGIKMEGLECHVFIGGTPLSQDKTRLKKCHIAVGSPGRIKQLIELDYLNPGSIRLFILDEADKLLEEGSFQEQINWIYSSLPASKQMLAVSATYPEFLANALTKYMRDPTFVRLNSSDPSLIGLKQYYKVVNSYPLAHKVFEEKTQHLQELFSRIPFNQALVFSNLHSRAQHLADILSSKGFPAECISGNMNQNQRLDAMAKLKHFHCRVLISTDLTSRGIDAEKVNLVVNLDVPLDWETYMHRIGRAGRFGTLGLTVTYCCRGEEENMMMRIAQKCNINLLPLPDPIPSGLMEECVDWDVEVKAAVHTYGIASVPNQPLKKQIQKIERTLQIQKAHGDHMASSRNNSVSGLSVKSKNNTKQKLPVKSHSECGIIEKATSPKELGCDRQSEEQMKNSVQTPVENSTNSQHQVKEALPVSLPQIPCLSSFKIHQPYTLTFAELVEDYEHYIKEGLEKPVEIIRHYTGPGDQTVNPQNGFVRNKVIEQRVPVLASSSQSGDSESDSDSYSSRTSSQSKGNKSYLEGSSDNQLKDSESTPVDDRISLEQPPNGSDTPNPEKYQESPGIQMKTRLKEGASQRAKQSRRNLPRRSSFRLQTEAQEDDWYDCHREIRLSFSDTYQDYEEYWRAYYRAWQEYYAAASHSYYWNAQRHPSWMAAYHMNTIYLQEMMHSNQ

SEQ ID NO: 4089 - protein, 432 aa, Homo Sapiens [sequence omitted]

SEQ ID NO: 4090 - protein, 191 aa, Homo Sapiens
ASVRSGASDAGGEMREGFGRGPQRETPSPPPREFSNLSQPRKNLWGIKSTAVRNIDGSINNINEDDEEDVVDLAANSLLNKLIHQSLVESSHRVEVLQKDPSSPLYSVKTFEELRLKEELLKGIYAMGFNRPSKIQEMALPMMLAHPPQNLIAQSQSGTGKTAAFVLAMLSRVNALELFPQCLCLAPTYEL

SEQ ID NO: 4091 - protein, 468 aa, Homo Sapiens
IAAMASLLWGGDAGAAESERLNSHFSNLSQPRKNLWGIKSTAVRNIDGSINNINEDDEEDVVDLAANSLLNKLIHQSLVESSHRVEVLQKDPSSPLYSVKTFEELRLKEELLKGIYAMGFNRPSKIQEMALPMMLAHPPQNLIAQSQSGTGKTAAFVLAMLSRVNALELFPQCLCLAPTYELALQTGRVVEQMGKFCVDVQVMYAIRGNRIPRGTDITKQIIIGTPGTVLDWCFKLKLIDLTKIRVFVLDEADVMIDTQGFSDHSIRIQRALPSECQMLLFSATFEDSVWHFAERIIPDPNVIKLRKEELTLNNIRQYYVLCEHRKDKYQALCNIYGSITIGQAIIFCQTRRNAKWLTVEMIQDGHQVSLLSGELTVEQRASIIQRFRDGKEKVLITTNVCARGIDVKQVTIVVNFDLPVKQGEEPDYETYLHRIGRTGRFGKKGLAFNMIEVDELPSLMKIQDHFSK

SEQ ID NO: 4092 - protein, 483 aa, Homo Sapiens
MASLLWGGDAGAAESERLNSHFSNLSQPRKNLWGIKSTAVRNIDGSINNINEDDEEDVVDLAANSLLNKLIHQSLVESSHRVEVLQKDPSSPLYSVKTFEELRLKEELLKGIYAMGFNRPSKIQEMALPMMLAHPPQNLIAQSQSGTGKTAAFVLAMLSRVNALELFPQCLCLAPTYELALQTGRVVEQMGKFCVDVQVMYAIRGNRIPRGTDITKQIIIGTPGTVLDWCFKLKLIDLTKIRVFVLDEADVMIDTQGFSDHSIRIQRALPSECQMLLFSATFEDSVWHFAERIIPDPNVIKLRKEELTLNNIRQYYVLCEHRKDKYQALCNIYGSITIGQAIIFCQTRRNAKWLTVEMIQDGHQVSLLSGELTVEQRASIIQRFRDGKEKVLITTNVCARGIDVKQVTIVVNFDLPVKQGEEPDYETYLHRIGRTGRFGKKGLAFNMIEVDELPSLMKIQDHFNSSIKQLNAEDMDEIEKIDY

SEQ ID NO: 4093 - protein, 369 aa, Homo Sapiens
MGFNRPSKIQEMALPMMLAHPPQNLIAQSQSGTGKTAAFVLAMLSRVNALELFPQCLCLAPTYELALQTGRVVEQMGKFCVDVQVMYAIRGNRIPRGTDITKQIIIGTPGTVLDWCFKLKLIDLTKIRVFVLDEADVMIDTQGFSDHSIRIQRALPSECQMLLFSATFEDSVWHFAERIIPDPNVIKLRKEELTLNNIRQYYVLCEHRKDKYQALCNIYGSITIGQAIIFCQTRRNAKWLTVEMIQDGHQVSLLSGELTVEQRASIIQRFRDGKEKVLITTNVCARGIDVKQVTIVVNFDLPVKQGEEPDYETYLHRIGRTGRFGKKGLAFNMIEVDELPSLMKIQDHFNSSIKQLNAEDMDEIEKIDY

SEQ ID NO: 4094 - protein, 197 aa, Homo Sapiens
MGFNRPSKIQEMALPMMLAHPPQNLIAQSQSGTGKTAAFVLAMLSRVNALELFPQCLCLAPTYELALQTGRVVEQMGKFCVDVQVMYAIRGNRIPRGTDITKQIIIGTPGTVLDWCFKLKLIDLTKIRVFVLDEADVMIDTQGFSDHSIRIQRIIWLLVAKETTDNFQLPSLTLELYRDIMETPHSFLLLSQGTWRI

SEQ ID NO: 4095 - protein, 67 aa, Homo Sapiens
  misc_feature (1)..(1): Xaa can be any naturally occurring amino acid
XGIDVKQVTIVVNFDLPVKQGEEPDYETYLHRIGRTGRFGKKGLAFNMIEVDELPSLMKIQDHFRKS

SEQ ID NO: 4096 - protein, 407 aa, Homo Sapiens
  misc_feature (1)..(1): Xaa can be any naturally occurring amino acid
XLVDLAANSLLNKLIHQSLVESSHRVEVLQKDPSSPLYSVKTFEELRLKEELLKGIYAMGFNRPSKIQEMALPMMLAHPPQNLIAQSQSGTGKTAAFVLAMLSRVNALELFPQCLCLAPTYELALQTGRVVEQMGKFCVDVQVMYAIRGNRNWCFKLKLIDLTKIRVFVLDEADVMIDTQGFSDHSIRIQRALPSECQMLLFSATFEDSVWHFAERIIPDPNVIKLRKEELTLNNIRQYYVLCEHRKDKYQALCNIYGSITIGQAIIFCQTRRNAKWLTVEMIQDGHQVSLLSGELTVEQRASIIQRFRDGKEKVLITTNVCARGIDVKQVTIVVNFDLPVKQGEEPDYETYLHRIGRTGRFGKKGLAFNMIEVDELPSLMKIQDHFNSSIKQLNAEDMDEIEKIDY

SEQ ID NO: 4097 - protein, 540 aa, Homo Sapiens
MALTRPVRLFSLVTRLLLAPRRGLTVRSPDEPLPVVRIPVALQRQLEQRQSRRRNLPRPVLVRPGPLLVSARRPELNQPARLTLGRWERAPLASQGWKSRRARRDHFSIERAQQEAPAVRKLSSKGSFADLGLEPRVLHALQEAAPEVVQPTTVQSSTIPSLLRGRHVVCAAETGSGKTLSYLLPLLQRLLGQPSLDSLPIPAPRGLVLVPSRELAQQVRAVAQPLGRSLGLLVRDLEGGHGMRRIRLQLSRQPSADVLVATPGALWKALKSRLISLEQLSFLVLDEADTLLDESFLELVDYILEKSHIAEGPADLEDPFNPKAQLVLVGATFPEGVGQLLNKVASPDAVTTITSSKLHCIMPHVKQTFLRLKGADKVAELVHILKHRDRAERTGPSGTVLVFCNSSSTVNWLGYILDDHKIQHLRLQGQMPALMRVGIFQSFQKSSRDILLCTDIASRGLDSTGVELVVNYDFPPTLQDYIHRAGRVGRVGSEVPGTVISFVTHPWDVSLVQKIELAARRRRSLPGLASSVKEPLPQAT

SEQ ID NO: 4098 - protein, 565 aa, Homo Sapiens
MEDSDSAAKQLGLAEAAAVAAAAAVAAAAAAAAGGEAEEPVLSRDEDSEEDADSEAERETPRVTAVAVMAAEPGHMDMGAEALPGPDEAAAAAAFAEVTTVTVANVGAAADNVFTTSVANAASISGHVLSGRTALQIGDSLNTEKATLIVVHTDGSIVETTGLKGPAAPLTPGPQSPPTPLAPGQEKGGTKYNWDPSVYDSELPVRCRNISGTLYKNRLGSGGRGRCIKQGENWYSPTEFEAMAGRASSKDWKRSIRYAGRPLQCLIQDGILNPHAASCTCAACCDDMTLSGPVRLFVPYKRRKKENELPTTPVKKDSPKNITLLPATAATTFTVTPSGQITTSGALTFDRASTVEATAVISESPAQGDVFAGATVQEASVQPPCRASHPEPHYPGYQDSCQIAPFPEAALPTSHPKIVLTSLPALAVPPPTPTKAAPPALVNGLELSEPRSWLYLEEMVNSLLNTAQQLKTLFEQAKHASTYREAATNQAKIHADAERKEQSCVNCGREAMSECTGCHKVNYCSTFCQRKDWKDHQHICGQSAAVTVQADEVHVAESVMEKVTV

SEQ ID NO: 4099 - protein, 349 aa, Homo Sapiens
  misc_feature (1)..(1): Xaa can be any naturally occurring amino acid
XLYKNRLGSGGRGRCIKQGENWYSPTEFEAMAGRASSKDWKRSIRYAGRPLQCLIQDGILNPHAASCTCAACCDDMTLSGPVRLFVPYKRRKKENELPTTPVKKDSPKNITLLPATAATTFTVTPSGQITTSGALTFDRASTVEATAVISESPAQGDVFAGATVQEASVQPPCRASHPEPHYPGYQDSCQIAPFPEAALPTSHPKIVLTSLPALAVPPPTPTKAAPPALVNGLELSEPRSWLYLEEMVNSLLNTAQQLKTLFEQAKHASTYREAATNQAKIHADAERKEQSCVNCGREAMSECTGCHKVNYCSTFCQRKRWSLTMLTSLVSISWLRAILPCQPPKVLGL

SEQ ID NO: 4100 - protein, 86 aa, Homo Sapiens
  misc_feature (1)..(1): Xaa can be any naturally occurring amino acid
XPVLSRDEDSEEDADSEAERETPRVTAVAVMAAEPGHMDMGAEALPGPDEAAAAAAFAGKCARRPLASSGSRAPTPRACPAQLSQR

SEQ ID NO: 4101 - protein, 136 aa, Homo Sapiens
MAILSLRAPGPWQAMQAHLNPFNKQSGPRQHEQGPGEEVPDVTPEEALPELPPGEPEFRCPERVMDLGLSEDHFSRPVGLFLASDVQQLRQAIEECKQVILELPEQSEKQKDAVVRLIHLRLKLQELKDPNEDEPN

SEQ ID NO: 4102 - protein, 512 aa, Homo Sapiens
MAILSLRAPGPWQAMQVWADRTLLTPHTGVTSQVLGVAAAVMTPLPGGHAAGRTREARWDAMEYDEKLARFRQAHLNPFNKQSGPRQHEQGPGEEVPDVTPEEALPELPPGEPEFRCPERVMDLGLSEDHFSRPVGLFLASDVQQLRQAIEECKQVILELPEQSEKQKDAVVRLIHLRLKLQELKDPNEDEPNIRVLLEHRFYKEKSKSVKQTCDKCNTIIWGLIQTWYTCTGCYYRCHSKCLNLISKPCVSSKVSHQAEYELNICPETGLDSQDYRCAECRAPISLRGVPSEARQCDYTGQYYCSHCHWNDLAVIPARVVHNWDFEPRKVSRCSMRYLALMVSRPVLRLREINPLLFSYVEELVEIRKLRQDILLMKPYFITCREAMEARLLLQLQDRQHFVENDEMYSVQDLLDVHAGRLGCSLTEIHTLFAKHIKLDCERCQAKGFVCELCREGDVLFPFDSHTSVCADCSAVFHRDCYYDNSTTCPKCARLSLRKQSLFQEPGPDVEA

SEQ ID NO: 4103 - protein, 125 aa, Homo Sapiens
MDLGLSEDHFSRPVGLFLASDVQQLRQAIEECKQVILELPEQSEKQKDAVVRLIHLRLKLQELKDPNEDEPNIRVLLEHRFYKEKSKSVKQTCDKCNTIIWGLIQTWYTCTGCYYRCHSKCLNLI

SEQ ID NO: 4104 - protein, 391 aa, Homo Sapiens
MDLGLSEDHFSRPVGLFLASDVQQLRQAIEECKQVILELPEQSEKQKDAVVRLIHLRLKLQELKDPNEDEPNIRVLLEHRFYKEKSKSVKQTCDKCNTIIWGLIQTWYTCTGCYYRCHSKCLNLISKPCVSSKVSHQAEYELNICPETGLDSQDYRCAECRAPISLRGVPSEARQCDYTGQYYCSHCHWNDLAVIPARVVHNWDFEPRKVSRCSMRYLALMVSRPVLRLREINPLLFSYVEELVEIRKLRQDILLMKPYFITCREAMEARLLLQLQDRQHFVENDEMYSVQDLLDVHAGRLGCSLTEIHTLFAKHIKLDCERCQAKGFVCELCREGDVLFPFDSHTSVCADCSAVFHRDCYYDNSTTCPKCARLSLRKQSLFQEPGPDVEA

SEQ ID NO: 4105 - protein, 66 aa, Homo Sapiens
MEYDEKLARFRQAHLNPFNKQSGPRQHEQGPGEEVPDVTPEEALPELPPGEPEFRCPERVMDLGLS

SEQ ID NO: 4106 - protein, 107 aa, Homo Sapiens
MEYDEKLARFRQAHLNPFNKQSGPRQHEQGPGEEVPDVTPEEALPELPPGEPEFRCPERVMDLGLSEDHFSRPVDGPLTAPAPNLGRVCSWPLTSSSCGRRSRSASR

SEQ ID NO: 4107 - protein, 106 aa, Homo Sapiens
MEYDEKLARFRQAHLNPFNKQSGPRQHEQGPGEEVPDVTPEEALPELPPGEPEFRCPERVMDLGLSEDHFSRPVGLFLASDVQQLRQAIEECKQVILELPEQSEKQ

SEQ ID NO: 4108 - protein, 134 aa, Homo Sapiens
MEYDEKLARFRQAHLNPFNKQSGPRQHEQGPGEEVPDVTPEEALPELPPGEPEFRCPERVMDLGLSEDHFSRPVGLFLASDVQQLRQAIEECKQVILELPEQSEKQKDAVVRLIHLRLKLQELKDPNEDEPNIR

SEQ ID NO: 4109 - protein, 150 aa, Homo Sapiens
MEYDEKLARFRQAHLNPFNKQSGPRQHEQGPGEEVPDVTPEEALPELPPGEPEFRCPERVMDLGLSEDHFSRPVGLFLASDVQQLRQAIEECKQVILELPEQSEKQKDAVVRLIHLRLKLQELKDPNEDEPNIRVLLEHRFYKEKSKSVK

SEQ ID NO: 4110 - protein, 451 aa, Homo Sapiens
MEYDEKLARFRQAHLNPFNKQSGPRQHEQGPGEEVPDVTPEEALPELPPGEPEFRCPERVMDLGLSEDHFSRPVGLFLASDVQQLRQAIEECKQVILELPEQSEKQKDAVVRLIHLRLKLQELKDPNEDEPNIRVLLEHRFYKEKSKSVKQTCDKCNTIIWGLIQTWYTCTGCYYRCHSKCLNLISKPCVSSKVSHQAEYELNICPETGLDSQDYRCAECRAPISLRGVPSEARQCDYTGQYYCSHCHWNDLAVIPARVVHNWDFEPRKVSRCSMRYLALMVSRPVLRLREINPLLFSYVEELVEIRKLRQDILLMKPYFITCREAMEARLLLQLQDRQHFVENDEMYSVQDLLDVHAGRLGCSLTEIHTLFAKHIKLDCERCQAKGFVCELCREGDVLFPFDSHTSVCADCSAVFHRDCYYDNSTTCPKCARLSLRKQSLFQEPGPDVEA

SEQ ID NO: 4111 - protein, 451 aa, Homo Sapiens; identical to SEQ ID NO: 4110

SEQ ID NO: 4112 - protein, 434 aa, Homo Sapiens
MEYDEKLARFRQAHLNPFNKQSGPRQHEQGPGEEVPDVTPEEALPELPPGEPEFRCPERVMDLGLSEDHFSRPVGLFLASDVQQLRQAIEECKQVILELPEQSEKQKDAVVRLIHLRLKLQELKDPNEDEPNIRVLLEHRFYKEKSKSVKQTCDKCNTIIWGLIQTWYTCTGCYYRCHSKCLNLISKPCVSSKVSHQAEYELNICPETGLDSQDYRCAECRAPISLRGVPSEARQCDYTGQYYCSHCHWNDLAVIPARVVHNWDFEPRKVSRCSMRYLALMVSRPVLRLREINPLLFSYVEELVEIRKLRQDILLMKPYFITCREAMEARLLLQDLLDVHAGRLGCSLTEIHTLFAKHIKLDCERCQAKGFVCELCREGDVLFPFDSHTSVCADCSAVFHRDCYYDNSTTCPKCARLSLRKQSLFQEPGPDVEA

SEQ ID NO: 4113 - protein, 451 aa, Homo Sapiens; identical to SEQ ID NO: 4110

SEQ ID NO: 4114 - protein, 197 aa, Homo Sapiens
MEYDEKLARFRQAHLNPFNKQSGPRQHEQGPGEEVPDVTPEEALPELPPGEPEFRCPERVMDLGLSEDHFSRPVGLFLASDVQQLRQAIEECKQVILELPEQSEKQKDAVVRLIHLRLKLQELKDPNEDEPNIRVLLEHRFYKEKSKSVKQTCDKCNTIIWGLIQTWYTCTGGPRPRRGVRNERDQSSCLRWAHIQM

SEQ ID NO: 4115 - protein, 197 aa, Homo Sapiens; identical to SEQ ID NO: 4114

SEQ ID NO: 4116 - protein, 176 aa, Homo Sapiens
MEYDEKLARFRQAHLNPFNKQSGPRQHEQGPGEEVPDVTPEEALPELPPGEPEFRCPERVMDLGLSEDHFSRPVGLFLASDVQQLRQAIEECKQVILELPEQSEKQKDAVVRLIHLRLKLQELKRCQAKGFVCELCREGDVLFPFDSHTSVCADCSAVFHRDCYYDNSTTCPKCAR

SEQ ID NO: 4117 - protein, 441 aa, Homo Sapiens
MEYDEKLARFRQAHLNPFNKQSGPRQHEQGPGEEVPDVTPEEALPELPPGEPEFRCPERVMDLGLSEDHFSRPVLRQAIEECKQVILELPEQSEKQKDAVVRLIHLRLKLQELKDPNEDEPNIRVLLEHRFYKEKSKSVKQTCDKCNTIIWGLIQTWYTCTGCYYRCHSKCLNLISKPCVSSKVSHQAEYELNICPETGLDSQDYRCAECRAPISLRGVPSEARQCDYTGQYYCSHCHWNDLAVIPARVVHNWDFEPRKVSRCSMRYLALMVSRPVLRLREINPLLFSYVEELVEIRKLRQDILLMKPYFITCREAMEARLLLQLQDRQHFVENDEMYSVQDLLDVHAGRLGCSLTEIHTLFAKHIKLDCERCQAKGFVCELCREGDVLFPFDSHTSVCADCSAVFHRDCYYDNSTTCPKCARLSLRKQSLFQEPGPDVEA

SEQ ID NO: 4118 - protein, 127 aa, Homo Sapiens
MEYDEKLARFRQAHLNPFNKQSGPRQHEQGPGEEVPDVTPEEALPELPPGEPEFRCPERVMDLGLSEDHFSRPVQLRQAIEECKQVILELPEQSEKQKDAVVRLIHLRLKLQELKDPNEDEPNIRVL

SEQ ID NO: 4119 - protein, 177 aa, Homo Sapiens
MRGGGQAHLNPFNKQSGPRQHEQGPGEEVPDVTPEEALPELPPGEPEFRCPERVMDLGLSEDHFSRPVGLFLASDVQQLRQAIEECKQVILELPEQSEKQKDAVVRLIHLRLKLQELKDPNEDEPNIRVLLEHRFYKEKSKSVKQTCDKCNTIIWGLIQTWYTCTGCYYRCHSKCLN

SEQ ID NO: 4120 - protein, 186 aa, Homo Sapiens
MRGGGQVLGVAAAVMTPLPGGHAAGRTREARWDAMEYDEKLARFRQAHLNPFNKQSGPRQHEQGPGEEVPDVTPEEALPELPPGEPEFRCPERVMDLGLSEDHFSRPVGLFLASDVQQLRQAIEECKQVILELPEQSEKQKDAVVRLIHLRLKLQELKDPNEDEPNIRVLLEHRFYKEKSKSVKQT

SEQ ID NO: 4121 - protein, 94 aa, Homo Sapiens
MRTLAILAAILLVALQAQAEPLQARADEVAAAPEQIAADIPEVVVSLAWDESLAPKHPGSRKNMACYCRIPACIAGERRYGTCIYQGRLWAFCC

SEQ ID NO: 4122 - protein, 94 aa, Homo Sapiens; identical to SEQ ID NO: 4121

SEQ ID NO: 4123 - protein, 94 aa, Homo Sapiens; identical to SEQ ID NO: 4121

SEQ ID NO: 4124 - protein, 94 aa, Homo Sapiens
MRTLAILAAILLVALQAQAEPLQARADEVAAAPEQIAADIPEVVVSLAWDESLAPKHPGSRKNMDCYCRIPACIAGERRYGTCIYQGRLWAFCC

SEQ ID NO: 4125 - protein, 97 aa, Homo Sapiens
MRIIALLAAILLVALQVRAGPLQARGDEAPGQEQRGPEDQDISISFAWDKSSALQVSGSTRGMVCSCRLVFCRRTELRVGNCLIGGVSFTYCCTRVD

SEQ ID NO: 4126 - protein, 94 aa, Homo Sapiens
MRTIAILAAILLVALQAQAESLQERADEATTQKQSGEDNQDLAISFAGNGLSALRTSGSQARATCYCRTGRCATRESLSGVCEISGRLYRLCCR

SEQ ID NO: 4127 - protein, 100 aa, Homo Sapiens
MRTLTILTAVLLVALQAKAEPLQAEDDPLQAKAYEADAQEQRGANDQDFAVSFAEDASSSLRALGSTRAFTCHCRRSCYSTEYSYGTCTVMGINHRFCCL

SEQ ID NO: 4128 - protein, 68 aa, Homo Sapiens
MRTSYLLLFTLCLLLSEMASGGNFLTGLGHRSDHYNCVSSGGQCLYSACPIFTKIQGTCYRGKAKCCK

SEQ ID NO: 4129 - protein, 67 aa, Homo Sapiens
MRIHYLLFALLFLFLVPVPGHGGIINTLQKYYCRVRGGRCAVLSCLPKEEQIGKCSTRGRKCCRRKK

SEQ ID NO: 4130 - protein, 67 aa, Homo Sapiens; identical to SEQ ID NO: 4129

SEQ ID NO: 4131 - protein, 72 aa, Homo Sapiens
MQRLVLLLAISLLLYQDLPVRSEFELDRICGYGTARCRKKCRSQEYRIGRCPNTYACCLRKWDESLLNRTKP

SEQ ID NO: 4132 - protein, 72 aa, Homo Sapiens; identical to SEQ ID NO: 4131

SEQ ID NO: 4133 - protein, 78 aa, Homo Sapiens
MALIRKTFYFLFAMFFILVQLPSGCQAGLDFSQPFPSGEFAVCESCKLGRGKCRKECLENEKPDGNCRLNFLCCRQRI

SEQ ID NO: 4134 - protein, 78 aa, Homo Sapiens; identical to SEQ ID NO: 4133

SEQ ID NO: 4135 - protein, 65 aa, Homo Sapiens
MRTFLFLFAVLFFLTPAKNAFFDEKCNKLKGTCKNNCGKNEELIALCQKSLKCCRTIQPCGSIID

SEQ ID NO: 4136 - protein, 65 aa, Homo Sapiens; identical to SEQ ID NO: 4135

SEQ ID NO: 4137 - protein, 70 aa, Homo Sapiens
MPGAMKIFVFILAALILLAQIFQARTAIHRALISKRMEGHCEAECLTFEVKIGGCRAELAPFCCKNRKKH

SEQ ID NO: 4138 - protein, 70 aa, Homo Sapiens; identical to SEQ ID NO: 4137

SEQ ID NO: 4139 - protein, 73 aa, Homo Sapiens
MRIAVLLFAIFFFMSQVLPARGKFKEICERPNGSCRDFCLETEIHVGRCLNSQPCCLPLGHQPRIESTTPKKD

SEQ ID NO: 4140 - protein, 67 aa, Homo Sapiens
MKIQLFFFILHFWVTILPAKKKYPEYGSLDLRRECRIGNGQCKNQCHENEIRIAYCIRPGTHCCLQQ

SEQ ID NO: 4141 - protein, 62 aa, Homo Sapiens
MKIQLFFFILHFWVTILPARSNFEPKYRFERCEKVRGICKTFCDDVEYDYGYCIKWRSQCCV

SEQ ID NO: 4142 - protein, 82 aa, Homo Sapiens
MKILCIFLTFVFTVSCGPSVPQKKTREVAERKRECQLVRGACKPECNSWEYVYYYCNVNPCCAVWEYQKPIINKITSKLHQK

SEQ ID NO: 4143 - protein, 69 aa, Homo Sapiens
MRIFYYLHFLCYVTFILPATCTLVNADRCTKRYGRCKRDCLESEKQIDICSLPRKICCTEKLYEEDDMF

SEQ ID NO: 4144 - protein, 88 aa, Homo Sapiens
MLPDHFSPLSGDIKLSVLALVVLVVLAQTAPDGWIRRCYYGTGRCRKSCKEIERKKEKCGEKHICCVPKEKDKLSHIHDQKETSELYI

SEQ ID NO: 4145 - protein, 102 aa, Homo Sapiens
MSVMKPCLMTIAILMILAQKTPGGLFRSHNGKSREPWNPCELYQGMCRNACREYEIQYLTCPNDQKCCLKLSVKITSSKNVKEDYDSNSNLSVTNSSSYSHI

SEQ ID NO: 4146 - protein, 123 aa, Homo Sapiens
MKLLLLALPMLVLLPQVIPAYSGEKKCWNRSGHCRKQCKDGEAVKDTCKNLRACCIPSNEDHRRVPATSPTPLSDSTPGIIDDILTVRFTTDYFEVSSKKDMVEESEAGRGTETSLPNVHHSS

SEQ ID NO: 4147 - protein, 43 aa, Homo Sapiens
MKLLYLFLAILLAIEEPVISALVRTVGCCLDTARQTPHPSMHG

SEQ ID NO: 4148 - protein, 84 aa, Homo Sapiens
MKLLYLFLAILLAIEEPVISGKRHILRCMGNSGICRASCKKNEQPYLYCRNCQSCCLQSYMRISISGKEENTDWSYEKQWPRLP

SEQ ID NO: 4149 - protein, 88 aa, Homo Sapiens
MKLLYLFLAILLAIEEPVISVECWMDGHCRLLCKDGEDSIIRCRNRKRCCVPSRYLTIQPVTIHGILGWTTPQMSTTAPKMKTNITNR

SEQ ID NO: 4150 - protein, 76 aa, Homo Sapiens
MKLLLLLLTVTLLLAQVTPVMKCWGKSGRCRTTCKESEVYYILCKTEAKCCVDPKYVPVKPKLTDTNTSLESTSAV

SEQ ID NO: 4151 - protein, 67 aa, Homo Sapiens
MKLLLLTLTVLLLLSQLTPGGTQRCWNLYGKCRYRCSKKERVYVYCINNKMCCVKPKYQPKERWWPF

SEQ ID NO: 4152 - protein, 71 aa, Homo Sapiens
MTQLLLFLVALLVLGHVPSGRSEFKRCWKGQGACQTYCTRQETYMHLCPDASLCCLSYALKPPPVPKHEYE

SEQ ID NO: 4153 - protein, 156 aa, Homo Sapiens
MNILMLTFIICGLLTRVTKGSFEPQKCWKNNVGHCRRRCLDTERYILLCRNKLSCCISIISHEYTRRPAFPVIHLEDITLDYSDVDSFTGSPVSMLNDLITFDTTKFGETMTPETNTPETTMPPSEATTPETTMPPSETATSETMPPPSQTALTHN

SEQ ID NO: 4154 - protein, 111 aa, Homo Sapiens
MKSLLFTLAVFMLLAQLVSGNWYVKKCLNDVGICKKKCKPEEMHVKNGWAMCGKQRDCCVPADRRANYPVFCVQTKTTRISTVTATTATTTLMMTTASMSSMAPTPVSPTG

SEQ ID NO: 4155 - protein, 99 aa, Homo Sapiens
MGLFMIIAILLFQKPTVTEQLKKCWNNYVQGHCRKICRVNEVPEALCENGRYCCLNIKELEACKKITKPPRPKPATLALTLQDYVTIIENFPSLKTQST

SEQ ID NO: 4156 - protein, 93 aa, Homo Sapiens
MKLFLVLIILLFEVLTDGARLKKCFNKVTGYCRKKCKVGERYEIGCLSGKLCCANDEEEKKHVSFKKPHQHSGEKLSVLQDYIILPTITIFTV

SEQ ID NO: 4157 - protein, 183 aa, Homo Sapiens
MKLLFPIFASLMLQYQVNTEFIGLRRCLMGLGRCRDHCNVDEKEIQKCKMKKCCVGPKVVKLIKNYLQYGTPNVLNEDVQEMLKPAKNSSAVIQRKHILSVLPQIKSTSFFANTNFVIIPNATPMNSATISTMTPGQITYTATSTKSNTKESRDSATASPPPAPPPPNILPTPSLELEEAEEQ

SEQ ID NO: 4158 - protein, 79 aa, Homo Sapiens
MKLHSLISVLLLFVTLIPKGKTGVIPGQKQCIALKGVCRDKLCSTLDDTIGICNEGKKCCRRWWILEPYPTPVPKGKSP

SEQ ID NO: 4159 - protein, 79 aa, Homo Sapiens; identical to SEQ ID NO: 4158

SEQ ID NO: 4160 - protein, 70 aa, Homo Sapiens
MRVLFFVFGVLSLMFTVPPARSFISNDECPSEYYHCRLKCNADEHAIRYCADFSICCKLKIIEIDGQKKW

SEQ ID NO: 4161 - protein, 70 aa, Homo Sapiens
MRVLFFVFGVLSLMSTVPPTRSFTSNDECPSEYYHCRLKCNADEHAIRYCADFSICCKLKIIQIDGQKKW

SEQ ID NO: 4162 - protein, 95 aa, Homo Sapiens
MKFLLLVLAALGFLTQVIPASAGGSKCVSNTPGYCRTCCHWGETALFMCNASRKCCISYSFLPKPDLPQLIGNHWQSRRRNTQRKDKKQQTTVTS

SEQ ID NO: 4163 - protein, 61 aa, Homo Sapiens
MKIHVFLFVLFFFLVPIATRVKCAVKDTYSCFIMRGKCRHECHDFEKPIGFCTKLNANCYM

SEQ ID NO: 4164 - protein, 66 aa, Homo Sapiens
MKPLLVVFVFLFLWDPVLAGINSLSSEMHKKCYKNGICRLECYESEMLVAYCMFQLECCVKGNPAP

SEQ ID NO: 4165 - protein, 66 aa, Homo Sapiens; identical to SEQ ID NO: 4164

SEQ ID NO: 4166 - protein, 77 aa, Homo Sapiens
MATRSVLLALVVLNLLFYVPPGRSGPNVYIQKIFASCWRLQGTCRPKCLKNEQYRILCDTIHLCCVNPKYLPILTGK

SEQ ID NO: 4167 - protein, 78 aa, Homo Sapiens
MNLCLSALLFFLVILLPSGKGMFGNDGVKVRTCTSQKAVCFFGCPPGYRWIAFCHNILSCCKNMTRFQPPQAKDPWVH

SEQ ID NO: 4168 - protein, 64 aa, Homo Sapiens
MRVLYLLFSFLFIFLMPLPGVFGGIGDPVTCLKSGAICHPVFCPRRYKQIGTCGLPGTKCCKKP

SEQ ID NO: 4169 - protein, 64 aa, Homo Sapiens; identical to SEQ ID NO: 4168

SEQ ID NO: 4170 - protein, 84 aa, Homo Sapiens
MRSRLLLSVAHLPTIRETTEEMLLGGPGQEPPPSPSLDDYVRSISRLAQPTSVLDKATAQGQPRPPHRPAQACRKGRPAVSLRD

SEQ ID NO: 4171 - protein, 212 aa, Homo Sapiens
MRSRLLLSVAHLPTIRETTEEMLLGGPGQEPPPSPSLDDYVRSISRLAQPTSVLDKATAQGQPRPPHRPAQACRKGRPAVSLRDITARFSGQQPTLPMADTVDPLDWLFGESQEKQPSQRDLPRRTGPSAGLWGPHRQMDSSKPMGAPRGRLCEARMPGHSLARPPQDGQQSSDLRSWTFGQSAQAMASRHRPRPSSVLRTLYSHLPVIHEL

SEQ ID NO: 4172 - protein, 326 aa, Homo Sapiens
MSENDNVFCAQLQCFHFPTLRHHDLHSWHAESCYEKSSFLCKRSQTCVDIKDNVVDEGFYFTPKGDDPCLSCTCHGGEPEMCVAALCERPQGCQQYRKDPKECCKFMCLDPDGNSLFDSMASGMRLVVSCISSFLILSLLLFMVHRLRQRRRERIESLIGANLHHFNLGRRIPGFDYGPDGFGTGLTPLHLSDDGEGGTFHFHDPPPPYTAYKYPDIGQPDDPPPPYEASIHPDSVFYDPADDDAFEPVEVSLPAPGDGGSEGALLRRLEQPLPTAGASLADLEDSADSSSALLVPPDPAQSGSTPAAEALPGGGRHSRSSLNTVV

SEQ ID NO: 4173 - protein, 550 aa, Homo Sapiens
MVPKADSGAFLLLFLLVLTVTEPLRPELRCNPGQFACRSGTIQCIPLPWQCDGWATCEDESDEANCPEVTGEVRPHHGKEAVDPRQGRARGGDPSHFHAVNVAQPVRFSSFLGKCPTGWHHYEGTASCYRVYLSGENYWDAAQTCQRLNGSLATFSTDQELRFVLAQEWDQPERSFGWKDQRKLWVGYQYVITGRNRSLEGRWEVAFKGSSEVFLPPDPIFASAMSENDNVFCAQLQCFHFPTLRHHDLHSWHAESCYEKSSFLCKRSQTCVDIKDNVVDEGFYFTPKGDDPCLSCTCHGGEPEMCVAALCERPQGCQQYRKDPKECCKFMCLDPDGNSLFDSMASGMRLVVSCISSFLILSLLLFMVHRLRQRRRERIESLIGANLHHFNLGRRIPGFDYGPDGFGTGLTPLHLSDDGEGGTFHFHDPPPPYTAYKYPDIGQPDDPPPPYEASIHPDSVFYDPADDDAFEPVEVSLPAPGDGGSEGALLRRLEQPLPTAGASLADLEDSADSSSALLVPPDPAQSGSTPAAEALPGGGRHSRSSLNTVV

SEQ ID NO: 4174 - protein, 550 aa, Homo Sapiens [sequence omitted]

SEQ ID NO: 4175 - protein, 509 aa, Homo Sapiens
MVPKADSGAFLLLFLLVLTVTEPLRPEVTGEVRPHHGKEAVDPRQGRARGGDPSHFHAVNVAQPVRFSSFLGKCPTGWHHYEGTASCYRVYLSGENYWDAAQTCQRLNGSLATFSTDQELRFVLAQEWDQPERSFGWKDQRKLWVGYQYVITGRNRSLEGRWEVAFKGSSEVFLPPDPIFASAMSENDNVFCAQLQCFHFPTLRHHDLHSWHAESCYEKSSFLCKRSQTCVDIKDNVVDEGFYFTPKGDDPCLSCTCHGGEPEMCVAALCERPQGCQQYRKDPKECCKFMCLDPDGNSLFDSMASGMRLVVSCISSFLILSLLLFMVHRLRQRRRERIESLIGANLHHFNLGRRIPGFDYGPDGFGTGLTPLHLSDDGEGGTFHFHDPPPPYTAYKYPDIGQPDDPPPPYEASIHPDSVFYDPADDDAFEPVEVSLPAPGDGGSEGALLRRLEQPLPTAGASLADLEDSADSSSALLVPPDPAQSGSTPAAEALPGGGRHSRSSLNTVV

SEQ ID NO: 4176 - protein, 396 aa, Homo Sapiens
MALLTNLLPLCCLALLALPAQSCGPGRGPVGRRRYARKQLVPLLYKQFVPGVPERTLGASGPAEGRVARGSERFRDLVPNYNPDIIFKDEENSGADRLMTERCKERVNALAIAVMNMWPGVRLRVTEGWDEDGHHAQDSLHYEGRALDITTSDRDRNKYGLLARLAVEAGFDWVYYESRNHVHVSVKADNSLAVRAGGCFPGNATVRLWSGERKGLRELHRGDWVLAADASGRVVPTPVLLFLDRDLQRRASFVAVETEWPPRKLLLTPWHLVFAARGPAPAPGDFAPVFARRLRAGDSVLAPGGDALRPARVARVAREEAVGVFAPLTAHGTLLVNDVLASCYAVLESHQWAHRAFAPLRLLHALGALLPGGAVQPTGMHWYSRLLYRLAEELLG

SEQ ID NO: 4177 - protein, 155 aa, Homo Sapiens
MHKAGLLGLCARAWNSVRMASSGMTRRDPLANKVALVTASTDGIGFAIARRLAQDGAHVVVSSRKQQNVDQAVATLQGEGLSVTGTVCHVGKAEDRERLVATAVKLHGGIDILVSNAAVNPFFGSIMDVTEEVWDKLWMDKEKEESMKETLRIRR

SEQ ID NO: 4178 - protein, 192 aa, Homo Sapiens
MHKAGLLGLCARAWNSVRMASSGMTRRDPLANKVALVTASTDGIGFAIARRLAQDGAHVVVSSRKQQNVDQAVATLQGEGLSVTGTVCHVGKAEDRERLVATAVKLHGGIDILVSNAAVNPFFGSIMDVTEEVWDKLWMDKEKEESMKETLRIRRLGEPEDCAGIVSFLCSEDASYITGETVVVGGGTPSRL

SEQ ID NO: 4179 - protein, 188 aa, Homo Sapiens
MHKAGLLGLCARAWNSVRMASSGMTRRDPLANKVALVTASTDGIGFAIARRLAQDGAHVVVSSRKQQNVDQAVATLQGEGLSVTGTVCHVGKAEDRERLVATAVKLHGGIDILVSNAAVNPFFGSIMDVTEEVWDKRRLSGDRVFHSSLQSISSLDGQGKRGKHERNPADKKVRRARGLCWHRVFPVL

SEQ ID NO: 4180 - protein, 278 aa, Homo Sapiens
MHKAGLLGLCARAWNSVRMASSGMTRRDPLANKVALVTASTDGIGFAIARRLAQDGAHVVVSSRKQQNVDQAVATLQGEGLSVTGTVCHVGKAEDRERLVATAVKLHGGIDILVSNAAVNPFFGSIMDVTEEVWDKTLDINVKAPALMTKAVVPEMEKRGGGSVVIVSSIAAFSPSPGFSPYNVSKTALLGLTKTLAIELAPRNIRVNCLAPGLIKTSFSRMLWMDKEKEESMKETLRIRRLGEPEDCAGIVSFLCSEDASYITGETVVVGGGTPSRL

SEQ ID NO: 4181 - protein, 158 aa, Homo Sapiens
MHKAGLLGLCARAWNSVRMASSGMTRRDPLANKVALVTASTDGIGFAIARRLAQDGAHVVVSSRKQQNVDQAVATLQGEGLSVTGTVCHVGKAEDRERLVATLWMDKEKEESMKETLRIRRLGEPEDCAGIVSFLCSEDASYITGETVVVGGGTPSRL

SEQ ID NO: 4182 - protein, 244 aa, Homo Sapiens
MHKAGLLGLCARAWNSVRMASSGMTRRDPLANKVALVTASTDGIGFAIARRLAQDGAHVVVSSRKQQNVDQAVATLQGEGLSVTGTVCHVGKAEDRERLVATTLDINVKAPALMTKAVVPEMEKRGGGSVVIVSSIAAFSPSPGFSPYNVSKTALLGLTKTLAIELAPRNIRVNCLAPGLIKTSFSRMLWMDKEKEESMKETLRIRRLGEPEDCAGIVSFLCSEDASYITGETVVVGGGTPSRL

SEQ ID NO: 4183 - protein, 199 aa, Homo Sapiens
MHKAGLLGLCARAWNSVRMASSGMTRRDPLANKVALVTASTDGIGFAIARRLAQDGAHVVVSSRKQQNVDQAVATLQGEGLSVTGTVCHVGKAEDRERLVATTLDINVKAPALMTKAVVPEMEKRGGGSVVIVSSIAAFSPSPLWMDKEKEESMKETLRIRRLGEPEDCAGIVSFLCSEDASYITGETVVVGGGTPSRL

SEQ ID NO: 4184 - protein, 61 aa, Homo Sapiens
RNIRVNCLAPGLIKTSFSRMLWMDKEKEESMKETLRIRRPRIHKHYHYSDLSKKSASLSKG

SEQ ID NO: 4185 - protein, 90 aa, Homo Sapiens
MAVKLHGGIDILVSNAAVNPFFGSLMDVTEEVWDKGFSPYNVSKTALLGLNNTLAIELAPRNIRVNCLHLDLSRLASAGCSGWTRKKRKA

SEQ ID NO: 4186 - protein, 131 aa, Homo Sapiens
MAVKLHGGIDILVSNAAVNPFFGSLMDVTEEVWDKTLDINVKAPALMTKAVVPEMEKRGGGSVVIVSSIAAFSPSPGFSPYNVSKTALLGLNNTLAIELAPRNIRVNCLHLDLSRLASAGCSGWTRKKRKA

SEQ ID NO: 4187 - protein, 49 aa, Homo Sapiens
MDVTEEVWDKTLDINVKAPALMTKAVVPEMEKRGGGSVVIVSSIAAFSP

SEQ ID NO: 4188 - protein, 215 aa, Homo Sapiens
MPFPCLSLPSSWDYRIGFAIARRLAQDRAHVVVSSRKQQNVDQAVATLQGEGLSVTGTVCHVGKAEDRERLVAMTLDINVKAPALMTKAVVPEMEKRGGGSVVIVSSIAAFSPSPGFSPYNVSKTALLGLNNTLAIELAPRNIRVNCLPGLIKTSFSRMLWMDKEKEESMKETLRIRRLGEPEDCAGIVSFLCSEDASYITGETVVVGGGTPSRL

SEQ ID NO: 4189 - protein, 192 aa, Homo Sapiens
MQMARLLGLCAWARKSVRMASSRMTRRDPLTNKVALVTASTDGIGFAIARRLAQDRAHVVVSSRKQQNVDQAVATLQGEGLSVTGTVCHVGKAEDRERLVAMAVKLHGGIDILVSNAAVNPFFGSLMDVTEEVWDKLWMDKEKEESMKETLRIRRLGEPEDCAGIVSFLCSEDASYITGETVVVGGGTPSRL

SEQ ID NO: 4190 - protein, 232 aa, Homo Sapiens
MQMARLLGLCAWARKSVRMASSRMTRRDPLTNKVALVTASTDGIGFAIARRLAQDRAHVVVSSRKQQNVDQAVATLQGEGLSVTGTVCHVGKAEDRERLVAMAVKLHGGIDILVSNAAVNPFFGSLMDVTEEVWDKTLDINVKAPALMTKAVVPEMEKRGGGSVVIVSSIAAFSPSPGFSPYNVSKTALLGLNNTLAIELAPRNIRVNCLHLDLSRLASAGCSGWTRKKRKA

SEQ ID NO: 4191 - protein, 242 aa, Homo Sapiens
MQMARLLGLCAWARKSVRMASSRMTRRDPLTNKVALVTASTDGIGFAIARRLAQDRAHVVVSSRKQQNVDQAVATLQGEGLSVTGTVCHVGKAEDRERLVAMAVKLHGGIDILVSNAAVNPFFGSLMDVTEEVWDKTLDINVKAPALMTKAVVPEMEKRGGGSVVIVSSIAAFSPSPGFSPYNVSKTALLGLNNTLAIELAPRNIRVNCLHLDLSRLASAGWLGEPEDCAGIVSFLCSEDAS

SEQ ID NO: 4192 - protein, 157 aa, Homo Sapiens
MQMARLLGLCAWARKSVRMASSRMTRRDPLTNKVALVTASTDGIGFAIARRLAQDRAHVVVSSRKQQNVDQAVATLQGEGLSVTGTVCHVGKAEDRERLVAMGFSPYNVSKTALLGLNNTLAIELAPRNIRVNCLHLDLSRLASAGCSGWTRKKRKA

SEQ ID NO: 4193 - protein, 157 aa, Homo Sapiens; identical to SEQ ID NO: 4192

SEQ ID NO: 4194 - protein, 109 aa, Homo Sapiens
  misc_feature (1)..(1): Xaa can be any naturally occurring amino acid
XSLMDVTEEVWDKTLDINVKAPALMTKAVVPEMEKRGGGSVVIVSSIAAFSPSPGFSPYNVSKTALLGLNNTLAIELAPRNIRVNCLHLDLSRLASAGCSGWTRKKRKA

SEQ ID NO: 4195 - protein, 61 aa, Homo Sapiens
MNWELLLWLLVLCALLLLLVQLLRFLRADGDLTLLWAEWQGRRPEWELTDMVVWVTGASSG

SEQ ID NO: 4196 - protein, 339 aa, Homo Sapiens
MNWELLLWLLVLCALLLLLVQLLRFLRADGDLTLLWAEWQGRRPEWELTDMVVWVTGASSGIGEELAYQLSKLGVSLVLSARRVHELERVKRRCLENGNLKEKDILVLPLDLTDTGSHEAATKAVLQEFGRIDILVNNGGMSQRSLCMDTSLDVYRKLIELNYLGTVSLTKCVLPHMIERKQGKIVTVNSILGIISVPLSIGYCASKHALRGFFNGLRTELATYPGIIVSNICPGPVQSNIVENSLAGEVTKTIGNNGDQSHKMTTSRCVRLMLISMANDLKEVWISEQPFLLVTYLWQYMPTWAWWITNKMGKKRIENFKSGVDADSSYFKIFKTKHD

SEQ ID NO: 4197 - protein, 339 aa, Homo Sapiens; identical to SEQ ID NO: 4196

SEQ ID NO: 4198 - protein, 376 aa, Homo Sapiens
MNWELLLWLLVLCALLLLLVQLLRFLRADGDLTLLWAEWQGRRPEWELTDMVVWVTGASSGIGEELAYQLSKLGVSLVLSARRVHELERVKRRCLENGNLKEKDILVLPLDLTDTGSHEAATKAVLQEFGRIDILVNNGGMSQRSLCMDTSLDVYRKLIELNYLGTVSLTKCVLPHMIERKQGKIVTVNSILGIISVPLSIGYCASKHALRGFFNGLRTELATYPGIIVSNICPGPVQSNIVENSLAGEVTKTIGNNGDQSHKMTTSRCVRLMLISMANDLKEVWISEQPFLLVTYLWQYMPTWAWWITTRWGRKGLRTLRVVWMQTLLILKSLRQNMTEKSTCTFQATGGRNGKHENSNLLMLLNNQRLICDFTF

SEQ ID NO: 4199 - protein, 289 aa, Homo Sapiens
MVVWVTGASSGIGEELAYQLSKLGVSLVLSARRVHELERVKRRCLENGNLKEKDILVLPLDLTDTGSHEAATKAVLQEFGRIDILVNNGGMSQRSLCMDTSLDVYRKLIELNYLGTVSLTKCVLPHMIERKQGKIVTVNSILGIISVPLSIGYCASKHALRGFFNGLRTELATYPGIIVSNICPGPVQSNIVENSLAGEVTKTIGNNGDQSHKMTTSRCVRLMLISMANDLKEVWISEQPFLLVTYLWQYMPTWAWWITNKMGKKRIENFKSGVDADSSYFKIFKTKHD

SEQ ID NO: 4200 - protein, 212 aa, Homo Sapiens
  misc_feature (1)..(1): Xaa can be any naturally occurring amino acid
XILVNNGGMSQRSLCMDTSLDVYRKLIELNYLGTVSLTKCVLPHMIERKQGKIVTVNSILGIISVPLSIGYCASKHALRGFFNGLRTELATYPGIIVSNICPGPVQSNIVENSLAGEVTKTIGNNGDQSHKMTTSRCVRLMLISMANDLKEVWISEQPFLMQTLLILKSLRQNMTEKSTCTFQATGGRNGKHENSNLLMLLNNQRLICDFTF

SEQ ID NO: 4201 - protein, 399 aa, Homo Sapiens
  misc_feature (1)..(1): Xaa can be any naturally occurring amino acid
XLWLLVLCALLLLLVQLLRFLRADGDLTLLWAEWQGRRPEWELTDMVVWVTGASSGIGEELAYQLSKLGVSLVLSARRVHELERVKRRCLENGNLKEKDILVLPLDLTDTGSHEAATKAVLQEFGRIDILVNNGGMSQRSLCMDTSLDVYRKLIELNYLGTVSLTKCVLPHMIERKQGKIVTVNSILGIISVPLSIGYCASKHALRGFFNGLRTELATYPGIIVSNICPGPVQSNIVENSLAGEVTKTIGNNGDQSHKMTTSRCVRLMLISMANDLKEVWISEQPFLLVTYLWQYMPTWAWWITNKMGKKRIENFKSGVVRPISKFLNSMYQSCRKVQNFPVFKKLSGWVQWLMSVIPALWEAKADHLRPGVQDQPGQHSETPSLLKIQKVAGHGGACL

SEQ ID NO: 4202 - protein, 160 aa, Homo Sapiens
  misc_feature (1)..(1): Xaa can be any naturally occurring amino acid
XNWELLLWLLVLCALLLLLVQLLRFLRADGDLTLLWAEWQGRRPEWELTDMVVWVTGASSGIGEELAYQLSKLGVSLVLSARRVHELERVKRRCLENGNLKEKDILVLPLDLTDTGSHEAATKAVLQEFGRGFFNGLRTELATYPGIIVSNICPGPVQSN

SEQ ID NO: 4203 - protein, 312 aa, Homo Sapiens
MGVMAMLMLPLLLLGISGLLFIYQEVSRLWSKSAVQNKVVVITDAISGLGKECARVFHTGGARLVLCGKNWERLENLYDALISVADPSKQTFTPKLVLLDLSDISCVPDVAKEVLDCYGCVDILINNASVKVKGPAHKISLELDKKIMDANYFGPITLTKALLPNMISRRTGQIVLVNNIQGKFGIPFRTTYAASKHAALGFFDCLRAEVEEYDVVISTVSPTFIRSYHVYPEQGNWEASIWKFFFRKLTYGVHPVEVAEEVMRTVRRKKQEVFMANPIPKAAVYVRTFFPEFFFAVVACGVKEKLNVPEEG

SEQ ID NO: 4204 - protein, 311 aa, Homo Sapiens
MGVMAMLMLPLLLLGISGLLFIYQEVSRLWSKSAVQNKVVVITDAISGLGKECARVFHTGGARLVLCGKNWERLENLYDALISVADPSKTFTPKLVLLDLSDISCVPDVAKEVLDCYGCVDILINNASVKVKGPAHKISLELDKKIMDANYFGPITLTKALLPNMISRRTGQIVLVNNIQGKFGIPFRTTYAASKHAALGFFDCLRAEVEEYDVVISTVSPTFIRSYHVYPEQGNWEASIWKFFFRKLTYGVHPVEVAEEVMRTVRRKKQEVFMANPIPKAAVYVRTFFPEFFFAVVACGVKEKLNVPEEG

SEQ ID NO: 4205 - protein, 132 aa, Homo Sapiens
SVKVKGPAHKISLELDKKIMDANYFGPITLTKALLPNMISRRTGQIVLVNNIQGKFGIPFRTTFFFRKLTYGVHPVEVAEEVMRTVRRKKQEVFMANPIPKAAVYVRTFFPEFFFAVVACGVKEKLNVPEEG

SEQ ID NO: 4206 - protein, 66 aa, Homo Sapiens
MLFWVLGLLILCGFLWTRKGKLKIEDITDKYIFITGCDSGFGNLAARTFDKKGFHVIAACLTESGS

SEQ ID NO: 4207 - protein, 319 aa, Homo Sapiens
MLFWVLGLLILCGFLWTRKGKLKIEDITDKYIFITGCDSGFGNLAARTFDKKGFHVIAACLTESGSTALKAETSERLRTVLLDVTDPENVKRTAQWVKNQVGEKGLWGLINNAGVPGVLAPTDWLTLEDYREPIEVNLFGLISVTLNMLPLVKKAQGRVINVSSVGGRLAIVGGGYTPSKYAVEGFNDSLRRDMKAFGVHVSCIEPGLFKTNLADPVKVIEKKLAIWEQLSPDIKQQYGEGYIEKSLDKLKGNKSYVNMDLSPVVECMDHALTSLFPKTHYAAGKDAKIFWIPLSHMPAALQDFLLLKQKAELANPKAV

SEQ ID NO: 4208 - protein, 319 aa, Homo Sapiens; identical to SEQ ID NO: 4207

SEQ ID NO: 4209 - protein, 319 aa, Homo Sapiens; identical to SEQ ID NO: 4207

SEQ ID NO: 4210 - protein, 319 aa, Homo Sapiens; identical to SEQ ID NO: 4207

SEQ ID NO: 4211 - protein, 319 aa, Homo Sapiens; identical to SEQ ID NO: 4207

SEQ ID NO: 4212 - protein, 172 aa, Homo Sapiens
MLPLVKKAQGRVINVSSVGGRLAIVGGGYTPSKYAVEGFNDSLRRDMKAFGVHVSCIEPGLFKTNLADPVKVIEKKLAIWEQLSPDIKQQYGEGYIEKSLDKLKGNKSYVNMDLSPVVECMDHALTSLFPKTHYAAGKDAKIFWIPLSHMPAALQDFLLLKQKAELANPKAV

SEQ ID NO: 4213 - protein, 379 aa, Homo Sapiens
MPEGRSHCACSITSLTLLVSLTRVTLDILQKLDPPQPAHWRHHLLVLYKKGVYLSHTGGKMLFWVLGLLILCGFLWTRKGKLKIEDITDKYIFITGCDSGFGNLAARTFDKKGFHVIAACLTESGSTALKAETSERLRTVLLDVTDPENVKRTAQWVKNQVGEKGLWGLINNAGVPGVLAPTDWLTLEDYREPIEVNLFGLISVTLNMLPLVKKAQGRVINVSSVGGRLAIVGGGYTPSKYAVEGFNDSLRRDMKAFGVHVSCIEPGLFKTNLADPVKVIEKKLAIWEQLSPDIKQQYGEGYIEKSLDKLKGNKSYVNMDLSPVVECMDHALTSLFPKTHYAAGKDAKIFWIPLSHMPAALQDFLLLKQKAELANPKAV

SEQ ID NO: 4214 - protein, 122 aa, Homo Sapiens
MHVIIAGNNDSKAKQVVSKIKEETLNDKVEFLYCDLASMTSIRQFVQKFKMKKIPLHVLINNAGVMMVPQRKTRDGFEEHFGLNYLGHFLLTNLLLDTLKESGSPGHSARVVTVSSATHYVA

SEQ ID NO: 4215 - protein, 63 aa, Homo Sapiens
MPVFPPRPDRVAIVTGGTDGIGYSTAKHLARLGMHVIIAGNNDSKAKQVVSKIKEETLNDKET

SEQ ID NO: 4216 - protein, 330 aa, Homo Sapiens
MSPLSAARAALRVYAVGAAVILAQLLRRCRGGFLEPVFPPRPDRVAIVTGGTDGIGYSTAKHLARLGMHVIIAGNNDSKAKQVVSKIKEETLNDKVEFLYCDLASMTSIRQFVQKFKMKKIPLHVLINNAGVMMVPQRKTRDGFEEHFGLNYLGHFLLTNLLLDTLKESGSPGHSARVVTVSSATHYVAELNMDDLQSSACYSPHAAYAQSKLALVLFTYHLQRLLAAEGSHVTANVVDPGVVNTDVYKHVFWATRLAKKLLGWLLFKTPDEGAWTSIYAAVTPELEGVGGHYLYNEKETKSLHVTYNQKLQQQLWSKSCEMTGVLDVTL

SEQ ID NO: 4217 - protein, 232 aa, Homo Sapiens
MSPLSAARAALRVYAVGAAVILAQLLRRCRGGFLEPVFPPRPDRVAIVTGGTDGIGYSTAKHLARLGMHVIIVEFLYCDLASMTSIRQFVQKFKMKKIPLHVLINNAGVMMVPQRKTRDGFEEHFGLNYLGHFLLTNLLLDTLKESGSPGHSARVVTVSSATHYVAELNMDDLQSSACYSPHAAYAQSKLALVLFTYHLQRLLAAEGSHVTANVVDPGVVNTDVYKHVFWAT

SEQ ID NO: 4218 - protein, 154 aa, Homo Sapiens
  misc_feature (1)..(1): Xaa can be any naturally occurring amino acid
XPARPGPTLPSPRVWPPRLSRVGLQPSSPRAAAPPRTLTPPGHGRGPGGSHAPRPRHQAALPAACGRPVTARPRQAPEGRSGRPRDLDPYPPQVFPPRPDRVAIVTGGTDGIGYSTAKHLARLGMHVIIAGNNDSKAKQVVSKIKEETLNDKET

SEQ ID NO: 4219 - protein, 1369 aa, Homo Sapiens
MGGKNKKHKAPAAAVVRAAVSASRAKSAEAGIAGEAQSKKPVSRPATAAAAAAGSREPRVKQGPKIYSFNSTNDSSGPANLDKSILKVVINNKLEQRIIGVINEHKKQNNDKGMISGRLTAKKLQDLYMALQAFSFKTKDIEDAMTNTLLYGGDLHSALDWLCLNLSDDALPEGFSQEFEEQQPKSRPKFQSPQIQATISPPLQPKTKTYEEDPKSKPKKEEKNMEVNMKEWILRYAEQQNEEEKNENSKSLEEEEKFDPNERYLHLAAKLLDAKEQAATFKLEKNKQGQKEAQEKIRKFQREMETLEDHPVFNPAMKISHQQNERKKPPVATEGESALNFNLFEKSAAATEEEKDKKKEPHDVRNFDYTARSWTGKSPKQFLIDWVRKNLPKSPNPSFEKVPVGRYWKCRVRVIKSEDDVLVVCPTILTEDGMQAQHLGATLALYRLVKGQSVHQLLPPTYRDVWLEWSDAEKKREELNKMETNKPRDLFIAKLLNKLKQQQQQQQQHSENKRENSEDPEESWENLVSDEDFSALSLESANVEDLEPVRNLFRKLQSTPKYQKLLKERQQLPVFKHRDSIVETLKRHRVVVVAGETGSGKSTQVPHFLLEDLLLNEWEASKCNIVCTQPRRISAVSLANRVCDELGCENGPGGRNSLCGYQIRMESRACESTRLLYCTTGVLLRKLQEDGLLSNVSHVIVDEVHERSVQSDFLLIILKEILQKRSDLHLILMSATVDSEKFSTYFTHCPILRISGRSYPVEVFHLEDIIEETGFVLEKDSEYCQKFLEEEEEVTINVTSKAGGIKKYQEYIPVQTGAHADLNPFYQKYSSRTQHAILYMNPHKINLDLILELLAYLDKSPQFRNIEGAVLIFLPGLAHIQQLYDLLSNDRRFYSERYKVIALHSILSTQDQAAAFTLPPPGVRKIVLATNIAETGITIPDVVFVIDTGRTKENKYHESSQMSSLVETFVSKASALQRQGRAGRVRDGFCFRMYTRERFEGFMDYSVPEILRVPLEELCLHIMKCNLGSPEDFLSKALDPPQLQVISNAMNLLRKIGACELNEPKLTPLGQHLAALPVNVKIGKMLIFGAIFGCLDPVATLAAVMTEKSPFTTPIGRKDEADLAKSALAMADSDHLTIYNAYLGWKKARQEGGYRSEITYCRRNFLNRTSLLTLEDVKQELIKLVKAAGFSSSTTSTSWEGNRASQTLSFQEIALLKAVLVAGLYDNVGKIIYTKSVDVTEKLACIVETAQGKAQVHPSSVNRDLQTHGWLLYQEKIRYARVYLRETTLITPFPVLLFGGDIEVQHRERLLSIDGWIYFQAPVKIAVIFKQLRVLIDSVLRKKLENPKMSLENDKILQIITELIKTENN

SEQ ID NO: 4220 - protein, 1370 aa, Homo Sapiens
MGGKNKKHKAPAAAVVRAAVSASRAKSAEAGIAGEAQSKKPVSRPATAAAAAAGSREPRVKQGPKIYSFNSTNDSSGPANLDKSILKVVINNKLEQRIIGVINEHKKQNNDKGMISGRLTAKKLQDLYMALQAFSFKTKDIEDAMTNTLLYGGDLHSALDWLCLNLSDDALPEGFSQEFEEQQPKSRPKFQSPQIQATISPPLQPKTKTYEEDPKSKPKKEEKNMEVNMKEWILRYAEQQNEEEKNENSKSLEEEEKFDPNERYLHLAAKLLDAKEQAATFKLEKNKQGQKEAQEKIRKFQREMETLEDHPVFNPAMKISHQQNERKKPPVATEGESALNFNLFEKSAAATEEEKGKKKEPHDVRNFDYTARSWTGKSPKQFLIDWVRKNLPKSPNPSFEKVPVGRYWKCRVRVIKSEDDVLVVCPTILTEDGMQAQHLGATLALYRLVKGQSVHQLLPPTYRDVWLEWSDAEKKREELNKMETNKPRDLFIAKLLNKLKQQQQQQQQHSENKRENSEDPEESWENLVSDEDFSALSLESANVEDLEPVRNLFRKLQSTPKYQKLLKERQQLPVFKHRDSIVETLKRHRVVVVAGETGSGKSTQVPHFLLEDLLLNEWEASKCNIVCTQPRRISAVSLANRVCDELGCENGPGGRNSLCGYQIRMESRACESTRLLYCTTGVLLRKLQEDGLLSNVSHVIVDEVHERSVQSDFLLIILKEILQKRSDLHLILMSATVDSEKFSTYFTHCPILRISGRSYPVEVFHLEDIIEETGFVLEKDSEYCQKFLEEEEEVTINVTSKAGGIKKYQEYIPVQTGAHADLNPFYQKYSSRTQHAILYMNPHKINLDLILELLAYLDKSPQFRNIEGAVLIFLPGLAHIQQLYDLLSNDRRFYSERYKVIALHSILSTQDQAAAFTLPPPGVRKIVLATNIAETGITIPDVVFVIDTGRTKENKYHESSQMSSLVETFVSKASALQRQGRAGRVRDGFCFRMYTRERFEGFMDYSVPEILRVPLEELCLHIMKCNLGSPEDFLSKALDPPQLQVISNAMNLLRKIGACELNEPKLTPLGQHLAALPVNVKIGKMLIFGAIFGCLDPVATLAAVMTEKSPFTTPIGRKDEADLAKSALAMADSDHLTIYNAYLGWKKARQEGGYRSEITYCRRNFLNRTSLLTLEDVKQELIKLVKAAGFSSSTTSTSWEGNRASQTLSFQEIALLKAVLVAGLYDNVGKIIYTKSVDVTEKLACIVETAQGKAQVHPSSVNRDLQTHGWLLYQEKIRYARVYLRETTLITPFPVLLFGGDIEVQHRERLLSIDGWIYFQAPVKIAVIFKQLRVLIDSVLRKKLENPKMSLENDKILQIITELIKTENNN

SEQ ID NO: 4221 - protein, 160 aa, Homo Sapiens
  misc_feature (1)..(1): Xaa can be any naturally occurring amino acid
XRPRWSGPPCLLPEPNLPRLELPGRPKARSQCPGRPPLPLPLPAPGSPVSSKVVINNKLEQRIIGVINEHKKQNNDKGMISGRLTAKKLQDLYMALQAFSFKTKDIEDAMTNTLLYGGDLHSALDWLCLNLSDDALPEGFSQEFEEQQPKSRPKFQSPQI

SEQ ID NO: 4222 - protein, 1222 aa, Homo Sapiens
MAAARRLMALAAGISPRLQPLGPRAAGRQGRSRGFSSSCAHPDHTKEAAEAESGMAPGGPGEGDGSLVNASRDLLKEFPQPKNLLNSVIGRALGISHAKDKLVYVHTNGPKKKKVTLHIKWPKSVEVEGYGSKKIDAERQAAAAACQLFKGWGLLGPRNELFDAAKYRVLADRFGSPADSWWRPEPTMPPTSWRQLNPESIRPGGPGGLSRSLGREEEEDEEEELEEGTIDVTDFLSMTQQDSHAPLRDSRGSSFEMTDDDSAIRALTQFPLPKNLLAKVIQIATSSSTAKNLMQFHTVGTKTKLSTLTLLWPCPMTFVAKGRRKAEAENKAAALACKKLKSLGLVDRNNEPLTHAMYNLASLRELGETQRRPCTIQVPEPILRKIETFLNHYPVESSWIAPELRLQSDDILPLGKDSGPLSDPITGKPYVPLLEAEEVRLSQSLLELWRRRGPVWQEAPQLPVDPHRDTILNAIEQHPVVVISGDTGCGKTTRIPQLLLERYVTEGRGARCNVIITQPRRISAVSVAQRVSHELGPSLRRNVGFQVRLESKPPSRGGALLFCTVGILLRKLQSNPSLEGVSHVIVDEVHERDVNTDFLLILLKGLQRLNPALRLVLMSATGDNERFSRYFGGCPVIKVPGFMYPVKEHYLEDILAKLGKHQYLHRHRHHESEDECALDLDLVTDLVLHIDARGEPGGILCFLPGWQEIKGVQQRLQEALGMHESKYLILPVHSNIPMMDQKAIFQQPPVGVRKIVLATNIAETSITINDIVHVVDSGLHKEERYDLKTKVSCLETVWVSRANVIQRRGRAGRCQSGFAYHLFPRSRLEKMVPFQVPEILRTPLENLVLQAKIHMPEKTAVEFLSKAVDSPNIKAVDEAVILLQEIGVLDQREYLTTLGQRLAHISTDPRLAKAIVLAAIFRCLHPLLVVVSCLTRDPFSSSLQNRAEVDKVKALLSHDSGSDHLAFVRAVAGWEEVLRWQDRSSRENYLEENLLYAPSLRFIHGLIKQFSENIYEAFLVGKPSDCTLASAQCNEYSEEEELVKGVLMAGLYPNLIQVRQGKVTRQGKFKPNSVTYRTKSGNILLHKSTINREATRLRSRWLTYFMAVKSNGSVFVRDSSQVHPLAVLLLTDGDVHIRDDGRRATISLSDSDLLRLEGDSRTVRLLKELRRALGRMVERSLRSELAALPPSVQEEHGQLLALLAELLRGPCGSFDVRKTADD

SEQ ID NO: 4223 - protein, 1155 aa, Homo Sapiens
MAASRDLLKEFPQPKNLLNSVIGRALGISHAKDKLVYVHTNGPKKKKVTLHIKWPKSVEVEGYGSKKIDAERQAAAAACQLFKGWGLLGPRNELFDAAKYRVLADRFGSPADSWWRPEPTMPPTSWRQLNPESIRPGGPGGLSRSLGREEEEDEEEELEEGTIDVTDFLSMTQQDSHAPLRDSRGSSFEMTDDDSAIRALTQFPLPKNLLAKVIQIATSSSTAKNLMQFHTVGTKTKLSTLTLLWPCPMTFVAKGRRKAEAENKAAALACKKLKSLGLVDRNNEPLTHAMYNLASLRELGETQRRPCTIQVPEPILRKIETFLNHYPVESSWIAPELRLQSDDILPLGKDSGPLSDPITGKPYVPLLEAEEVRLSQSLLELWRRRGPVWQEAPQLPVDPHRDTILNAIEQHPVVVISGDTGCGKTTRIPQLLLERYVTEGRGARCNVIITQPRRISAVSVAQRVSHELGPSLRRNVGFQVRLESKPPSRGGALLFCTVGILLRKLQSNPSLEGVSHVIVDEVHERDVNTDFLLILLKGLQRLNPALRLVLMSATGDNERFSRYFGGCPVIKVPGFMYPVKEHYLEDILAKLGKHQYLHRHRHHESEDECALDLDLVTDLVLHIDARGEPGGILCFLPGWQEIKGVQQRLQEALGMHESKYLILPVHSNIPMMDQKAIFQQPPVGVRKIVLATNIAETSITINDIVHVVDSGLHKEERYDLKTKVSCLETVWVSRANVIQRRGRAGRCQSGFAYHLFPRSRLEKMVPFQVPEILRTPLENLVLQAKIHMPEKTAVEFLSKAVDSPNIKAVDEAVILLQEIGVLDQREYLTTLGQRLAHISTDPRLAKAIVLAAIFRCLHPLLVVVSCLTRDPFSSSLQNRAEVDKVKALLSHDSGSDHLAFVRAVAGWEEVLRWQDRSSRENYLEENLLYAPSLRFIHGLIKQFSENIYEAFLVGKPSDCTLASAQCNEYSEEEELVKGVLMAGLYPNLIQVRQGKVTRQGKFKPNSVTYRTKSGNILLHKSTINREATRLRSRWLTYFMAVKSNGSVFVRDSSQVHPLAVLLLTDGDVHIRDDGRRATISLSDSDLLRLEGDSRTVRLLKELRRALGRMVERSLRSELAALPPSVQEEHGQLLALLAELLRGPCGSFDVRKTADD

SEQ ID NO: 4224 - protein, 1166 aa, Homo Sapiens
MCVNPTPGGTISRASRDLLKEFPQPKNLLNSVIGRALGISHAKDKLVYVHTNGPKKKKVTLHIKWPKSVEVEGYGSKKIDAERQAAAAACQLFKGWGLLGPRNELFDAAKYRVLADRFGSPADSWWRPEPTMPPTSWRQLNPESIRPGGPGGLSRSLGREEEEDEEEELEEGTIDVTDFLSMTQQDSHAPLRDSRGSSFEMTDDDSAIRALTQFPLPKNLLAKVIQIATSSSTAKNLMQFHTVGTKTKLSTLTLLWPCPMTFVAKGRRKAEAENKAAALACKKLKSLGLVDRNNEPLTHAMYNLASLRELGETQRRPCTIQVPEPILRKIETFLNHYPVESSWIAPELRLQSDDILPLGKDSGPLSDPITGKPYVPLLEAEEVRLSQSLLELWRRRGPVWQEAPQLPVDPHRDTILNAIEQHPVVVISGDTGCGKTTRIPQLLLERYVTEGRGARCNVIITQPRRISAVSVAQRVSHELGPSLRRNVGFQVRLESKPPSRGGALLFCTVGILLRKLQSNPSLEGVSHVIVDEVHERDVNTDFLLILLKGLQRLNPALRLVLMSATGDNERFSRYFGGCPVIKVPGFMYPVKEHYLEDILAKLGKHQYLHRHRHHESEDECALDLDLVTDLVLHIDARGEPGGILCFLPGWQEIKGVQQRLQEALGMHESKYLILPVHSNIPMMDQKAIFQQPPVGVRKIVLATNIAETSITINDIVHVVDSGLHKEERYDLKTKVSCLETVWVSRANVIQRRGRAGRCQSGFAYHLFPRSRLEKMVPFQVPEILRTPLENLVLQAKIHMPEKTAVEFLSKAVDSPNIKAVDEAVILLQEIGVLDQREYLTTLGQRLAHISTDPRLAKAIVLAAIFRCLHPLLVVVSCLTRDPFSSSLQNRAEVDKVKALLSHDSGSDHLAFVRAVAGWEEVLRWQDRSSRENYLEENLLYAPSLRFIHGLIKQFSENIYEAFLVGKPSDCTLASAQCNEYSEEEELVKGVLMAGLYPNLIQVRQGKVTRQGKFKPNSVTYRTKSGNILLHKSTINREATRLRSRWLTYFMAVKSNGSVFVRDSSQVHPLAVLLLTDGDVHIRDDGRRATISLSDSDLLRLEGDSRTVRLLKELRRALGRMVERSLRSELAALPPSVQEEHGQLLALLAELLRGPCGSFDVRKTADD

SEQ ID NO: 4225 - protein, 1194 aa, Homo Sapiens
MFSLDSFRKDRAQHRQRQCKLPPPRLPPMCVNPTPGGTISRASRDLLKEFPQPKNLLNSVIGRALGISHAKDKLVYVHTNGPKKKKVTLHIKWPKSVEVEGYGSKKIDAERQAAAAACQLFKGWGLLGPRNELFDAAKYRVLADRFGSPADSWWRPEPTMPPTSWRQLNPESIRPGGPGGLSRSLGREEEEDEEEELEEGTIDVTDFLSMTQQDSHAPLRDSRGSSFEMTDDDSAIRALTQFPLPKNLLAKVIQIATSSSTAKNLMQFHTVGTKTKLSTLTLLWPCPMTFVAKGRRKAEAENKAAALACKKLKSLGLVDRNNEPLTHAMYNLASLRELGETQRRPCTIQVPEPILRKIETFLNHYPVESSWIAPELRLQSDDILPLGKDSGPLSDPITGKPYVPLLEAEEVRLSQSLLELWRRRGPVWQEAPQLPVDPHRDTILNAIEQHPVVVISGDTGCGKTTRIPQLLLERYVTEGRGARCNVIITQPRRISAVSVAQRVSHELGPSLRRNVGFQVRLESKPPSRGGALLFCTVGILLRKLQSNPSLEGVSHVIVDEVHERDVNTDFLLILLKGLQRLNPALRLVLMSATGDNERFSRYFGGCPVIKVPGFMYPVKEHYLEDILAKLGKHQYLHRHRHHESEDECALDLDLVTDLVLHIDARGEPGGILCFLPGWQEIKGVQQRLQEALGMHESKYLILPVHSNIPMMDQKAIFQQPPVGVRKIVLATNIAETSITINDIVHVVDSGLHKEERYDLKTKVSCLETVWVSRANVIQRRGRAGRCQSGFAYHLFPRSRLEKMVPFQVPEILRTPLENLVLQAKIHMPEKTAVEFLSKAVDSPNIKAVDEAVILLQEIGVLDQREYLTTLGQRLAHISTDPRLAKAIVLAAIFRCLHPLLVVVSCLTRDPFSSSLQNRAEVDKVKALLSHDSGSDHLAFVRAVAGWEEVLRWQDRSSRENYLEENLLYAPSLRFIHGLIKQFSENIYEAFLVGKPSDCTLASAQCNEYSEEEELVKGVLMAGLYPNLIQVRQGKVTRQGKFKPNSVTYRTKSGNILLHKSTINREATRLRSRWLTYFMAVKSNGSVFVRDSSQVHPLAVLLLTDGDVHIRDDGRRATISLSDSDLLRLEGDSRTVRLLKELRRALGRMVERSLRSELAALPPSVQEEHGQLLALLAELLRGPCGSFDVRKTADD

SEQ ID NO: 4226 - protein, 1194 aa, Homo Sapiens; identical to SEQ ID NO: 4225

SEQ ID NO: 4227 - protein, 42 aa, Homo Sapiens
MFSLDSFRKDRAQHRQRQCKLPPPRLPPMCVNPTPGGTISRG

SEQ ID NO: 4228 - protein, 42 aa, Homo Sapiens; identical to SEQ ID NO: 4227

SEQ ID NO: 4229 - protein, 42 aa, Homo Sapiens; identical to SEQ ID NO: 4227

SEQ ID NO: 4230 - protein, 138 aa, Homo Sapiens
KAKFHQTEGDHLTLLAVYNSWKNNKFSNPWCYENFIQARSLRRAQDIRKQMLGIMDRHKLDVVSCGKSTVRVQKAICSGFFRNAAKKDPQEGYRTLIDQQVVYIHPSSALFNRQPEWDLYSRFSEWKSGTNCSSLSGT

SEQ ID NO: 4231 - protein, 1220 aa, Homo Sapiens [sequence omitted]

SEQ ID NO: 4232 - protein, 1181 aa, Homo Sapiens
MAVAVAMAGALIGSEPGPAEELAKLEYLSLVSKVCTELDNHLGINDKDLAEFVISLAEKNTTFDTFKASLVKNGAEFTDSLISNLLRLIQTMRPPAKPSTSKDPVVKPKTEKEKLKELFPVLCQPDNPSVRTMLDEDDVKVAVDVLKELEALMPSAAGQEKQRDAEHRDRTKKKKRSRSRDRNRDRDRDRERNRDRDHKRRHRSRSRSRSRTRERNKVKSRYRSRSRSQSPPKDRKDRDKYGERNLDRWRDKHVDRPPPEEPTIGDIYNGKVTSIMQFGCFVQLEGLRKRWEGLVHISELRREGRVANVADVVSKGQRVKVKVLSFTGTKTSLSMKDVDQETGEDLNPNRRRNLVGETNEETSMRNPDRPTHLSLVSAPEVEDDSLERKRLTRISDPEKWEIKQMIAANVLSKEEFPDFDEETGILPKVDDEEDEDLEIELVEEEPPFLRGHTKQSMDMSPIKIVKNPDGSLSQAAMMQSALAKERRELKQAQREAEMDSIPMGLNKHWVDPLPDAEGRQIAANMRGIGMMPNDIPEWKKHAFGGNKASYGKKTQMSILEQRESLPIYKLKEQLVQAVHDNQILIVIGETGSGKTTQITQYLAEAGYTSRGKIGCTQPRRVAAMSVAKRVSEEFGCCLGQEVGYTIRFEDCTSPETVIKYMTDGMLLRECLIDPDLTQYAIIMLDEAHERTIHTDVLFGLLKKTVQKRQDMKLIVTSATLDAVKFSQYFYEAPIFTIPGRTYPVEILYTKEPETDYLDASLITVMQIHLTEPPGDILVFLTGQEEIDTACEILYERMKSLGPDVPELIILPVYSALPSEMQTRIFDPAPPGSRKVVIATNIAETSLTIDGIYYVVDPGFVKQKVYNSKTGIDQLVVTPISQAQAKQRAGRAGRTGPGKCYRLYTERAYRDEMLTTNVPEIQRTNLASTVLSLKAMGINDLLSFDFMDAPPMETLITAMEQLYTLGALDDEGLLTRLGRRMAEFPLEPMLCKMLIMSVHLGCSEEMLTIVSMLSVQNVFYRPKDKQALADQKKAKFHQTEGDHLTLLAVYNSWKNNKFSNPWCYENFIQARSLRRAQDIRKQMLGIMDRHKLDVVSCGKSTVRVQKAICSGFFRNAAKKDPQEGYRTLIDQQVVYIHPSSALFNRQPECPKHFLPVVAVAVSLEQCLSKFEDLNKELGLVTC

SEQ ID NO: 4233 - protein, 53 aa, Homo Sapiens
MAVAVAMAGALIGSEPGPAEELAKLEYLSLVSKVCTELDNHLGINDKDLGFSY

SEQ ID NO: 4234 - protein, 33 aa, Homo Sapiens
  misc_feature (1)..(1): Xaa can be any naturally occurring amino acid
XYRTLIDQQVVYIHPSSALFNRQPEWTVPMGHV

SEQ ID NO: 4235 - protein, 6 aa, Homo Sapiens
MGILSV

SEQ ID NO: 4236 - protein, 6 aa, Homo Sapiens
MGILSV

SEQ ID NO: 4237 - protein, 56 aa, Homo Sapiens
MGILSVDLLITLQILPPSANWWKSSPQWLTSCWSTLMRLIHQMAGRYRGTPLCLLR

SEQ ID NO: 4238 - protein, 55 aa, Homo Sapiens
MGILSVDLLITLQILPVFFSNCLFLALYDSVILLKHVVLLLSRSKSTRGEWRRML

SEQ ID NO: 4239 - protein, 145 aa, Homo Sapiens
MGILSVDLLITLQILPVFFSNCLFLALYDSVILLKHVVLLLSRSKSTRGEWRRMLTSEGLRCVWKSFLLDAYKQLNCPPSGFSKDGHILLVYEAYKSRLLVYSHLDLWMTDSVVLTLNFPRQISLCFGKNSAAELYIVSKKEKVP

SEQ ID NO: 4240 - protein, 306 aa, Homo Sapiens
MGILSVDLLITLQILPVFFSNCLFLALYDSVILLKHVVLLLSRSKSTRGEWRRMLTSEGLRCVWKSFLLDAYKQLNCPPSGFSKDGHILLVYEAYKSRLLVYSHLDLWMVKLGEDAPNSSVVHVSSTEGGDNSGNGTQEKIAEGATCHLLDFASPERPLVVNFGSATPPFTSQLPAFRKLVEEFSSVADFLLVYIDEAHPSDGWAIPGDSSLSFEVKKHQNQEDRCAAAQQLLERFSLPPQCRVVADRMDNNANIAYGVAFERVCIVQRQKIAYLGGKGPFSYNLQEVRHWLEKNFSKRKKTRLAG

SEQ ID NO: 4241 - protein, 271 aa, Homo Sapiens
MGILSVDLLITLQILPVFFSNCLFLALYDSVILLKHVVLLLSRSKSTRGEWRRMLTSEGLRCVWKSFLLDAYKQVKLGEDAPNSSVVHVSSTEGGDNSGNGTQEKIAEGATCHLLDFASPERPLVVNFGSATPPFTSQLPAFRKLVEEFSSVADFLLVYIDEAHPSDGWAIPGDSSLSFEVKKHQNQEDRCAAAQQLLERFSLPPQCRVVADRMDNNANIAYGVAFERVCIVQRQKIAYLGGKGPFSYNLQEVRHWLEKNFSKRKKTRLAG

SEQ ID NO: 4242 - protein, 271 aa, Homo Sapiens; identical to SEQ ID NO: 4241

SEQ ID NO: 4243 - protein, 37 aa, Homo Sapiens
  misc_feature (1)..(1): Xaa can be any naturally occurring amino acid
XMLTSEGLRCVWKSFLLDAYKQLNCPPSGFSKDGHIL

SEQ ID NO: 4244 - protein, 58 aa, Homo Sapiens
  misc_feature (1)..(1): Xaa can be any naturally occurring amino acid
XMLTSEGLRCVWKSFLLDAYKQTDSVVLTLNFPRQISLCFGKNSAAELYIVSKKEKVP

SEQ ID NO: 4245 - protein, 77 aa, Homo Sapiens
MEEAKKMISGLQALLLNGSLPEDEQERPLALCEPGVNPEEQLIIIQSRLDQSMEENQDLKKELLKCKQEARNLQGIK

SEQ ID NO: 4246 - protein, 472 aa, Homo Sapiens
MGGTQVKCLTSPSPIHSAKSESIITQSEEKADFVIIPAEGIENRTEGTDSPLSRDWRPGSPGTYLETSWEEQLLEQQEYLEKEMEEAKKMISGLQALLLNGSLPEDEQERPLALCEPGVNPEEQLIIIQSRLDQSMEENQDLKKELLKCKQEARNLQGIKDALQQRLTQQDTSVLQLKQELLRANMDKDELHNQNVDLQRKLDERNRLLGEYKKELGQKDRLLQQHQAKLEEALRKLSDVSYHQVDLERELEHKDVLLAHCMKREADEATNYNSHNSQSNGFLLPTAGKGATSVSNRGTSDLQLVRDALRSLRNSFSGHDPQHHTIDSLEQGISSLMERLHVMETQKKQERKVRVKSPRTQVGSEYRESWPPNSKLPHSQSSPTVSSTCTKVLYFTDRSLTPFMVNIPKRLEEVTLKDFKAAIDREGNHRYHFKALDPEFGTVKEEIFHDDDAIPGWEGKIVAWVEEDHGEN

SEQ ID NO: 4247 - protein, 218 aa, Homo Sapiens
MGTQVVMRFNNSLLPTEPSQQLQAYVAWVNAQLKKRPAVKPVQDLRQDLRDGVILAYLIEIVAGEKLSGVQLSPGNQQEMKNNVEKVLQFVASKKIRMHQTSAKDIVDGNLKSIMRLVLALAAHFKPGSSRTVNQGRDSRAPLQSHRPHCATAVAQGAAAALADVCHDMSRSGRDVFRYRQRNSSMDEEIENPYWSVRALVQQYEGQQRSPSESSCSR

SEQ ID NO: 4248 - protein, 683 aa, Homo Sapiens
MLACLTRGNLLDVLQEGFNEQQLQAYVAWVNAQLKKRPAVKPVQDLRQDLRDGVILAYLIEIVAGEKLSGVQLSPGNQQEMKNNVEKVLQFVASKKIRMHQTSAKDIVDGNLKSIMRLVLALAAHFKPGSSRTVNQGRDSRAPLQSHRPHCATAVAQGAAAALADVCHDMSRSGRDVFRYRQRNSSMDEEIENPYWSVRALVQQYEGQQRSPSESSCSSLTSPSPIHSAKSESIITQSEEKADFVIIPAEGIENRTEGTDSPLSRDWRPGSPGTYLETSWEEQLLEQQEYLEKEMEEAKKMISGLQALLLNGSLPEDEQERPLALCEPGVNPEEQLIIIQSRLDQSMEENQDLKKELLKCKQEARNLQGIKDALQQRLTQQDTSVLQLKQELLRANMDKDELHNQNVDLQRKLDERNRLLGEYKKELGQKDRLLQQHQAKLEEALRKLSDVSYHQVDLERELEHKDVLLAHCMKREADEATNYNSHNSQSNGFLLPTAGKGATSVSNRGTSDLQLVRDALRSLRNSFSGHDPQHHTIDSLEQGISSLMERLHVMETQKKQERKVRVKSPRTQVGSEYRESWPPNSKLPHSQSSPTVSSTCTKVLYFTDRSLTPFMVNIPKRLEEVTLKDFKAAIDREGNHRYHFKALDPEFGTVKEEIFHDDDAIPGWEGKIVAWVEEDHGEN

SEQ ID NO: 4249 - protein, 266 aa, Homo Sapiens
MMALGAAGATRVFVAMVAAALGGHPLLGVSATLNSVLNSNAIKNLPPPLGGAAGHPGSAVSAAPGILYPGGNKYQTIDNYQPYPCAEDEECGTDEYCASPTRGGDAGVQICLACRKRRKRCMRHAMCCPGNYCKNGICVSSDQNHFRGEIEETITESFGNDHSTLDGYSRRTTLSSKMYHTKGQEGSVCLRSSDCASGLCCARHFWSKICKPVLKEGQVCTKHRRKGSHGLEIFQRCYCGEGLSCRIQKDHHQASNSSRLHTCQRH

SEQ ID NO: 4250 - protein, 259 aa, Homo Sapiens
MAALMRSKDSSCCLLLLAAVLMVESSQIGSSRAKLNSIKSSLGGETPGQAANRSAGMYQGLAFGGSKKGKNLGQAYPCSSDKECEVGRYCHSPHQGSSACMVCRRKKKRCHRDGMCCPSTRCNNGICIPVTESILTPHIPALDGTRHRDRNHGHYSNHDLGWQNLGRPHTKMSHIKGHEGDPCLRSSDCIEGFCCARHFWTKICKPVLHQGEVCTKQRKKGSHGLEIFQRCDCAKGLSCKVWKDATYSSKARLHVCQKI

SEQ ID NO: 4251 - protein, 213 aa, Homo Sapiens
MTLRIDYCQGLLVGVSSSGLNIIQIQCQAYPCSSDKECEVGRYCHSPHQGSSACMVCRRKKKRCHRDGMCCPSTRCNNGICIPVTESILTPHIPALDGTRHRDRNHGHYSNHDLGWQNLGRPHTKMSHIKGHEGDPCLRSSDCIEGFCCARHFWTKICKPVLHQGEVCTKQRKKGSHGLEIFQRCDCAKGLSCKVWKDATYSSKARLHVCQKI

SEQ ID NO: 4252 - protein, 159 aa, Homo Sapiens
MVCRRKKKRCHRDGMCCPSTRCNNGICIPVTESILTPHIPALDGTRHRDRNHGHYSNHDLGWQNLGRPHTKMSHIKGHEGDPCLRSSDCIEGFCCARHFWTKICKPVLHQGEVCTKQRKKGSHGLEIFQRCDCAKGLSCKVWKDATYSSKARLHVCQKI

SEQ ID NO: 4253 - protein, 132 aa, Homo Sapiens
MQRLGATLLCLLLAAAVPTAPAPAPTATSAPVKPGPALSYPQEEATLNEMFREVEELMEDTQHKLRSAVEEMEAEEAAAKASSEVNLANLPPSYHNETNTDTKVGNNTIHVHREIHKECIIDEDCGPSMYCQ

SEQ ID NO: 4254 - protein, 183 aa, Homo Sapiens
MQRLGATLLCLLLAAAVPTAPAPAPTATSAPVKPGPALSYPQEEATLNEMFREVEELMEDTQHKLRSAVEEMEAEEAAAKASSEVNLANLPPSYHNETNTDTKVGNNTIHVHREIHKECIIDEDCGPSMYCQFASFQYTCQPCRGQRMLCTRDSECCGDQLCVWGHCTKMATRGSNGTICDNQ

SEQ ID NO: 4255 - protein, 235 aa, Homo Sapiens
MQRLGATLLCLLLAAAVPTAPAPAPTATSAPVKPGPALSYPQEEATLNEMFREVEELMEDTQHKLRSAVEEMEAEEAAAKASSEVNLANLPPSYHNETNTDTKVGNNTIHVHREIHKITNNQTGQMVFSETVITSVGDEEGRRSHECIIDEDCGPSMYCQFASFQYTCQPCRGQRMLCTRDSECCGDQLCVWGHCTKMATRGSNGTICDNQRDCQPGLCCAFQRGLLFPVCTPLP

SEQ ID NO: 4256 - protein, 350 aa, Homo Sapiens
MQRLGATLLCLLLAAAVPTAPAPAPTATSAPVKPGPALSYPQEEATLNEMFREVEELMEDTQHKLRSAVEEMEAEEAAAKASSEVNLANLPPSYHNETNTDTKVGNNTIHVHREIHKITNNQTGQMVFSETVITSVGDEEGRRSHECIIDEDCGPSMYCQFASFQYTCQPCRGQRMLCTRDSECCGDQLCVWGHCTKMATRGSNGTICDNQRDCQPGLCCAFQRGLLFPVCTPLPVEGELCHDPASRLLDLITWELEPDGALDRCPCASGLLCQPHSHSLVYVCKPTFVGSRDQDGEILLPREVPDEYEVGSFMEEVRQELEDLERSLTEEMALREPAAAAAALLGGEEI

SEQ ID NO: 4257 - protein, 350 aa, Homo Sapiens; identical to SEQ ID NO: 4256

SEQ ID NO: 4258 - protein, 364 aa, Homo Sapiens
MQRLGATLLCLLLAAAVPTAPAPAPTATSAPVKPGPALSYPQEEATLNEMFREVEELMEDTQHKLRSAVEEMEAEEAAAKASSEVNLANLPPSYHNETNTDTKVGNNTIHVHREIHKITNNQTGQMVFSETVITSVGDEEGRRSHECIIDEDCGPSMYCQFASFQYTCQPCRGQRMLCTRDSECCGDQLCVWGHCTKMATRGSNGTICDNQRDCQPGLCCAFQRGLLFPVCTPLPVEGELCHDPASRLLDLITWELEPDGALDRCPCASGLLCQPHRLPRLEPGFVPSLPSHSLVYVCKPTFVGSRDQDGEILLPREVPDEYEVGSFMEEVRQELEDLERSLTEEMALREPAAAAAALLGGEEI

SEQ ID NO: 4259 - protein, 224 aa, Homo Sapiens
MVAAVLLGLSWLCSPLGALVLDFNNIRSSADLHGARKGSQCLSDTDCNTRKFCLQPRDEKPFCATCRGLRRRCQRDAMCCPGTLCVNDVCTTMEDATPILERQLDEQDGTHAEGTTGHPVQENQPKRKPSIKKSQGRKGQEGESCLRTFDCGPGLCCARHFWTKICKPVLLEGQVCSRRGHKDTAQAPEIFQRCDCGPGLLCRSQLTSNRQHARLRVCQKIEKL

SEQ ID NO: 4260 - protein, 125 aa, Homo Sapiens
MDFRGLPGNYHKEENQEHQLGNNTLSSHLQIDKMTDNKTGEVLISENVVASIQPAEGSFEGDLKVPRMEEKEALVPIQKATDSFHTELHPRVAFWIIKLPRRRSHQDALEGGHWLSEKRHRLQAI

SEQ ID NO: 4261 - protein, 146 aa, Homo Sapiens
MDFRGLPGNYHKEENQEHQLGNNTLSSHLQIDKMTDNKTGEVLISENVVASIQPAEGSFEGDLKVPRMEEKEALVPIQKATDSFHTELHPRVAFWIIKLPRRRSHQDALEGGHWLSEKRHRLQAIRDGLRKGTHKDVLEEGTESSS

SEQ ID NO: 4262 - protein, 100 aa, Homo Sapiens
MEEKEALVPIQKATDSFHTELHPRVAFWIIKLPRRRSHQDALEGGHWLSEKRHRLQAIRDGLRKGTHKDVLEEGTESSSHSRLSPRKTHLLYILRPSRQL

SEQ ID NO: 4263 - protein, 242 aa, Homo Sapiens
MGEASPPAPARRHLLVLLLLLSTLVIPSAAAPIHDADAQESSLGLTGLQSLLQGFSRLFLKGNLLRGIDSLFSAPMDFRGLPGNYHKEENQEHQLGNNTLSSHLQIDKMTDNKTGEVLISENVVASIQPAEGSFEGDLKVPRMEEKEALVPIQKATDSFHTELHPRVAFWIIKLPRRRSHQDALEGGHWLSEKRHRLQAIRDGLRKGTHKDVLEEGTESSSHSRLSPRKTHLLYILRPSRQL

SEQ ID NO: 4264 - protein, 199 aa, Homo Sapiens
MGEASPPAPARRHLLVLLLLLSTLVIPSAAAPIHDADAQESSLGLTGLQSLLQGFSRLFLKGNLLRGIDSLFSAPMDFRGLPGNYHKEENQEHQLGNNTLSSHLQIDKVPRMEEKEALVPIQKATDSFHTELHPRVAFWIIKLPRRRSHQDALEGGHWLSEKRHRLQAIRDGLRKGTHKDVLEEGTESSSHSRLSPRKT

SEQ ID NO: 4265 - protein, 137 aa, Homo Sapiens
  misc_feature (1)..(1): Xaa can be any naturally occurring amino acid
XAAAPIHDADAQESSLGLTGLQSLLQGFSRLFLKVPRMEEKEALVPIQKATDSFHTELHPRVAFWIIKLPRRRSHQDALEGGHWLSEKRHRLQAIRDGLRKGTHKDVLEEGTESSSHSRLSPRKTHLLYILRPSRQL

SEQ ID NO: 4266 - protein, 724 aa, Homo Sapiens
MDCLCIVTTKKYRYQDEDTPPLEHSPAHLPNQANSPPVIVNTDTLEAPGYELQVNGTEGEMEYEEITLERGNSGLGFSIAGGTDNPHIGDDPSIFITKIIPGGAAAQDGRLRVNDSILFVNEVDVREVTHSAAVEALKEAGSIVRLYVMRRKPPAEKVMEIKLIKGPKGLGFSIAGGVGNQHIPGDNSIYVTKIIEGGAAHKDGRLQIGDKILAVNSVGLEDVMHEDAVAALKNTYDVVYLKVAKPSNAYLSDSYAPPDITTSYSQHLDNEISHSSYLGTDYPTAMTPTSPRRYSPVAKDLLGEEDIPREPRRIVIHRGSTGLGFNIVGGEDGEGIFISFILAGGPADLSGELRKGDQILSVNGVDLRNASHEQAAIALKNAGQTVTIIAQYKPEEYSRFEAKIHDLREQLMNSSLGSGTASLRSNPKRGFYIRALFDYDKTKDCGFLSQALSFRFGDVLHVIDASDEEWWQARRVHSDSETDDIGFIPSKRRVERREWSRLKAKDWGSSSGSQGREDSVLSYETVTQMEVHYARPIIILGPTKDRANDDLLSEFPDKFGSCVPHTTRPKREYEIDGRDYHFVSSREKMEKDIQAHKFIEAGQYNSHLYGTSVQSVREVAEQGKHCILDVSANAVRRLQAAHLHPIAIFIRPRSLENVLEINKRITEEQARKAFDRATKLEQEFTECFSAIVEGDSFEEIYHKVKRVIEDLSGPYIWVPARERL

SEQ ID NO: 4267 - protein, 721 aa, Homo Sapiens
MDCLCIVTTKKYRYQDEDTPPLEHSPAHLPNQANSPPVIVNTDTLEAPGYVNGTEGEMEYEEITLERGNSGLGFSIAGGTDNPHIGDDPSIFITKIIPGGAAAQDGRLRVNDSILFVNEVDVREVTHSAAVEALKEAGSIVRLYVMRRKPPAEKVMEIKLIKGPKGLGFSIAGGVGNQHIPGDNSIYVTKIIEGGAAHKDGRLQIGDKILAVNSVGLEDVMHEDAVAALKNTYDVVYLKVAKPSNAYLSDSYAPPDITTSYSQHLDNEISHSSYLGTDYPTAMTPTSPRRYSPVAKDLLGEEDIPREPRRIVIHRGSTGLGFNIVGGEDGEGIFISFILAGGPADLSGELRKGDQILSVNGVDLRNASHEQAAIALKNAGQTVTIIAQYKPEEYSRFEAKIHDLREQLMNSSLGSGTASLRSNPKRGFYIRALFDYDKTKDCGFLSQALSFRFGDVLHVIDASDEEWWQARRVHSDSETDDIGFIPSKRRVERREWSRLKAKDWGSSSGSQGREDSVLSYETVTQMEVHYARPIIILGPTKDRANDDLLSEFPDKFGSCVPHTTRPKREYEIDGRDYHFVSSREKMEKDIQAHKFIEAGQYNSHLYGTSVQSVREVAEQGKHCILDVSANAVRRLQAAHLHPIAIFIRPRSLENVLEINKRITEEQARKAFDRATKLEQEFTECFSAIVEGDSFEEIYHKVKRVIEDLSGPYIWVPARERL

SEQ ID NO: 4268 - protein, 296 aa, Homo Sapiens
MDCLCIVTTKKYRYQDEDTPPLEHSPAHLPNQANSPPVIVNTDTLEAPGYVNGTEGEMEYEEITLERGNSGLGFSIAGGTDNPHIGDDPSIFITKIIPGGAAAQDGRLRVNDSILFVNEVDVREVTHSAAVEALKEAGSIVRLYVMRRKPPAEKVMEIKLIKGPKGLGFSIAGGVGNQHIPGDNSIYVTKIIEGGAAHKDGRLQIGDKILAVNSVGLEDVMHEDAVAALKNTYDVVYLKVAKPSNAYLSDSYAPPDITTCESPSNTKVPHDPSRLTHDMQSHDIPVAVPLQIFPMK

SEQ ID NO: 4269 - protein, 234 aa, Homo Sapiens
MDCLCIVTTKKYRYQDEDTPPLEHSPAHLPNQVNAPELVHVAERNLSHLEAGHGVVGHAHLSPFKANSPPVIVNTDTLEAPGYVNGTEGEMEYEEITLERGNSGLGFSIAGGTDNPHIGDDPSIFITKIIPGGAAAQDGRLRVNDSILFVNEVDVREVTHSAAVEALKEAGSIVRLYVMRRKPPAEKVMEIKLIKGPKGLGFSIAGGVGNQHIPGDNSIYVTKIIEGGAAHKDG

SEQ ID NO: 4270 - protein, 91 aa, Homo Sapiens
MEYEEITLERGNSGLGFSIAGGTDNPHIGDDPSIFITKIIPGGAAAQDGRLRVNDSILFVNEVDVREVTHSAAVEALKEAGSIVRLYVMRR

SEQ ID NO: 4271 - protein, 116 aa, Homo Sapiens
MEYEEITLERGNSGLGFSIAGGTDNPHIGDDPSIFITKIIPGGAAAQDGRLRVNDSILFVNEVDVREVTHSAAVEALKEAGSIVRLYVMRRKPPAEKVMEIKLIKGPKGLGFSIAG

SEQ ID NO: 4272 - protein, 281 aa, Homo Sapiens
MPINGVNLAWKYRYQDEDTPPLEHSPAHLPNQVNAPELVHVAERNLSHLEAGHGVVGHAHLSPFKANSPPVIVNTDTLEAPGYELQVNGTEGEMEYEEITLERGNSGLGFSIAGGTDNPHIGDDPSIFITKIIPGGAAAQDGRLRVNDSILFVNEVDVREVTHSAAVEALKEAGSIVRLYVMRRKPPAEKVMEIKLIKGPKGLGFSIAGGVGNQHIPGDNSIYVTKIIEGGAAHKDGRLQIGDKILAVNSVGLEDVMHEDAVAALKNTYDVVYLKVAKPSN

SEQ ID NO: 4273 - protein, 767 aa, Homo Sapiens
MSQRPRAPRSALWLLAPPLLRWAPPLLTVLHSDLFQALLDILDYYEASLSESQKYRYQDEDTPPLEHSPAHLPNQANSPPVIVNTDTLEAPGYELQVNGTEGEMEYEEITLERGNSGLGFSIAGGTDNPHIGDDPSIFITKIIPGGAAAQDGRLRVNDSILFVNEVDVREVTHSAAVEALKEAGSIVRLYVMRRKPPAEKVMEIKLIKGPKGLGFSIAGGVGNQHIPGDNSIYVTKIIEGGAAHKDGRLQIGDKILAVNSVGLEDVMHEDAVAALKNTYDVVYLKVAKPSNAYLSDSYAPPDITTSYSQHLDNEISHSSYLGTDYPTAMTPTSPRRYSPVAKDLLGEEDIPREPRRIVIHRGSTGLGFNIVGGEDGEGIFISFILAGGPADLSGELRKGDQILSVNGVDLRNASHEQAAIALKNAGQTVTIIAQYKPEEYSRFEAKIHDLREQLMNSSLGSGTASLRSNPKRGFYIRALFDYDKTKDCGFLSQALSFRFGDVLHVIDASDEEWWQARRVHSDSETDDIGFIPSKRRVERREWSRLKAKDWGSSSGSQGREDSVLSYETVTQMEVHYARPIIILGPTKDRANDDLLSEFPDKFGSCVPHTTRPKREYEIDGRDYHFVSSREKMEKDIQAHKFIEAGQYNSHLYGTSVQSVREVAEQGKHCILDVSANAVRRLQAAHLHPIAIFIRPRSLENVLEINKRITEEQARKAFDRATKLEQEFTECFSAIVEGDSFEEIYHKVKRVIEDLSGPYIWVPARERL

SEQ ID NO: 4274 - protein, 85 aa, Homo Sapiens
  misc_feature (1)..(1): Xaa can be any naturally occurring amino acid
XGPTKDRANDDLLSEFPDKFGSCVPHTTRPKREYEIDGRDYHFVSSREKMEKDIQAHKFIEAGQYNSHLYGTSVQSVREVAEQRD

SEQ ID NO: 4275 - protein, 97 aa, Homo Sapiens
MTATEALLRVLLLLLAFGHSTYGAECFPACNPQNGFCEDDNVCRCQPGWQGPLCDQCVTSPGCLHGLCGEPGQCICTDGWDGELCDRDVRACSSAPC

SEQ ID NO: 4276 - protein, 310 aa, Homo Sapiens
MTATEALLRVLLLLLAFGHSTYGAECFPACNPQNGFCEDDNVCRCQPGWQGPLCDQCVTSPGCLHGLCGEPGQCICTDGWDGELCDRDVRACSSAPCANNRTCVSLDDGLYECSCAPGYSGKDCQKKDGPCVINGSPCQHGGTCVDDEGRASHASCLCPPGFSGNFCEIVANSCTPNPCENDGVCTDIGGDFRCRCPAGFIDKTCSRPVTNCASSPCQNGGTCLQHTQGQAICFTILGVLTSLVVLGTVGIVFLNKCETWVSNLRYNHMLRKKKNLLLQYNSGEDLAVNIIFPEKIDMTTFSKEAGDEEI

SEQ ID NO: 4277 - protein, 383 aa, Homo Sapiens
MTATEALLRVLLLLLAFGHSTYGAECFPACNPQNGFCEDDNVCRCQPGWQGPLCDQCVTSPGCLHGLCGEPGQCICTDGWDGELCDRDVRACSSAPCANNRTCVSLDDGLYECSCAPGYSGKDCQKKDGPCVINGSPCQHGGTCVDDEGRASHASCLCPPGFSGNFCEIVANSCTPNPCENDGVCTDIGGDFRCRCPAGFIDKTCSRPVTNCASSPCQNGGTCLQHTQVSYECLCKPEFTGLTCVKKRALSPQQVTRLPSGYGLAYRLTPGVHELPVQQPEHRILKVSMKELNKKTPLLTEGQAICFTILGVLTSLVVLGTVGIVFLNKCETWVSNLRYNHMLRKKKNLLLQYNSGEDLAVNIIFPEKIDMTTFSKEAGDEEI

SEQ ID NO: 4278 - protein, 136 aa, Homo Sapiens
MTATEALLRVLLLLLAFGHSTYGAECFPACNPQNGFCEDDNVCRCQPGWQGPLCDQCVTSPGCLHGLCGEPGQCICTDGWDGELCDRGWHSPLFTSALRPYLPALAPTTSSQSPVAGVPHFLIPAHSVPCILKICL

SEQ ID NO: 4279 - protein, 54 aa, Homo Sapiens
MGSRCALALAVLSALLCQVWSSGVFELKLQEFVNKKGLLGNRNCCRGGAGPPPC

SEQ ID NO: 4280 - protein, 723 aa, Homo Sapiens
MGSRCALALAVLSALLCQVWSSGVFELKLQEFVNKKGLLGNRNCCRGGAGPPPCACRTFFRVCLKHYQASVSPEPPCTYGSAVTPVLGVDSFSLPDGGGADSAFSNPIRFPFGFTWPGTFSLIIEALHTDSPDDLATENPERLISRLATQRHLTVGEEWSQDLHSSGRTDLKYSYRFVCDEHYYGEGCSVFCRPRDDAFGHFTCGERGEKVCNPGWKGPYCTEPICLPGCDEQHGFCDKPGECKCRVGWQGRYCDECIRYPGCLHGTCQQPWQCNCQEGWGGLFCNQDLNYCTHHKPCKNGATCTNTGQGSYTCSCRPGYTGATCELGIDECDPSPCKNGGSCTDLENSYSCTCPPGFYGKICELSAMTCADGPCFNGGRCSDSPDGGYSCRCPVGYSGFNCEKKIDYCSSSPCSNGAKCVDLGDAYLCRCQAGFSGRHCDDNVDDCASSPCANGGTCRDGVNDFSCTCPPGYTGRNCSAPVSRCEHAPCHNGATCHERGHRYVCECARGYGGPNCQFLLPELPPGPAVVDLTEKLEGQGGPFPWVAVCAGVILVLMLLLGCAAVVVCVRLRLQKHRPPADPCRGETETMNNLANCQREKDISVSIIGATQIKNTNKKADFHGDHSADKNGFKARYPAVDYNLVQDLKGDDTAVRDAHSKRDTKCQPQGSSGEEKGTPTTLRGGEASERKRPDSGCSTSKDTKYQSVYVISEEKDECVIATEV

SEQ ID NO: 4281 - protein, 220 aa, Homo Sapiens
MVSPRMSGLLSQTVILALIFLPQTRPAGVFELQIHSFGPGPGPGAPRSPCSARLPCRLFFRVCLKPGLSEEAAESPCALGAALSARGPVYTEQPGAPAPDLPLPDGLLQVPFRDAWPGTFSFIIETWREELGDQIGGGLCLDLGHALRCRCRAGFAGPRCEHDLDDCAGRACANGGTCVEGGGAHRCSCALGFGGRDCRERADPCAARPCAHGGRCYAHF

SEQ ID NO: 4282 - protein, 618 aa, Homo Sapiens
MVSPRMSGLLSQTVILALIFLPQTRPAGVFELQIHSFGPGPGPGAPRSPCSARLPCRLFFRVCLKPGLSEEAAESPCALGAALSARGPVYTEQPGAPAPDLPLPDGLLQVPFRDAWPGTFSFIIETWREELGDQIGGPAWSLLARVAGRRRLAAGGPWARDIQRAGAWELRFSYRARCEPPAVGTACTRLCRPRSAPSRCGPGLRPCAPLEDECEAPLVCRAGCSPEHGFCEQPGECRCLEGWTGPLCTVPVSTSSCLSPRGPSSATTGCLVPGPGPCDGNPCANGGSCSETPRSFECTCPRGFYGLRCEVSGVTCADGPCFNGGLCVGGADPDSAYICHCPPGFQGSNCEKRVDRCSLQPCRNGGLCLDLGHALRCRCRAGFAGPRCEHDLDDCAGRACANGGTCVEGGGAHRCSCALGFGGRDCRERADPCAARPCAHGGRCYAHFSGLVCACAPGYMGARCEFPVHPDGASALPAAPPGLRPGDPQRYLLPPALGLLVAAGVAGAALLLVHVRRRGHSQDAGSRLLAGTPEPSVHALPDALNNLRTQEGSGDGPSSSVDWNRPEDVDPQGIYVISAPSIYAREVATPLFPPLHTGRAGQRQHLLFPYPSSILSVK

SEQ ID NO: 4283 - protein, 587 aa, Homo Sapiens
MVSPRMSGLLSQTVILALIFLPQTRPAGVFELQIHSFGPGPGPGAPRSPCSARLPCRLFFRVCLKPGLSEEAAESPCALGAALSARGPVYTEQPGAPAPDLPLPDGLLQVPFRDAWPGTFSFIIETWREELGDQIGGPAWSLLARVAGRRRLAAGGPWARDIQRAGAWELRFSYRARCEPPAVGTACTRLCRPRSAPSRCGPGLRPCAPLEDECEAPLVCRAGCSPEHGFCEQPGECRCLEGWTGPLCTVPVSTSSCLSPRGPSSATTGCLVPGPGPCDGNPCANGGSCSETPRSFECTCPRGFYGLRCEVSGVTCADGPCFNGGLCVGGADPDSAYICHCPPGFQGSNCEKRVDRCSLQPCRNGGLCLDLGHALRCRCRAGFAGPRCEHDLDDCAGRACANGGTCVEGGGAHRCSCALGFGGRDCRERADPCAARPCAHGGRCYAHFSGLVCACAPGYMGARCEFPVHPDGASALPAAPPGLRPGDPQRYLLPPALGLLVAAGVAGAALLLVHVRRRGHSQDAGSRLLAGTPEPSVHALPDALNNLRTQEGSGDGPSSSVDWNRPEDVDPQGIYVISAPSIYAREA

SEQ ID NO: 4284 - protein, 1785 aa, Homo Sapiens
MGISTVILEMCLLWGQVLSTGGWIPRTTDYASLIPSEVPLDPTVAEGSPFPSESTLESTVAEGSPISLESTLESTVAEGSLIPSESTLESTVAEGSDSGLALRLVNGDGRCQGRVEILYRGSWGTVCDDSWDTNDANVVCRQLGCGWAMSAPGNAWFGQGSGPIALDDVRCSGHESYLWSCPHNGWLSHNCGHGEDAGVICSAAQPQSTLRPESWPVRISPPVPTEGSESSLALRLVNGGDRCRGRVEVLYRGSWGTVCDDYWDTNDANVVCRQLGCGWAMSAPGNAQFGQGSGPIVLDDVRCSGHESYLWSCPHNGWLTHNCGHSEDAGVICSAPQSRPTPSPDTWPTSHASTAGPESSLALRLVNGGDRCQGRVEVLYRGSWGTVCDDSWDTSDANVVCRQLGCGWATSAPGNARFGQGSGPIVLDDVRCSGYESYLWSCPHNGWLSHNCQHSEDAGVICSAAHSWSTPSPDTLPTITLPASTVGSESSLALRLVNGGDRCQGRVEVLYQGSWGTVCDDSWDTNDANVVCRQLGCGWAMSAPGNARFGQGSGPIVLDDVRCSGHESYLWSCPHNGWLSHNCGHSEDAGVICSASQSRPTPSPDTWPTSHASTAGSESSLALRLVNGGDRCQGRVEVLYRGSWGTVCDDYWDTNDANVVCRQLGCGWAMSAPGNARFGQGSGPIVLDDVRCSGHESYLWSCPHNGWLSHNCGHHEDAGVICSASQSQPTPSPDTWPTSHASTAGSESSLALRLVNGGDRCQGRVEVLYRGSWGTVCDDYWDTNDANVVCRQLGCGWATSAPGNARFGQGSGPIVLDDVRCSGHESYLWSCPHNGWLSHNCGHHEDAGVICSASQSQPTPSPDTWPTSRASTAGSESTLALRLVNGGDRCRGRVEVLYQGSWGTVCDDYWDTNDANVVCRQLGCGWAMSAPGNAQFGQGSGPIVLDDVRCSGHESYLWSCPHNGWLSHNCGHHEDAGVICSAAQSQSTPRPDTWLTTNLPALTVGSESSLALRLVNGGDRCRGRVEVLYRGSWGTVCDDSWDTNDANVVCRQLGCGWAMSAPGNARFGQGSGPIVLDDVRCSGNESYLWSCPHKGWLTHNCGHHEDAGVICSATQINSTTTDWWHPTTTTTARPSSNCGGFLFYASGTFSSPSYPAYYPNNAKCVWEIEVNSGYRINLGFSNLKLEAHHNCSFDYVEIFDGSLNSSLLLGKICNDTRQIFTSSYNRMTIHFRSDISFQNTGFLAWYNSFPSDATLRLVNLNSSYGLCAGRVEIYHGGTWGTVCDDSWTIQEAEVVCRQLGCGRAVSALGNAYFGSGSGPITLDDVECSGTESTLWQCRNRGWFSHNCNHREDAGVICSGNHLSTPAPFLNITRPNTDYSCGGFLSQPSGDFSSPFYPGNYPNNAKCVWDIEVQNNYRVTVIFRDVQLEGGCNYDYIEVFDGPYRSSPLIARVCDGARGSFTSSSNFMSIRFISDHSITRRGFRAEYYSSPSNDSTNLLCLPNHMQASVSRSYLQSLGFSASDLVISTWNGYYECRPQITPNLVIFTIPYSGCGTFKQADNDTIDYSNFLTAAVSGGIIKRRTDLRIHVSCRMLQNTWVDTMYIANDTIHVANNTIQVEEVQYGNFDVNISFYTSSSFLYPVTSRPYYVDLNQDLYVQAEILHSDAVLTLFVDTCVASPYSNDFTSLTYDLIRSGCVRDDTYGPYSSPSLRIARFRFRAFHFLNRFPSVYLRCKMVVCRAYDPSSRCYRGCVLRSKRDVGSYQEKVDVVLGPIQLQTPPRREEEPR

SEQ ID NO: 4285 - protein, 2413 aa, Homo Sapiens
MGISTVILEMCLLWGQVLSTGGWIPRTTDYASLIPSEVPLDPTVAEGSPFPSESTLESTVAEGSPISLESTLESTVAEGSLIPSESTLESTVAEGSDSGLALRLVNGDGRCQGRVEILYRGSWGTVCDDSWDTNDANVVCRQLGCGWAMSAPGNAWFGQGSGPIALDDVRCSGHESYLWSCPHNGWLSHNCGHGEDAGVICSAAQPQSTLRPESWPVRISPPVPTEGSESSLALRLVNGGDRCRGRVEVLYRGSWGTVCDDYWDTNDANVVCRQLGCGWAMSAPGNAQFGQGSGPIVLDDVRCSGHESYLWSCPHNGWLTHNCGHSEDAGVICSAPQSRPTPSPDTWPTSHASTAGPESSLALRLVNGGDRCQGRVEVLYRGSWGTVCDDSWDTSDANVVCRQLGCGWATSAPGNARFGQGSGPIVLDDVRCSGYESYLWSCPHNGWLSHNCQHSEDAGVICSAAHSWSTPSPDTLPTITLPASTVGSESSLALRLVNGGDRCQGRVEVLYRGSWGTVCDDSWDTNDANVVCRQLGCGWAMLAPGNARFGQGSGPIVLDDVRCSGNESYLWSCPHNGWLSHNCGHSEDAGVICSGPESSLALRLVNGGDRCQGRVEVLYRGSWGTVCDDSWDTNDANVVCRQLGCGWATSAPGNARFGQGSGPIVLDDVRCSGHESYLWSCPNNGWLSHNCGHHEDAGVICSAAQSRSTPRPDTLSTITLPPSTVGSESSLTLRLVNGSDRCQGRVEVLYRGSWGTVCDDSWDTNDANVVCRQLGCGWATSAPGNARFGQGSGPIVLDDVRCSGHESYLWSCPHNGWLSHNCGHHEDAGVICSVSQSRPTPSPDTWPTSHASTAGPESSLALRLVNGGDRCQGRVEVLYRGSWGTVCDDSWDTSDANVVCRQLGCGWATSAPGNARFGQGSGPIVLDDVRCSGYESYLWSCPHNGWLSHNCQHSEDAGVICSAAHSWSTPSPDTLPTITLPASTVGSESSLALRLVNGGDRCQGRVEVLYQGSWGTVCDDSWDTNDANVVCRQLGCGWAMSAPGNARFGQGSGPIVLDDVRCSGHESYLWSCPHNGWLSHNCGHSEDAGVICSASQSRPTPSPDTWPTSHASTAGSESSLALRLVNGGDRCQGRVEVLYRGSWGTVCDDYWDTNDANVVCRQLGCGWAMSAPGNARFGQGSGPIVLDDVRCSGHESYLWSCPHNGWLSHNCGHHEDAGVICSASQSQPTPSPDTWPTSHASTAGSESSLALRLVNGGDRCQGRVEVLYRGSWGTVCDDYWDTNDANVVCRQLGCGWATSAPGNARFGQGSGPIVLDDVRCSGHESYLWSCPHNGWLSHNCGHHEDAGVICSASQSQPTPSPDTWPTSHASTAGSESSLALRLVNGGDRCQGRVEVLYRGSWGTVCDDYWDTNDANVVCRQLGCGWATSAPGNARFGQGSGPIVLDDVRCSGHESYLWSCPHNGWLSHNCGHHEDAGVICSASQSQPTPSPDTWPTSRASTAGSESTLALRLVNGGDRCRGRVEVLYQGSWGTVCDDYWDTNDANVVCRQLGCGWAMSAPGNAQFGQGSGPIVLDDVRCSGHESYLWSCPHNGWLSHNCGHHEDAGVICSAAQSQSTPRPDTWLTTNLPALTVGSESSLALRLVNGGDRCRGRVEVLYRGSWGTVCDDSWDTNDANVVCRQLGCGWAMSAPGNARFGQGSGPIVLDDVRCSGNESYLWSCPHKGWLTHNCGHHEDAGVICSATQINSTTTDWWHPTTTTTARPSSNCGGFLFYASGTFSSPSYPAYYPNNAKCVWEIEVNSGYRINLGFSNLKLEAHHNCSFDYVEIFDGSLNSSLLLGKICNDTRQIFTSSYNRMTIHFRSDISFQNTGFLAWYNSFPSDATLRLVNLNSSYGLCAGRVEIYHGGTWGTVCDDSWTIQEAEVVCRQLGCGRAVSALGNAYFGSGSGPITLDDVECSGTESTLWQCRNRGWFSHNCNHREDAGVICSGNHLSTPAPFLNITRPNTDYSCGGFLSQPSGDFSSPFYPGNYPNNAKCVWDIEVQNNYRVTVIFRDVQLEGGCNYDYIEVFDGPYRSSPLIARVCDGARGSFTSSSNFMSIRFISDHSITRRGFRAEYYSSPSNDSTNLLCLPNHMQASVSRSYLQSLGFSASDLVISTWNGYYECRPQITPNLVIFTIPYSGCGTFKQADNDTIDYSNFLTAAVSGGIIKRRTDLRIHVSCRMLQNTWVDTMYIANDTIHVANNTIQVEEVQYGNFDVNISFYTSSSFLYPVTSRPYYVDLNQDLYVQAEILHSDAVLTLFVDTCVASPYSNDFTSLTYDLIRSGCVRDDTYGPYSSPSLRIARFRFRAFHFLNRFPSVYLRCKMVVCRAYDPSSRCYRGCVLRSKRDVGSYQEKVDVVLGPIQLQTPPRREEEPR

SEQ ID NO: 4286 - protein, 2403 aa, Homo Sapiens
MGISTVILEMCLLWGQVLSTGGWIPRTTDYASLIPSEVPLDPTVAEGSPFPSESTLESTVAEGSPISLESTLESTVAEGSLIPSESTLESTVAEGSDSGLALRLVNGDGRCQGRVEILYRGSWGTVCDDSWDTNDANVVCRQLGCGWAMSAPGNAWFGQGSGPIALDDVRCSGHESYLWSCPHNGWLSHNCGHGEDAGVICSAAQPQSTLRPESWPVRISPPVPTEGSESSLALRLVNGGDRCRGRVEVLYRGSWGTVCDDYWDTNDANVVCRQLGCGWAMSAPGNAQFGQGSGPIVLDDVRCSGHESYLWSCPHNGWLTHNCGHSEDAGVICSAPQSRPTPSPDTWPTSHASTAGPESSLALRLVNGGDRCQGRVEVLYRGSWGTVCDDSWDTSDANVVCRQLGCGWATSAPGNARFGQGSGPIVLDDVRCSGYESYLWSCPHNGWLSHNCQHSEDAGVICSDTLPTITLPASTVGSESSLALRLVNGGDRCQGRVEVLYRGSWGTVCDDSWDTNDANVVCRQLGCGWAMLAPGNARFGQGSGPIVLDDVRCSGNESYLWSCPHNGWLSHNCGHSEDAGVICSGPESSLALRLVNGGDRCQGRVEVLYRGSWGTVCDDSWDTNDANVVCRQLGCGWATSAPGNARFGQGSGPIVLDDVRCSGHESYLWSCPNNGWLSHNCGHHEDAGVICSAAQSRSTPRPDTLSTITLPPSTVGSESSLTLRLVNGSDRCQGRVEVLYRGSWGTVCDDSWDTNDANVVCRQLGCGWATSAPGNARFGQGSGPIVLDDVRCSGHESYLWSCPHNGWLSHNCGHHEDAGVICSVSQSRPTPSPDTWPTSHASTAGPESSLALRLVNGGDRCQGRVEVLYRGSWGTVCDDSWDTSDANVVCRQLGCGWATSAPGNARFGQGSGPIVLDDVRCSGYESYLWSCPHNGWLSHNCQHSEDAGVICSAAHSWSTPSPDTLPTITLPASTVGSESSLALRLVNGGDRCQGRVEVLYQGSWGTVCDDSWDTNDANVVCRQLGCGWAMSAPGNARFGQGSGPIVLDDVRCSGHESYLWSCPHNGWLSHNCGHSEDAGVICSASQSRPTPSPDTWPTSHASTAGSESSLALRLVNGGDRCQGRVEVLYRGSWGTVCDDYWDTNDANVVCRQLGCGWAMSAPGNARFGQGSGPIVLDDVRCSGHESYLWSCPHNGWLSHNCGHHEDAGVICSASQSQPTPSPDTWPTSHASTAGSESSLALRLVNGGDRCQGRVEVLYRGSWGTVCDDYWDTNDANVVCRQLGCGWATSAPGNARFGQGSGPIVLDDVRCSGHESYLWSCPHNGWLSHNCGHHEDAGVICSASQSQPTPSPDTWPTSHASTAGSESSLALRLVNGGDRCQGRVEVLYRGSWGTVCDDYWDTNDANVVCRQLGCGWATSAPGNARFGQGSGPIVLDDVRCSGHESYLWSCPHNGWLSHNCGHHEDAGVICSASQSQPTPSPDTWPTSRASTAGSESTLALRLVNGGDRCRGRVEVLYQGSWGTVCDDYWDTNDANVVCRQLGCGWAMSAPGNAQFGQGSGPIVLDDVRCSGHESYLWSCPHNGWLSHNCGHHEDAGVICSAAQSQSTPRPDTWLTTNLPALTVGSESSLALRLVNGGDRCRGRVEVLYRGSWGTVCDDSWDTNDANVVCRQLGCGWAMSAPGNARFGQGSGPIVLDDVRCSGNESYLWSCPHKGWLTHNCGHHEDAGVICSATQINSTTTDWWHPTTTTTARPSSNCGGFLFYASGTFSSPSYPAYYPNNAKCVWEIEVNSGYRINLGFSNLKLEAHHNCSFDYVEIFDGSLNSSLLLGKICNDTRQIFTSSYNRMTIHFRSDISFQNTGFLAWYNSFPSDATLRLVNLNSSYGLCAGRVEIYHGGTWGTVCDDSWTIQEAEVVCRQLGCGRAVSALGNAYFGSGSGPITLDDVECSGTESTLWQCRNRGWFSHNCNHREDAGVICSGNHLSTPAPFLNITRPNTDYSCGGFLSQPSGDFSSPFYPGNYPNNAKCVWDIEVQNNYRVTVIFRDVQLEGGCNYDYIEVFDGPYRSSPLIARVCDGARGSFTSSSNFMSIRFISDHSITRRGFRAEYYSSPSNDSTNLLCLPNHMQASVSRSYLQSLGFSASDLVISTWNGYYECRPQITPNLVIFTIPYSGCGTFKQADNDTIDYSNFLTAAVSGGIIKRRTDLRIHVSCRMLQNTWVDTMYIANDTIHVANNTIQVEEVQYGNFDVNISFYTSSSFLYPVTSRPYYVDLNQDLYVQAEILHSDAVLTLFVDTCVASPYSNDFTSLTYDLIRSGCVRDDTYGPYSSPSLRIARFRFRAFHFLNRFPSVYLRCKMVVCRAYDPSSRCYRGCVLRSKRDVGSYQEKVDVVLGPIQLQTPPRREEEPR

SEQ ID NO: 4287 - protein, 2542 aa, Homo Sapiens
MGISTVILEMCLLWGQVLSTGGWIPRTTDYASLIPSEVPLDPTVAEGSPFPSESTLESTVAEGSPISLESTLESTVAEGSLIPSESTLESTVAEGSDSGLALRLVNGDGRCQGRVEILYRGSWGTVCDDSWDTNDANVVCRQLGCGWAMSAPGNAWFGQGSGPIALDDVRCSGHESYLWSCPHNGWLSHNCGHGEDAGVICSAAQPQSTLRPESWPVRISPPVPTEGSESSLALRLVNGGDRCRGRVEVLYRGSWGTVCDDYWDTNDANVVCRQLGCGWAMSAPGNAQFGQGSGPIVLDDVRCSGHESYLWSCPHNGWLTHNCGHSEDAGVICSAPQSRPTPSPDTWPTSHASTAGPESSLALRLVNGGDRCQGRVEVLYRGSWGTVCDDSWDTSDANVVCRQLGCGWATSAPGNARFGQGSGPIVLDDVRCSGYESYLWSCPHNGWLSHNCQHSEDAGVICSAAHSWSTPSPDTLPTITLPASTVGSESSLALRLVNGGDRCQGRVEVLYRGSWGTVCDDSWDTNDANVVCRQLGCGWAMLAPGNARFGQGSGPIVLDDVRCSGNESYLWSCPHNGWLSHNCGHSEDAGVICSGPESSLALRLVNGGDRCQGRVEVLYRGSWGTVCDDSWDTNDANVVCRQLGCGWATSAPGNARFGQGSGPIVLDDVRCSGHESYLWSCPNNGWLSHNCGHHEDAGVICSAAQSRSTPRPDTLSTITLPPSTVGSESSLTLRLVNGSDRCQGRVEVLYRGSWGTVCDDSWDTNDANVVCRQLGCGWATSAPGNARFGQGSGPIVLDDVRCSGHESYLWSCPHNGWLSHNCGHHEDAGVICSVSQSRPTPSPDTWPTSHASTAGPESSLALRLVNGGDRCQGRVEVLYRGSWGTVCDDSWDTSDANVVCRQLGCGWATSAPGNARFGQGSGPIVLDDVRCSGYESYLWSCPHNGWLSHNCQHSEDAGVICSAAHSWSTPSPDTLPTITLPASTVGSESSLALRLVNGGDRCQGRVEVLYQGSWGTVCDDSWDTNDANVVCRQLGCGWAMSAPGNARFGQGSGPIVLDDVRCSGHESYLWSCPHNGWLSHNCGHSEDAGVICSASQSRPTPSPDTWPTSHASTAGSESSLALRLVNGGDRCQGRVEVLYRGSWGTVCDDYWDTNDANVVCRQLGCGWAMSAPGNARFGQGSGPIVLDDVRCSGHESYLWSCPHNGWLSHNCGHHEDAGVICSASQSQPTPSPDTWPTSHASTAGSESSLALRLVNGGDRCQGRVEVLYRGSWGTVCDDYWDTNDANVVCRQLGCGWATSAPGNARFGQGSGPIVLDDVRCSGHESYLWSCPHNGWLSHNCGHHEDAGVICSASQSQPTPSPDTWPTSHASTAGSESSLALRLVNGGDRCQGRVEVLYRGSWGTVCDDYWDTNDANVVCRQLGCGWATSAPGNARFGQGSGPIVLDDVRCSGHESYLWSCPHNGWLSHNCGHHEDAGVICSASQSQPTPSPDTWPTSHASTAGSESSLALRLVNGGDRCQGRVEVLYRGSWGTVCDDYWDTNDANVVCRQLGCGWATSAPGNARFGQGSGPIVLDDVRCSGHESYLWSCPHNGWLSHNCGHHEDAGVICSASQSQPTPSPDTWPTSRASTAGSESTLALRLVNGGDRCRGRVEVLYQGSWGTVCDDYWDTNDANVVCRQLGCGWAMSAPGNAQFGQGSGPIVLDDVRCSGHESYLWSCPHNGWLSHNCGHHEDAGVICSAAQSQSTPRPDTWLTTNLPALTVGSESSLALRLVNGGDRCRGRVEVLYRGSWGTVCDDSWDTNDANVVCRQLGCGWAMSAPGNARFGQGSGPIVLDDVRCSGNESYLWSCPHKGWLTHNCGHHEDAGVICSATQINSTTTDWWHPTTTTTARPSSNCGGFLFYASGTFSSPSYPAYYPNNAKCVWEIEVNSGYRINLGFSNLKLEAHHNCSFDYVEIFDGSLNSSLLLGKICNDTRQIFTSSYNRMTIHFRSDISFQNTGFLAWYNSFPSDATLRLVNLNSSYGLCAGRVEIYHGGTWGTVCDDSWTIQEAEVVCRQLGCGRAVSALGNAYFGSGSGPITLDDVECSGTESTLWQCRNRGWFSHNCNHREDAGVICSGNHLSTPAPFLNITRPNTDYSCGGFLSQPSGDFSSPFYPGNYPNNAKCVWDIEVQNNYRVTVIFRDVQLEGGCNYDYIEVFDGPYRSSPLIARVCDGARGSFTSSSNFMSIRFISDHSITRRGFRAEYYSSPSNDSTNLLCLPNHMQASVSRSYLQSLGFSASDLVISTWNGYYECRPQITPNLVIFTIPYSGCGTFKQADNDTIDYSNFLTAAVSGGIIKRRTDLRIHVSCRMLQNTWVDTMYIANDTIHVANNTIQVEEVQYGNFDVNISFYTSSSFLYPVTSRPYYVDLNQDLYVQAEILHSDAVLTLFVDTCVASPYSNDFTSLTYDLIRSGCVRDDTYGPYSSPSLRIARFRFRAFHFLNRFPSVYLRCKMVVCRAYDPSSRCYRGCVLRSKRDVGSYQEKVDVVLGPIQLQTPPRREEEPR

SEQ ID NO: 4288 - protein, 1785 aa, Homo Sapiens; identical to SEQ ID NO: 4284

SEQ ID NO: 4289 - protein, 2403 aa, Homo Sapiens; identical to SEQ ID NO: 4286

SEQ ID NO: 4290 - protein, 2413 aa, Homo Sapiens; identical to SEQ ID NO: 4285

SEQ ID NO: 4291 - protein, 33 aa, Homo Sapiens
MFNFDTFWKNFKSKLGFINWDAINKDQRSSRIP

SEQ ID NO: 4292 - protein, 33 aa, Homo Sapiens; identical to SEQ ID NO: 4291

SEQ ID NO: 4293 - protein, 95 aa, Homo Sapiens
MFNFDTFWKNFKSKLGFINWDAINKNQVPPPSTRALLYFSRLWEDFKQNTPFLNWKAIIEGADASSLQKRAGRDDQNYNYNQHAYPTAYGGKYSV

SEQ ID NO: 4294 - protein, 123 aa, Homo Sapiens
MFNFDTFWKNFKSKLGFINWDAINKNQVPPPSTRALLYFSRLWEDFKQNTPFLNWKAIIEGADASSLQKRAGRDDQNYNYNQHAYPTAYGGKYSVKTPAKGGVSPSSSASRVQPGLLQWVKFW

SEQ ID NO: 4295 - protein, 123 aa, Homo Sapiens; identical to SEQ ID NO: 4294

SEQ ID NO: 4296 - protein, 476 aa, Homo Sapiens
MKFQGPLACLLLALCLGSGEAGPLQSGEESTGTNIGEALGHGLGDALSEGVGKAIGKEAGGAAGSKVSEALGQGTREAVGTGVRQVPGFGVADALGNRVGEAAHALGNTGHEIGRQAEDVIRHGADAVRGSWQGVPGHNGAWETSGGHGIFGSQGGLGGQGQGNPGGLGTPWVHGYPGNSAGSFGMNPQGAPWGQGGNGGPPNFGTNTQGAVAQPGYGSVRASNQNEGCTNPPPSGSGGGSSNSGGGSGSQSGSSGSGSNGDNNNGSSSGGSSSGSSSGGSSGGSSGGSSGNSGGSRGDSGSESSWGSSTGSSSGNHGGSGGGNGHKPGCEKPGNEARGSGESGIQNSETSPGMFNFDTFWKNFKSKLGFINWDAINKNQVPPPSTRALLYFSRLWEDFKQNTPFLNWKAIIEGADASSLQKRAGRDDQNYNYNQHAYPTAYGGKYSVKTPAKGGVSPSSSASRVQPGLLQWVKFW

SEQ ID NO: 4297 - protein, 386 aa, Homo Sapiens
MKFQGPLACLLLALCLGSGEAGPLQSGEESTGTNIGEALGHGLGDALSEGVGKAIGKEAGGAAGSKVSEALGQGTREAVGTGVRQVPGFGVADALGNRVGEAAHALGNTGHEIGRQAEDVIRHGADAVRGSWQGVPGHNGAWETSGGHGIFGSQGGLGGQGQGNPGGLGTPWVHGYPGNSAGSFGMNPQGAPWGQGGNGGPPNFGTNTQGAVAQPGYGSVRASNQNEGCTNPPPSGSGGGSSNSGGGSGSQSGSSGSGSNGDNNNGSSSGGSSSGSSSGGSSGGSSGGSSGNSGGSRGDSGSESSWGSSTGSSSGNHGGSGGGNGHKPGCEKPGNEARGSGESGIQNSETSPGMFNFDTFWKNFKSKLGFINWDAINKDQRSSRIP

SEQ ID NO: 4298 - protein, 436 aa, Homo Sapiens
MKFQGPLACLLLALCLGSGEAGPLQSGEESTGTNIGEALGHGLGDALSEGVGKAIGKEAGGAAGSKVSEALGQGTREAVGTGVRQVPGFGVADALGNRVGEAAHALGNTGHEIGRQAEDVIRHGADAVRGSWQGVPGHNGAWETSGGHGIFGSQGGLGGQGQGNPGGLGTPWVHGYPGNSAGSFGMNPQGAPWGQGGNGGPPNFGTNTQGAVAQPGYGSVRASNQNEGCTNPPPSGSGGGSSNSGGGSGSQSGSSGSGSNGDNNNGSSSGGSSSGSSSGGSSGGSSGGSSGNSGGSRGDSGSESSWGSSTGSSSGNHGGSGGGNGHKPGCEKPGNEARGSGESGIQGFRGQGVSSNMREISKEGNRLLGGSGDNYRGQGSSWGSGGGDAVGGVNTVNSETSPGMFNFDTFWKNFKSKLGFINWDAINKDQRSSRIP

SEQ ID NO: 4299 - protein, 398 aa, Homo Sapiens
MKFQGPLACLLLALCLGSGEAGPLQSGEESTGTNIGEALGHGLGDALSEGVGKAIGKEAGGAAGSKVSEALGQGTREAVGTGVRQVPGFGVADALGNRVGEAAHALGNTGHEIGRQAEDVIRHGADAVRGSWQGVPGHNGAWETSGGHGIFGSQGGLGGQGQGNPGGLGTPWVHGYPGNSAGSFGMNPQGAPWGQGGNGGPPNFGTNTQGAVAQPGYGSVRASNQNEGCTNPPPSGSGGGSSNSGGGSGSQSGSSGSGSNGDNNNGSSSGGSSSGSSSGGSSGGSSGGSSGNSGGSRGDSGSESSWGSSTGSSSGNHGGSGGGNGHKPGCEKPGNEARGSGESGIQGFRGQGVSSNMRNSETSPGMFNFDTFWKNFKSKLGFINWDAINKDQRSSRIP

SEQ ID NO: 4300 - protein, 369 aa, Homo Sapiens
MKFQGPLACLLLALCLGSGEAGPLQSGEESTGTNIGEALGHGLGDALSEGVGKAIGKEAGGAAGSKVSEALGQGTREAVGTGVRQVPGFGVADALGNRVGEAAHALGNTGHEIGRQAEDVIRHGADAVRGSWQGVPGHNGAWETSGGHGIFGSQGGLGGQGQGNPGGLGTPWVHGYPGNSAGSFGMNPQGAPWGQGGNGGPPNFGTNTQGAVAQPGYGSVRASNQNEGCTNPPPSGSGGGSSNSGGGSGSQSGSSGSGSNGDNNNGSSSGGSSSGSSSGGSSGGSSGGSSGNSGGSRGDSGSESSWGSSTGSSSGNHGGSGGGNGHKPGNSETSPGMFNFDTFWKNFKSKLGFINWDAINKDQRSSRIP

SEQ ID NO: 4301 - protein, 449 aa, Homo Sapiens
MKFQGPLACLLLALCLGSGEAGPLQSGEESTGTNIGEALGHGLGDALSEGVGKAIGKEAGGAAGSKVSEALGQGTREAVGTGVRQVPGFGVADALGNRVGEAAHALGNTGHEIGRQAEDVIRHGADAVRGSWQGVPGHNGAWETSGGHGIFGSQGGLGGQGQGNPGGLGTPWVHGYPGNSAGSFGMNPQGAPWGQGGNGGPPNFGTNTQGAVAQPGYGSVRASNQNEGCTNPPPSGSGGGSSNSGGSSTGSSSGNHGGSGGGNGHKPGCEKPGNEARGSGESGIQGQGSSWGSGGGDAVGGVNTVNSETSPGMFNFDTFWKNFKSKLGFINWDAINKNQVPPPSTRALLYFSRLWEDFKQNTPFLNWKAIIEGADASSLQKRAGRDDQPGAGWQEVAAVTSKNYNYNQHAYPTAYGGKYSVKTPAKGGVSPSSSASRVQPGLLQWVKFW

SEQ ID NO: 4302 - protein, 465 aa, Homo Sapiens
MKFQGPLACLLLALCLGSGEAGPLQSGEESTGTNIGEALGHGLGDALSEGVGKAIGKEAGGAAGSKVSEALGQGTREAVGTGVRQVPGFGVADALGNRVGEAAHALGNTGHEIGRQAEDVIRHGADAVRGSWQGVPGHNGAWETSGGHGIFGSQGGLGGQGQGNPGGLGTPWVHGYPGNSAGSFGMNPQGAPWGQGGNGGPPNFGTNTQGAVAQPGYGSVRASNQNEGCTNPPPSGSGGGSSNSGGSSTGSSSGNHGGSGGGNGHKPGCEKPGNEARGSGESGIQGFRGQGVSSNMREISKEGNRLLGGSGDNYRGQGSSWGSGGGDAVGGVNTVNSETSPGMFNFDTFWKNFKSKLGFINWDAINKNQVPPPSTRALLYFSRLWEDFKQNTPFLNWKAIIEGADASSLQKRAGRDDQNYNYNQHAYPTAYGGKYSVKTPAKGGVSPSSSASRVQPGLLQWVKFW

SEQ ID NO: 4303 - protein, 36 aa, Homo Sapiens
MLGITSCSDQQAKEGEGIQHRLLLRQPRWERRRKWT

SEQ ID NO: 4304 - protein, 36 aa, Homo Sapiens; identical to SEQ ID NO: 4303

SEQ ID NO: 4305 - protein, 36 aa, Homo Sapiens; identical to SEQ ID NO: 4303

SEQ ID NO: 4306 - protein, 36 aa, Homo Sapiens; identical to SEQ ID NO: 4303

SEQ ID NO: 4307 - protein, 36 aa, Homo Sapiens; identical to SEQ ID NO: 4303

SEQ ID NO: 4308 - protein, 36 aa, Homo Sapiens; identical to SEQ ID NO: 4303

SEQ ID NO: 4309 - protein, 36 aa, Homo Sapiens; identical to SEQ ID NO: 4303

SEQ ID NO: 4310 - protein, 36 aa, Homo Sapiens; identical to SEQ ID NO: 4303

SEQ ID NO: 4311 - protein, 36 aa, Homo Sapiens; identical to SEQ ID NO: 4303

SEQ ID NO: 4312 - protein, 36 aa, Homo Sapiens; identical to SEQ ID NO: 4303

SEQ ID NO: 4313 - protein, 36 aa, Homo Sapiens; identical to SEQ ID NO: 4303

SEQ ID NO: 4314 - protein, 36 aa, Homo Sapiens; identical to SEQ ID NO: 4303

SEQ ID NO: 4315 - protein, 36 aa, Homo Sapiens; identical to SEQ ID NO: 4303

SEQ ID NO: 4316 - protein, 36 aa, Homo Sapiens; identical to SEQ ID NO: 4303

SEQ ID NO: 4317 - protein, 36 aa, Homo Sapiens; identical to SEQ ID NO: 4303

SEQ ID NO: 4318 - protein, 36 aa, Homo Sapiens; identical to SEQ ID NO: 4303

SEQ ID NO: 4319 - protein, 36 aa, Homo Sapiens; identical to SEQ ID NO: 4303

SEQ ID NO: 4320 - protein, 253 aa, Homo Sapiens
MLGITSCSDQQAKEGEGLEGSSTGSSSGNHGGSGGGNGHKPGCEKPGNEARGSGESGIQGFRGQGVSSNMREISKEGNRLLGGSGDNYRGQGSSWGSGGGDAVGGVNTVNSETSPGMFNFDTFWKNFKSKLGFINWDAINKNQVPPPSTRALLYFSRLWEDFKQNTPFLNWKAIIEGADASSLQKRAGRDDQPGAGWQEVAAVTSKNYNYNQHAYPTAYGGKYSVKTPAKGGVSPSSSASRVQPGLLQWVKFW

SEQ ID NO: 4321 - protein, 131 aa, Homo Sapiens
MLGITSCSDQQAKEGEGLEGSSTGSSSGNHGGSGGGNGHKPGCEKPGNEARGSGESGIQGFRGQGVSSNMRGQGSSWGSGGGDAVGGVNTVNSETSPGMFNFDTFWKNFKSKLGFINWDAINKDQRSSRIP

SEQ ID NO: 4322 - protein, 201 aa, Homo Sapiens
MLGITSCSDQQAKEGEGLEGSSTGSSSGNHGGSGGGNGHKPGCEKPGNEARGSGESGIQGFRGQGVSSNMRNSETSPGMFNFDTFWKNFKSKLGFINWDAINKNQVPPPSTRALLYFSRLWEDFKQNTPFLNWKAIIEGADASSLQKRAGRDDQNYNYNQHAYPTAYGGKYSVKTPAKGGVSPSSSASRVQPGLLQWVKFW

SEQ ID NO: 4323 - protein, 116 aa, Homo Sapiens
MLGITSCSDQQAKEGEGLEGSSTGSSSGNHGGSGGGNGHKPGCEKPGNEARGSGESGIQGQGSSWGSGGGDAVGGVNTVNSETSPGMFNFDTFWKNFKSKLGFINWDAINKDQRSS

SEQ ID NO: 4324 - protein, 184 aa, Homo Sapiens
MLGITSCSDQQAKEGEGLEGSSTGSSSGNHGGSGGGNGHKPGCEKPGNEARGSGESGIQNSETSPGMFNFDTFWKNFKSKLGFINWDAINKDFKQNTPFLNWKAIIEGADASSLQKRAGRDDQPGAGWQEVAAVTSKNYNYNQHAYPTAYGGKYSVKTPAKGGVSPSSSASRVQPGLLQWVKFW

SEQ ID NO: 4325 - protein, 99 aa, Homo Sapiens
MLGITSCSDQQAKEGEGLEGSSTGSSSGNHGGSGGGNGHKPGCEKPGNEARGSGESGIQNSETSPGMFNFDTFWKNFKSKLGFINWDAINKDQRSSRIP

SEQ ID NO: 4326 - protein, 189 aa, Homo Sapiens
MLGITSCSDQQAKEGEGLEGSSTGSSSGNHGGSGGGNGHKPGCEKPGNEARGSGESGIQNSETSPGMFNFDTFWKNFKSKLGFINWDAINKNQVPPPSTRALLYFSRLWEDFKQNTPFLNWKAIIEGADASSLQKRAGRDDQNYNYNQHAYPTAYGGKYSVKTPAKGGVSPSSSASRVQPGLLQWVKFW

SEQ ID NO: 4327 - protein, 203 aa, Homo Sapiens
MLGITSCSDQQAKEGEGLEGSSTGSSSGNHGGSGGGNGHKPGCEKPGNEARGSGESGIQNSETSPGMFNFDTFWKNFKSKLGFINWDAINKNQVPPPSTRALLYFSRLWEDFKQNTPFLNWKAIIEGADASSLQKRAGRDDQPGAGWQEVAAVTSKNYNYNQHAYPTAYGGKYSVKTPAKGGVSPSSSASRVQPGLLQWVKFW

SEQ ID NO: 4328 - protein, 203 aa, Homo Sapiens; identical to SEQ ID NO: 4327

SEQ ID NO: 4329 - protein, 82 aa, Homo Sapiens
MLGITSCSDQQAKEGEGLEGSSTGSSSGNHGGSGGGNGHKPGNSETSPGMFNFDTFWKNFKSKLGFINWDAINKDQRSSRIP

SEQ ID NO: 4330 - protein, 172 aa, Homo Sapiens
MLGITSCSDQQAKEGEGLEGSSTGSSSGNHGGSGGGNGHKPGNSETSPGMFNFDTFWKNFKSKLGFINWDAINKNQVPPPSTRALLYFSRLWEDFKQNTPFLNWKAIIEGADASSLQKRAGRDDQNYNYNQHAYPTAYGGKYSVKTPAKGGVSPSSSASRVQPGLLQWVKFW

SEQ ID NO: 4331 - protein, 90 aa, Homo Sapiens
MNMKPATASALLLLLLGLAWTQGSHGWGADASSLQKRAGRDDQNYNYNQHAYPTAYGGKYSVKTPAKGGVSPSSSASRVQPGLLQWVKFW

SEQ ID NO: 4332 - protein, 36 aa, Homo Sapiens
SGNHGGSGGGNGHKPGISRLWLTKWVLLSSHISLVP

SEQ ID NO: 4333 - protein, 152 aa, Homo Sapiens
SSTGSSSGNHGGSGGGNGHKPGNSETSPGMFNFDTFWKNFKSKLGFINWDAINKNQVPPPSTRALLYFSRLWEDFKQNTPFLNWKAIIEGADASSLQKRAGRDDQNYNYNQHAYPTAYGGKYSVKTPAKGGVSPSSSASRVQPGLLQWVKFW

SEQ ID NO: 4334 - protein, 74 aa, Homo Sapiens
  misc_feature (1)..(1): Xaa can be any naturally occurring amino acid
XALLLLLLGLAWTQGSHGWGADASSLQKRAGRDDQNYNYNQHAYPTAYGGKYSVKTPAKASRVQPGLLQWVKFW

SEQ ID NO: 4335 - protein, 201 aa, Homo Sapiens
  misc_feature (1)..(1): Xaa can be any naturally occurring amino acid
XGGGNGHKPGCEKPGNEARGSGESGIQGFRGQGVSSNMREISKEGNRLLGGSGDNYRNSETSPGMFNFDTFWKNFKSKLGFINWDAINKNQVPPPSTRALLYFSRLWEDFKQNTPFLNWKAIIEGADASSLQKRAGRDDQPGAGWQEVAAVTSKNYNYNQHAYPTAYGGKYSVKTPAKGGVSPSSSASRVQPGLLQWVKFW

SEQ ID NO: 4336 - protein, 109 aa, Homo Sapiens
  misc_feature (1)..(1): Xaa can be any naturally occurring amino acid
XPATASALLLLLLGLAWTQGSHGWVGTAGCTGCGRVITAETCRQRRSELQLQPACVSHCLWWEVLSQDPCKGGSLTFFLGFPGATWPAAVGEVLVGNFLQPPPRPRKAL

SEQ ID NO: 4337 - protein, 96 aa, Homo Sapiens
  misc_feature (1)..(1): Xaa can be any naturally occurring amino acid
XPPPSTRALLYFSRLWEDFKQNTPFLNWKAIIEGADASSLQKRAGRDDQNYNYNQHAYPTAYGGKYSVKTPAKGGVSPSSSASRVQPGLLQWVKFW

SEQ ID NO: 4338 - protein, 497 aa, Homo Sapiens
MKISILLMFLWGLSCALPVTRYQNNESEDSEEWKGHLAQAPTPPLANEDPSDSTQSEEGLGSDDHQYIYRLAGGFSRSTGKGGDDKDDDEDDSGDDTFGDDDSGPGPKDRQEGGNSRLGSDEDSDDTIQASEESAPQGQDSAQDTTSESRELDNEDRVDSKPEGGDSTQESESEEHWVGGGSDGESSHGDGSELDDEGMQSDDPESIRSERGNSRMNSAGMKSKESGENSEQANTQDSGGSQLLEHPSRKIFRKSRISEEDDRSELDDNNTMEEVKSDSTENSNSRDTGLSQPRRDSKGDSQEDSKENLSQEESQNVDGPSSESSQEANLSSQENSSESQEEVVSESRGDNPDPTTSYVEDQEDSDSSEEDSSHTLSHSKSESREEQADSESSESLNFSEESPESPEDENSSSQEGLQSHSSSAESQSEESHSEEDDSDSQDSSRSKEDSNSTESKSSSEEDGQLKNIEIESRKLTVDAYHNKPIGDQDDNDCQDGY

SEQ ID NO: 4339 - protein, 513 aa, Homo Sapiens
MKISILLMFLWGLSCALPVTRYQNNESEDSEEWKGHLAQAPTPPLESSESSEGSKVSSEEQANEDPSDSTQSEEGLGSDDHQYIYRLAGGFSRSTGKGGDDKDDDEDDSGDDTFGDDDSGPGPKDRQEGGNSRLGSDEDSDDTIQASEESAPQGQDSAQDTTSESRELDNEDRVDSKPEGGDSTQESESEEHWVGGGSDGESSHGDGSELDDEGMQSDDPESIRSERGNSRMNSAGMKSKESGENSEQANTQDSGGSQLLEHPSRKIFRKSRISEEDDRSELDDNNTMEEVKSDSTENSNSRDTGLSQPRRDSKGDSQEDSKENLSQEESQNVDGPSSESSQEANLSSQENSSESQEEVVSESRGDNPDPTTSYVEDQEDSDSSEEDSSHTLSHSKSESREEQADSESSESLNFSEESPESPEDENSSSQEGLQSHSSSAESQSEESHSEEDDSDSQDSSRSKEDSNSTESKSSSEEDGQLKNIEIESRKLTVDAYHNKPIGDQDDNDCQDGY

SEQ ID NO: 4340 - protein, 542 aa, Homo Sapiens
MELRSELPSVPGAATAAAATATGPPVASVASVAAAAAAAASLPVSVAGGLLRGPPLLLRAAEKYPRTPKCARCRNHGVVSALKGHKRYCRWKDCLCAKCTLIAERQRVMAAQVALRRQQAQEENEARELQLLYGTAEGLALAAANGIIPPRPAYEVFGSVCAADGGGPGAGAPAGTGGGAAGAGGSEAKLQKFDLFPKTLLQAGRPGSPLPPPVKPLSPDGADSGPGTSSPEVRPGSGSENGDGESFSGSPLARASKEAGGSCPGSAGPGGGGEEDSPGSASPLGSESGSEADKEEGEAAPAPGLGGGSGPRQRTPLDILTRVFPGHRRGVLELVLQGCGGDVVQAIEQVLNHHRGGLAAGLGPAAPPDKAAVGAAAAADDAWPSRVDAAAAAAAAAGGPGLPAPLQAGPAAPPHHRPLLAGAMAPGALGSLSSRSAFSPLQPNASHFGADAGAYPLGAPLGLSPLRLAYSAAAAHSRGLAFMAPYSTAGLVPTLGFRPPMDYAFSDLMRDRSAAAAAAVHKEPTYGGGLYGPMVNGAPEKQ

SEQ ID NO: 4341 - protein, 542 aa, Homo Sapiens; identical to SEQ ID NO: 4340

SEQ ID NO: 4342 - protein, 855 aa, Homo Sapiens
MAALGVAEAVAAPHPAEGAETAEAVELSRALSRLLPGLEADSKPGRRRALEALRRALEEPGPAADPTAFQGPWARLLLPRLLRCLSDPAEGCRALAVHLLDLGLRRAARPRDALPRLLPALAARLAGPVPARRPPEACEELRLALVQLLGLAVDLCGAALAPHLDDALRALRCSLLDPFAAVRRESCSCAAALAQATPDHFHMQSESLIGPLMQTISHQHWKVRVAAIEATGAVIHFGNGKSVDDVLSHFAQRLFDDVPQVRRAVASVVGGWLLCLRDRYSFFHKLIPLLLSSLNDEVPEVRQLAASLWEDVGLQWQKENEEDLKDKLDFAPPTPPHYPPHERRPVLGCRELVFRNLSKILPALCHDITDWVVGTRVKSAQLLPVLLLHAEDHATQHLEVVLRTLFQACTDEEAAVVQSCTRSAELVGTFVSPEVFLKLILSTLKKTPSASGLLVLASAMRGCPREALQPHLAAIATELAQAHICQASENDLYLERLLLCVQALVSVCHEDCGVASLQLLDVLLTIVALAGATGLRDKAQETMDSLAMVEGVSSCQDLYRKHIGPLLERVTASHLDWTAHSPELLQFSVIVAQSGPALGEALPHVVPTLRACLQPSQDPQMRLKLFSILSTVLLRATDTINSQGQFPSYLETVTKDILAPNLQWHAGRTAAAIRTAAVSCLWALTSSEVLSAEQIRDVQETLMPQVLTTLEEDSKMTRLISCRIINTFLKTSGGMTDPEKLIRIYPELLKRLDDVSNDVRMAAASTLVTWLQCVKGANAKSYYQSSVQYLYRELLVHLDDPERAIQDAILEVLKEGSGLFPDLLVRETEAVIHKHRSATYCEQLLQHVQAVPATQ

SEQ ID NO: 4343 - protein, 280 aa, Homo Sapiens
MTGGAREKAHIARSPATAQGPALGEALPHVVPTLRACLQPSQDPQMRLKLFSILSTVLLRATDTINSQGQFPSYLETVTKDILAPNLQWHAGRTAAAIRTAAVSCLWALTSSEVLSAEQIRDVQETLMPQVLTTLEEDSKMTRLISCRIINTFLKTSGGMTDPEKLIRIYPELLKRLDDVSNDVRMAAASTLVTWLQCVKGANAKSYYQSSVQYLYRELLVHLDDPERAIQDAILEVLKEGSGLFPDLLVRETEAVIHKHRSATYCEQLLQHVQAVPATQ

SEQ ID NO: 4344 - protein, 196 aa, Homo Sapiens
  misc_feature (1)..(1): Xaa can be any naturally occurring amino acid
XLCARCAAPCSTPSPPCAARAAAAPPPWRRPRPVRRAVASVVGGWLLCLRDRYSFFHKLIPLLLSSLNDEVPEVRQLAASLWEDVGLQWQKENEEDLKDKLDFAPPTPPHYPPHERRPVLGCRELVFRNLSKILPALCHDITDWVVGTRVKSAQLLPVLLLHAEDHATQHLEVVLRTLFQACTDEEAAVVQSCTRS

SEQ ID NO: 4345 - protein, 657 aa, Homo Sapiens
  misc_feature (1)..(1): Xaa can be any naturally occurring amino acid
XSPPCAARAAAAPPPWRRPRPHWKVRVAAIEATGAVIHFGNGKSVDDVLSHFAQRLFDDVPQVRRAVASVVGGWLLCLRDRYSFFHKLIPLLLSSLNDEVPEVRQLAASLWEDVGLQWQKENEEDLKDKLDFAPPTPPHYPPHERRPVLGCRELVFRNLSKILPALCHDITDWVVGTRVKSAQLLPVLLLHAEDHATQHLEVVLRTLFQACTDEEAAVVQSCTRSAELVGTFVSPEVFLKLILSTLKKTPSASGLLVLASAMRGCPREALQPHLAAIATELAQAHICQASENDLYLERLLLCVQALVSVCHEDCGVASLQLLDVLLTIVALAGATGLRDKAQETMDSLAMVEGVSSCQDLYRKHIGPLLERVTASHLDWTAHSPELLQFSVIVAQSGPALGEALPHVVPTLRACLQPSQDPQMRLKLFSILSTVLLRATDTINSQGQFPSYLETVTKDILAPNLQWHAGRTAAAIRTAAVSCLWALTSSEVLSAEQIRDVQETLMPQVLTTLEEDSKMTRLISCRIINTFLKTSGGMTDPEKLIRIYPELLKRLDDVSNDVRMAAASTLVTWLQCVKGANAKSYYQSSVQYLYRELLVHLDDPERAIQDAILEVLKEGSGLFPDLLVRETEAVIHKHRSATYCEQLLQHVQAVPATQ

SEQ ID NO: 4346 - protein, 68 aa, Homo Sapiens
AEGEGLVLPKKIRVRSAVEQWLVNVEKSMFDVLKKFLSQGIEDWNCQMFSQWVLSHPGQVVLTVTFAI

SEQ ID NO: 4347 - protein, 130 aa, Homo Sapiens
DYLEVKRLIFPRFYFLSNAELLDILADSRNPESVQPHLVKCFENIKQLLIWKQDIGPPAVKMLISAEGEGLVLPKYDKCYKLFRFCTTSLFKISALKFLIYYKSALSKLFLQRLYPYVNILLPFHIPYNT

SEQ ID NO: 4348 - protein, 430 aa, Homo Sapiens
METFIPIDLTTENQEMDKEETKTKPRLLRYEEKKYEDVKPLETQPAEIAEKETLEYKTVRTFSESLKSEKTEDYLRESIIQQHMVSPEPASLKEKGKSRRKKDQTHACPNVRKARPVSYDRTEPKDDDVIRNIIRLREKLGWQTILPQHSLKYGSSKIAIQKITLKKPLEDDGEFVYCLPRKSPKSLYNPYDLQVINIVGSVKEVELIPTLEWLSERRHYYLLRQFKIFSDFRMNKAFVTWKLNVKRIKTEKSRSFLYHHLFLADDLFQTCLVYIRGLCEDAINLKNYNDHENNLSAICLVKLDSSRTYSLDEFCEEQLQQATQALKQLEDIRNKAISEMKSTFLKVAEKNEIKEYFESKLSEDDTTHFKLPKYRRLLETFFKFVMLVDYIFQELIRQLMNTAVTLLLELFNGSAGMPFSVEKKNENLIR

SEQ ID NO: 4349 - protein, 228 aa, Homo Sapiens
METFIPIDLTTENQEMDKEETKTKPRLLRYEEKKYEDVKPLETQPAEIAEKETLEYKTVRTFSESLKSEKTEDYLRESIIQQHMVSPEPASLKEKGKSRRKKDQTHACPNVRKARPVSYDRTEPKDDDVIRNIIRLREKLGWQTILPQHSLKYGSSKIAIQKITLKKPLEDDGEFVYCLPRKSPKSLYNPYDLQVVSAHTAKHCKEFWVITASFISKRYLVICGAVYI

SEQ ID NO: 4350 - protein, 228 aa, Homo Sapiens; identical to SEQ ID NO: 4349

SEQ ID NO: 4351 - protein, 4515 aa, Homo Sapiens
METFIPIDLTTENQEMDKEETKTKPRLLRYEEKKYEDVKPLETQPAEIAEKETLEYKTVRTFSESLKSEKTEDYLRESIIQQHMVSPEPASLKEKGKSRRKKDQTHACPNVRKARPVSYDRTEPKDDDVIRNIIRLREKLGWQTILPQHSLKYGSSKIAIQKITLKKPLEDDGEFVYCLPRKSPKSLYNPYDLQVVSAHTAKHCKEFWVITASFISKVINIVGSVKEVELIPTLEWLSERRHYYLLRQFKIFSDFRMNKAFVTWKLNVKRIKTEKSRSFLYHHLFLADDLFQTCLVYIRGLCEDAINLKNYNDHENNLSAICLVKLDSSRTYSLDEFCEEQLQQATQALKQLEDIRNKAISEMKSTFLKVAEKNEIKEYFESKLSEDDTTHFKLPKYRRLLETFFKFVMLVDYIFQELIRQLMNTAVTLLLELFNGSAGMPFSVEKKNENLIRTFKDNSFPTGKTTNDCEELVDNSKLHAISVQKSEVKTDTDINEILNSVEVGKDLRKTYAPIFEVNLCLRIPAESDSSENSKENFHESDQCPEECVMFEDEMSENKDNCVKKHSSEELLPKAKKSKEISYNLEDIISDTEIETEFENKYMYYEFPEFPTNLFIDPNRLEFSVKIQNMLTNMEKCITTITPLCQDPQLSIFIDLVSIMDLPNKTGSIIHYKEQTRWPDCHILFETDPAYQNIIVNLLTIIGNSMGLVNAYSHKFIKYCTMTEKAKIMSMKISSMGELTSKEFEAILNRFRNYFRHIVNMAIEKRIGIFNVVSLDYQSECLLYIDNVIHMSHTLIQSVIEKKNKNLLEVVESSLQQLECDPTEIEEFLEHFIFLNAISSKISKLEKEFLTMSQLYSVAKHHQIHISEEQIAIFQVLLLKFSQLKSSMKLSKINKDTAITKFRDNLEACISGLHVDVGNLKAKIRTPLLLCAGTQVSTAMEMIQTLSGEAASLTNKAKAYSHYQDCFSDSQSHMHSVNVEEITQIVLSEISDIEGDLTLRKKLWEAQEEWKRASWEWRNSSLQSIDVESVQRNVSKLMHIISVLEKGLPKSDMVTHLKQVVTEFKQELPIIIALGNPCLKPRHWEALQEIIGKSVPLDKNCKVENLLALKMFQYENEINDMSTSATNEAALEKMLFKIIDFWNTTPLPLILHHTEIYSIFIIPSIDDISAQLEESQVILATIKGSPHIGPIKDLVNEWDQNLTLFSYTLEEWMNCQRNWLYLEPVFHSSEIRRQLPAETELFSQVISMWKKIMSKIQNKQNALQITTSAGVLEILQNCNIHLEHIKKSLEDYLEVKRLIFPRFYFLSNAELLDILADSRNPESVQPHLVKCFENIKQLLIWKQDIGPPAVKMLISAEGEGLVLPKKIRVRSAVEQWLVNVEKSMFDVLKKERYIYNIILLFQSQIMFYNDCVKSFVSSYSREKLEKVHAGLMCHLEEVADLVVLDTSNSRTKAILGALLILYVHCRDIVINLLLKNIFNAEDFEWTRHLQYKWNEKQKLCYVSQGNASFTYGYEYLGCTSRLVITPLTDRCWLTLMEALHLNLGGCPAGPAGTGKTETVKDLAKSLGKHCVVFNCFEDLDYKIVRKFFFGLVQSGAWSCFDEFNLIDLEVLSVIASQILTIKAAKDNYSARFVLEGKEIRINMSCAVFITMNPRYGGGVELPDNLKSLFRPVAMMVPHYQMIAEIILFSFGFKSANSLSGKLTNLYELARKQLSQQDHYNFGLRSLKIVLIMAGTKKREFKCLSEADETLIVIEAIREASLPKCPPEDVPLFENIIGDIFPEVTVLKVNQLALEKVIYTATQQLGLQNWSSQKEKIIQFYNQLQVCVGVMLVGPTGGGKTTVRRILEKALTLLPIADFLSVAERKSASKISERKGKVDICVLNPKCVTLSELYGQLDPNTMEWTDGLLSATIRSYVYFNTPKNTKKDIDLRLKSRISDLSNVFKLDSSDTTETDDNIFEEIEKVVKIPENHNFDWQWIILDGPVDTFWVENLNSVLDDTRTLCLANSERIALTNKIRVIFEVDNLSQASPATVSRCAMVYMDPVDLGWEPYVKSWLLKTSKIISQSGVDCLEFMIKNSVTDGLQFIRNRQKFQPYPMEDITVVITLCRILDAFFDFMGKNGGFEQSDDLNDTSSKEANSQRESVTFKDIEKRDENTWYPEKNPDKLTKIIQKLFVFAFTWAFGGALNREDEHRENIPFCPSLEPDSLAKVTYDFDKLVHELFGNSSQVGWKHWGQSQGRRRKGNCINLPTGECSIFGYFVDIEQCEFIPWSDLVPNDQTLIQRGTSLLTNLQRSGGNFLKITECGECINYTATRDTTCLSFLMSLLLKNSCPVLLTGESGVGKTAAINQMLEKLEGPGAFDIKHGSILGDTLLYSEIKKSSSLKQNITILIPETHKTATGSSDNPTKKPEVRTNKKLLKNNDHKGVVVSTINFSTNVTAAKTKEMILKKLIRRTKDTLGAPKNNRILIFIDDMNMPVSDMYGAQPPLELIRQLLDLGGVYDTEKNTWKNIQDLSIVAACVPVVNDISPRLLKHFSMLVLPHPSQDILCTIFQAHLGIYFSINNFTPEVQKSKDQIISCSLAIYHQVRQNMLPTPTKCHYMFNLRDMFKLLLGLLQADRTVVNSKEMAALLFVHEATRVFHDRLIDFTDKSLFYRLLSRELENCFQIGIDGCGKKTCATLACYLTDNKLYRVPISHKCAYIEFKEVFKKVFIHAGLKGKPTVLMVPNLNIEQDSFLEDLNYIISSGRIPDLFENVELDSIAMKIRYLTEQSGHMDNRQSLLSFFQKRIYKNLHIFVIMSPEGPSFRQNCRVYPSMISSCTIDWYERWPEEALLIVANSFLKEKVNFENRENLKEKLAPTCVQIHKSMKDLNRKYFEETGRFYYTTPNSYLQFMETFAHILRAREEEMQTKRDRFHMGLSTILEATTLVTEMQEELLILGPQVEQKTKETETLMEKLRKDSQVVEKVQMLVKQDEEIVAEEVRIVEDYAQKTANELKSVLPAFDKAIVALNALDKADVAELRVYTRPPFLVLTVMNAVCILLQKKPNWATAKLLLSETGFLKKLINLDKDSIPDKVFVKLKKIVTLPDFNPHKISLVSVACCSLCQWVIALNNYHEVQKVVGPKQIQVAEAQNVLKIARQRLAEKQRGLQLVEEHLLFLQAAYKDTVAEKQLLANRKTMASRRFQCASVLLTVLEDEKTRWQETINQIDNKLEGILGDILLSAACIVYSGILTPEFRQLIVNKWETFCIENGISLSSKFSLIKVMAQKYEISRWHNQGLPHGQYSVENAILIKNGQQWPLLIDPHRQAHKWIRQMEGSRLQKLSIEDSNYTKKIENAMKTGGSVLLQNLLETLAPGLKAILKKDIYQKKGHYFIRVGDAEFEYNSNFRLYLSTEIDNPHFLPSVYNFVTMINFTVTFQGLQDQLLSTVVTHEVPHLEDQRSKLLESISLDAITLEELEEKTLNLLQKALGSILDDDKIVDTLRKSKMTSNEISKRIEATKKAESEIQAIRKNYLPIATRGALLYFLVADLTQINYMYQFSLDWFHQVFVSSVVSKSKEQEHSFKREKVSPKEVHEFISISKEPNLENEKNLLDKHIKSAIDMLTKSIFKVVSSALFNEDKLCFSFRLCTVIMQNNANGNLIQDDIGFLPEEEWNIFLYSGILINIKSALSQSRLTSTFEIGESQHLQWLSDSRWRQCQYVSTHLEPFSLLCKSLLSNVSQWDTFKNSKAVYSLISTPFSSENASLEENTKPPEETELLNENKETCNPINFPWEKLTSFQRLILVKVLRPESLNNSVRKFITEKMGNKYLQRTGVNLKDAYKGSNARTPLILIQTHGIDLTNILLRFAQELKGTTHHVTIISLGRDQAAKAEDLILKALTKTQQWVFLQNCHLATSFMPRLCTIVESFNSPNVTIDPEFRLWLSSKSYSSFPIPVLKKGLKIAVESPQGLKSNLLQTFGCTGSGEVTEEIFENPDCGQWWKKLLFSLCFFNAVINERKNYGILGWNIAYKFNSSDLGVAIKVLENSLRGQPSISWQALRYLIGEVIYGGRVIDNWDKRCLKTLLYKFCNPEVLKDDFSFSRSASIKDYIHIIQSLPDDDLPEVLGIHPEAIRSCWETQGEKFIENLIAMQPKTTTANLMIRPEQSKDELVMEILSDLLKRLPLTVEKEEIAVGTPSTLKSMMSSSIWESLSKNLKDHDPLIHCVLLTFLKQEIKRFDKLLFVIHKSLKDLQLAIKGEIILTQELEEIFNSFLNMRVPTLWQKHAYRSCKPLSSWIDDLIQRLNFFNTWAKVAYTAIQRRYMRFVTVWKQSIPSTSQKCKHPEDSENNFFEGFPSRYWLPAFFFPQAFLAAVLQDYGRSRGIAVDALTFTHHVISNTTDKDEKFSVFMPKKLNIVRRAFKGSASSHTGVYIFGLFIEGARWNREQKILEDSLPLEMCCDFPDIYFLPTKISTKTPNASNQTDSELYAFECPVYQTPERSRILATTGLPTNFLTSVYLSTKKPPSHWITMRVALLCEKNEK

SEQ ID NO: 4352 - protein, 453 aa, Homo Sapiens
METFIPIDLTTENQEMDKEETKTKPRLLRYEEKKYEDVKPLETQPAEIAEKETLEYKTVRTFSESLKSEKTEDYLRESIIQQHMVSPEPASLKEKGKSRRKKDQTHACPNVRKARPVSYDRTEPKDDDVIRNIIRLREKLGWQTILPQHSLKYGSSKIAIQKITLKKPLEDDGEFVYCLPRKSPKSLYNPYDLQVVSAHTAKHCKEFWVITASFISKVINIVGSVKEVELIPTLEWLSERRHYYLLRQFKIFSDFRMNKAFVTWKLNVKRIKTEKSRSFLYHHLFLADDLFQTCLVYIRGLCEDAINLKNYNDHENNLSAICLVKLDSSRTYSLDEFCEEQLQQATQALKQLEDIRNKAISEMKSTFLKVAEKNEIKEYFESKLSEDDTTHFKLPKYRRLLETFFKFVMLVDYIFQELIRQLMNTAVTLLLELFNGSAGMPFSVEKKNENLIR

SEQ ID NO: 4353 - protein, 4515 aa, Homo Sapiens; identical to SEQ ID NO: 4351

SEQ ID NO: 4354 - protein, 3507 aa, Homo Sapiens
MGRRSQWIWAMRCQMLVPVLSLHIGLARALGCGCIASKIECLIRCNAPFPLLDAVGSVASQELQSLTGTVGVTSGAAAYPRWNLARARAPPHLPGTQDPLRRVRDPTPIVASSPGRRRGSWSGGYGQEASEPGVVGLCCAVLPIHPSLALAGVGGPDLRRFQEGPQRPSDHGAAEKHMETFIPIDLTTENQEMDKEETKTKPRLLRYEEKKYEDVKPLETQPAEIAEKETLEYKTVRTFSESLKSEKTEEPKDDDVIRNIIRLREKLGWQTILPQHSLKYGSSKIAIQKITLKKPLEDDGEFVYCLPRKSPKSLYNPYDLQVVSAHTAKHCKEFWVITASFISKLDSSRTYSLDEFCEEQLQQATQALKQLEDIRNKAISEMKSTFLKVAEKNEIKEYFESKLSEDDTTHFKLPKYRRLLETFFKFVMLVDYIFQELIRQLMNTAVTLLLELFNGSAGMPFSVEKKNENLIRTFKDNSFPTGKTTNDCEELVDNSKLHAISVQKSEVKTDTDINEILNSVEVGKDLRKTYAPIFEVNLCLRIPAESDSSENSKENFHESDQCPEECVMFEDEMSENKDNCVKKHSSEELLPKAKKSKEISYNLEDIISATITPLCQDPQLSIFIDLVSIMDLPNKTGSIIHYKEQTRWPDCHILFETDPAYQNIIVNLLTIIGNSMGLVNAYSHKFIKYCTMTEKAKIMSMKISSMGELTSKEFEAILNRFRNYFRHIVNMAIEKRIGIFNVVVESSLQQLECDPTEIEEFLEHFIFLNAISSKISKLEKEFLTMSQLYSVAKHHQIHISEEQIAIFQVLLLKFSQLKSSMKLSKINKDTAITKFRDNLEACISGLHVDVGNLKAKIRTPLLLCAGTQVSTAMEMIQTLSGEAASLTNKAKAYSHYQDCFSDSQSHMHSVNVEEITQIVLSEISDIEGDLTLRKKLWEAQEEWKRASWEWRNSSLQSIDVESVQRNVSKLMHIISVLEKEIYSIFIIPSIDDISAQLEESQVILATIKGSPHIGPIKSQIMFYNDCVKSFVSSYSREKLEKVHAGLMCHLEEVADLVVLDTSNSRTKAILGALLILYVHCRDIVINLLLKNIFNAEDFEWTRHLQYKWNEKQKLCYVSQGNASFTYGYEYLGCTSRLVITPLTDRCWLTLMEALHLNLGGCPAGPAGTGKTETVKDLAKCALFAFKCNTALIKLPNSLIVLTCFGLEKTVLVMNTVMSFRFVLEGKEIRINMSCAVFITMNPRYGGGVELPDNLKSLFRPVAMMVPHYQMIAEIILFSFGFKSANSLSGKLTNLYELARKQLSQQDHYNFGLRSLKIVLIMAGTKKREFKCDTSDSLSEADETLIVIEAIREASLPKCPPEDVPLFENIIGDIFPEVTVLKVNQLALEKVIYTATQQLGLQNWSSQKEKIIQFYNQLQVCVGVMLVGPTGGGKTTVRRILEKALTLLPIADFLSVAERKSASKISERKGKVDICVLNPKCVTLSELYGQLDPNTMEWTDGLLSATIRSYVYFNTPKNTKKDIDLRLKSRISDLSNVFKLDSSDTTETDDNIFEEIEKVVKIPENHNFDWQWIILDGPVDTFWVENLNSVLDDTRTLCLANSERIALTNKIRVIFEVDNLSQASPATVSRCAMVYMDPVDLGWEPYVKSWLLKTSKIISQSGVDCLEFMIKNSVTDGLQFIRNRQKFQPYPMEDITVVITLCRILDAFFDFMGKNGGFEQSDDLNDTSSKEANSQRESVTFKDIEKRDENTWYPEKNPDKLTKIIQKLFVFAFTWAFGGALNREDEHRENIPFCPSLEPDSLAKVTYDFDKLVHELFGNSSQVGINLPTGECSIFGYFVDIEQCEFIPWSDLVPNDQTLIQRDNPTKKPEVRTNKKLLKNNDHKGVVVSTINFSTNVTAAKTKEMILKKLIRRTKDTLGAPKNNRILIFIDDMNMPVSDMYGAQPPLELIRQLLDLGGVYDTEKNTWKNIQDLSIVAACVPVVNDISPRLLKHFSMLVLPHPSQDILCTIFQIGIDGCGKKTCATLACYLTDNKLYRVPISHKCAYIEFKEVFKKVFIHAGLKGKPTVLMVPNLNIEQDSFLEDLNYIISSGRIPDLFENVELDSIAMKIRYLTEQSGHMDNRQSLLSFFQKRIYKNLHIFVIMSPEGPSFRQNCRVYPSMISSCTIDWYERWPEEALLIVANSFLKEKVNFENRENLKEKLAPTCVQIHKSMKDLNRKYFEETGRFYYTTPNSYLQFMETFAHILRAREEEMQTKRDRFHMGLSTILEATTLVTEMQEELLILGPQVEQKTKETETLMEKLRKDSQVVEKVQMLVKQDEEIVAEEVRIVEDYAQKTANELKSVLPAFDKAIVALNALDKADVAELRVYTRPPFLVLTVMNAVCILLQKKPNWATAKLLLSETGFLKKLINLDKDSIPDKVFVKLKKIVTLPDFNPHKISLVSVACCSLCQWVIALNNYHEVQKVVGPKQIQVAEAQNVLKIARQRLAEKQRGLQLISRWHNQGLPHGQYSVENAILIKNGQQWPLLIDPHRQAHKWIRQMEGSRLQKLSIEDSNYTKKIENAMKTGGSVLLQSCQASTWRKKLYLSTEIDNPHFLPSVYNFVTMINFTVTFQGLQDQLLSTVVTHEVPHLEDQRSKLLESISLDAITLEELEEKTLNLLQKALGSILDDDKIVDTLRKSKMTSNEISKRIEATKKAESEIQAIRKNYLPIATRGALLYFLVADLTQINYMYQFSLDWFHQVFVSSVVSKSKEQEHSFKREKVSPKEVHEFISISKEPNLENEKNLLDKHIKSAIDMLTKSIFKVVSSALFNEDKLCFSFRLCTVIMQNNANGNLIQDDIGFLPEEEWNIFLYSGILINIKSALSQSRLTSTFEIGESQHLQWLSDSRWRQCQYVSTHLEPFSLLCKSLLSNVSQWDTFKNSKAVYSLISTPFSSENASLEENTKPPEEKHTFCLLLRAINHTGTDLGPVGRGQWLTSTACDRHTDVCSFSFALNDGVPDVEHVQDIFYGHCVDKYHVKVLRPESLNNSVRKFITEKMGNKYLQRTGVNLKDAYKGSNARTPLILIQTHGSASIKDYIHIIQSLPDDDLPEVLGIHPEAIRSCWETQGEKFIENLIAMQPKTTTANLMIRPEQSKDELVMEILSDLLKRLPLTVEKEEIAVGTPSTLKSMMSSSIWESLSKNLKDHDPLIHCVLLTFLKQEIKRFDKLLFVIHKSLKDLQLAIKGEIILTQELEEIFNSFLNMRVPTLWQKHAYRSCKPLSSWIDDLIQRLNFFNTWAKVAYTAIQRRYMRFVTVWKQSIPSTSQKCKHPEDSENNFFEGFPSRYWLPAFFFPQAFLAAVLQDYGRSRGIAVDALTFTHHVISNTTDKDEKFSVFMPKKLNIVRRAFKGSASSHTGVYIFGLFIEGARWNREQKILEDSLPLEMCCDFPDIYFLPTKISTKTPNASNQTDSELYAFECPVYQTPERSRILATTGLPTNFLTSVYLSTKKPPSHWITMRVALLCEKNEK

SEQ ID NO: 4355 - protein, 1481 aa, Homo Sapiens
  misc_feature (1)..(1): Xaa can be any naturally occurring amino acid
XELFGNSSQVGINLPTGECSIFGYFVDIEQCEFIPWSDLVPNDQTLIQRGTSLLTNLQRSGGNFLKITECGECINYTATRDTTCLSFLMSLLLKNSCPVLLTGESGVGKTAAINQMLEKLEGPGAFDIKHGSILGDTLLYSEIKKSSSLKQNITILIPETHKTATGSSDNPTKKPEVRTNKKLLKNNDHKGVVVSTINFSTNVTAAKTKEMILKKLIRRTKDTLGAPKNNRILIFIDDMNMPVSDMYGAQPPLELIRQLLDLGGVYDTEKNTWKNIQDLSIVAACVPVVNDISPRLLKHFSMLVLPHPSQDILCTIFQLLLGLLQADRTVVNSKEMAALLFVHEATRVFHDRLIDFTDKSLFYRLLSRELENCFQIQWTQENLMNHSTVFLDFLDINKTHRKKIYQNTSDYNKLASVLDEFQMKLGSISLELSHSMVFFKEAIEHIIRATRVLRQPGSHMLLIGIDGCGKKTCATLACYLTDNKLYRVPISHKCAYIEFKEVFKKVFIHAGLKGKPTVLMVPNLNIEQDSFLEDLNYIISSGRIPDLFENVELDSIAMKIRYLTEQSGHMDNRQSLLSFFQKRIYKNLHIFVIMSPEGPSFRQNCRVYPSMISSCTIDWYERWPEEALLIVANSFLKEKVNFENRENLKEKLAPTCVQIHKSMKDLNRKYFEETGRFYYTTPNSYLQFMETFAHILRAREEEMQTKRDRFHMGLSTILEATTLVTEMQEELLILGPQVEQKTKETETLMEKLRKDSQVVEKVQMLVKQDEEIVAEEVRIVEDYAQKTANELKSVLPAFDKAIVALNALDKADVAELRVYTRPPFLVLTVMNAVCILLQKKPNWATAKLLLSETGFLKKLINLDKDSIPDKVFVKLKKIVTLPDFNPHKISLVSVACCSLCQWVIALNNYHEVQKVVGPKQIQVAEAQNVLKIARQRLAEKQRGLQLVEEHLLFLQAAYKDTVAEKQLLANRKTMASRRFQCASVLLTVLEDEKISRWHNQGLPHGQYSVENAILIKNGQQWPLLIDPHRQAHKWIRQMEGSRLQKLSIEDSNYTKKIENAMKTGGSVLLQNLLETLAPGLKAILKKDIYQKKGHYFIRVGDAEFEYNSNFRLYLSTEIDNPHFLPSVYNFVTMINFTVTFQGLQDQLLSTVVTHEVPHLEDQRSKLLESISLDAITLEELEEKTLNLLQKALGSILDDDKIVDTLRKSKMTSNEISKRIEATKKAESEIQAIRKNYLPIATRGALLYFLVADLTQINYMYQFSLDWFHQVFVSSVVSKSKEQEHSFKREKVSPKEVHEFISISKEPNLENEKNLLDKHIKSAIDMLTKSIFKVVSSALFNEDKLCFSFRLCTVIMQNNANGNLIQDDIGFLPEEEWNIFLYSGILINIKSALSQSRLTSTFEIGESQHLQWLSDSRWRQCQYVSTHLEPFSLLCKSLLSNVSQWDTFKNSKAVYSLISTPFSSENASLEENTKPPEESKSS

SEQ ID NO: 4356 - protein, 1477 aa, Homo Sapiens
  misc_feature (1)..(1): Xaa can be any naturally occurring amino acid
XELFGNSSQVGINLPTGECSIFGYFVDIEQCEFIPWSDLVPNDQTLIQRGTSLLTNLQRSGGNFLKITECGECINYTATRDTTCLSFLMSLLLKNSCPVLLTGESGVGKTAAINQMLEKLEGPGAFDIKHGSILGDTLLYSEIKKSSSLKQNITILIPETHKTATGSSDNPTKKPEVRTNKKLLKNNDHKGVVVSTINFSTNVTAAKTKEMILKKLIRRTKDTLGAPKNNRILIFIDDMNMPVSDMYGAQPPLELIRQLLDLGGVYDTEKNTWKNIQDLSIVAACVPVVNDISPRLLKHFSMLVLPHPSQDILCTIFQLLLGLLQADRTVVNSKEMAALLFVHEATRVFHDRLIDFTDKSLFYRLLSRELENCFQIQWTQENLMNHSTVFLDFLDINKTHRKKIYQNTSDYNKLASVLDEFQMKLGSISLELSHSMVFFKEAIEHIIRATRVLRQPGSHMLLIGIDGCGKKTCATLACYLTDNKLYRVPISHKCAYIEFKEVFKKVFIHAGLKGKPTVLMVPNLNIEQDSFLEDLNYIISSGRIPDLFENVELDSIAMKIRYLTEQSGHMDNRQSLLSFFQKRIYKNLHIFVIMSPEGPSFRQNCRVYPSMISSCTIDWYERWPEEALLIVANSFLKEKVNFENRENLKEKLAPTCVQIHKSMKDLNRKYFEETGRFYYTTPNSYLQFMETFAHILRAREEEMQTKRDRFHMGLSTILEATTLVTEMQEELLILGPQVEQKTKETETLMEKLRKDSQVVEKVQMLVKQDEEIVAEEVRIVEDYAQKTANELKSVLPAFDKAIVALNALDKADVAELRVYTRPPFLVLTVMNAVCILLQKKPNWATAKLLLSETGFLKKLINLDKDSIPDKVFVKLKKIVTLPDFNPHKISLVSVACCSLCQWVIALNNYHEVQKVVGPKQIQVAEAQNVLKIARQRLAEKQRGLQLVEEHLLFLQAAYKDTVAEKQLLANRKTMASRRFQCASVLLTVLEDEKISRWHNQGLPHGQYSVENAILIKNGQQWPLLIDPHRQAHKWIRQMEGSRLQKLSIEDSNYTKKIENAMKTGGSVLLQNLLETLAPGLKAILKKDIYQKKGHYFIRVGDAEFEYNSNFRLYLSTEIDNPHFLPSVYNFVTMINFTVTFQGLQDQLLSTVVTHEVPHLEDQRSKLLESISLDAITLEELEEKTLNLLQKALGSILDDDKIVDTLRKSKMTSNEISKRIEATKKAESEIQAIRKNYLPIATRGALLYFLVADLTQINYMYQFSLDWFHQVFVSSVVSKSKEQEHSFKREKVSPKEVHEFISISKEPNLENEKNLLDKHIKSAIDMLTKSIFKVVSSALFNEDKLCFSFRLCTVIMQNNANGNLIQDDIGFLPEEEWNIFLYSGILINIKSALSQSRLTSTFEIGESQHLQWLSDSRWRQCQYVSTHLEPFSLLCKSLLSNVSQWDTFKNSKAVYSLISTPFSSENASLEENTKPPEE

SEQ ID NO: 4357 - protein, 126 aa, Homo Sapiens
  misc_feature (1)..(1): Xaa can be any naturally occurring amino acid
XLEYKTVRTFSESLKSEKTEEPKDDDVIRNIIRLREKLGWQTILPQHSLKYGSSKIAIQKITLKKPLEDDGEFVYCLPRKSPKSLYNPYDLQVVSAHTAKHCKEFWVITASFISKRYLVICGAVYI

SEQ ID NO: 4358 - protein, 204 aa, Homo Sapiens
  misc_feature (1)..(1): Xaa can be any naturally occurring amino acid
XMLISAEGEGLVLPKKIRVRSAVEQWLVNVEKSMFDVLKKFLSQGIEDWNCQMFSQWVLSHPGQVVLTVSQIMFYNDCVKSFVSSYSREKLEKVHAGLMCHLEEVADLVVLDTSNSRTKAILGALLILYVHCRDIVINLLLKNIFNAEDFEWTRHLQYKWNEKQKLCYVSQGNASFTYGYEYLGCTSRLVITPLTDRCWLTLME

SEQ ID NO: 4359 - protein, 219 aa, Homo Sapiens
  misc_feature (1)..(1): Xaa can be any naturally occurring amino acid
XRFVTVWKQSIPSTSQKCKHPEDSENNFFEGFPSRYWLPAFFFPQAFLAAVLQDYGRSRGIAVDALTFTHHVISNTTDKDEKFSVFMPKKLNIVRRAFKGSASSHTGVYIFGLFIEGARWNREQKILEDSLPLEMCCDFPDIYFLPTKISTKTPNASNQTDSELYAFECPVYQTPERSRILATTGLPTNFLTSVYLSTKKPPSHWITMRVALLCEKNEK

SEQ ID NO: 4360 - protein, 300 aa, Homo Sapiens
  misc_feature (1)..(1): Xaa can be any naturally occurring amino acid
XTGVSHRADGERGTVGINLPTGECSIFGYFVDIEQCEFIPWSDLVPNDQTLIQRGTSLLTNLQRSGGNFLKITECGECINYTATRDTTCLSFLMSLLLKNSCPVLLTGESGVGKTAAINQMLEKLEGPGAFDIKHGSILGDTLLYSEIKKSSSLKQNITILIPETHKTATGSSDNPTKKPEVRTNKKLLKNNDHKGVVVSTINFSTNVTAAKTKEMILKKLIRRTKDTLGAPKNNRILIFIDDMNMPVSDMYGAQPPLELIRQLLDLGGVYDTEKNTWKNIQDLSIVAACVPVVNDISPR

SEQ ID NO: 4361 - protein, 358 aa, Homo Sapiens
MAPQNLSTFCLLLLYLIGAVIAGRDFYKILGVPRSASIKDIKKAYRKLALQLHPDRNPDDPQAQEKFQDLGAAYEVLSDSEKRKQYDTYGEEGLKDGHQSSHGDIFSHFFGDFGFMFGGTPRQQDRNIPRGSDIIVDLEVTLEEVYAGNFVEVVRNKPVARQAPGKRKCNCRQEMRTTQLGPGRFQMTQEVVCDECPNVKLVNEERTLEVEIEPGVRDGMEYPFIGEGEPHVDGEPGDLRFRIKVVKHPIFERRGDDLYTNVTISLVESLVGFEMDITHLDGHKVHISRDKITRPGAKLWKKGEGLPNFDNNNIKGSLIITFDVDFPKEQLTEEAREGIKQLLKQGSVQKVYNGLQGY

SEQ ID NO: 4362 - protein, 358 aa, Homo Sapiens; identical to SEQ ID NO: 4361

SEQ ID NO: 4363 - protein, 223 aa, Homo Sapiens
MATPQSIFIFAICILMITELILASKSYYDILGVPKSASERQIKKAFHKLAMKYHPDKNKSPDAEAKFREIAEAYETLSDANRRKEYDTLGHSAFTSGKGQRGSGSSFEQSFNFNFDDLFKDFGFFGQNQNTGSKKRFENHFQTRQDGGSSRQRHHFQEFSFGGGLFDDMFEDMEKMFSFSGFDSTNQHTVQTENRFHGSSKHCRTVTQRRGNMVTTYTDCSGQ

SEQ ID NO: 4364 - protein, 153 aa, Homo Sapiens
MGAPLLSPGWGAGAAGRRWWMLLAPLLPALLLVRPAGALVEGLYCGTRDCYEVLGVSRSAGKAEIARAYRQLARRYHPDRYRPQPGDEGPGRTPQSAEEAFLLVATAYETLKVSQAAAELQQYCMQNACKDALLVGVPAGSNPFREPRSCALL

SEQ ID NO: 4365 - protein, 504 aa, Homo Sapiens
MVAPGSVTSRLGSVFPFLLVLVDLQYEGAECGVNADVEKHLELGKKLLAAGQLADALSQFHAAVDGDPDNYIAYYRRATVFLAMGKSKAALPDLTKVIQLKMDFTAARLQRGHLLLKQGKLDEAEDDFKKVLKSNPSENEEKEAQSQLIKSDEMQRLRSQALNAFGSGDYTAAIAFLDKILEVCVWDAELRELRAECFIKEGEPRKAISDLKAASKLKNDNTEAFYKISTLYYQLGDHELSLSEVRECLKLDQDHKRCFAHYKQVKKLNKLIESAEELIRDGRYTDATSKYESVMKTEPSIAEYTVRSKERICHCFSKDEKPVEAIRVCSEVLQMEPDNVNALKDRAEAYLIEEMYDEAIQDYETAQEHNENDQQIREGLEKAQRLLKQSQKRDYYKILGVKRNAKKQEIIKAYRKLALQWHPDNFQNEEEKKKAEKKFIDIAAAKEVLSDPEMRKKFDDGEDPLDAESQQGGGGNPFHRSWNSWQGFNPFSSGGPFRFKFHFN

SEQ ID NO: 4366 - protein, 453 aa, Homo Sapiens
MVAPGSVTSRLGSVFPFLLVLVDLQYEGAECGVNADVEKHLELGKKLLAAGQLADALSQFHAAVDGDPDNYIAYYRRATVFLAMGKSKAALPDLTKVIQLKMDFTAARLQRGHLLLKQGKLDEAEDDFKKVVCVWDAELRELRAECFIKEGEPRKAISDLKAASKLKNDNTEAFYKISTLYYQLGDHELSLSEVRECLKLDQDHKRCFAHYKQVKKLNKLIESAEELIRDGRYTDATSKYESVMKTEPSIAEYTVRSKERICHCFSKDEKPVEAIRVCSEVLQMEPDNVNALKDRAEAYLIEEMYDEAIQDYETAQEHNENDQQIREGLEKAQRLLKQSQKRDYYKILGVKRNAKKQEIIKAYRKLALQWHPDNFQNEEEKKKAEKKFIDIAAAKEVLSDPEMRKKFDDGEDPLDAESQQGGGGNPFHRSWNSWQGFNPFSSGGPFRFKFHFN

SEQ ID NO: 4367 - protein, 60 aa, Homo Sapiens
MRGMKLLGALLALAALLQGAVSLKIAAFNIQTFGETKMSNATLVSYIVQGCTRHLSLRGQ

SEQ ID NO: 4368 - protein, 60 aa, Homo Sapiens; identical to SEQ ID NO: 4367

SEQ ID NO: 4369 - protein, 60 aa, Homo Sapiens; identical to SEQ ID NO: 4367

SEQ ID NO: 4370 - protein, 282 aa, Homo Sapiens [sequence omitted]

SEQ ID NO: 4371 - protein, 282 aa, Homo Sapiens [sequence omitted]

SEQ ID NO: 4372 - protein, 86 aa, Homo Sapiens
MRGMKLLGALLALAALLQGAVSLKIAAFNIQTFGETKMSNATLVSYIVQILSRYDIALVQEVRDSHLTAVGKLLDNLNQWVTVAGS

SEQ ID NO: 4373 - protein, 108 aa, Homo Sapiens
NREPAIVRFFSRFTEVREFAIVPLHAAPGDAVAEIDALYDVYLDVQEKWGLEDVMLMGDFNAGCSYVRPSQWSSIRLWTSPTFQWLIPDSADTTATPTHCAYDRLPMA

SEQ ID NO: 4374 - protein, 72 aa, Homo Sapiens
SIRLWTSPTFQWLIPDSADTTATPTHCAYDRIVVAGMLLRGAVVPDSALPFNFQAAYGLSDQLVCVLPCTAT

SEQ ID NO: 4375 - protein, 90 aa, Homo Sapiens
  misc_feature (1)..(1): Xaa can be any naturally occurring amino acid
XHYVVSEPLGRNSYKERYLFVYRPDQVSAVDSYYYDDGCEPCGNDTFNREPAIVRFFSRFTGSVPHTTWLSPQRSGSLPLFPCMRPRGTQ

SEQ ID NO: 4376 - protein, 75 aa, Homo Sapiens
  misc_feature (1)..(1): Xaa can be any naturally occurring amino acid
XRYLFVYRPDQVSAVDSYYYDDGCEPCGNDTFNREPAIVRFFSRFTGSVPHTTWLSPQRSGSLPLFPCMRPRGTQ

SEQ ID NO: 4377 - protein, 65 aa, Homo Sapiens
  misc_feature (1)..(1): Xaa can be any naturally occurring amino acid
XTFQWLIPDSADTTATPTHCAYDRIVVAGMLLRGAVVPDSALPFNFQAAYGLSDQLVCVLPCTAT

SEQ ID NO: 4378 - protein, 26 aa, Homo Sapiens
MHYPTALLFLILANGAQAFRICAFNA

SEQ ID NO: 4379 - protein, 85 aa, Homo Sapiens
MHYPTALLFLILANGAQAFRICAFNAQRLTLAKVAREQVMDTLVRALNISDHYPVEVELKLSQAHSVQPLSLTVLLLLSLLSPQL

SEQ ID NO: 4380 - protein, 62 aa, Homo Sapiens
MHYPTALLFLILANGAQAFRICAFNAQRLTLAKVAREQVMDTLVRDVILLGDFNADCASLTK

SEQ ID NO: 4381 - protein, 104 aa, Homo Sapiens
MHYPTALLFLILANGAQAFRICAFNAQRLTLAKVAREQVMDTLVRILARCDIMVLQEVVDSSGSAIPLLLRELNRFDGSGPYSTLSSPQLGRSTYMETYVYFYR

SEQ ID NO: 4382 - protein, 208 aa, Homo Sapiens
MHYPTALLFLILANGAQAFRICAFNAQRLTLAKVAREQVMDTLVRILARCDIMVLQEVVDSSGSAIPLLLRELNRFDGSGPYSTLSSPQLGRSTYMETYVYFYRSHKTQVLSSYVYNDEDDVFAREPFVAQFSLPSNVLPSLVLVPLHTTPKAVEKELNALYDVFLEVSQHWQSKDVILLGDFNADCASLTKKRLDKLELRTEPGFHW

SEQ ID NO: 4383 - protein, 302 aa, Homo Sapiens
MHYPTALLFLILANGAQAFRICAFNAQRLTLAKVAREQVMDTLVRILARCDIMVLQEVVDSSGSAIPLLLRELNRFDGSGPYSTLSSPQLGRSTYMETYVYFYRSHKTQVLSSYVYNDEDDVFAREPFVAQFSLPSNVLPSLVLVPLHTTPKAVEKELNALYDVFLEVSQHWQSKDVILLGDFNADCASLTKKRLDKLELRTEPGFHWVIADGEDTTVRASTHCTYDRVVLHGERCRSLLHTAAAFDFPTSFQLTEEEALNISDHYPVEVELKLSQAHSVQPLSLTVLLLLSLLSPQLCPAA

SEQ ID NO: 4384 - protein, 302 aa, Homo Sapiens; identical to SEQ ID NO: 4383

SEQ ID NO: 4385 - protein, 302 aa, Homo Sapiens; identical to SEQ ID NO: 4383

SEQ ID NO: 4386 - protein, 302 aa, Homo Sapiens; identical to SEQ ID NO: 4383

SEQ ID NO: 4387 - protein, 302 aa, Homo Sapiens; identical to SEQ ID NO: 4383

SEQ ID NO: 4388 - protein, 302 aa, Homo Sapiens; identical to SEQ ID NO: 4383

SEQ ID NO: 4389 - protein, 278 aa, Homo Sapiens
MGGPRALLAALWALEAAGTAALRIGAFNIQSFGDSKVSDPACGSIIAKILAGYDLALVQEVRDPDLSAVSALMEQINSVSEHEYSFVSSQPLGRDQYKEMYLFVYRKDAVSVVDTYLYPDPEDVFSREPFVVKFSAPGTAQNLVLIPLHAAPHQAVAEIDALYDVYLDVIDKWGTDDMLFLGDFNADCSYVRAQDWAAIRLRSSEVFKWLIPDSADTTVGNSDCAYDRIVACGARLRRSLKPQSATVHDFQEEFGLDQTQALAISDHFPVEVTLKFHR

SEQ ID NO: 4390 - protein, 278 aa, Homo Sapiens; identical to SEQ ID NO: 4389

SEQ ID NO: 4391 - protein, 299 aa, Homo Sapiens
MGGPRALLAALWALEAAGTAALRIGAFNIQSFGDSKVSDPACGSIIAKILAGYDLALVQEVRDPDLSAVSALMEQINSVSEHEYSFVSSQPLGRDQYKEMYLFVYRKDAVSVVDTYLYPDPEDVFSREPFVVKFSAPGTGERAPPLPSRRALTPPPLPAAAQNLVLIPLHAAPHQAVAEIDALYDVYLDVIDKWGTDDMLFLGDFNADCSYVRAQDWAAIRLRSSEVFKWLIPDSADTTVGNSDCAYDRIVACGARLRRSLKPQSATVHDFQEEFGLDQTQALAISDHFPVEVTLKFHR

SEQ ID NO: 4392 - protein, 299 aa, Homo Sapiens; identical to SEQ ID NO: 4391

SEQ ID NO: 4393 - protein, 299 aa, Homo Sapiens; identical to SEQ ID NO: 4391

SEQ ID NO: 4394 - protein, 254 aa, Homo Sapiens
PRALLAALWALEAAGTAALRIGAFNIQSFGDSKVSDPACGSIIAKILAGYDLALVQEVRDPDLSAVSALMEQINSVSEHEYSFVSSQPLGRDQYKEMYLFVYRKDAVSVVDTYLYPDPEDVFSREPFVVKFSAPGTGERAPPLPSRRALTPPPLPAAAQNLVLIPLHAAPHQAVAEIDALYDVYLDVIDKWGTDDWAAIRLRSSEVFKWLIPDSADTTVGNSDCAYDRIVACGARLRRSLKPQSATVHDFQEEF

SEQ ID NO: 4395 - protein, 137 aa, Homo Sapiens
ADVFSREPFVVWFQSPHTAVKDFVIIPLHTTPETSVKEIDELVEVYTDVKHRWKAENFIFMGDFNAGCSYVPKKAWKNIRLRTDPRFVWLIGDQEDTTVKKSTNCAYDRPWMSATTFQLNLNYSLQGPSPTAKNLSL

SEQ ID NO: 4396 - protein, 275 aa, Homo Sapiens
MSRELAPLLLLLLSIHSALAMRICSFNVRSFGESKQEDKNAMDVIVKVIKRCDIILVMEIKDSNNRICPILMEKLNREKLVSVKRSYHYHDYQDGDADVFSREPFVVWFQSPHTAVKDFVIIPLHTTPETSVKEIDELVEVYTDVKHRWKAENFIFMGDFNAGCSYVPKKAWKNIRLRTDPRFVWLIGDQEDTTVKKSTNCAYDRIVLRGQEIVSSVVPKSNSVFDFQKAYKLTEEEALDVSDHFPVEFKLQSSRAFTNSKKSVTLRKKTKSKRS

SEQ ID NO: 4397 - protein, 100 aa, Homo Sapiens
MSRELAPLLLLLLSIHSALAMRICSFNVRSFGESKQEDKNAMDVIVKVIKRCDIILVMEIKDSNNRICPILMEKLNRNSRRGITYNYVISSRLGRNTYKE

SEQ ID NO: 4398 - protein, 158 aa, Homo Sapiens
MSRELAPLLLLLLSIHSALAMRICSFNVRSFGESKQEDKNAMDVIVKVIKRCDIILVMEIKDSNNRICPILMEKLNRNSRRGITYNYVISSRLGRNTYKEQYAFLYKEKLVSVKRSYHYHDYQDGDADVFSREPFVVWFQSPHTAVKDFVIIPLHTTP

SEQ ID NO: 4399 - protein, 305 aa, Homo Sapiens
MSRELAPLLLLLLSIHSALAMRICSFNVRSFGESKQEDKNAMDVIVKVIKRCDIILVMEIKDSNNRICPILMEKLNRNSRRGITYNYVISSRLGRNTYKEQYAFLYKEKLVSVKRSYHYHDYQDGDADVFSREPFVVWFQSPHTAVKDFVIIPLHTTPETSVKEIDELVEVYTDVKHRWKAENFIFMGDFNAGCSYVPKKAWKNIRLRTDPRFVWLIGDQEDTTVKKSTNCAYDRIVLRGQEIVSSVVPKSNSVFDFQKAYKLTEEEALDVSDHFPVEFKLQSSRAFTNSKKSVTLRKKTKSKRS

SEQ ID NO: 4400 - protein, 288 aa, Homo Sapiens
MSRELAPLLLLLLSIHSALAMRICSFNVRSFGESKQEDKNAMDVIVKVIKRCDIILVMEIKDSNNRICPILMEKLNRNSRRGITYNYVISSRLGRNTYKEQYAFLYKEKLVSVKRSYHYHDYQDGDADVFSREPFVVWFQSPHTAVKDFVIIPLHTTPETSVKEIDELVEVYTDVKHRWKAENFIFMGDFNAGCSYVPKKAWKNIRLRTDPRFVWLIGDQEDTTVKKSTNCAYDRIVLRGQEIVSSVVPKSNSVFDFQKAYKLTEEEVRLPSCLSMPLSWKDELAWAT

SEQ ID NO: 4401 - protein, 218 aa, Homo Sapiens
MIPLLLAALLCVPAGALTCYGDSGQPVDWFVVYKLPALRGSGEAAQRGLQYKYLDESSGGWRDGRALINSPEGAVGRSLQPLYRSNTSQLAFLLYNDQPPQPSKAQDSSMRGHTKGKQLTYTYPWVYNYQLEGIFAQEFPDLENVVKGHHVSQEPWNSSITLTSQAGAVFQSFAKFSKFGDDLYSGWLAAALGTNLQVQFWHKTVGILPSNCSDIWQV

SEQ ID NO: 4402 - protein, 360 aa, Homo Sapiens
MIPLLLAALLCVPAGALTCYGDSGQPVDWFVVYKLPALRGSGEAAQRGLQYKYLDESSGGWRDGRALINSPEGAVGRSLQPLYRSNTSQLAFLLYNDQPPQPSKAQDSSMRGHTKGVLLLDHDGGFWLVHSVPNFPPPASSAAYSWPHSACTYGQTLLCVSFPFAQFSKMGKQLTYTYPWVYNYQLEGIFAQEFPDLENVVKGHHVSQEPWNSSITLTSQAGAVFQSFAKFSKFGDDLYSGWLAAALGTNLQVQFWHKTVGILPSNCSDIWQVLNVNQIAFPGPAGPSFNSTEDHSKWCVSPKGPWTCVGDMNRNQGEEQRGGGTLCAQLPALWKAFQPLVKNYQPCNGMARKPSRAYKI

SEQ ID NO: 4403 - protein, 361 aa, Homo Sapiens
MKQKMMARLLRTSFALLFLGLFGVLGAATISCRNEEGKAVDWFTFYKLPKRQNKESGETGLEYLYLDSTTRSWRKSEQLMNDTKSVLGRTLQQLYEAYASKSNNTAYLIYNDGVPKPVNYSRKYGHTKGLLLWNRVQGFWLIHSIPQFPPIPEEGYDYPPTGRRNGQSGICITFKYNQYEAIDSQLLVCNPNVYSCSIPATFHQELIHMPQLCTRASSSEIPGRLLTTLQSAQGQKFLHFAKSDSFLDDIFAAWMAQRLKTHLLTETWQRKRQELPSNCSLPYHVYNIKAIKLSRHSYFSSYQDHAKWCISQKGTKNRWTCIGDLNRSPHQAFRSGGFICTQNWQIYQAFQGLVLYYESCK

SEQ ID NO: 4404 - protein, 153 aa, Homo Sapiens
MPQLCTRASSSEIPGRLLTTLQSAQGQKFLHFAKSDSFLDDIFAAWMAQRLKTHLLTETWQRKRQELPSNCSLPYHVYNIKAIKLSRHSYFSSYQDHAKWCISQKGTKNRWTCIGDLNRSPHQAFRSGGFICTQNWQIYQAFQGLVLYYESCK

SEQ ID NO: 4405 - protein, 107 aa, Homo Sapiens
MWSGWWLWPLVAVCTADFFRDEAERIMRDSPVIDGHNDLPWQLLDMFNNRLQDERANLTTLAGTHTNIPKLRAGFVGGQFWSVYTPCDTQNKDAVRRTLEQMDVVHR

SEQ ID NO: 4406 - protein, 111 aa, Homo Sapiens
MWSGWWLWPLVAVCTADFFRDEAERIMRDSPVIDGHNDLPWQLLDMFNNRLQDERANLTTLAGTHTNIPKLRAGFVGGQFWSVYTPCDTQNKDAVRRTLEQMDVVHRMCRM

SEQ ID NO: 4407 - protein, 411 aa, Homo Sapiens
MWSGWWLWPLVAVCTADFFRDEAERIMRDSPVIDGHNDLPWQLLDMFNNRLQDERANLTTLAGTHTNIPKLRAGFVGGQFWSVYTPCDTQNKDAVRRTLEQMDVVHRMCRMYPETFLYVTSSAGIRQAFREGKVASLIGVEGGHSIDSSLGVLRALYQLGMRYLTLTHSCNTPWADNWLVDTGDSEPQSQGLSPFGQRVVKELNRLGVLIDLAHVSVATMKATLQLSRAPVIFSHSSAYSVCASRRNVPDDVLRLVKQTDSLVMVNFYNNYISCTNKANLSQVADHLDHIKEVAGARAVGFGGDFDGVPRVPEGLEDVSKYPDLIAELLRRNWTEAEVKGALADNLLRVFEAVEQASNLTQAPEEEPIPLDQLGGSCRTHYGYSSGASSLHRHWGLLLASLAPLVLCLSLL

SEQ ID NO: 4408 - protein, 411 aa, Homo Sapiens; identical to SEQ ID NO: 4407

SEQ ID NO: 4409 - protein, 411 aa, Homo Sapiens; identical to SEQ ID NO: 4407

SEQ ID NO: 4410 - protein, 161 aa, Homo Sapiens
MKLQTLAVSVTALKFWSAYVPCQTQDRDALRLTLEQIDLIRRMCASYSELELVTSAKALNDTQKLACLIGVEGGHSLDNSLSILRTFYMLGVRYLTLTHTCNTPWAESSAKGVHSFYNNISGLTDFGEKVVAEMNRLGMMVDLSHVSDAVARRALEVSQAP

SEQ ID NO: 4411 - protein, 123 aa, Homo Sapiens
MQMIIIWALLDTEAESSAKGVHSFYNNISGLTDFGEKVVAEMNRLGMMVDLSHVSDAVARRALEVSQAPVIFSHSAARGVCNSARNVPDDILQLLKKNGGVVMVSLSMGVIQCNPSANVSTVA

SEQ ID NO: 4412 - protein, 114 aa, Homo Sapiens
MQPSGLEGPGTFGRWPLLSLLLLLLLLQPVTCAYTTPGPPRALTTLGAPRAHTMPGTYAPSTTLSSPSTQGLQEQARALMRDFPLVDGHNDLPLVLRQVYQKGLQDVNLRNFSY

SEQ ID NO: 4413 - protein, 137 aa, Homo Sapiens
MQPSGLEGPGTFGRWPLLSLLLLLLLLQPVTCAYTTPGPPRALTTLGAPRAHTMPGTYAPSTTLSSPSTQGLQEQARALMRDFPLVDGHNDLPLVLRQVYQKGLQDVNLRNFSYGQTSLDRLRDGLVGAQFWSAYVP

SEQ ID NO: 4414 - protein, 486 aa, Homo Sapiens
MQPSGLEGPGTFGRWPLLSLLLLLLLLQPVTCAYTTPGPPRALTTLGAPRAHTMPGTYAPSTTLSSPSTQGLQEQARALMRDFPLVDGHNDLPLVLRQVYQKGLQDVNLRNFSYGQTSLDRLRDGLVGAQFWSAYVPCQTQDRDALRLTLEQIDLIRRMCASYSELELVTSAKALNDTQKLACLIGVEGGHSLDNSLSILRTFYMLGVRYLTLTHTCNTPWAESSAKGVHSFYNNISGLTDFGEKVVAEMNRLGMMVDLSHVSDAVARRALEVSQAPVIFSHSAARGVCNSARNVPDDILQLLKKNGGVVMVSLSMGVIQCNPSANVSTVADHFDHIKAVIGSKFIGIGGDYDGAGKFPQGLEDVSTYPVLIEELLSRGWSEEELQGVLRGNLLRVFRQVEKVQEENKWQSPLEDKFPDEQLSSSCHSDLSRLRQRQSLTSGQELTEIPIHWTAKLPAKWSVSESSPHMAPVLAVVATFPVLILWL

SEQ ID NO: 4415 - protein, 486 aa, Homo Sapiens; identical to SEQ ID NO: 4414

SEQ ID NO: 4416 - protein, 258 aa, Homo Sapiens
MQPSGLEGPGTFGRWPLLSLLLLLLLLQPVTCAYTTPGPPRALTTLGAPRAHTMPGTYAPSTTLSSPSTQGLQEQARALMRDFPLVDGHNDLPLVLRQVYQKGLQDVNLRNFSYGQTSLDRLRDGLVGAQFWSAYVPCQTQDRDALRLTLEQIDLIRRMCASYSELELVTSAKALNDTQKLACLIGVEGGHSLDNSLSILRTFYMLGVRYLTLTHTCNTPWAESSAKGVHSFYNNISGLTDFGEMLWHGGPWKCHRHL

SEQ ID NO: 4417 - protein, 513 aa, Homo Sapiens
MIRTPLSASAHRLLLPGSRGRPPRNMQPTGREGSRALSRRYLRRLLLLLLLLLLRQPVTRAETTPGAPRALSTLGSPSLFTTPGVPSALTTPGLTTPGTPKTLDLRGRAQALMRSFPLVDGHNDLPQVLRQRYKNVLQDVNLRNFSHGQTSLDRLRDGLVGAQFWSASVSCQSQDQTAVRLALEQIDLIHRMCASYSELELVTSAEGLNSSQKLACLIGVEGGHSLDSSLSVLRSFYVLGVRYLTLTFTCSTPWAESSTKFRHHMYTNVSGLTSFGEKVVEELNRLGMMIDLSYASDTLIRRVLEVSQAPVIFSHSAARAVCDNLLNVPDDILQLLKKNGGIVMVTLSMGVLQCNLLANVSTVADHFDHIRAVIGSEFIGIGGNYDGTGRFPQGLEDVSTYPVLIEELLSRSWSEEELQGVLRGNLLRVFRQVEKVREESRAQSPVEAEFPYGQLSTSCHSHLVPQNGHQATHLEVTKQPTNRVPWRSSNASPYLVPGLVAAATIPTFTQWLC

SEQ ID NO: 4418 - protein, 357 aa, Homo Sapiens
MATVIHNPLKALGDQFYKEAIEHCRSYNSRLCAERSVRLPFLDSQTGVAQNNCYIWMEKRHRGPGLAPGQLYTYPARCWRKKRRLHPPEDPKLRLLEIKPEVELPLKKDGFTSESTTLEALLRGEGVEKKVDAREEESIQEIQRVLENDENVEEGNEEEDLEEDIPKRKNRTRGRARGSAGGRRRHDAASQEDHDKPYVCDICGKRYKNRPGLSYHYAHTHLASEEGDEAQDQETRSPPNHRNENHRPQKGPDGTVIPNNYCDFCLGGSNMNKKSGRPEELVSCADCGRSAHLGGEGRKEKEAAAAARTTEDLFGSTSESDTSTFHGFDEDDLEEPRSCRGRRSGRGSPTADKKGSC

SEQ ID NO: 4419 - protein, 357 aa, Homo Sapiens; identical to SEQ ID NO: 4418

SEQ ID NO: 4420 - protein, 378 aa, Homo Sapiens
MATVIHNPLKALGDQFYKEAIEHCRSYNSRLCAERSVRLPFLDSQTGVAQNNCYIWMEKRHRGPGLAPGQLYTYPARCWRKKRRLHPPEDPKLRLLEIKPEVELPLKKDGFTSESTTLEALLRGEGVEKKVDAREEESIQEIQRVLENDENVEEGNEEEDLEEDIPKRKNRTRGRARGSAGGRRRHDAASQEDHDKPYVCDICGKRYKNRPGLSYHYAHTHLASEEGDEAQDQETRSPPNHRNENHRPQKGPDGTVIPNNYCDFCLGGSNMNKKSGRPEELVSCADCGRSGHPTCLQFTLNMTEAVKTYKWQCIECKSCILCGTSENDDQLLFCDDCDRGYHMYCLNPPVAEPPEGSWSCHLCWELLKEKASAFGCQA

SEQ ID NO: 4421 - protein, 412 aa, Homo Sapiens
MFYGRINGRNFAASSLPVAFAATPLMLFLPNPQLIFSFPISSRNHITGLMPPGKLKLENLFHMCTRLGDQFYKEAIEHCRSYNSRLCAERSVRLPFLDSQTGVAQNNCYIWMEKRHRGPGLAPGQLYTYPARCWRKKRRLHPPEDPKLRLLEIKPEVELPLKKDGFTSESTTLEALLRGEGVEKKVDAREEESIQEIQRVLENDENVEEGNEEEDLEEDIPKRKNRTRGRARGSAGGRRRHDAASQEDHDKPYVCDICGKRYKNRPGLSYHYAHTHLASEEGDEAQDQETRSPPNHRNENHRPQKGPDGTVIPNNYCDFCLGGSNMNKKSGRPEELVSCADCGRSAHLGGEGRKEKEAAAAARTTEDLFGSTSESDTSTFHGFDEDDLEEPRSCRGRRSGRGSPTADKKGSC

SEQ ID NO: 4422 - protein, 412 aa, Homo Sapiens; identical to SEQ ID NO: 4421

SEQ ID NO: 4423 - protein, 367 aa, Homo Sapiens
MGFTDLEEPISGCPGGPWALGLGDQFYKEAIEHCRSYNSRLCAERSVRLPFLDSQTGVAQNNCYIWMEKRHRGPGLAPGQLYTYPARCWRKKRRLHPPEDPKLRLLEIKPEVELPLKKDGFTSESTTLEALLRGEGVEKKVDAREEESIQEIQRVLENDENVEEGNEEEDLEEDIPKRKNRTRGRARGSAGGRRRHDAASQEDHDKPYVCDICGKRYKNRPGLSYHYAHTHLASEEGDEAQDQETRSPPNHRNENHRPQKGPDGTVIPNNYCDFCLGGSNMNKKSGRPEELVSCADCGRSAHLGGEGRKEKEAAAAARTTEDLFGSTSESDTSTFHGFDEDDLEEPRSCRGRRSGRGSPTADKKGSC

SEQ ID NO: 4424 - protein, 367 aa, Homo Sapiens; identical to SEQ ID NO: 4423

SEQ ID NO: 4425 - protein, 170 aa, Homo Sapiens
MKTPWKVLLGLLGAAALVTIITVPVVLLNKGNDATADSRKTYTLTDYLKNTYRLKLYSLRWISDHEYLYKQENNILVFNAEYGNSSVFLENSTFDEFGHSINDYSISPDGQFILLEYNYVKQWRHSYTASYDIYDLNKRQLITEERIPNNTQWVTWSPVGHKLVSICLEQ

SEQ ID NO: 4426 - protein, 766 aa, Homo Sapiens
MKTPWKVLLGLLGAAALVTIITVPVVLLNKGTDDATADSRKTYTLTDYLKNTYRLKLYSLRWISDHEYLYKQENNILVFNAEYGNSSVFLENSTFDEFGHSINDYSISPDGQFILLEYNYVKQWRHSYTASYDIYDLNKRQLITEERIPNNTQWVTWSPVGHKLAYVWNNDIYVKIEPNLPSYRITWTGKEDIIYNGITDWVYEEEVFSAYSALWWSPNGTFLAYAQFNDTEVPLIEYSFYSDESLQYPKTVRVPYPKAGAVNPTVKFFVVNTDSLSSVTNATSIQITAPASMLIGDHYLCDVTWATQERISLQWLRRIQNYSVMDICDYDESSGRWNCLVARQHIEMSTTGWVGRFRPSEPHFTLDGNSFYKIISNEEGYRHICYFQIDKKDCTFITKGTWEVIGIEALTSDYLYYISNEYKGMPGGRNLYKIQLSDYTKVTCLSCELNPERCQYYSVSFSKEAKYYQLRCSGPGLPLYTLHSSVNDKGLRVLEDNSALDKMLQNVQMPSKKLDFIILNETKFWYQMILPPHFDKSKKYPLLLDVYAGPCSQKADTVFRLNWATYLASTENIIVASFDGRGSGYQGDKIMHAINRRLGTFEVEDQIEAARQFSKMGFVDNKRIAIWGWSYGGYVTSMVLGSGSGVFKCGIAVAPVSRWEYYDSVYTERYMGLPTPEDNLDHYRNSTVMSRAENFKQVEYLLIHGTADDNVHFQQSAQISKALVDVGVDFQAMWYTDEDHGIASSTAHQHIYTHMSHFIKQCFSLP

SEQ ID NO: 4427 - protein, 118 aa, Homo Sapiens
MKTPWKVLLGLLGAAALVTIITVPVVLLNKGTDDATADSRKTYTLTDYLKNTYRLKLYSLRWISDHEYLYKQENNILVFNAEYGNSSVFLENSTFHMAKWIFLSFLKCSLPWLLFSLL

SEQ ID NO: 4428 - protein, 118 aa, Homo Sapiens; identical to SEQ ID NO: 4427

SEQ ID NO: 4429 - protein, 86 aa, Homo Sapiens
  misc_feature (1)..(1): Xaa can be any naturally occurring amino acid
XDATADSRKTYTLTDYLKNTYRLKLYSLRWISDHEYLYKQENNILVFNAEYGNSSVFLENSTFHMAKWIFLSFLKCSLPWLLFSLL

SEQ ID NO: 4430 - protein, 272 aa, Homo Sapiens
APWAPVLLLALGLRGLQAGARRAPDPGFQERFFQQRLDHFNFERFGNKTFPQRFLVSDRFWVRGEGPIFFYTGNEGDVWAFANNSAFVAELAAERGALLVFAEHRYYGKSLPFGAQSTQRGHTELLTVEQALADFAELLRALRRDLGAQDAPAIAFGGRKPSHLSSQPPAQLGCAATLAAFPSESCTRTWPRVGICGSQKCRPPCGTCGPLRRKRGNGVLGAAALTLCPSPSYGGMLSAYLRMKYPHLVAGALAASAPVLAVAGLGDSNQFF

SEQ ID NO: 4431 - protein, 492 aa, Homo Sapiens [sequence omitted]

SEQ ID NO: 4432 - protein, 61 aa, Homo Sapiens
  misc_feature (1)..(1): Xaa can be any naturally occurring amino acid
XSGSEHCYDIYRLYHSCADPTGCGTGPDARAWDYQISEPPATSSSPTGTWTPGQGAGFGGT

SEQ ID NO: 4433 - protein, 155 aa, Homo Sapiens
  misc_feature (1)..(1): Xaa can be any naturally occurring amino acid
XTFPQRFLVSDRFWVRGEGPIFFYTGNEGDVWAFANNSAFVAELAAERGALLVFAEHRYYGKSLPFGAQSTQRGHTELLTVEQALADFAELLRALRRDLGAQDAPAIAFGGSLRHGPLGVRHLPAAVRREGPDPALHVRPECLHRAGHDGLPLPH

SEQ ID NO: 4434 - protein, 244 aa, Homo Sapiens
  misc_feature (1)..(1): Xaa can be any naturally occurring amino acid
XTVRWEFGTCQPLSDEKDLTQLFMFARNAFTVLAMMDYPYPTDFLGPLPANPVKVGCDRLLSEAQRITGLRALAGALPPAPDGCADPTGCGTGPDARAWDYQACTEINLTFASNNVTDMFPDLPFTDELRQRYCLDTWGVWPRPDWLLTSFWGGDLRAASNIIFSNGNLDPWAGGGIRRNLSASVIAVTIQGGAHHLDLRASHPEDPASVVEARKLEATIIGEWVKAARREQQPALRGGPRLSL

SEQ ID NO: 4435 - protein, 120 aa, Homo Sapiens
  misc_feature (1)..(1): Xaa can be any naturally occurring amino acid
XVLLLALGLRGLQAGARRAPDPGFQERFFQQRLDHFNFERFGNKTFPQRFLVSGSGSGARGPSSSTLGTRATCGPSPTTRPSSRSWRPSGGLYWSSRSTATTGSRCRSVRSPRSAGTRSC

SEQ ID NO: 4436 - protein, 201 aa, Homo Sapiens
MDLSLLWVLLPLVTMAWGQYGDYGYPYQQYHDYSDDGWVNLNRQGFSYQCPQGQVIVAVRSIFSKKEGSDRQWNYACMPTPQSLGEPTECWWEEINRAGMEWYQTCSNNGLVAGFQSRYFESVLDREWQFYCCRYSKRCPYSCWLTTEYPGHYGEEMDMISYNYDYYIRGATTTFSAVERDRQWKFIMCRMTEYDCEFANV

SEQ ID NO: 4437 - protein, 349 aa, Homo Sapiens
MAGPAIHTAPMLFLVLLLPLELSLAGALAPGTPARNLPENHIDLPGPALWTPQASHHRRRGPGKKEWGPGLPSQAQDGAVVTATRQASRLPEAEGLLPEQSPAGLLQDKDLLLGLALPYPEKENRPPGWERTRKRSREHKRRRDRLRLHQGRALVRGPSSLMKKAELSEAQVLDAAMEESSTSLAPTMFFLTTFEAAPATEESLILPVTSLRPQQAQPRSDGEVMPTLDMALFDWTDYEDLKPDGWPSAKKKEKHRGKLSSDGNETSPAEGEPCDHHQDCLPGTCCDLREHLCTPHNRGLNNKCFDDCMCVEGLRCYAKFHRNRRVTRRKGRCVEPETANGDQGSFINV

SEQ ID NO: 4438 - protein, 136 aa, Homo Sapiens
MRTHTRGAPSVFFIYLLCFVSAYITDENPEVMIPFTNANYDSHPMLYFSRAEVAELQLRAASSHEHIAARLTEAVHTMLSSPLEYLPPWDPKDYSARWNEIFGNNLGALAMFCVLYPENIEARDMAKDYMERMAAQ

SEQ ID NO: 4439 - protein, 139 aa, Homo Sapiens
MRTHTRGAPSVFFIYLLCFVSAYITDENPEVMIPFTNANYDSHPMLYFSRAEVAELQLRAASSHEHIAARLTEAVHTMLSSPLEYLPPWDPKDYSARWNEIFGNNLGALAMFCVLYPENIEARDMAKDYMERMAAQPSW

SEQ ID NO: 4440 - protein, 144 aa, Homo Sapiens
MRTHTRGAPSVFFIYLLCFVSAYITDENPEVMIPFTNANYDSHPMLYFSRAEVAELQLRAASSHEHIAARLTEAVHTMLSSPLEYLPPWDPKDYSARWNEIFGNNLGALAMFCVLYPENIEARDMAKDYMERMAAQPSWLVKDA

SEQ ID NO: 4441 - protein, 228 aa, Homo Sapiens
MRTHTRGAPSVFFIYLLCFVSAYITDENPEVMIPFTNANYDSHPMLYFSRAEVAELQLRAASSHEHIAARLTEAVHTMLSSPLEYLPPWDPKDYSARWNEIFGNNLGALAMFCVLYPENIEARDMAKDYMERMAAQPSWLVKDAPWDEVPLAHSLVGFATAYDFLYNYLSKTQQEKFLEVIANASGYMYETSYRRGWGFQYLHNHQPTNCMALLTGSLVLMNQGMMAA

SEQ ID NO: 4442 - protein, 228 aa, Homo Sapiens; identical to SEQ ID NO: 4441

SEQ ID NO: 4443 - protein, 958 aa, Homo Sapiens [sequence omitted]

SEQ ID NO: 4444 - protein, 308 aa, Homo Sapiens
MRTHTRGAPSVFFIYLLCFVSAYITDENPEVMIPFTNANYDSHPMLYFSRAEVAELQLRAASSHEHIAARLTEAVHTMLSSPLEYLPPWDPKDYSARWNEIFGNNLGALAMFCVLYPENIEARDMAKDYMERMAAQPSWLVKDAPWDEVPLAHSLVGFATAYDFLYNYLSKTQQEKFLEVIANASGYMYETSYRRGWGFQYLHNHQPTNCMALLTGSLVLMNQGYLQEAYLWTKQVLTIMEKSLVLLREVTDGSLYEGVAYGSYTTRSLFQYMFLVQRHFNINHFGHPWLKQHFAFMYRTILPGMMAA

SEQ ID NO: 4445 - protein, 958 aa, Homo Sapiens [sequence omitted]

SEQ ID NO: 4446 - protein, 958 aa, Homo Sapiens [sequence omitted]

SEQ ID NO: 4447 - protein, 1118 aa, Homo Sapiens
MARSPGRAYALLLLLICFNVGSGLHLQVLSTRNENKLLPKHPHLVRQKRAWITAPVALREGEDLSKKNPIAKIHSDLAEERGLKITYKYTGKGITEPPFGIFVFNKDTGELNVTSILDREETPFFLLTGYALDARGNNVEKPLELRIKVLDINDNEPVFTQDVFVGSVEELSAAHTLVMKINATDADEPNTLNSKISYRIVSLEPAYPPVFYLNKDTGEIYTTSVTLDREEHSSYTLTVEARDGNGEVTDKPVKQAQVQIRILDVNDNIPVVENKVLEGMVEENQVNVEVTRIKVFDADEIGSDNWLANFTFASGNEGGYFHIETDAQTNEGIVTLIKEVDYEEMKNLDFSVIVANKAAFHKSIRSKYKPTPIPIKVKVKNVKEGIHFKSSVISIYVSESMDRSSKGQIIGNFQAFDEDTGLPAHARYVKLEDRDNWISVDSVTSEIKLAKLPDFESRYVQNGTYTVKIVAISEDYPRKTITGTVLINVEDINDNCPTLIEPVQTICHDAEYVNVTAEDLDGHPNSGPFSFSVIDKPPGMAEKWKIARQESTSVLLQQSEKKLGRSEIQFLISDNQGFSCPEKQVLTLTVCECLHGSGCREAQHDSYVGLGPAAIALMILAFLLLLLVPLLLLMCHCGKGAKGFTPIPGTIEMLHPWNNEGAPPEDKVVPSFLPVDQGGSLVGRNGVGGMAKEATMKGSSSASIVKGQHEMSEMDGRWEEHRSLLSGRATQFTGATGAIMTTETTKTARATGASRDMAGAQAAAVALNEEFLRNYFTDKAASYTEEDENHTAKDCLLVYSQEETESLNASIGCCSFIEGELDDRFLDDLGLKFKTLAEVCLGQKIDINKEIEQRQKPATETSMNTASHSLCEQTMVNSENTYSSGSSFPVPKSLQEANAEKVTQEIVTERSVSSRQAQKVATPLPDPMASRNVIATETSYVTGSTMPPTTVILGPSQPQSLIVTERVYAPASTLVDQPYANEGTVVVTERVIQPHGGGSNPLEGTQHLQDVPYVMVRERESFLAPSSGVQPTLAMPNIAVGQNVTVTERVLAPASTLQSSYQIPTENSMTARNTTVSGAGVPGPLPDFGLEESGHSNSTITTSSTRVTKHSTVQHSYS

SEQ ID NO: 4448 - protein, 232 aa, Homo Sapiens
MARSPGRAYALLLLLICFNVGSGLHLQVLSTRNENKLLPKHPHLVRQKRAWITAPVALREGEDLSKKNPIAKIHSDLAEERGLKITYKYTGKGITEPPFGIFVFNKDTGELNVTSILDREETPFFLLTGYALDARGNNVEKPLELRIKVLDINDNEPVFTQDVFVGSVEELSAAHTLVMKINATDADEPNTLNSKISYRIVSLEPAYPPVFYLNKDTGEIYTTSVTLDREVS

SEQ ID NO: 4449 - protein, 1301 aa, Homo Sapiens
MKIITYFCIWAVAWAIPVPQSKPLERHVEKSMNLHLLARSNVSVQDELNASGTIKESGVLVHEGDRGRQENTQDGHKGEGNGSKWAEVGGKSFSTYSTLANEEGNIEGWNGDTGKAETYGHDGIHGKEENITANGIQGQVSIIDNAGATNRSNTNGNTDKNTQNGDVGDAGHNEDVAVVQEDGPQVAGSNNSTDNEDEIIENSCRNEGNTSEITPQINSKRNGTKEAEVTPGTGEDAGLDNSDGSPSGNGADEDEDEGSGDDEDEEAGNGKDSSNNSKGQEGQDHGKEDDHDSSIGQNSDSKEYYDPEGKEDPHNEVDGDKTSKSEENSAGIPEDNGSQRIEDTQKLNHRESKRVENRITKESETHAVGKSQDKGIEIKGPSSGNRNITKEVGKGNEGKEDKGQHGMILGKGNVKTQGEVVNIEGPGQKSEPGNKVGHSNTGSDSNSDGYDSYDFDDKSMQGDDPNSSDESNGNDDANSESDNNSSSRGDASYNSDESKDNGNGSDSKGAEDDDSDSTSDTNNSDSNGNGNNGNDDNDKSDSGKGKSDSSDSDSSDSSNSSDSSDSSDSDSSDSNSSSDSDSSDSDSSDSSDSDSSDSSNSSDSSDSSDSSDSSDSSDSSDSKSDSSKSESDSSDSDSKSDSSDSNSSDSSDNSDSSDSSNSSNSSDSSDSSDSSDSSSSSDSSNSSDSSDSSDSSNSSESSDSSDSSDSDSSDSSDSSNSNSSDSDSSNSSDSSDSSNSSDSSDSSDSSNSSDSSDSSDSSNSSDSSDSSDSSDSSDSSNSSDSNDSSNSSDSSDSSNSSDSSNSSDSSDSSDSSDSDSSNSSDSSNSSDSSDSSNSSDSSDSSDSSDGSDSDSSNRSDSSNSSDSSDSSDSSNSSDSSDSSDSNESSNSSDSSDSSNSSDSDSSDSSNSSDSSDSSNSSDSSESSNSSDNSNSSDSSNSSDSSDSSDSSNSSDSSNSSDSSNSSDSSDSNSSDSSDSSNSSDSSDSSDSSDSSDSSDSSNSSDSSDSSDSSDSSNSSDSSNSSDSSNSSDSSDSSDSSDSSDSSDSSDSSDSSNSSDSSDSSDSSDSSDSSDSSDSSDSSESSDSSDSSNSSDSSDSSDSSDSSDSSDSSDSSDSSDSSNSSDSSDSSDSSDSSDSSNSSDSSDSSESSDSSDSSDSSDSSDSSDSSDSSDSSDSSNSSDSSDSSDSSDSSDSSDSSDSSDSSDSSDSSDSSDSSDSSDSSDSSDSSDSNESSDSSDSSDSSDSSNSSDSSDSSDSSDSTSDSNDESDSQSKSGNGNNNGSDSDSDSEGSDSNHSTSDD

SEQ ID NO: 4450 - protein, 1301 aa, Homo Sapiens; identical to SEQ ID NO: 4449

SEQ ID NO: 4451 - protein, 123 aa, Homo Sapiens
EMTRKQPDVDKVTKTYKRRAADPSSLQSHIPVLDKGRAGRKRFPASSLYPSGSQTQIETKNPRVNLLVSKWQQVWLLALERRRKLNDALDRLEEVWKFIPSTPHCHLPSFLITHCHCQNLGIF

SEQ ID NO: 4452 - protein, 7461 aa, Homo Sapiens
MAGYLSPAAYLYVEEQEYLQAYEDVLERYKDERDKVQKKTFTKWINQHLMKVRKHVNDLYEDLRDGHNLISLLEVLSGDTLPREKGRMRFHRLQNVQIALDYLKRRQVKLVNIRNDDITDGNPKLTLGLIWTIILHFQISDIHVTGESEDMSAKERLLLWTQQATEGYAGIRCENFTTCWRDGKLFNAIIHKYRPDLIDMNTVAVQSNLANLEHAFYVAEKIGVIRLLDPEDVDVSSPDEKSVITYVSSLYDAFPKVPEGGEGIGANDVEVKWIEYQNMVNYLIQWIRHHVTTMSERTFPNNPVELKALYNQYLQFKETEIPPKETEKSKIKRLYKLLEIWIEFGRIKLLQGYHPNDIEKEWGKLIIAMLEREKALRPEVERLEMLQQIANRVQRDSVICEDKLILAGNALQSDSKRLESGVQFQNEAEIAGYILECENLLRQHVIDVQILIDGKYYQADQLVQRVAKLRDEIMALRNECSSVYSKGRILTTEQTKLMISGITQSLNSGFAQTLHPSLTSGLTQSLTPSLTSSSMTSGLSSGMTSRLTPSVTPAYTPGFPSGLVPNFSSGVEPNSLQTLKLMQIRKPLLKSSLLDQNLTEEEINMKFVQDLLNWVDEMQVQLDRTEWGSDLPSVESHLENHKNVHRAIEEFESSLKEAKISEIQMTAPLKLTYAEKLHRLESQYAKLLNTSRNQERHLDTLHNFVSRATNELIWLNEKEEEEVAYDWSERNTNIARKKDYHAELMRELDQKEENIKSVQEIAEQLLLENHPARLTIEAYRAAMQTQWSWILQLCQCVEQHIKENTAYFEFFNDAKEATDYLRNLKDAIQRKYSCDRSSSIHKLEDLVQESMEEKEELLQYKSTIANLMGKAKTIIQLKPRNSDCPLKTSIPIKAICDYRQIEITIYKDDECVLANNSHRAKWKVISPTGNEAMVPSVCFTVPPPNKEAVDLANRIEQQYQNVLTLWHESHINMKSVVSWHYLINEIDRIRASNVASIKTMLPGEHQQVLSNLQSRFEDFLEDSQESQVFSGSDITQLEKEVNVCKQYYQELLKSAEREEQEESVYNLYISEVRNIRLRLENCEDRLIRQIRTPLERDDLHESVFRITEQEKLKKELERLKDDLGTITNKCEEFFSQAAASSSVPTLRSELNVVLQNMNQVYSMSSTYIDKLKTVNLVLKNTQAAEALVKLYETKLCEEEAVIADKNNIENLISTLKQWRSEVDEKRQVFHALEDELQKAKAISDEMFKTYKERDLDFDWHKEKADQLVERWQNVHVQIDNRLRDLEGIGKSLKYYRDTYHPLDDWIQQVETTQRKIQENQPENSKTLATQLNQQKMLVSEIEMKQSKMDECQKYAEQYSATVKDYELQTMTYRAMVDSQQKSPVKRRRMQSSADLIIQEFMDLRTRYTALVTLMTQYIKFAGDSLKRLEEEEKSLEEEKKEHVEKAKELQKWVSNISKTLKDAEKAGKPPFSKQKISSEEISTKKEQLSEALQTIQLFLAKHGDKMTDEERNELEKQVKTLQESYNLLFSESLKQLQESQTSGDVKVEEKLDKVIAGTIDQTTGEVLSVFQAVLRGLIDYDTGIRLLETQLMISGLISPELRKCFDLKDAKSHGLIDEQILCQLKELSKAKEIISAASPTTIPVLDALAQSMITESMAIKVLEILLSTGSLVIPATGEQLTLQKAFQQNLVSSALFSKVLERQNMCKDLIDPCTSEKVSLIDMVQRSTLQENTGMWLLPVRPQEGGRITLKCGRNISILRAAHEGLIDRETMFRLLSAQLLSGGLINSNSGQRMTVEEAVREGVIDRDTASSILTYQVQTGGIIQSNPAKRLTVDEAVQCDLITSSSALLVLEAQRGYVGLIWPHSGEIFPTSSSLQQELITNELAYKILNGRQKIAALYIPESSQVIGLDAAKQLGIIDNNTASILKNITLPDKMPDLGDLEACKNARRWLSFCKFQPSTVHDYRQEEDVFDGEEPVTTQTSEETKKLFLSYLMINSYMDANTGQRLLLYDGDLDEAVGMLLEGCHAEFDGNTAIKECLDVLSSSGVFLNNASGREKDECTATPSSFNKCHCGEPEHEETPENRKCAIDEEFNEMRNTVINSEFSQSGKLASTISIDPKVNSSPSVCVPSLISYLTQTELADISMLRSDSENILTNYENQSRVETNERANECSHSKNIQNFPSDLIENPIMKSKMSKFCGVNETENEDNTNRDSPIFDYSPRLSALLSHDKLMHSQGSFNDTHTPESNGNKCEAPALSFSDKTMLSGQRIGEKFQDQFLGIAAINISLPGEQYGQKSLNMISSNPQVQYHNDKYISNTSGEDEKTHPGFQQMPEDKEDESEIEEYSCAVTPGGDTDNAIVSLTCATPLLDETISASDYETSLLNDQQNNTGTDTDSDDDFYDTPLFEDDDHDSLLLDGDDRDCLHPEDYDTLQEENDETASPADVFYDVSKENENSMVPQGAPVGSLSVKNKAHCLQDFLMDVEKDELDSGEKIHLNPVGSDKVNGQSLETGSERECTNILEGDESDSLTDYDIVGGKESFTASLKFDDSGSWRGRKEEYVTGQEFHSDTDHLDSMQSEESYGDYIYDSNDQDDDDDDGIDEEGGGIRDENGKPRCQNVAEDMDIQLCASILNENSDENENINTMILLDKMHSCSSLEKQQRVNVVQLASPSENNLVTEKSNLPEYTTEIAGKSKENLLNHEMVLKDVLPPIIKDTESEKTFGPASISHDNNNISSTSELGTDLANTKVKLIQGSELPELTDSVKGKDEYFKNMTPKVDSSLDHIICTEPDLIGKPAEESHLSLIASVTDKDPQGNGSDLIKGRDGKSDILIEDETSIQKMYLGEGEVLVEGLVEEENRHLKLLPGKNTRDSFKLINSQFPFPQITNNEELNQKGSLKKATVTLKDEPNNLQIIVSKSPVQFENLEEIFDTSVSKEISDDITSDITSWEGNTHFEESFTDGPEKELDLFTYLKHCAKNIKAKDVAKPNEDVPSHVLITAPPMKEHLQLGVNNTKEKSTSTQKDSPLNDMIQSNDLCSKESISGGGTEISQFTPESIEATLSILSRKHVEDVGKNDFLQSERCANGLGNDNSSNTLNTDYSFLEINNKKERIEQQLPKEQALSPRSQEKEVQIPELSQVFVEDVKDILKSRLKEGHMNPQEVEEPSACADTKILIQNLIKRITTSQLVNEASTVPSDSQMSDSSGVSPMTNSSELKPESRDDPFCIGNLKSELLLNILKQDQHSQKITGVFELMRELTHMEYDLEKRGITSKVLPLQLENIFYKLLADGYSEKIEHVGDFNQKACSTSEMMEEKPHILGDIKSKEGNYYSPNLETVKEIGLESSTVWASTLPRDEKLKDLCNDFPSHLECTSGSKEMASGDSSTEQFSSELQQCLQHTEKMHEYLTLLQDMKPPLDNQESLDNNLEALKNQLRQLETFELGLAPIAVILRKDMKLAEEFLKSLPSDFPRGHVEELSISHQSLKTAFSSLSNVSSERTKQIMLAIDSEMSKLAVSHEEFLHKLKSFSDWVSEKSKSVKDIEIVNVQDSEYVKKRLEFLKNVLKDLGHTKMQLETTAFDVQFFISEYAQDLSPNQSKQLLRLLNTTQKCFLDVQESVTTQVERLETQLHLEQDLDDQKIVAERQQEYKEKLQGICDLLTQTENRLIGHQEAFMIGDGTVELKKYQSKQEELQKDMQGSAQALAEVVKNTENFLKENGEKLSQEDKALIEQKLNEAKIKCEQLNLKAEQSKKELDKVVTTAIKEETEKVAAVKQLEESKTKIENLLDWLSNVDKDSERAGTKHKQVIEQNGTHFQEGDGKSAIGEEDEVNGNLLETDVDGQVGTTQENLNQQYQKVKAQHEKIISQHQAVIIATQSAQVLLEKQGQYLSPEEKEKLQKNMKELKVHYETALAESEKKMKLTHSLQEELEKFDADYTEFEHWLQQSEQELENLEAGADDINGLMTKLKRQKSFSEDVISHKGDLRYITISGNRVLEAAKSCSKRDGGKVDTSATHREVQRKLDHATDRFRSLYSKCNVLGNNLKDLVDKYQHYEDASCGLLAGLQACEATASKHLSEPIAVDPKNLQRQLEETKALQGQISSQQVAVEKLKKTAEVLLDARGSLLPAKNDIQKTLDDIVGRYEDLSKSVNERNEKLQITLTRSLSVQDGLDEMLDWMGNVESSLKEQGQVPLNSTALQDIISKNIMLEQDIAGRQSSINAMNEKVKKFMETTDPSTASSLQAKMKDLSARFSEASHKHKETLAKMEELKTKVELFENLSEKLQTFLETKTQALTEVDVPGKDVTELSQYMQESTSEFLEHKKHLEVLHSLLKEISSHGLPSDKALVLEKTNNLSKKFKEMEDTIKEKKEAVTSCQEQLDAFQVLVKSLKSWIKETTKKVPIVQPSFGAEDLGKSLEDTKKLQEKWSLKTPEIQKVNNSGISLCNLISAVTTPAKAIAAVKSGGAVLNGEGTATNTEEFWANKGLTSIKKDMTDISHGYEDLGLLLKDKIAELNTKLSKLQKAQEESSAMMQWLQKMNKTATKWQQTPAPTDTEAVKTQVEQNKSFEAELKQNVNKVQELKDKLTELLEENPDTPEAPRWKQMLTEIDSKWQELNQLTIDRQQKLEESSNNLTQFQTVEAQLKQWLVEKELMVSVLGPLSIDPNMLNTQRQQVQILLQEFATRKPQYEQLTAAGQGILSRPGEDPSLRGIVKEQLAAVTQKWDSLTGQLSDRCDWIDQAIVKSTQYQSLLRSLSDKLSDLDNKLSSSLAVSTHPDAMNQQLETAQKMKQEIQQEKKQIKVAQALCEDLSALVKEEYLKAELSRQLEGILKSFKDVEQKAENHVQHLQSACASSHQFQQMSRDFQAWLDTKKEEQNKSHPISAKLDVLESLIKDHKDFSKTLTAQSHMYEKTIAEGENLLLKTQGSEKAALQLQLNTIKTNWDTFNKQVKERENKLKESLEKALKYKEQVETLWPWIDKCQNNLEEIKFCLDPAEGENSIAKLKSLQKEMDQHFGMVELLNNTANSLLSVCEIDKEVVTDENKSLIQKVDMVTEQLHSKKFCLENMTQKFKEFQEVSKESKRQLQCAKEQLDIHDSLGSQAYSNKYLTMLQTQQKSLQALKHQVDLAKRLAQDLVVEASDSKGTSDVLLQVETIAQEHSTLSQQVDEKCSFLETKLQGIGHFQNTIREMFSQFAEFDDELDSMAPVGRDAETLQKQKETIKAFLKKLEALMASNDNANKTCKMMLATEETSPDLVGIKRDLEALSKQCNKLLDRAQAREEQVEGTIKRLEEFYSKLKEFSILLQKAEEHEESQGPVGMETETINQQLNMFKVFQKEEIEPLQGKQQDVNWLGQGLIQSAAKSTSTQGLEHDLDDVNARWKTLNKKVAQRAAQLQEALLHCGRFQDALESLLSWMVDTEELVANQKPPSAEFKVVKAQIQEQKLLQRLLDDRKSTVEVIKREGEKIATTAEPADKVKILKQLSLLDSRWEALLNKAETRNRQLEGISVVAQQFHETLEPLNEWLTTIEKRLVNCEPIGTQASKLEEQIAQHKVLQEDILLRKQNVDQALLNGLELLKQTTGDEVLIIQDKLEAIKARYKDITKLSTDVAKTLEQALQLARRLHSTHEELCTWLDKVEVELLSYETQVLKGEEASQAQMRPKELKKEAKNNKALLDSLNEVSSALLELVPWRAREGLEKMVAEDNERYRLVSDTITQKVEEIDAAILRSQQFDQAADAELSWITETEKKLMSLGDIRLEQDQTSAQLQVQKTFTMEILRHKDIIDDLVKSGHKIMTACSEEEKQSMKKKLDKVLKNYDTICQINSERYLQLERAQSLVNQFWETYEELWPWLTETQSIISQLPAPALEYETLRQQQEEHRQLRELIAEHKPHIDKMNKTGPQLLELSPGEGFSIQEKYVAADTLYSQIKEDVKKRAVALDEAISQSTQFHDKIDQILESLERIVERLRQPPSISAEVEKIKEQISENKNVSVDMEKLQPLYETLKQRGEEMIARSGGTDKDISAKAVQDKLDQMVFIWENIHTLVEEREAKLLDVMELAEKFWCDHMSLIVTIKDTQDFIRDLEDPGIDPSVVKQQQEAAETIREEIDGLQEELDIVINLGSELIAACGEPDKPIVKKSIDELNSAWDSLNKAWKDRIDKLEEAMQAAVQYQDGLQAVFDWVDIAGGKLASMSPIGTDLETVKQQIEELKQFKSEAYQQQIEMERLNHQAELLLKKVTEESDKHTVQDPLMELKLIWDSLEERIINRQHKLEGALLALGQFQHALDELLAWLTHTEGLLSEQKPVGGDPKAIEIELAKHHVLQNDVLAHQSTVEAVNKAGNDLIESSAGEEASNLQNKLEVLNQRWQNVLEKTEQRKQQLDGALRQAKGFHGEIEDLQQWLTDTERHLLASKPLGGLPETAKEQLNVHMEVCAAFEAKEETYKSLMQKGQQMLARCPKSAETNIDQDINNLKEKWESVETKLNERKTKLEEALNLAMEFHNSLQDFINWLTQAEQTLNVASRPSLILDTVLFQIDEHKVFANEVNSHREQIIELDKTGTHLKYFSQKQDVVLIKNLLISVQSRWEKVVQRLVERGRSLDDARKRAKQFHEAWSKLMEWLEESEKSLDSELEIANDPDKIKTQLAQHKEFQKSLGAKHSVYDTTNRTGRSLKEKTSLADDNLKLDDMLSELRDKWDTICGKSVERQNKLEEALLFSGQFTDALQALIDWLYRVEPQLAEDQPVHGDIDLVMNLIDNHKAFQKELGKRTSSVQALKRSARELIEGSRDDSSWVKVQMQELSTRWETVCALSISKQTRLEAALRQAEEFHSVVHALLEWLAEAEQTLRFHGVLPDDEDALRTLIDQHKEFMKKLEEKRAELNKATTMGDTVLAICHPDSITTIKHWITIIRARFEEVLAWAKQHQQRLASALAGLIAKQELLEALLAWLQWAETTLTDKDKEVIPQEIEEVKALIAEHQTFMEEMTRKQPDVDKVTKTYKRRAADPSSLQSHIPVLDKGRAGRKRFPASSLYPSGSQTQIETKNPRVNLLVSKWQQVWLLALERRRKLNDALDRLEELREFANFDFDIWRKKYMRWMNHKKSRVMDFFRRIDKDQDGKITRQEFIDGILSSKFPTSRLEMSAVADIFDRDGDGYIDYYEFVAALHPNKDAYKPITDADKIEDEVTRQVAKCKCAKRFQVEQIGDNKYRFFLGNQFGDSQQLRLVRILRSTVMVRVGGGWMALDEFLVKNDPCRVHHHGSKMLRSESNSSITTTQPTIAKGRTNMELREKFILADGASQGMAAFRPRGRRSRPSSRGASPNRSTSVSSQAAQAASPQVPATTTPKGTPIQGSKLRLPGYLSGKGFHSGEDSGLITTAAARVRTQFADSKKTPSRPGSRAGSKAGSRASSRRGSDASDFDISEIQSVCSDVETVPQTHRPTPRAGSRPSTAKPSKIPTPQRKSPASKLDKSSKR

SEQ ID NO: 4453 - protein, 5375 aa, Homo Sapiens
MAGYLSPAAYLYVEEQEYLQAYEDVLERYKDERDKVQKKTFTKWINQHLMKVRKHVNDLYEDLRDGHNLISLLEVLSGDTLPREKGRMRFHRLQNVQIALDYLKRRQVKLVNIRNDDITDGNPKLTLGLIWTIILHFQISDIHVTGESEDMSAKERLLLWTQQATEGYAGIRCENFTTCWRDGKLFNAIIHKYRPDLIDMNTVAVQSNLANLEHAFYVAEKIGVIRLLDPEDVDVSSPDEKSVITYVSSLYDAFPKVPEGGEGIGANDVEVKWIEYQNMVNYLIQWIRHHVTTMSERTFPNNPVELKALYNQYLQFKETEIPPKETEKSKIKRLYKLLEIWIEFGRIKLLQGYHPNDIEKEWGKLIIAMLEREKALRPEVERLEMLQQIANRVQRDSVICEDKLILAGNALQSDSKRLESGVQFQNEAEIAGYILECENLLRQHVIDVQILIDGKYYQADQLVQRVAKLRDEIMALRNECSSVYSKGRILTTEQTKLMISGITQSLNSGFAQTLHPSLTSGLTQSLTPSLTSSSMTSGLSSGMTSRLTPSVTPAYTPGFPSGLVPNFSSGVEPNSLQTLKLMQIRKPLLKSSLLDQNLTEEEINMKFVQDLLNWVDEMQVQLDRTEWGSDLPSVESHLENHKNVHRAIEEFESSLKEAKISEIQMTAPLKLTYAEKLHRLESQYAKLLNTSRNQERHLDTLHNFVSRATNELIWLNEKEEEEVAYDWSERNTNIARKKDYHAELMRELDQKEENIKSVQEIAEQLLLENHPARLTIEAYRAAMQTQWSWILQLCQCVEQHIKENTAYFEFFNDAKEATDYLRNLKDAIQRKYSCDRSSSIHKLEDLVQESMEEKEELLQYKSTIANLMGKAKTIIQLKPRNSDCPLKTSIPIKAICDYRQIEITIYKDDECVLANNSHRAKWKVISPTGNEAMVPSVCFTVPPPNKEAVDLANRIEQQYQNVLTLWHESHINMKSVVSWHYLINEIDRIRASNVASIKTMLPGEHQQVLSNLQSRFEDFLEDSQESQVFSGSDITQLEKEVNVCKQYYQELLKSAEREEQEESVYNLYISEVRNIRLRLENCEDRLIRQIRTPLERDDLHESVFRITEQEKLKKELERLKDDLGTITNKCEEFFSQAAASSSVPTLRSELNVVLQNMNQVYSMSSTYIDKLKTVNLVLKNTQAAEALVKLYETKLCEEEAVIADKNNIENLISTLKQWRSEVDEKRQVFHALEDELQKAKAISDEMFKTYKERDLDFDWHKEKADQLVERWQNVHVQIDNRLRDLEGIGKSLKYYRDTYHPLDDWIQQVETTQRKIQENQPENSKTLATQLNQQKMLVSEIEMKQSKMDECQKYAEQYSATVKDYELQTMTYRAMVDSQQKSPVKRRRMQSSADLIIQEFMDLRTRYTALVTLMTQYIKFAGDSLKRLEEEEKSLEEEKKEHVEKAKELQKWVSNISKTLKDAEKAGKPPFSKQKISSEEISTKKEQLSEALQTIQLFLAKHGDKMTDEERNELEKQVKTLQESYNLLFSESLKQLQESQTSGDVKVEEKIVAERQQEYKEKLQGICDLLTQTENRLIGHQEAFMIGDGTVELKKYQSKQEELQKDMQGSAQALAEVVKNTENFLKENGEKLSQEDKALIEQKLNEAKIKCEQLNLKAEQSKKELDKVVTTAIKEETEKVAAVKQLEESKTKIENLLDWLSNVDKDSERAGTKHKQVIEQNGTHFQEGDGKSAIGEEDEVNGNLLETDVDGQVGTTQENLNQQYQKVKAQHEKIISQHQAVIIATQSAQVLLEKQGQYLSPEEKEKLQKNMKELKVHYETALAESEKKMKLTHSLQEELEKFDADYTEFEHWLQQSEQELENLEAGADDINGLMTKLKRQKSFSEDVISHKGDLRYITISGNRVLEAAKSCSKRDGGKVDTSATHREVQRKLDHATDRFRSLYSKCNVLGNNLKDLVDKYQHYEDASCGLLAGLQACEATASKHLSEPIAVDPKNLQRQLEETKALQGQISSQQVAVEKLKKTAEVLLDARGSLLPAKNDIQKTLDDIVGRYEDLSKSVNERNEKLQITLTRSLSVQDGLDEMLDWMGNVESSLKEQGQVPLNSTALQDIISKNIMLEQDIAGRQSSINAMNEKVKKFMETTDPSTASSLQAKMKDLSARFSEASHKHKETLAKMEELKTKVELFENLSEKLQTFLETKTQALTEVDVPGKDVTELSQYMQESTSEFLEHKKHLEVLHSLLKEISSHGLPSDKALVLEKTNNLSKKFKEMEDTIKEKKEAVTSCQEQLDAFQVLVKSLKSWIKETTKKVPIVQPSFGAEDLGKSLEDTKKLQEKWSLKTPEIQKVNNSGISLCNLISAVTTPAKAIAAVKSGGAVLNGEGTATNTEEFWANKGLTSIKKDMTDISHGYEDLGLLLKDKIAELNTKLSKLQKAQEESSAMMQWLQKMNKTATKWQQTPAPTDTEAVKTQVEQNKSFEAELKQNVNKVQELKDKLTELLEENPDTPEAPRWKQMLTEIDSKWQELNQLTIDRQQKLEESSNNLTQFQTVEAQLKQWLVEKELMVSVLGPLSIDPNMLNTQRQQVQILLQEFATRKPQYEQLTAAGQGILSRPGEDPSLRGIVKEQLAAVTQKWDSLTGQLSDRCDWIDQAIVKSTQYQSLLRSLSDKLSDLDNKLSSSLAVSTHPDAMNQQLETAQKMKQEIQQEKKQIKVAQALCEDLSALVKEEYLKAELSRQLEGILKSFKDVEQKAENHVQHLQSACASSHQFQQMSRDFQAWLDTKKEEQNKSHPISAKLDVLESLIKDHKDFSKTLTAQSHMYEKTIAEGENLLLKTQGSEKAALQLQLNTIKTNWDTFNKQVKERENKLKESLEKALKYKEQVETLWPWIDKCQNNLEEIKFCLDPAEGENSIAKLKSLQKEMDQHFGMVELLNNTANSLLSVCEIDKEVVTDENKSLIQKVDMVTEQLHSKKFCLENMTQKFKEFQEVSKESKRQLQCAKEQLDIHDSLGSQAYSNKYLTMLQTQQKSLQALKHQVDLAKRLAQDLVVEASDSKGTSDVLLQVETIAQEHSTLSQQVDEKCSFLETKLQGIGHFQNTIREMFSQFAEFDDELDSMAPVGRDAETLQKQKETIKAFLKKLEALMASNDNANKTCKMMLATEETSPDLVGIKRDLEALSKQCNKLLDRAQAREEQVEGTIKRLEEFYSKLKEFSILLQKAEEHEESQGPVGMETETINQQLNMFKVFQKEEIEPLQGKQQDVNWLGQGLIQSAAKSTSTQGLEHDLDDVNARWKTLNKKVAQRAAQLQEALLHCGRFQDALESLLSWMVDTEELVANQKPPSAEFKVVKAQIQEQKLLQRLLDDRKSTVEVIKREGEKIATTAEPADKVKILKQLSLLDSRWEALLNKAETRNRQLEGISVVAQQFHETLEPLNEWLTTIEKRLVNCEPIGTQASKLEEQIAQHKVLQEDILLRKQNVDQALLNGLELLKQTTGDEVLIIQDKLEAIKARYKDITKLSTDVAKTLEQALQLARRLHSTHEELCTWLDKVEVELLSYETQVLKGEEASQAQMRPKELKKEAKNNKALLDSLNEVSSALLELVPWRAREGLEKMVAEDNERYRLVSDTITQKVEEIDAAILRSQQFDQAADAELSWITETEKKLMSLGDIRLEQDQTSAQLQVQKTFTMEILRHKDIIDDLVKSGHKIMTACSEEEKQSMKKKLDKVLKNYDTICQINSERYLQLERAQSLVNQFWETYEELWPWLTETQSIISQLPAPALEYETLRQQQEEHRQLRELIAEHKPHIDKMNKTGPQLLELSPGEGFSIQEKYVAADTLYSQIKEDVKKRAVALDEAISQSTQFHDKIDQILESLERIVERLRQPPSISAEVEKIKEQISENKNVSVDMEKLQPLYETLKQRGEEMIARSGGTDKDISAKAVQDKLDQMVFIWENIHTLVEEREAKLLDVMELAEKFWCDHMSLIVTIKDTQDFIRDLEDPGIDPSVVKQQQEAAETIREEIDGLQEELDIVINLGSELIAACGEPDKPIVKKSIDELNSAWDSLNKAWKDRIDKLEEAMQAAVQYQDGLQAVFDWVDIAGGKLASMSPIGTDLETVKQQIEELKQFKSEAYQQQIEMERLNHQAELLLKKVTEESDKHTVQDPLMELKLIWDSLEERIINRQHKLEGALLALGQFQHALDELLAWLTHTEGLLSEQKPVGGDPKAIEIELAKHHVLQNDVLAHQSTVEAVNKAGNDLIESSAGEEASNLQNKLEVLNQRWQNVLEKTEQRKQQLDGALRQAKGFHGEIEDLQQWLTDTERHLLASKPLGGLPETAKEQLNVHMEVCAAFEAKEETYKSLMQKGQQMLARCPKSAETNIDQDINNLKEKWESVETKLNERKTKLEEALNLAMEFHNSLQDFINWLTQAEQTLNVASRPSLILDTVLFQIDEHKVFANEVNSHREQIIELDKTGTHLKYFSQKQDVVLIKNLLISVQSRWEKVVQRLVERGRSLDDARKRAKQFHEAWSKLMEWLEESEKSLDSELEIANDPDKIKTQLAQHKEFQKSLGAKHSVYDTTNRTGRSLKEKTSLADDNLKLDDMLSELRDKWDTICGKSVERQNKLEEALLFSGQFTDALQALIDWLYRVEPQLAEDQPVHGDIDLVMNLIDNHKAFQKELGKRTSSVQALKRSARELIEGSRDDSSWVKVQMQELSTRWETVCALSISKQTRLEAALRQAEEFHSVVHALLEWLAEAEQTLRFHGVLPDDEDALRTLIDQHKEFMKKLEEKRAELNKATTMGDTVLAICHPDSITTIKHWITIIRARFEEVLAWAKQHQQRLASALAGLIAKQELLEALLAWLQWAETTLTDKDKEVIPQEIEEVKALIAEHQTFMEEMTRKQPDVDKVTKTYKRRAADPSSLQSHIPVLDKGRAGRKRFPASSLYPSGSQTQIETKNPRVNLLVSKWQQVWLLALERRRKLNDALDRLEELREFANFDFDIWRKKYMRWMNHKKSRVMDFFRRIDKDQDGKITRQEFIDGILSSKFPTSRLEMSAVADIFDRDGDGYIDYYEFVAALHPNKDAYKPITDADKIEDEVTRQVAKCKCAKRFQVEQIGDNKYRFFLGNQFGDSQQLRLVRILRSTVMVRVGGGWMALDEFLVKNDPCRVHHHGSKMLRSESNSSITTTQPTIAKGRTNMELREKFILADGASQGMAAFRPRGRRSRPSSRGASPNRSTSVSSQAAQAASPQVPATTTPKGTPIQGSKLRLPGYLSGKGFHSGEDSGLITTAAARVRTQFADSKKTPSRPGSRAGSKAGSRASSRRGSDASDFDISEIQSVCSDVETVPQTHRPTPRAGSRPSTAKPSKIPTPQRKSPASKLDKSSKR

SEQ ID NO: 4454 - protein, 5497 aa, Homo Sapiens
MAGYLSPAAYLYVEEQEYLQAYEDVLERYKDERDKVQKKTFTKWINQHLMKVRKHVNDLYEDLRDGHNLISLLEVLSGDTLPREKGRMRFHRLQNVQIALDYLKRRQVKLVNIRNDDITDGNPKLTLGLIWTIILHFQISDIHVTGESEDMSAKERLLLWTQQATEGYAGIRCENFTTCWRDGKLFNAIIHKYRPDLIDMNTVAVQSNLANLEHAFYVAEKIGVIRLLDPEDVDVSSPDEKSVITYVSSLYDAFPKVPEGGEGIGANDVEVKWIEYQNMVNYLIQWIRHHVTTMSERTFPNNPVELKALYNQYLQFKETEIPPKETEKSKIKRLYKLLEIWIEFGRIKLLQGYHPNDIEKEWGKLIIAMLEREKALRPEVERLEMLQQIANRVQRDSVICEDKLILAGNALQSDSKRLESGVQFQNEAEIAGYILECENLLRQHVIDVQILIDGKYYQADQLVQRVAKLRDEIMALRNECSSVYSKGRILTTEQTKLMISGITQSLNSGFAQTLHPSLTSGLTQSLTPSLTSSSMTSGLSSGMTSRLTPSVTPAYTPGFPSGLVPNFSSGVEPNSLQTLKLMQIRKPLLKSSLLDQNLTEEEINMKFVQDLLNWVDEMQVQLDRTEWGSDLPSVESHLENHKNVHRAIEEFESSLKEAKISEIQMTAPLKLTYAEKLHRLESQYAKLLNTSRNQERHLDTLHNFVSRATNELIWLNEKEEEEVAYDWSERNTNIARKKDYHAELMRELDQKEENIKSVQEIAEQLLLENHPARLTIEAYRAAMQTQWSWILQLCQCVEQHIKENTAYFEFFNDAKEATDYLRNLKDAIQRKYSCDRSSSIHKLEDLVQESMEEKEELLQYKSTIANLMGKAKTIIQLKPRNSDCPLKTSIPIKAICDYRQIEITIYKDDECVLANNSHRAKWKVISPTGNEAMVPSVCFTVPPPNKEAVDLANRIEQQYQNVLTLWHESHINMKSVVSWHYLINEIDRIRASNVASIKTMLPGEHQQVLSNLQSRFEDFLEDSQESQVFSGSDITQLEKEVNVCKQYYQELLKSAEREEQEESVYNLYISEVRNIRLRLENCEDRLIRQIRTPLERDDLHESVFRITEQEKLKKELERLKDDLGTITNKCEEFFSQAAASSSVPTLRSELNVVLQNMNQVYSMSSTYIDKLKTVNLVLKNTQAAEALVKLYETKLCEEEAVIADKNNIENLISTLKQWRSEVDEKRQVFHALEDELQKAKAISDEMFKTYKERDLDFDWHKEKADQLVERWQNVHVQIDNRLRDLEGIGKSLKYYRDTYHPLDDWIQQVETTQRKIQENQPENSKTLATQLNQQKMLVSEIEMKQSKMDECQKYAEQYSATVKDYELQTMTYRAMVDSQQKSPVKRRRMQSSADLIIQEFMDLRTRYTALVTLMTQYIKFAGDSLKRLEEEEKSLEEEKKEHVEKAKELQKWVSNISKTLKDAEKAGKPPFSKQKISSEEISTKKEQLSEALQTIQLFLAKHGDKMTDEERNELEKQVKTLQESYNLLFSESLKQLQESQTSGDVKVEEKIVAERQQEYKEKLQGICDLLTQTENRLIGHQEAFMIGDGTVELKKYQSKQEELQKDMQGSAQALAEVVKNTENFLKENGEKLSQEDKALIEQKLNEAKIKCEQLNLKAEQSKKELDKVVTTAIKEETEKVAAVKQLEESKTKIENLLDWLSNVDKDSERAGTKHKQVIEQNGTHFQEGDGKSAIGEEDEVNGNLLETDVDGQVGTTQENLNQQYQKVKAQHEKIISQHQAVIIATQSAQVLLEKQGQYLSPEEKEKLQKNMKELKVHYETALAESEKKMKLTHSLQEELEKFDADYTEFEHWLQQSEQELENLEAGADDINGLMTKLKRQKSFSEDVISHKGDLRYITISGNRVLEAAKSCSKRDGGKVDTSATHREVQRKLDHATDRFRSLYSKCNVLGNNLKDLVDKYQHYEDASCGLLAGLQACEATASKHLSEPIAVDPKNLQRQLEETKALQGQISSQQVAVEKLKKTAEVLLDARGSLLPAKNDIQKTLDDIVGRYEDLSKSVNERNEKLQITLTRSLSVQDGLDEMLDWMGNVESSLKEQGQVPLNSTALQDIISKNIMLEQDIAGRQSSINAMNEKVKKFMETTDPSTASSLQAKMKDLSARFSEASHKHKETLAKMEELKTKVELFENLSEKLQTFLETKTQALTEVDVPGKDVTELSQYMQESTSEFLEHKKHLEVLHSLLKEISSHGLPSDKALVLEKTNNLSKKFKEMEDTIKEKKEAVTSCQEQLDAFQVLVKSLKSWIKETTKKVPIVQPSFGAEDLGKSLEDTKKLQEKWSLKTPEIQKVNNSGISLCNLISAVTTPAKAIAAVKSGGAVLNGEGTATNTEEFWANKGLTSIKKDMTDISHGYEDLGLLLKDKIAELNTKLSKLQKAQEESSAMMQWLQKMNKTATKWQQTPAPTDTEAVKTQVEQNKSFEAELKQNVNKVQELKDKLTELLEENPDTPEAPRWKQMLTEIDSKWQELNQLTIDRQQKLEESSNNLTQFQTVEAQLKQWLVEKELMVSVLGPLSIDPNMLNTQRQQVQILLQEFATRKPQYEQLTAAGQGILSRPGEDPSLRGIVKEQLAAVTQKWDSLTGQLSDRCDWIDQAIVKSTQYQSLLRSLSDKLSDLDNKLSSSLAVSTHPDAMNQQLETAQKMKQEIQQEKKQIKVAQALCEDLSALVKEEYLKAELSRQLEGILKSFKDVEQKAENHVQHLQSACASSHQFQQMSRDFQAWLDTKKEEQNKSHPISAKLDVLESLIKDHKDFSKTLTAQSHMYEKTIAEGENLLLKTQGSEKAALQLQLNTIKTNWDTFNKQVKERENKLKESLEKALKYKEQVETLWPWIDKCQNNLEEIKFCLDPAEGENSIAKLKSLQKEMDQHFGMVELLNNTANSLLSVCEIDKEVVTDENKSLIQKVDMVTEQLHSKKFCLENMTQKFKEFQEVSKESKRQLQCAKEQLDIHDSLGSQAYSNKYLTMLQTQQKSLQALKHQVDLAKRLAQDLVVEASDSKGTSDVLLQVETIAQEHSTLSQQVDEKCSFLETKLQGIGHFQNTIREMFSQFAEFDDELDSMAPVGRDAETLQKQKETIKAFLKKLEALMASNDNANKTCKMMLATEETSPDLVGIKRDLEALSKQCNKLLDRAQAREEQVEGTIKRLEEFYSKLKEFSILLQKAEEHEESQGPVGMETETINQQLNMFKVFQKEEIEPLQGKQQDVNWLGQGLIQSAAKSTSTQGLEHDLDDVNARWKTLNKKVAQRAAQLQEALLHCGRFQDALESLLSWMVDTEELVANQKPPSAEFKVVKAQIQEQKLLQRLLDDRKSTVEVIKREGEKIATTAEPADKVKILKQLSLLDSRWEALLNKAETRNRQLEGISVVAQQFHETLEPLNEWLTTIEKRLVNCEPIGTQASKLEEQIAQHKALEDDIINHNKHLHQAVSIGQSLKVLSSREDKDMVQSKLDFSQVWYIEIQEKSHSRSELLQQALCNAKIFGEDEVELMNWLNEVHDKLSKLSVQDYSTEGLWKQQSELRVLQEDILLRKQNVDQALLNGLELLKQTTGDEVLIIQDKLEAIKARYKDITKLSTDVAKTLEQALQLARRLHSTHEELCTWLDKVEVELLSYETQVLKGEEASQAQMRPKELKKEAKNNKALLDSLNEVSSALLELVPWRAREGLEKMVAEDNERYRLVSDTITQKVEEIDAAILRSQQFDQAADAELSWITETEKKLMSLGDIRLEQDQTSAQLQVQKTFTMEILRHKDIIDDLVKSGHKIMTACSEEEKQSMKKKLDKVLKNYDTICQINSERYLQLERAQSLVNQFWETYEELWPWLTETQSIISQLPAPALEYETLRQQQEEHRQLRELIAEHKPHIDKMNKTGPQLLELSPGEGFSIQEKYVAADTLYSQIKEDVKKRAVALDEAISQSTQFHDKIDQILESLERIVERLRQPPSISAEVEKIKEQISENKNVSVDMEKLQPLYETLKQRGEEMIARSGGTDKDISAKAVQDKLDQMVFIWENIHTLVEEREAKLLDVMELAEKFWCDHMSLIVTIKDTQDFIRDLEDPGIDPSVVKQQQEAAETIREEIDGLQEELDIVINLGSELIAACGEPDKPIVKKSIDELNSAWDSLNKAWKDRIDKLEEAMQAAVQYQDGLQAVFDWVDIAGGKLASMSPIGTDLETVKQQIEELKQFKSEAYQQQIEMERLNHQAELLLKKVTEESDKHTVQDPLMELKLIWDSLEERIINRQHKLEGALLALGQFQHALDELLAWLTHTEGLLSEQKPVGGDPKAIEIELAKHHVLQNDVLAHQSTVEAVNKAGNDLIESSAGEEASNLQNKLEVLNQRWQNVLEKTEQRKQQLDGALRQAKGFHGEIEDLQQWLTDTERHLLASKPLGGLPETAKEQLNVHMEVCAAFEAKEETYKSLMQKGQQMLARCPKSAETNIDQDINNLKEKWESVETKLNERKTKLEEALNLAMEFHNSLQDFINWLTQAEQTLNVASRPSLILDTVLFQIDEHKVFANEVNSHREQIIELDKTGTHLKYFSQKQDVVLIKNLLISVQSRWEKVVQRLVERGRSLDDARKRAKQFHEAWSKLMEWLEESEKSLDSELEIANDPDKIKTQLAQHKEFQKSLGAKHSVYDTTNRTGRSLKEKTSLADDNLKLDDMLSELRDKWDTICGKSVERQNKLEEALLFSGQFTDALQALIDWLYRVEPQLAEDQPVHGDIDLVMNLIDNHKAFQKELGKRTSSVQALKRSARELIEGSRDDSSWVKVQMQELSTRWETVCALSISKQTRLEAALRQAEEFHSVVHALLEWLAEAEQTLRFHGVLPDDEDALRTLIDQHKEFMKKLEEKRAELNKATTMGDTVLAICHPDSITTIKHWITIIRARFEEVLAWAKQHQQRLASALAGLIAKQELLEALLAWLQWAETTLTDKDKEVIPQEIEEVKALIAEHQTFMEEMTRKQPDVDKVTKTYKRRAADPSSLQSHIPVLDKGRAGRKRFPASSLYPSGSQTQIETKNPRVNLLVSKWQQVWLLALERRRKLNDALDRLEELREFANFDFDIWRKKYMRWMNHKKSRVMDFFRRIDKDQDGKITRQEFIDGILSSKFPTSRLEMSAVADIFDRDGDGYIDYYEFVAALHPNKDAYKPITDADKIEDEVTRQVAKCKCAKRFQVEQIGDNKYRFFLGNQFGDSQQLRLVRILRSTVMVRVGGGWMALDEFLVKNDPCRAKGRTNMELREKFILADGASQGMAAFRPRGRRSRPSSRGASPNRSTSVSSQAAQAASPQVPATTTPKILHPLTRNYGKPWLTNSKMSTPCKAAECSDFPVPSAEGTPIQGSKLRLPGYLSGKGFHSGEDSGLITTAAARVRTQFADSKKTPSRPGSRAGSKAGSRASSRRGSDASDFDISEIQSVCSDVETVPQTHRPTPRAGSRPSTAKPSKIPTPQRKSPASKLDKSSKR

SEQ ID NO: 4455 - protein, 1674 aa, Homo Sapiens
MGKPLSRPDCLRQNPPCVGKGEEEEDLNIEDCYVPQRSIYDTVRLNEQIDSGSKGSLSSRHFTDRTLPYSHRTLDVSSLCSNGALTSSSVFELRGREANKLDEKMIFDALKLNSDIIRTTGLPKAKSHAEKKEHRRSWRMFVPANFMDYANKSESSFVEPADMSDAVTKASKCRWGTNSLTSEEDDSGLCSPPAEREEKQGILTGDQSRIKSLSSTEDILVTDQYRPFFSVNSISEQKIPLLSCQSAHPDENFKMILHDVSPLEEAKHVNGQREIHDENCCLQNNLKESPVKCDPLIMPRNRENEHIFNLGEEDETYGPGESQITAQSRELLKDSPQDLDLSHTDLGESDVDCGSTSLVENVTLLTQYDSGECNIASKEEVEAPLSAQESEMLYKKFSLKFVSARKKAAPRKTGAQAGILDTVCNGFQLVQVFQKEEIEPLQGKQQDVNWLGQGLIQSAAKSTSTQGLEHDLDDVNARWKTLNKKVAQRAAQLQEALLHCGRFQDALESLLSWMVDTEELVANQKPPSAEFKVVKAQIQEQKLLQRLLDDRKSTVEVIKREGEKIATTAEPADKVKILKQLSLLDSRWEALLNKAETRNRQLEGISVVAQQFHETLEPLNEWLTTIEKRLVNCEPIGTQASKLEEQIAQHKALEDDIINHNKHLHQAVSIGQSLKVLSSREDKDMVQSKLDFSQVWYIEIQEKSHSRSELLQQALCNAKIFGEDEVELMNWLNEVHDKLSKLSVQDYSTEGLWKQQSELRVLQEDILLRKQNVDQALLNGLELLKQTTGDEVLIIQDKLEAIKARYKDITKLSTDVAKTLEQALQLARRLHSTHEELCTWLDKVEVELLSYETQVLKGEEASQAQMRPKELKKEAKNNKALLDSLNEVSSALLELVPWRAREGLEKMVAEDNERYRLVSDTITQKVEEIDAAILRSQQFDQAADAELSWITETEKKLMSLGDIRLEQDQTSAQLQVQKTFTMEILRHKDIIDDLVKSGHKIMTACSEEEKQSMKKKLDKVLKNYDTICQINSERYLQLERAQSLVNQFWETYEELWPWLTETQSIISQLPAPALEYETLRQQQEEHRQLRELIAEHKPHIDKMNKTGPQLLELSPGEGFSIQEKYVAADTLYSQIKEDVKKRAVALDEAISQSTQFHDKIDQILESLERIVERLRQPPSISAEVEKIKEQISENKNVSVDMEKLQPLYETLKQRGEEMIARSGGTDKDISAKAVQDKLDQMVFIWENIHTLVEEREAKLLDVMELAEKFWCDHMSLIVTIKDTQDFIRDLEDPGIDPSVVKQQQEAAETIREEIDGLQEELDIVINLGSELIAACGEPDKPIVKKSIDELNSAWDSLNKAWKDRIDKLEEAMQAAVQYQDGLQAVFDWVDIAGGKLASMSPIGTDLETVKQQIEELKQFKSEAYQQQIEMERLNHQAELLLKKVTEESDKHTVQDPLMELKLIWDSLEERIINRQHKLEGALLALGQFQHALDELLAWLTHTEGLLSEQKPVGGDPKAIEIELAKHHVLQNDVLAHQSTVEAVNKAGNDLIESSAGEEASNLQNKLEVLNQRWQNVLEKTEQRKQQLDGALRQAKGFHGEIEDLQQWLTDTERHLLASKPLGGLPETAKEQLNVHMEVCAAFEAKEETYKSLMQKGQQMLARCPKSAETNIDQD

SEQ ID NO: 4456 - protein, 304 aa, Homo Sapiens
MGNVCGCVRAEKEEQYVDPAKTPLNPEKYSPGRKYFRRKPIKKTGGDKESVGANNENEGKKKSSSQPSKEQPAPLSRGLVQQESVTLNSALGDGIQQKKTEVVADSVKQKLLPSAVSSWSDCVNTSPAKDSETEVKVSELDERISEKDSTPYCAKRKKHLDDVNTSEITFQEKTDVFSFRKAASLSSIPSGIERSLEKSGFPEDPPKSYSSIQEKQNTERFCPHATQHFQFKKKRCHSLYTSMSSVSKDTDGNEISDIHVTGESEDMSAKERLLLWTQQATEGYAGIRCENFTTCWRDGKLFNA

SEQ ID NO: 4457 - protein, 5171 aa, Homo Sapiens
MHSSSYSYRSSDSVFSNTTSTRTSLDSNENLLLVHCGPTLINSCISFGSESFDGHRLEMLQQIANRVQRDSVICEDKLILAGNALQSDSKRLESGVQFQNEAEIAGYILECENLLRQHVIDVQILIDGKYYQADQLVQRVAKLRDEIMALRNECSSVYSKGRILTTEQTKLMISGITQSLNSGFAQTLHPSLTSGLTQSLTPSLTSSSMTSGLSSGMTSRLTPSVTPAYTPGFPSGLVPNFSSGVEPNSLQTLKLMQIRKPLLKSSLLDQNLTEEEINMKFVQDLLNWVDEMQVQLDRTEWGSDLPSVESHLENHKNVHRAIEEFESSLKEAKISEIQMTAPLKLTYAEKLHRLESQYAKLLNTSRNQERHLDTLHNFVSRATNELIWLNEKEEEEVAYDWSERNTNIARKKDYHAELMRELDQKEENIKSVQEIAEQLLLENHPARLTIEAYRAAMQTQWSWILQLCQCVEQHIKENTAYFEFFNDAKEATDYLRNLKDAIQRKYSCDRSSSIHKLEDLVQESMEEKEELLQYKSTIANLMGKAKTIIQLKPRNSDCPLKTSIPIKAICDYRQIEITIYKDDECVLANNSHRAKWKVISPTGNEAMVPSVCFTVPPPNKEAVDLANRIEQQYQNVLTLWHESHINMKSVVSWHYLINEIDRIRASNVASIKTMLPGEHQQVLSNLQSRFEDFLEDSQESQVFSGSDITQLEKEVNVCKQYYQELLKSAEREEQEESVYNLYISEVRNIRLRLENCEDRLIRQIRTPLERDDLHESVFRITEQEKLKKELERLKDDLGTITNKCEEFFSQAAASSSVPTLRSELNVVLQNMNQVYSMSSTYIDKLKTVNLVLKNTQAAEALVKLYETKLCEEEAVIADKNNIENLISTLKQWRSEVDEKRQVFHALEDELQKAKAISDEMFKTYKERDLDFDWHKEKADQLVERWQNVHVQIDNRLRDLEGIGKSLKYYRDTYHPLDDWIQQVETTQRKIQENQPENSKTLATQLNQQKMLVSEIEMKQSKMDECQKYAEQYSATVKDYELQTMTYRAMVDSQQKSPVKRRRMQSSADLIIQEFMDLRTRYTALVTLMTQYIKFAGDSLKRLEEEEKSLEEEKKEHVEKAKELQKWVSNISKTLKDAEKAGKPPFSKQKISSEEISTKKEQLSEALQTIQLFLAKHGDKMTDEERNELEKQVKTLQESYNLLFSESLKQLQESQTSGDVKVEEKIVAERQQEYKEKLQGICDLLTQTENRLIGHQEAFMIGDGTVELKKYQSKQEELQKDMQGSAQALAEVVKNTENFLKENGEKLSQEDKALIEQKLNEAKIKCEQLNLKAEQSKKELDKVVTTAIKEETEKVAAVKQLEESKTKIENLLDWLSNVDKDSERAGTKHKQVIEQNGTHFQEGDGKSAIGEEDEVNGNLLETDVDGQVGTTQENLNQQYQKVKAQHEKIISQHQAVIIATQSAQVLLEKQGQYLSPEEKEKLQKNMKELKVHYETALAESEKKMKLTHSLQEELEKFDADYTEFEHWLQQSEQELENLEAGADDINGLMTKLKRQKSFSEDVISHKGDLRYITISGNRVLEAAKSCSKRDGGKVDTSATHREVQRKLDHATDRFRSLYSKCNVLGNNLKDLVDKYQHYEDASCGLLAGLQACEATASKHLSEPIAVDPKNLQRQLEETKALQGQISSQQVAVEKLKKTAEVLLDARGSLLPAKNDIQKTLDDIVGRYEDLSKSVNERNEKLQITLTRSLSVQDGLDEMLDWMGNVESSLKEQGQVPLNSTALQDIISKNIMLEQDIAGRQSSINAMNEKVKKFMETTDPSTASSLQAKMKDLSARFSEASHKHKETLAKMEELKTKVELFENLSEKLQTFLETKTQALTEVDVPGKDVTELSQYMQESTSEFLEHKKHLEVLHSLLKEISSHGLPSDKALVLEKTNNLSKKFKEMEDTIKEKKEAVTSCQEQLDAFQVLVKSLKSWIKETTKKVPIVQPSFGAEDLGKSLEDTKKLQEKWSLKTPEIQKVNNSGISLCNLISAVTTPAKAIAAVKSGGAVLNGEGTATNTEEFWANKGLTSIKKDMTDISHGYEDLGLLLKDKIAELNTKLSKLQKAQEESSAMMQWLQKMNKTATKWQQTPAPTDTEAVKTQVEQNKSFEAELKQNVNKVQELKDKLTELLEENPDTPEAPRWKQMLTEIDSKWQELNQLTIDRQQKLEESSNNLTQFQTVEAQLKQWLVEKELMVSVLGPLSIDPNMLNTQRQQVQILLQEFATRKPQYEQLTAAGQGILSRPGEDPSLRGIVKEQLAAVTQKWDSLTGQLSDRCDWIDQAIVKSTQYQSLLRSLSDKLSDLDNKLSSSLAVSTHPDAMNQQLETAQKMKQEIQQEKKQIKVAQALCEDLSALVKEEYLKAELSRQLEGILKSFKDVEQKAENHVQHLQSACASSHQFQQMSRDFQAWLDTKKEEQNKSHPISAKLDVLESLIKDHKDFSKTLTAQSHMYEKTIAEGENLLLKTQGSEKAALQLQLNTIKTNWDTFNKQVKERENKLKESLEKALKYKEQVETLWPWIDKCQNNLEEIKFCLDPAEGENSIAKLKSLQKEMDQHFGMVELLNNTANSLLSVCEIDKEVVTDENKSLIQKVDMVTEQLHSKKFCLENMTQKFKEFQEVSKESKRQLQCAKEQLDIHDSLGSQAYSNKYLTMLQTQQKSLQALKHQVDLAKRLAQDLVVEASDSKGTSDVLLQVETIAQEHSTLSQQVDEKCSFLETKLQGIGHFQNTIREMFSQFAEFDDELDSMAPVGRDAETLQKQKETIKAFLKKLEALMASNDNANKTCKMMLATEETSPDLVGIKRDLEALSKQCNKLLDRAQAREEQVEGTIKRLEEFYSKLKEFSILLQKAEEHEESQGPVGMETETINQQLNMFKVFQKEEIEPLQGKQQDVNWLGQGLIQSAAKSTSTQGLEHDLDDVNARWKTLNKKVAQRAAQLQEALLHCGRFQDALESLLSWMVDTEELVANQKPPSAEFKVVKAQIQEQKLLQRLLDDRKSTVEVIKREGEKIATTAEPADKVKILKQLSLLDSRWEALLNKAETRNRQLEGISVVAQQFHETLEPLNEWLTTIEKRLVNCEPIGTQASKLEEQIAQHKALEDDIINHNKHLHQAVSIGQSLKVLSSREDKDMVQSKLDFSQVWYIEIQEKSHSRSELLQQALCNAKIFGEDEVELMNWLNEVHDKLSKLSVQDYSTEGLWKQQSELRVLQEDILLRKQNVDQALLNGLELLKQTTGDEVLIIQDKLEAIKARYKDITKLSTDVAKTLEQALQLARRLHSTHEELCTWLDKVEVELLSYETQVLKGEEASQAQMRPKELKKEAKNNKALLDSLNEVSSALLELVPWRAREGLEKMVAEDNERYRLVSDTITQKVEEIDAAILRSQQFDQAADAELSWITETEKKLMSLGDIRLEQDQTSAQLQVQKTFTMEILRHKDIIDDLVKSGHKIMTACSEEEKQSMKKKLDKVLKNYDTICQINSERYLQLERAQSLVNQFWETYEELWPWLTETQSIISQLPAPALEYETLRQQQEEHRQLRELIAEHKPHIDKMNKTGPQLLELSPGEGFSIQEKYVAADTLYSQIKEDVKKRAVALDEAISQSTQFHDKIDQILESLERIVERLRQPPSISAEVEKIKEQISENKNVSVDMEKLQPLYETLKQRGEEMIARSGGTDKDISAKAVQDKLDQMVFIWENIHTLVEEREAKLLDVMELAEKFWCDHMSLIVTIKDTQDFIRDLEDPGIDPSVVKQQQEAAETIREEIDGLQEELDIVINLGSELIAACGEPDKPIVKKSIDELNSAWDSLNKAWKDRIDKLEEAMQAAVQYQDGLQAVFDWVDIAGGKLASMSPIGTDLETVKQQIEELKQFKSEAYQQQIEMERLNHQAELLLKKVTEESDKHTVQDPLMELKLIWDSLEERIINRQHKLEGALLALGQFQHALDELLAWLTHTEGLLSEQKPVGGDPKAIEIELAKHHVLQNDVLAHQSTVEAVNKAGNDLIESSAGEEASNLQNKLEVLNQRWQNVLEKTEQRKQQLDGALRQAKGFHGEIEDLQQWLTDTERHLLASKPLGGLPETAKEQLNVHMEVCAAFEAKEETYKSLMQKGQQMLARCPKSAETNIDQDINNLKEKWESVETKLNERKTKLEEALNLAMEFHNSLQDFINWLTQAEQTLNVASRPSLILDTVLFQIDEHKVFANEVNSHREQIIELDKTGTHLKYFSQKQDVVLIKNLLISVQSRWEKVVQRLVERGRSLDDARKRAKQFHEAWSKLMEWLEESEKSLDSELEIANDPDKIKTQLAQHKEFQKSLGAKHSVYDTTNRTGRSLKEKTSLADDNLKLDDMLSELRDKWDTICGKSVERQNKLEEALLFSGQFTDALQALIDWLYRVEPQLAEDQPVHGDIDLVMNLIDNHKAFQKELGKRTSSVQALKRSARELIEGSRDDSSWVKVQMQELSTRWETVCALSISKQTRLEAALRQAEEFHSVVHALLEWLAEAEQTLRFHGVLPDDEDALRTLIDQHKEFMKKLEEKRAELNKATTMGDTVLAICHPDSITTIKHWITIIRARFEEVLAWAKQHQQRLASALAGLIAKQELLEALLAWLQWAETTLTDKDKEVIPQEIEEVKALIAEHQTFMEEMTRKQPDVDKVTKTYKRRAADPSSLQSHIPVLDKGRAGRKRFPASSLYPSGSQTQIETKNPRVNLLVSKWQQVWLLALERRRKLNDALDRLEELREFANFDFDIWRKKYMRWMNHKKSRVMDFFRRIDKDQDGKITRQEFIDGILSSKFPTSRLEMSAVADIFDRDGDGYIDYYEFVAALHPNKDAYKPITDADKIEDEVTRQVAKCKCAKRFQVEQIGDNKYRFFLGNQFGDSQQLRLVRILRSTVMVRVGGGWMALDEFLVKNDPCRAKGRTNMELREKFILADGASQGMAAFRPRGRRSRPSSRGASPNRSTSVSSQAAQAASPQVPATTTPKILHPLTRNYGKPWLTNSKMSTPCKAAECSDFPVPSAEGTPIQGSKLRLPGYLSGKGFHSGEDSGLITTAAARVRTQFADSKKTPSRPGSRAGSKAGSRASSRRGSDASDFDISEIQSVCSDVETVPQTHRPTPRAGSRPSTAKPSKIPTPQRKSPASKLDKSSKR

SEQ ID NO: 4458 - protein, 2649 aa, Homo Sapiens
MHSSSYSYRSSDSVFSNTTSTRTSLDSNENLLLVHCGPTLINSCISFGSESFDGHRLEMLQQIANRVQRDSVICEDKLILAGNALQSDSKRLESGVQFQNEAEIAGYILECENLLRQHVIDVQILIDGKYYQADQLVQRVAKLRDEIMALRNECSSVYSKGRILTTEQTKLMISGITQSLNSGFAQTLHPSLTSGLTQSLTPSLTSSSMTSGLSSGMTSRLTPSVTPAYTPGFPSGLVPNFSSGVEPNSLQTLKLMQIRKPLLKSSLLDQNLTEEEINMKFVQDLLNWVDEMQVQLDRTEWGSDLPSVESHLENHKNVHRAIEEFESSLKEAKISEIQMTAPLKLTYAEKLHRLESQYAKLLNTSRNQERHLDTLHNFVSRATNELIWLNEKEEEEVAYDWSERNTNIARKKDYHAELMRELDQKEENIKSVQEIAEQLLLENHPARLTIEAYRAAMQTQWSWILQLCQCVEQHIKENTAYFEFFNDAKEATDYLRNLKDAIQRKYSCDRSSSIHKLEDLVQESMEEKEELLQYKSTIANLMGKAKTIIQLKPRNSDCPLKTSIPIKAICDYRQIEITIYKDDECVLANNSHRAKWKVISPTGNEAMVPSVCFTVPPPNKEAVDLANRIEQQYQNVLTLWHESHINMKSVVSWHYLINEIDRIRASNVASIKTMLPGEHQQVLSNLQSRFEDFLEDSQESQVFSGSDITQLEKEVNVCKQYYQELLKSAEREEQEESVYNLYISEVRNIRLRLENCEDRLIRQIRTPLERDDLHESVFRITEQEKLKKELERLKDDLGTITNKCEEFFSQAAASSSVPTLRSELNVVLQNMNQVYSMSSTYIDKLKTVNLVLKNTQAAEALVKLYETKLCEEEAVIADKNNIENLISTLKQWRSEVDEKRQVFHALEDELQKAKAISDEMFKTYKERDLDFDWHKEKADQLVERWQNVHVQIDNRLRDLEGIGKSLKYYRDTYHPLDDWIQQVETTQRKIQENQPENSKTLATQLNQQKMLVSEIEMKQSKMDECQKYAEQYSATVKDYELQTMTYRAMVDSQQKSPVKRRRMQSSADLIIQEFMDLRTRYTALVTLMTQYIKFAGDSLKRLEEEEIKRCKETSEHGAYSDLLQRQKATVLENSKLTGKISELERMVAELKKQKSRVEEELPKVREAAENELRKQQRNVEDISLQKIRAESEAKQYRRELETIVREKEAAERELERVRQLTIEAEAKRAAVEENLLNFRNQLEENTFTRRTLEDHLKRKDLSLNDLEQQKNKLMEELRRKRDNEEELLKLIKQMEKDLAFQKQVAEKQLKEKQKIELEARRKITEIQYTCRENALPVCPITQATSCRAVTGLQQEHDKQKAEELKQQVDELTAANRKAEQDMRELTYELNALQLEKTSSEEKARLLKDKLDETNNTLRCLKLELERKDQAEKGYSQQLRELGRQLNQTTGKAEEAMQEASDLKKIKRNYQLELESLNHEKGKLQREVDRITRAHAVAEKNIQHLNSQIHSFRDEKELERLQICQRKSDHLKEQFEKSHEQLLQNIKAEKENNDKIQRLNEELEKSNECAEMLKQKVEELTRQNNETKLMMQRIQAESENIVLEKQTIQQRCEALKIQADGFKDQLRSTNEHLHKQTKTEQDFQRKIKCLEEDLAKSQNLVSEFKQKCDQQNIIIQNTKKEVRNLNAELNASKEEKRRGEQKVQLQQAQVQELNNRLKKVQDELHLKTIEEQMTHRKMVLFQEESGKFKQSAEEFRKKMEKLMESKVITENDISGIRLDFVSLQQENSRAQENAKLCETNIKELERQLQQYREQMQQGQHMEANHYQKCQKLEDELIAQKREVENLKQKMDQQIKEHEHQLVLLQCEIQKKSTAKDCTFKPDFEMTVKECQHSGELSSRNTGHLHPTPRSPLLRWTQEPQPLEEKWQHRVVEQIPKEVQFQPPGAPLEKEKSQQCYSEYFSQTSTELQITFDETNPITRLSEIEKIRDQALNNSRPPVRYQDNACEMELVKVLTPLEIAKNKQYDMHTEVTTLKQEKNPVPSAEEWMLEGCRASGGLKKGDFLKKGLEPETFQNFDGDHACSVRDDEFKFQGLRHTVTARQLVEAKLLDMRTIEQLRLGLKTVEEVQKTLNKFLTKATSIAGLYLESTKEKISFASAAERIIIDKMVALAFLEAQAATGFIIDPISGQTYSVEDAVLKGVVDPEFRIRLLEAEKAAVGYSYSSKTLSVFQAMENRMLDRQKGKHILEAQIASGGVIDPVRGIRVPPEIALQQGLLNNAILQFLHEPSSNTRVFPNPNNKQALYYSELLRMCVFDVESQCFLFPFGERNISNLNVKKTHRISVVDTKTGSELTVYEAFQRNLIEKSIYLELSGQQYQWKEAMFFESYGHSSHMLTDTKTGLHFNINEAIEQGTIDKALVKKYQEGLITLTELADSLLSRLVPKKDLHSPVAGYWLTASGERISVLKASRRNLVDRITALRCLEAQVSTGGIIDPLTGKKYRVAEALHRGLVDEGFAQQLRQCELVITGIGHPITNKMMSVVEAVNANIINKEMGIRCLEFQYLTGGLIEPQVHSRLSIEEALQVGIIDVLIATKLKDQKSYVRNIICPQTKRKLTYKEALEKADFDFHTGLKLLEVSEPLMTGISSLYYSS

SEQ ID NO: 4459 - protein, 3060 aa, Homo Sapiens
MHSSSYSYRSSDSVFSNTTSTRTSLDSNENLLLVHCGPTLINSCISFGSESFDGHRLEMLQQIANRVQRDSVICEDKLILAGNALQSDSKRLESGVQFQNEAEIAGYILECENLLRQHVIDVQILIDGKYYQADQLVQRVAKLRDEIMALRNECSSVYSKGRILTTEQTKLMISGITQSLNSGFAQTLHPSLTSGLTQSLTPSLTSSSMTSGLSSGMTSRLTPSVTPAYTPGFPSGLVPNFSSGVEPNSLQTLKLMQIRKPLLKSSLLDQNLTEEEINMKFVQDLLNWVDEMQVQLDRTEWGSDLPSVESHLENHKNVHRAIEEFESSLKEAKISEIQMTAPLKLTYAEKLHRLESQYAKLLNTSRNQERHLDTLHNFVSRATNELIWLNEKEEEEVAYDWSERNTNIARKKDYHAELMRELDQKEENIKSVQEIAEQLLLENHPARLTIEAYRAAMQTQWSWILQLCQCVEQHIKENTAYFEFFNDAKEATDYLRNLKDAIQRKYSCDRSSSIHKLEDLVQESMEEKEELLQYKSTIANLMGKAKTIIQLKPRNSDCPLKTSIPIKAICDYRQIEITIYKDDECVLANNSHRAKWKVISPTGNEAMVPSVCFTVPPPNKEAVDLANRIEQQYQNVLTLWHESHINMKSVVSWHYLINEIDRIRASNVASIKTMLPGEHQQVLSNLQSRFEDFLEDSQESQVFSGSDITQLEKEVNVCKQYYQELLKSAEREEQEESVYNLYISEVRNIRLRLENCEDRLIRQIRTPLERDDLHESVFRITEQEKLKKELERLKDDLGTITNKCEEFFSQAAASSSVPTLRSELNVVLQNMNQVYSMSSTYIDKLKTVNLVLKNTQAAEALVKLYETKLCEEEAVIADKNNIENLISTLKQWRSEVDEKRQVFHALEDELQKAKAISDEMFKTYKERDLDFDWHKEKADQLVERWQNVHVQIDNRLRDLEGIGKSLKYYRDTYHPLDDWIQQVETTQRKIQENQPENSKTLATQLNQQKMLVSEIEMKQSKMDECQKYAEQYSATVKDYELQTMTYRAMVDSQQKSPVKRRRMQSSADLIIQEFMDLRTRYTALVTLMTQYIKFAGDSLKRLEEEEKSLEEEKKEHVEKAKELQKWVSNISKTLKDAEKAGKPPFSKQKISSEEISTKKEQLSEALQTIQLFLAKHGDKMTDEERNELEKQVKTLQESYNLLFSESLKQLQESQTSGDVKVEEKLDKVIAGTIDQTTGEVLSVFQAVLRGLIDYDTGIRLLETQLMISGLISPELRKCFDLKDAKSHGLIDEQILCQLKELSKAKEIISAASPTTIPVLDALAQSMITESMAIKVLEILLSTGSLVIPATGEQLTLQKAFQQNLVSSALFSKVLERQNMCKDLIDPCTSEKVSLIDMVQRSTLQENTGMWLLPVRPQEGGRITLKCGRNISILRAAHEGLIDRETMFRLLSAQLLSGGLINSNSGQRMTVEEAVREGVIDRDTASSILTYQVQTGGIIQSNPAKRLTVDEAVQCDLITSSSALLVLEAQRGYVGLIWPHSGEIFPTSSSLQQELITNELAYKILNGRQKIAALYIPESSQVIGLDAAKQLGIIDNNTASILKNITLPDKMPDLGDLEACKNARRWLSFCKFQPSTVHDYRQEEDVFDGEEPVTTQTSEETKKLFLSYLMINSYMDANTGQRLLLYDGDLDEAVGMLLEGCHAEFDGNTAIKECLDVLSSSGVFLNNASGREKDECTATPSSFNKCHCGEPEHEETPENRKCAIDEEFNEMRNTVINSEFSQSGKLASTISIDPKVNSSPSVCVPSLISYLTQTELADISMLRSDSENILTNYENQSRVETNERANECSHSKNIQNFPSDLIENPIMKSKMSKFCGVNETENEDNTNRDSPIFDYSPRLSALLSHDKLMHSQGSFNDTHTPESNGNKCEAPALSFSDKTMLSGQRIGEKFQDQFLGIAAINISLPGEQYGQKSLNMISSNPQVQYHNDKYISNTSGEDEKTHPGFQQMPEDKEDESEIEEYSCAVTPGGDTDNAIVSLTCATPLLDETISASDYETSLLNDQQNNTGTDTDSDDDFYDTPLFEDDDHDSLLLDGDDRDCLHPEDYDTLQEENDETASPADVFYDVSKENENSMVPQGAPVGSLSVKNKAHCLQDFLMDVEKDELDSGEKIHLNPVGSDKVNGQSLETGSERECTNILEGDESDSLTDYDIVGGKESFTASLKFDDSGSWRGRKEEYVTGQEFHSDTDHLDSMQSEESYGDYIYDSNDQDDDDDDGIDEEGGGIRDENGKPRCQNVAEDMDIQLCASILNENSDENENINTMILLDKMHSCSSLEKQQRVNVVQLASPSENNLVTEKSNLPEYTTEIAGKSKENLLNHEMVLKDVLPPIIKDTESEKTFGPASISHDNNNISSTSELGTDLANTKVKLIQGSELPELTDSVKGKDEYFKNMTPKVDSSLDHIICTEPDLIGKPAEESHLSLIASVTDKDPQGNGSDLIKGRDGKSDILIEDETSIQKMYLGEGEVLVEGLVEEENRHLKLLPGKNTRDSFKLINSQFPFPQITNNEELNQKGSLKKATVTLKDEPNNLQIIVSKSPVQFENLEEIFDTSVSKEISDDITSDITSWEGNTHFEESFTDGPEKELDLFTYLKHCAKNIKAKDVAKPNEDVPSHVLITAPPMKEHLQLGVNNTKEKSTSTQKDSPLNDMIQSNDLCSKESISGGGTEISQFTPESIEATLSILSRKHVEDVGKNDFLQSERCANGLGNDNSSNTLNTDYSFLEINNKKERIEQQLPKEQALSPRSQEKEVQIPELSQVFVEDVKDILKSRLKEGHMNPQEVEEPSACADTKILIQNLIKRITTSQLVNEASTVPSDSQMSDSSGVSPMTNSSELKPESRDDPFCIGNLKSELLLNILKQDQHSQKITGVFELMRELTHMEYDLEKRGITSKVLPLQLENIFYKLLADGYSEKIEHVGDFNQKACSTSEMMEEKPHILGDIKSKEGNYYSPNLETVKEIGLESSTVWASTLPRDEKLKDLCNDFPSHLECTSGSKEMASGDSSTEQ

SEQ ID NO: 4460 - protein, 1143 aa, Homo Sapiens
MHSSSYSYRSSDSVFSNTTSTRTSLDSNENLLLVHCGPTLINSCISFGSESFDGHRLEMLQQIANRVQRDSVICEDKLILAGNALQSDSKRLESGVQFQNEAEIAGYILECENLLRQHVIDVQILIDGKYYQADQLVQRVAKLRDEIMALRNECSSVYSKGRILTTEQTKLMISGITQSLNSGFAQTLHPSLTSGLTQSLTPSLTSSSMTSGLSSGMTSRLTPSVTPAYTPGFPSGLVPNFSSGVEPNSLQTLKLMQIRKPLLKSSLLDQNLTEEEINMKFVQDLLNWVDEMQVQLDRTEWGSDLPSVESHLENHKNVHRAIEEFESSLKEAKISEIQMTAPLKLTYAEKLHRLESQYAKLLNTSRNQERHLDTLHNFVSRATNELIWLNEKEEEEVAYDWSERNTNIARKKDYHAELMRELDQKEENIKSVQEIAEQLLLENHPARLTIEAYRAAMQTQWSWILQLCQCVEQHIKENTAYFEFFNDAKEATDYLRNLKDAIQRKYSCDRSSSIHKLEDLVQESMEEKEELLQYKSTIANLMGKAKTIIQLKPRNSDCPLKTSIPIKAICDYRQIEITIYKDDECVLANNSHRAKWKVISPTGNEAMVPSVCFTVPPPNKEAVDLANRIEQQYQNVLTLWHESHINMKSVVSWHYLINEIDRIRASNVASIKTMLPGEHQQVLSNLQSRFEDFLEDSQESQVFSGSDITQLEKEVNVCKQYYQELLKSAEREEQEESVYNLYISEVRNIRLRLENCEDRLIRQIRTPLERDDLHESVFRITEQEKLKKELERLKDDLGTITNKCEEFFSQAAASSSVPTLRSELNVVLQNMNQVYSMSSTYIDKLKTVNLVLKNTQAAEALVKLYETKLCEEEAVIADKNNIENLISTLKQWRSEVDEKRQVFHALEDELQKAKAISDEMFKTYKERDLDFDWHKEKADQLVERWQNVHVQIDNRLRDLEGIGKSLKYYRDTYHPLDDWIQQVETTQRKIQENQPENSKTLATQLNQQKMLVSEIEMKQSKMDECQKYAEQYSATVKDYELQTMTYRAMVDSQQKSPVKRRRMQSSADLIIQEFMDLRTRYTALVTLMTQYIKFAGDSLKRLEEEEVIINSEHPVNIKELEMSSNYSVVWESKTCFMINLCGR

SEQ ID NO: 4461 - protein, 689 aa, Homo Sapiens
MIAAAFLVLLRPYSIQCALFLLLLLLGTIATIVFFCCWHRKLQKGRHPMKSVFSGRSRSRDAVLRSHHFRSEGFRASPRHLRRRVAAAAAARLEEVKPVVEVHHQSEQETSVRKRRIKKSSRVQPEFYHSVQGASIRRPSSGNASYRCSMSSSADFSDEDDFSQKSGSASPAPGDTLPWNLPKHERSKRKIQGGSVLDPAERAVLRIADERDKVQKKTFTKWINQHLMKVRKHVNDLYEDLRDGHNLISLLEVLSGDTLPREKGRMRFHRLQNVQIALDYLKRRQVKLVNIRNDDITDGNPKLTLGLIWTIILHFQISDIHVTGESEDMSAKERLLLWTQQATEGYAGIRCENFTTCWRDGKLFNAIIHKYRPDLIDMNTVAVQSNLANLEHAFYVAEKIGVIRLLDPEDVDVSSPDEKSVITYVSSLYDAFPKVPEGGEGIGANDVEVKWIEYQNMVNYLIQWIRHHVTTMSERTFPNNPVELKALYNQYLQFKETEIPPKETEKSKIKRLYKLLEIWIEFGRIKLLQGYHPNDIEKEWGKLIIAMLEREKALRPEVERLEMLQQIANRVQRDSVICEDKLILAGNALQSDSKRLESGVQFQNEAEIAGYILECENLLRQHVIDVQILIDGKYYQADQLVQRVAKLRDEIMALRNECSSVYSKGRILTTEQTKLMISGITQSLNSGFA

SEQ ID NO: 4462 - protein, 133 aa, Homo Sapiens
MKVRKHVNDLYEDLRDGHNLISLLEVLSGDTLPREKGRMRFHRLQNVQIALDYLKRRQVKLVNIRNDDITDGNPKLTLGLIWTIILHFQISDIHVTGESEDMSAKERLLLWTQQATEGYAGIRCENFTTCWRD

SEQ ID NO: 4463 - protein, 154 aa, Homo Sapiens
MMGQLMKNDQDWNAKLVGLMCCMDERDKVQKKTFTKWINQHLMKVRKHVNDLYEDLRDGHNLISLLEVLSGDTLPREKGRMRFHRLQNVQIALDYLKRRQVKLVNIRNDDITDGNPKLTLGLIWTIILHFQISDIHVTGESEDMSAKERLLLWT

SEQ ID NO: 4464 - protein, 5537 aa, Homo Sapiens
MSSGNASYRCSMSSSADFSDEDDFSQKSGSASPAPGDTLPWNLPKHERSKRKIQGGSVLDPAERAVLRIADERDKVQKKTFTKWINQHLMKVRKHVNDLYEDLRDGHNLISLLEVLSGDTLPREKGRMRFHRLQNVQIALDYLKRRQVKLVNIRNDDITDGNPKLTLGLIWTIILHFQISDIHVTGESEDMSAKERLLLWTQQATEGYAGIRCENFTTCWRDGKLFNAIIHKYRPDLIDMNTVAVQSNLANLEHAFYVAEKIGVIRLLDPEDVDVSSPDEKSVITYVSSLYDAFPKVPEGGEGIGANDVEVKWIEYQNMVNYLIQWIRHHVTTMSERTFPNNPVELKALYNQYLQFKETEIPPKETEKSKIKRLYKLLEIWIEFGRIKLLQGYHPNDIEKEWGKLIIAMLEREKALRPEVERLEMLQQIANRVQRDSVICEDKLILAGNALQSDSKRLESGVQFQNEAEIAGYILECENLLRQHVIDVQILIDGKYYQADQLVQRVAKLRDEIMALRNECSSVYSKGRILTTEQTKLMISGITQSLNSGFAQTLHPSLTSGLTQSLTPSLTSSSMTSGLSSGMTSRLTPSVTPAYTPGFPSGLVPNFSSGVEPNSLQTLKLMQIRKPLLKSSLLDQNLTEEEINMKFVQDLLNWVDEMQVQLDRTEWGSDLPSVESHLENHKNVHRAIEEFESSLKEAKISEIQMTAPLKLTYAEKLHRLESQYAKLLNTSRNQERHLDTLHNFVSRATNELIWLNEKEEEEVAYDWSERNTNIARKKDYHAELMRELDQKEENIKSVQEIAEQLLLENHPARLTIEAYRAAMQTQWSWILQLCQCVEQHIKENTAYFEFFNDAKEATDYLRNLKDAIQRKYSCDRSSSIHKLEDLVQESMEEKEELLQYKSTIANLMGKAKTIIQLKPRNSDCPLKTSIPIKAICDYRQIEITIYKDDECVLANNSHRAKWKVISPTGNEAMVPSVCFTVPPPNKEAVDLANRIEQQYQNVLTLWHESHINMKSVVSWHYLINEIDRIRASNVASIKTMLPGEHQQVLSNLQSRFEDFLEDSQESQVFSGSDITQLEKEVNVCKQYYQELLKSAEREEQEESVYNLYISEVRNIRLRLENCEDRLIRQIRTPLERDDLHESVFRITEQEKLKKELERLKDDLGTITNKCEEFFSQAAASSSVPTLRSELNVVLQNMNQVYSMSSTYIDKLKTVNLVLKNTQAAEALVKLYETKLCEEEAVIADKNNIENLISTLKQWRSEVDEKRQVFHALEDELQKAKAISDEMFKTYKERDLDFDWHKEKADQLVERWQNVHVQIDNRLRDLEGIGKSLKYYRDTYHPLDDWIQQVETTQRKIQENQPENSKTLATQLNQQKMLVSEIEMKQSKMDECQKYAEQYSATVKDYELQTMTYRAMVDSQQKSPVKRRRMQSSADLIIQEFMDLRTRYTALVTLMTQYIKFAGDSLKRLEEEEKSLEEEKKEHVEKAKELQKWVSNISKTLKDAEKAGKPPFSKQKISSEEISTKKEQLSEALQTIQLFLAKHGDKMTDEERNELEKQVKTLQESYNLLFSESLKQLQESQTSGDVKVEEKIVAERQQEYKEKLQGICDLLTQTENRLIGHQEAFMIGDGTVELKKYQSKQEELQKDMQGSAQALAEVVKNTENFLKENGEKLSQEDKALIEQKLNEAKIKCEQLNLKAEQSKKELDKVVTTAIKEETEKVAAVKQLEESKTKIENLLDWLSNVDKDSERAGTKHKQVIEQNGTHFQEGDGKSAIGEEDEVNGNLLETDVDGQVGTTQENLNQQYQKVKAQHEKIISQHQAVIIATQSAQVLLEKQGQYLSPEEKEKLQKNMKELKVHYETALAESEKKMKLTHSLQEELEKFDADYTEFEHWLQQSEQELENLEAGADDINGLMTKLKRQKSFSEDVISHKGDLRYITISGNRVLEAAKSCSKRDGGKVDTSATHREVQRKLDHATDRFRSLYSKCNVLGNNLKDLVDKYQHYEDASCGLLAGLQACEATASKHLSEPIAVDPKNLQRQLEETKALQGQISSQQVAVEKLKKTAEVLLDARGSLLPAKNDIQKTLDDIVGRYEDLSKSVNERNEKLQITLTRSLSVQDGLDEMLDWMGNVESSLKEQGQVPLNSTALQDIISKNIMLEQDIAGRQSSINAMNEKVKKFMETTDPSTASSLQAKMKDLSARFSEASHKHKETLAKMEELKTKVELFENLSEKLQTFLETKTQALTEVDVPGKDVTELSQYMQESTSEFLEHKKHLEVLHSLLKEISSHGLPSDKALVLEKTNNLSKKFKEMEDTIKEKKEAVTSCQEQLDAFQVLVKSLKSWIKETTKKVPIVQPSFGAEDLGKSLEDTKKLQEKWSLKTPEIQKVNNSGISLCNLISAVTTPAKAIAAVKSGGAVLNGEGTATNTEEFWANKGLTSIKKDMTDISHGYEDLGLLLKDKIAELNTKLSKLQKAQEESSAMMQWLQKMNKTATKWQQTPAPTDTEAVKTQVEQNKSFEAELKQNVNKVQELKDKLTELLEENPDTPEAPRWKQMLTEIDSKWQELNQLTIDRQQKLEESSNNLTQFQTVEAQLKQWLVEKELMVSVLGPLSIDPNMLNTQRQQVQILLQEFATRKPQYEQLTAAGQGILSRPGEDPSLRGIVKEQLAAVTQKWDSLTGQLSDRCDWIDQAIVKSTQYQSLLRSLSDKLSDLDNKLSSSLAVSTHPDAMNQQLETAQKMKQEIQQEKKQIKVAQALCEDLSALVKEEYLKAELSRQLEGILKSFKDVEQKAENHVQHLQSACASSHQFQQMSRDFQAWLDTKKEEQNKSHPISAKLDVLESLIKDHKDFSKTLTAQSHMYEKTIAEGENLLLKTQGSEKAALQLQLNTIKTNWDTFNKQVKERENKLKESLEKALKYKEQVETLWPWIDKCQNNLEEIKFCLDPAEGENSIAKLKSLQKEMDQHFGMVELLNNTANSLLSVCEIDKEVVTDENKSLIQKVDMVTEQLHSKKFCLENMTQKFKEFQEVSKESKRQLQCAKEQLDIHDSLGSQAYSNKYLTMLQTQQKSLQALKHQVDLAKRLAQDLVVEASDSKGTSDVLLQVETIAQEHSTLSQQVDEKCSFLETKLQGIGHFQNTIREMFSQFAEFDDELDSMAPVGRDAETLQKQKETIKAFLKKLEALMASNDNANKTCKMMLATEETSPDLVGIKRDLEALSKQCNKLLDRAQAREEQVEGTIKRLEEFYSKLKEFSILLQKAEEHEESQGPVGMETETINQQLNMFKVFQKEEIEPLQGKQQDVNWLGQGLIQSAAKSTSTQGLEHDLDDVNARWKTLNKKVAQRAAQLQEALLHCGRFQDALESLLSWMVDTEELVANQKPPSAEFKVVKAQIQEQKLLQRLLDDRKSTVEVIKREGEKIATTAEPADKVKILKQLSLLDSRWEALLNKAETRNRQLEGISVVAQQFHETLEPLNEWLTTIEKRLVNCEPIGTQASKLEEQIAQHKALEDDIINHNKHLHQAVSIGQSLKVLSSREDKDMVQSKLDFSQVWYIEIQEKSHSRSELLQQALCNAKIFGEDEVELMNWLNEVHDKLSKLSVQDYSTEGLWKQQSELRVLQEDILLRKQNVDQALLNGLELLKQTTGDEVLIIQDKLEAIKARYKDITKLSTDVAKTLEQALQLARRLHSTHEELCTWLDKVEVELLSYETQVLKGEEASQAQMRPKELKKEAKNNKALLDSLNEVSSALLELVPWRAREGLEKMVAEDNERYRLVSDTITQKVEEIDAAILRSQQFDQAADAELSWITETEKKLMSLGDIRLEQDQTSAQLQVQKTFTMEILRHKDIIDDLVKSGHKIMTACSEEEKQSMKKKLDKVLKNYDTICQINSERYLQLERAQSLVNQFWETYEELWPWLTETQSIISQLPAPALEYETLRQQQEEHRQLRELIAEHKPHIDKMNKTGPQLLELSPGEGFSIQEKYVAADTLYSQIKEDVKKRAVALDEAISQSTQFHDKIDQILESLERIVERLRQPPSISAEVEKIKEQISENKNVSVDMEKLQPLYETLKQRGEEMIARSGGTDKDISAKAVQDKLDQMVFIWENIHTLVEEREAKLLDVMELAEKFWCDHMSLIVTIKDTQDFIRDLEDPGIDPSVVKQQQEAAETIREEIDGLQEELDIVINLGSELIAACGEPDKPIVKKSIDELNSAWDSLNKAWKDRIDKLEEAMQAAVQYQDGLQAVFDWVDIAGGKLASMSPIGTDLETVKQQIEELKQFKSEAYQQQIEMERLNHQAELLLKKVTEESDKHTVQDPLMELKLIWDSLEERIINRQHKLEGALLALGQFQHALDELLAWLTHTEGLLSEQKPVGGDPKAIEIELAKHHVLQNDVLAHQSTVEAVNKAGNDLIESSAGEEASNLQNKLEVLNQRWQNVLEKTEQRKQQLDGALRQAKGFHGEIEDLQQWLTDTERHLLASKPLGGLPETAKEQLNVHMEVCAAFEAKEETYKSLMQKGQQMLARCPKSAETNIDQDINNLKEKWESVETKLNERKTKLEEALNLAMEFHNSLQDFINWLTQAEQTLNVASRPSLILDTVLFQIDEHKVFANEVNSHREQIIELDKTGTHLKYFSQKQDVVLIKNLLISVQSRWEKVVQRLVERGRSLDDARKRAKQFHEAWSKLMEWLEESEKSLDSELEIANDPDKIKTQLAQHKEFQKSLGAKHSVYDTTNRTGRSLKEKTSLADDNLKLDDMLSELRDKWDTICGKSVERQNKLEEALLFSGQFTDALQALIDWLYRVEPQLAEDQPVHGDIDLVMNLIDNHKAFQKELGKRTSSVQALKRSARELIEGSRDDSSWVKVQMQELSTRWETVCALSISKQTRLEAALRQAEEFHSVVHALLEWLAEAEQTLRFHGVLPDDEDALRTLIDQHKEFMKKLEEKRAELNKATTMGDTVLAICHPDSITTIKHWITIIRARFEEVLAWAKQHQQRLASALAGLIAKQELLEALLAWLQWAETTLTDKDKEVIPQEIEEVKALIAEHQTFMEEMTRKQPDVDKVTKTYKRRAADPSSLQSHIPVLDKGRAGRKRFPASSLYPSGSQTQIETKNPRVNLLVSKWQQVWLLALERRRKLNDALDRLEELREFANFDFDIWRKKYMRWMNHKKSRVMDFFRRIDKDQDGKITRQEFIDGILSSKFPTSRLEMSAVADIFDRDGDGYIDYYEFVAALHPNKDAYKPITDADKIEDEVTRQVAKCKCAKRFQVEQIGDNKYRFFLGNQFGDSQQLRLVRILRSTVMVRVGGGWMALDEFLVKNDPCRAKGRTNMELREKFILADGASQGMAAFRPRGRRSRPSSRGASPNRSTSVSSQAAQAASPQVPATTTPKILHPLTRNYGKPWLTNSKMSTPCKAAECSDFPVPSAEGTPIQGSKLRLPGYLSGKGFHSGEDSGLITTAAARVRTQFADSKKTPSRPGSRAGSKAGSRASSRRGSDASDFDISEIQSVCSDVETVPQTHRPTPRAGSRPSTAKPSKIPTPQRKSPASKLDKSSKR

SEQ ID NO: 4465 - protein, 1479 aa, Homo Sapiens
MSSGNASYRCSMSSSADFSDEDDFSQKSGSASPAPGDTLPWNLPKHERSKRKIQGGSVLDPAERAVLRIADERDKVQKKTFTKWINQHLMKVRKHVNDLYEDLRDGHNLISLLEVLSGDTLPREKGRMRFHRLQNVQIALDYLKRRQVKLVNIRNDDITDGNPKLTLGLIWTIILHFQISDIHVTGESEDMSAKERLLLWTQQATEGYAGIRCENFTTCWRDGKLFNAIIHKYRPDLIDMNTVAVQSNLANLEHAFYVAEKIGVIRLLDPEDVDVSSPDEKSVITYVSSLYDAFPKVPEGGEGIGANDVEVKWIEYQNMVNYLIQWIRHHVTTMSERTFPNNPVELKALYNQYLQFKETEIPPKETEKSKIKRLYKLLEIWIEFGRIKLLQGYHPNDIEKEWGKLIIAMLEREKALRPEVERLEMLQQIANRVQRDSVICEDKLILAGNALQSDSKRLESGVQFQNEAEIAGYILECENLLRQHVIDVQILIDGKYYQADQLVQRVAKLRDEIMALRNECSSVYSKGRILTTEQTKLMISGITQSLNSGFAQTLHPSLTSGLTQSLTPSLTSSSMTSGLSSGMTSRLTPSVTPAYTPGFPSGLVPNFSSGVEPNSLQTLKLMQIRKPLLKSSLLDQNLTEEEINMKFVQDLLNWVDEMQVQLDRTEWGSDLPSVESHLENHKNVHRAIEEFESSLKEAKISEIQMTAPLKLTYAEKLHRLESQYAKLLNTSRNQERHLDTLHNFVSRATNELIWLNEKEEEEVAYDWSERNTNIARKKDYHAELMRELDQKEENIKSVQEIAEQLLLENHPARLTIEAYRAAMQTQWSWILQLCQCVEQHIKENTAYFEFFNDAKEATDYLRNLKDAIQRKYSCDRSSSIHKLEDLVQESMEEKEELLQYKSTIANLMGKAKTIIQLKPRNSDCPLKTSIPIKAICDYRQIEITIYKDDECVLANNSHRAKWKVISPTGNEAMVPSVCFTVPPPNKEAVDLANRIEQQYQNVLTLWHESHINMKSVVSWHYLINEIDRIRASNVASIKTMLPGEHQQVLSNLQSRFEDFLEDSQESQVFSGSDITQLEKEVNVCKQYYQELLKSAEREEQEESVYNLYISEVRNIRLRLENCEDRLIRQIRTPLERDDLHESVFRITEQEKLKKELERLKDDLGTITNKCEEFFSQAAASSSVPTLRSELNVVLQNMNQVYSMSSTYIDKLKTVNLVLKNTQAAEALVKLYETKLCEEEAVIADKNNIENLISTLKQWRSEVDEKRQVFHALEDELQKAKAISDEMFKTYKERDLDFDWHKEKADQLVERWQNVHVQIDNRLRDLEGIGKSLKYYRDTYHPLDDWIQQVETTQRKIQENQPENSKTLATQLNQQKMLVSEIEMKQSKMDECQKYAEQYSATVKDYELQTMTYRAMVDSQQKSPVKRRRMQSSADLIIQEFMDLRTRYTALVTLMTQYIKFAGDSLKRLEEEEKSLEEEK

SEQ ID NO: 4466 - protein, 7 aa, Homo Sapiens
MVDTEEL

SEQ ID NO: 4467 - protein, 177 aa, Homo Sapiens
  misc_feature (1)..(1): Xaa can be any naturally occurring amino acid
XQLNQQKMLVSEIEMKQSKMDECQKYAEQYSATVKDYELQTMTYRAMVDSQQKSPVKRRRMQSSADLIIQEFMDLRTRYTALVTLMTQYIKFAGDSLKRLEEEEIAKNKQYDMHTEVTTLKQEKNPVPSAEEWMLEGCRASGGLKKGDFLKKGLEPETFQNFDGDHACSVRDDEFKF

SEQ ID NO: 4468 - protein, 259 aa, Homo Sapiens
  misc_feature (1)..(1): Xaa can be any naturally occurring amino acid
XTRQVAKCKCAKRFQVEQIGDNKYRFGDSQQLRLVRILRSTVMVRVGGGWMALDEFLVKNDPCRAKGRTNMELREKFILADGASQGMAAFRPRGRRSRPSSRGASPNRSTSVSSQAAQAASPQVPATTTPKGTPIQGSKLRLPGYLSGKGFHSGEDSGLITTAAARVRTQFADSKKTPSRPGSRAGSKAGSRASSRRGSDASDFDISEIQSVCSDVETVPQTHRPTPRAGSRPSTAKPSKIPTPQRKSPASKLDKSSKR

SEQ ID NO: 4469 - protein, 448 aa, Homo Sapiens
  misc_feature (1)..(1): Xaa can be any naturally occurring amino acid
XVVTTAIKEETEKVAAVKQLEESKTKIENLLDWLSNVDKDSERAGTKHKQVIEQNGTHFQEGDGKSAIGEEDEVNGNLLETDVDGQVGTTQENLNQQYQKVKAQHEKIISQHQAVIIATQSAQVLLEKQGQYLSPEEKEKLQKNMKELKVHYETALAESEKKMKLTHSLQEELEKFDADYTEFEHWLQQSEQELENLEAGADDINGLMTKLKRQKSFSEDVISHKGDLRYITISGNRVLEAAKSCSKRDGGKVDTSATHREVQRKLDHATDRFRSLYSKCNVLGNNLKDLVDKYQHYEDASCGLLAGLQACEATASKHLSEPIAVDPKNLQRQLEETKALQGQISSQQVAVEKLKKTAEVLLDARGSLLPAKNDIQKTLDDIVGRYEDLSKSVNERNEKLQITLTRSLSVQDGLDEMLDWMGNVESSLKEQDVGTGYCRSSEQYKCHE

SEQ ID NO: 4470 - protein, 43 aa, Homo Sapiens
MGFCLALAWTLLVGAWTPLGAQNPISWEVQRFDGWYNNLMEHR

SEQ ID NO: 4471 - protein, 1551 aa, Homo Sapiens
MGFCLALAWTLLVGAWTPLGAQNPISWEVQRFDGWYNNLMEHRWGSKGSRLQRLVPASYADGVYQPLGEPHLPNPRDLSNTISRGPAGLASLRNRTVLGVFFGYHVLSDLVSVETPGCPAEFLNIRIPPGDPMFDPDQRGDVVLPFQRSRWDPETGRSPSNPRDPANQVTGWLDGSAIYGSSHSWSDALRSFSRGQLASGPDPAFPRDSQNPLLMWAAPDPATGQNGPRGLYAFGAERGNREPFLQALGLLWFRYHNLWAQRLARQHPDWEDEELFQHARKRVIATYQNIAVYEWLPSFLQKTLPEYTGYRPFLDPSISSEFVAASEQFLSTMVPPGVYMRNASCHFQGVINRNSSVSRALRVCNSYWSREHPSLQSAEDVDALLLGMASQIAEREDHVLVEDVRDFWPGPLKFSRTDHLASCLQRGRDLGLPSYTKARAALGLSPITRWQDINPALSRSNDTVLEATAALYNQDLSWLELLPGGLLESHRDPGPLFSTIVLEQFVRLRDGDRYWFENTRNGLFSKKEIEEIRNTTLQDVLVAVINIDPSALQPNVFVWHKGDPCPQPRQLSTEGLPACAPSVVRDYFEGSGFGFGVTIGTLCCFPLVSLLSAWIVARLRMRNFKRLQGQDRQSIVSEKLVGGMEALEWQGHKEPCRPVLVYLQPGQIRVVDGRLTVLRTIQLQPPQKVNFVLSSNRGRRTLLLKIPKEYDLVLLFNLEEERQALVENLRGALKESGLSIQEWELREQELMRAAVTREQRRHLLETFFRHLFSQVLDINQADAGTLPLDSSQKVREALTCELSRAEFAESLGLKPQDMFVESMFSLADKDGNGYLSFREFLDILVVFMKGSPEEKSRLMFRMYDFDGNGLISKDEFIRMLRSFIEISNNCLSKAQLAEVVESMFRESGFQDKEELTWEDFHFMLRDHNSELRFTQLCVKGVEVPEVIKDLCRRASYISQDMICPSPRVSARCSRSDIETELTPQRLQCPMDTDPPQEIRRRFGKKVTSFQPLLFTEAHREKFQRSCLHQTVQQFKRFIENYRRHIGCVAVFYAIAGGLFLERAYYYAFAAHHTGITDTTRVGIILSRGTAASISFMFSYILLTMCRNLITFLRETFLNRYVPFDAAVDFHRLIASTAIVLTVLHSVGHVVNVYLFSISPLSVLSCLFPGLFHDDGSELPQKYYWWFFQTVPGLTGVVLLLILAIMYVFASHHFRRRSFRGFWLTHHLYILLYVLLIIHGSFALIQLPRFHIFFLVPAIIYGGDKLVSLSRKKVEISVVKAELLPSGVTHLRFQRPQGFEYKSGQWVRIACLALGTTEYHPFTLTSAPHEDTLSLHIRAAGPWTTRLREIYSAPTGDRCARYPKLYLDGPFGEGHQEWHKFEVSVLVGGGIGVTPFASILKDLVFKSSVSCQVFCKKIYFIWVTRTQRQFEWLADIIREVEENDHQDLVSVHIYITQLAEKFDLRTTMLYICERHFQKVLNRSLFTGLRSITHFGRPPFEPFFNSLQEVHPQVRKIGVFSCGPPGMTKNVEKACQLINRQDRTHFSHHYENF

SEQ ID NO: 4472 - protein, 1551 aa, Homo Sapiens; identical to SEQ ID NO: 4471

SEQ ID NO: 4473 - protein, 444 aa, Homo Sapiens
MGFCLALAWTLLVGAWTPLGAQNPISWEVQRFDGWYNNLMEHRWGSKGSRLQRLVPASYADGVYQPLGEPHLPNPRDLSNTISRGPAGLASLRNRTVLGVFFGYHVLSDLVSVETPGCPAEFLNIRIPPGDPMFDPDQRGDVVLPFQRSRWDPETGRSPSNPRDPANQVTGWLDGSAIYGSSHSWSDALRSFSRGQLASGPDPAFPRDSQNPLLMWAAPDPATGQNGPRGLYAFGAERGNREPFLQALGLLWFRYHNLWAQRLARQHPDWEDEELFQHARKRVIATYQNIAVYEWLPSFLQKTLPEYTGYRPFLDPSISSEFVAASEQFLSTMVPPGVYMRNASCHFQGVINRNSSVSRALRVCNSYWSREHPSLQSAEDVDALLLGMASQIAEREDHVLVEDVRGTGGHSCPVQPGLILARAAPWGTPGEPPGPWTSVQHHRP

SEQ ID NO: 4474 - protein, 1197 aa, Homo Sapiens
MWMHCCWAWPPRSQSERTMCWLKMCGVSLRLSLQVVNSWPLGRGSAGLPEPDFWPGPLKFSRTDHLASCLQRGRDLGLPSYTKARAALGLSPITRWQDINPALSRSNDTVLEATAALYNQDLSWLELLPGGLLESHRDPGPLFSTIVLEQFVRLRDGDRYWFENTRNGLFSKKEIEEIRNTTLQDVLVAVINIDPSALQPNVFVWHKGDPCPQPRQLSTEGLPACAPSVVRDYFEGSGFGFGVTIGTLCCFPLVSLLSAWIVARLRMRNFKRLQGQDRQSIVSEKLVGGMEALEWQGHKEPCRPVLVYLQPGQIRVVDGRLTVLRTIQLQPPQKVNFVLSSNRGRRTLLLKIPKEYDLVLLFNLEEERQALVENLRGALKESGLSIQEWELREQELMRAAVTREQRRHLLETFFRHLFSQVLDINQADAGTLPLDSSQKVREALTCELSRAEFAESLGLKPQDMFVESMFSLADKDGNGYLSFREFLDILVVFMKGSPEEKSRLMFRMYDFDGNGLISKDEFIRMLRSFIEISNNCLSKAQLAEVVESMFRESGFQDKEELTWEDFHFMLRDHNSELRFTQLCVKGVEVPEVIKDLCRRASYISQDMICPSPRVSARCSRSDIETELTPQRLQCPMDTDPPQEIRRRFGKKVTSFQPLLFTEAHREKFQRSCLHQTVQQFKRFIENYRRHIGCVAVFYAIAGGLFLERAYYYAFAAHHTGITDTTRVGIILSRGTAASISFMFSYILLTMCRNLITFLRETFLNRYVPFDAAVDFHRLIASTAIVLTVLHSVGHVVNVYLFSISPLSVLSCLFPGLFHDDGSELPQKYYWWFFQTVPGLTGVVLLLILAIMYVFASHHFRRRSFRGFWLTHHLYILLYVLLIIHGSFALIQLPRFHIFFLVPAIIYGGDKLVSLSRKKVEISVVKAELLPSGVTHLRFQRPQGFEYKSGQWVRIACLALGTTEYHPFTLTSAPHEDTLSLHIRAAGPWTTRLREIYSAPTGDRCARYPKLYLDGPFGEGHQEWHKFEVSVLVGGGIGVTPFASILKDLVFKSSVSCQVFCKKIYFIWVTRTQRQFEWLADIIREVEENDHQDLVSVHIYITQLAEKFDLRTTMLYICERHFQKVLNRSLFTGLRSITHFGRPPFEPFFNSLQEVHPQVRKIGVFSCGPPGMTKNVEKACQLINRQDRTHFSHHYENF

SEQ ID NO: 4475 - protein, 122 aa, Homo Sapiens
MARSLGVLVALPFPLPVGFNAEEAHNIVKECVDGVLGGEDYNHNNINQWTASIVEQSLTHLVKLGKAYKYIVTCAVVQKSAYGFHTASSCFWDTTSDGTCTVRWENRTMNCIVNVFAIAIVL

SEQ ID NO: 4476 - protein, 152 aa, Homo Sapiens
MEEYHRHCDEVGFNAEEAHNIVKECVDGVLGGEDYNHNNINQWTASIVEQSLTHLVKLGKAYKYIVTCAVVQKSAYGFHTASSCFWDTTSDGTCTVRWENRTMNCGVLLCRPGWSAVMQFRLTATSASQVQVILLPQPPEYLELQAHAITPG

SEQ ID NO: 4477 - protein, 116 aa, Homo Sapiens
MEEYHRHCDEVGFNAEEAHNIVKECVDGVLGGEDYNHNNINQWTASIVEQSLTHLVKLGKAYKYIVTCAVVQKSAYGFHTASSCFWDTTSDGTCTVRWENRTMNCIVNVFAIAIVL

SEQ ID NO: 4478 - protein, 346 aa, Homo Sapiens
MAAAEPASSGQQAPAGQGQGQRPPPQPPQAQAPQPPPPPQLGGAGGGSSRHEKSLGLLTTKFVSLLQEAKDGVLDLKAAADTLAVRQKRRIYDITNVLEGIDLIEKKSKNSIQWKGVGAGCNTKEVIDRLRYLKAEIEDLELKERELDQQKLWLQQSIKNVMDDSINNRFSYVTHEDICNCFNGDTLLAIQAPSGTQLEVPIPEMGQNGQKKYQINLKSHSGPIHVLLINKESSSSKPVVFPVPPPDDLTQPSSQSLTPVTPQKSSMATQNLPEQHVSERSQALQQTSATDISSAGSISGDIIDELMSSDVFPLLRLSPTPADDYNFNLDDNEGVCDLFDVQILNY

SEQ ID NO: 4479 - protein, 345 aa, Homo Sapiens
MAAAEPASSGQQAPAGQGQGQRPPPQPPQAQAPQPPPPPQLGGAGGGSSRHEKSLGLLTTKFVSLLQEAKDGVLDLKAAADTLAVRQKRRIYDITNVLEGIDLIEKKSKNSIQWKGVGAGCNTKEVIDRLRYLKAEIEDLELKERELDQQKLWLQQSIKNVMDDSINNRFSYVTHEDICNCFNGDTLLAIQAPSGTQLEVPIPEMGQNGQKKYQINLKSHSGPIHVLLINKESSSSKPVVFPVPPPDDLTQPSSQSLTPVTPQKSSMATQNLPEQHVSERSQALQQTSATDISSGSISGDIIDELMSSDVFPLLRLSPTPADDYNFNLDDNEGVCDLFDVQILNY

SEQ ID NO: 4480 - protein, 185 aa, Homo Sapiens
MDDSINNRFSYVTHEDICNCFNGDTLLAIQAPSGTQLEVPIPEMGQNGQKKYQINLKSHSGPIHVLLINKESSSSKPVVFPVPPPDDLTQPSSQSLTPVTPQKSSMATQNLPEQHVSERSQALQQTSATDISSAGSISGDIIDELMSSDVFPLLRLSPTPADDYNFNLDDNEGVCDLFDVQILNY

SEQ ID NO: 4481 - protein, 173 aa, Homo Sapiens
MKTSVIALMVSDTLLAIQAPSGTQLEVPIPEMGQNGQKKYQINLKSHSGPIHVLLINKESSSSKPVVFPVPPPDDLTQPSSQSLTPVTPQKSSMATQNLPEQHVSERSQALQQTSATDISSAGSISGDIIDELMSSDVFPLLRLSPTPADDYNFNLDDNEGVCDLFDVQILNY

SEQ ID NO: 4482 - protein, 182 aa, Homo Sapiens
SYDSTFSYVTHEDICNCFNGDTLLAIQAPSGTQLEVPIPEMGQNGQKKYQINLKSHSGPIHVLLINKESSSSKPVVFPVPPPDDLTQPSSQSLTPVTPQKSSMATQNLPEQHVSERSQALQQTSATDISSAGSISGDIIDELMSSDVFPLLRLSPTPADDYNFNLDDNEGVCDLFDVQILNY

SEQ ID NO: 4483 - protein, 249 aa, Homo Sapiens
  misc_feature (1)..(1): Xaa can be any naturally occurring amino acid
XLLQEAKDGVLDLKAAADTLAVRQKRRIYDITNVLEGIDLIEKKSKNSIQWKGVGAGCNTKEVIDRLRYLKAEIEDLELKERELDQQKLWLQQSIKNVMDDSINNRFSYVTHEDICNCFNGDTLLAIQAPSGTQLEVPIPEMGQNGQKKYQINLKSHSGPIHVLLINKESSSSKPVVFPVPPPDDLTQPSSQSLTPVTPQKSSMATQNLPEQHVSERSQALQQTSATDISSAGSISGDIIDELMSSDGK

SEQ ID NO: 4484 - protein, 130 aa, Homo Sapiens
  misc_feature (1)..(1): Xaa can be any naturally occurring amino acid
XNKESSSSKPVVFPVPPPDDLTQPSSQSLTPVTPQKSSMATQNLPEQHVSERSQALQQTSATDISSAGSISGDIIDELMSSDGGKLKDTTGHQKQVGQGLITCLIFLLPLNCLYFCMSFYPNRRSLPLVK

SEQ ID NO: 4485 - protein, 78 aa, Homo Sapiens
MAITQFRLFKFCTCLATVFSFLKRLICRSGRGRKLSGDQITLPTTVDYSSVPKQTDVEEWTSWDEDAPTSVKIEGGNG

SEQ ID NO: 4486 - protein, 197 aa, Homo Sapiens
MAITQFRLFKFCTCLATVFSFLKRLICRSGRGRKLSGDQITLPTTVDYSSVPKQTDVEEWTSWDEDAPTSVKIEGGNGNVATQQNSLEQLEPDYFKDMTPTIRKTQKIVIKKREPLNFGIPDGSTGFSSRLAATQDLPFIHQSSELGDLDTWQENTNAWEEEEDAAWQAEEVLRQQKLADREKRAAEQQRKKMEKEA

SEQ ID NO: 4487 - protein, 213 aa, Homo Sapiens
MAITQFRLFKFCTCLATVFSFLKRLICRSGRGRKLSGDQITLPTTVDYSSVPKQTDVEEWTSWDEDAPTSVKIEGGNGNVATQQNSLEQLEPDYFKDMTPTIRKTQKIVIKKREPLNFGIPDGSTGFSSRLAATQDLPFIHQSSELGDLDTWQENTNAWEEEEDAAWQAEEVLRQQKLADREKRAAEQQRKKMEKEAQRLMKKEQNKIGVKLS

SEQ ID NO: 4488 - protein, 213 aa, Homo Sapiens; identical to SEQ ID NO: 4487

SEQ ID NO: 4489 - protein, 213 aa, Homo Sapiens; identical to SEQ ID NO: 4487

SEQ ID NO: 4490 - protein, 258 aa, Homo Sapiens
MAITQFRLFKFCTCLATVFSFLKRLICRSGRGRKLSGDQITLPTTVDYSSVPKQTDVEEWTSWDEDAPTSVKIEGGNGNVATQQNSLEQLEPDYFKDMTPTIRKTQKIVIKKREPLNFGIPDGSTGFSSRLAATQDLPFIHQSSELGDLDTWQENTNAWEEEEDAAWQAEEVLRSRTNVCLLCSLLFHHPTPTSTPYINQSVKIERVSLGQWSYGKSKEQQKLADREKRAAEQQRKKMEKEAQRLMKKEQNKIGVKLS

SEQ ID NO: 4491 - protein, 258 aa, Homo Sapiens; identical to SEQ ID NO: 4490

SEQ ID NO: 4492 - protein, 153 aa, Homo Sapiens
MAITQFRLFKFCTCLATVFSFLKRLICRSGRGRKLSGDQITLPTTVDYSSVPKQTDVEEWTSWDEDAPTSVKIEGGNGNVATQQNSLEQLEPDYFKDMTPTIRKTQKIVIKKREPLNFGIPDGSTGFSSRLAATQDLPFIHQSTSHWVGATII

SEQ ID NO: 4493 - protein, 41 aa, Homo Sapiens
MTPTIRKTQKIVIKKREPLNFGIPDGSTGFSSRLAATQDLP

SEQ ID NO: 4494 - protein, 229 aa, Homo Sapiens
MTPQLLLALVLWASCPPCSGRKGPPAALTLPRVQCRASRYPIAVDCSWTLPPAPNSTSPVSFIATYRLGMAARGHSWPCLQQTPTSTSCTITDVQLFSMAPYVLNVTAVHPWGSSSSFVPFITEHIIKPDPPEGVRLSPLAERQLQVQWEPPGSWPFPEIFSLKYWIRYKRQGAARFHRVGPIEATSFILRAVRPRARYYVQVAAQDLTDYGELSDWSLPATATMSLGK

SEQ ID NO: 4495 - protein, 83 aa, Homo Sapiens
MAKSLLKTASLSGRTKLLHQTGLSLYSTSHGFYEEEVKKTLQQFPGGSIDLQKEDNGIGILTLNNPSRMNAFSEFREISLYQC

SEQ ID NO: 4496 - protein, 125 aa, Homo Sapiens
MAKSLLKTASLSGRTKLLHQTGLSLYSTSHGFYEEEVKKTLQQFPGGSIDLQKEDNGIGILTLNNPSRMNAFSGVMMLQLLEKVIELENWTEGKGLIVRGAKNTFSSGSDLNAVKSLGTPEANFL

SEQ ID NO: 4497 - protein, 135 aa, Homo Sapiens
MAKSLLKTASLSGRTKLLHQTGLSLYSTSHGFYEEEVKKTLQQFPGGSIDLQKEDNGIGILTLNNPSRMNAFSGVMMLQLLEKVIELENWTEGKGLIVRGAKNTFSSGSDLNAVKSLGTPEDGMAVCMFMQNTLT

SEQ ID NO: 4498 - protein, 139 aa, Homo Sapiens
MAKSLLKTASLSGRTKLLHQTGLSLYSTSHGFYEEEVKKTLQQFPGGSIDLQKEDNGIGILTLNNPSRMNAFSGVMMLQLLEKVIELENWTEGKGLIVRGAKNTFSSGSDLNAVKSLGTPEDGMAVCMFMQNTLTRFMR

SEQ ID NO: 4499 - protein, 151 aa, Homo Sapiens
MAKSLLKTASLSGRTKLLHQTGLSLYSTSHGFYEEEVKKTLQQFPGGSIDLQKEDNGIGILTLNNPSRMNAFSGVMMLQLLEKVIELENWTEGKGLIVRGAKNTFSSGSDLNAVKSLGTPEDGMAVCMFMQNTLTRFMRLPLISVALVQGW

SEQ ID NO: 4500 - protein, 301 aa, Homo Sapiens
MAKSLLKTASLSGRTKLLHQTGLSLYSTSHGFYEEEVKKTLQQFPGGSIDLQKEDNGIGILTLNNPSRMNAFSGVMMLQLLEKVIELENWTEGKGLIVRGAKNTFSSGSDLNAVKSLGTPEDGMAVCMFMQNTLTRFMRLPLISVALVQGWALGGGAEFTTACDFRLMTPESKIRFVHKEMGIIPSWGGTTRLVEIIGSRQALKVLSGALKLDSKNALNIGMVEEVLQSSDETKSLEEAQEWLKQFIQGPPEVIRALKKSVCSGRELYLEEALQNERDLLGTVWGGPANLEAIAKKGKFNK

SEQ ID NO: 4501 - protein, 301 aa, Homo Sapiens; identical to SEQ ID NO: 4500

SEQ ID NO: 4502 - protein, 301 aa, Homo Sapiens; identical to SEQ ID NO: 4500

SEQ ID NO: 4503 - protein, 179 aa, Homo Sapiens
MAKSLLKTASLSGRTKLLHQTGLSLYSTSHGFYEEEVKKTLQQFPGGSIDLQKEDNGIGILTLNNPSRMNAFSGVMMLQLLEKVIELENWTEGKGLIVRGAKNTFSSGSDLNAVKSLGTPEESCRWNTEFLYTLHPVSPFINILYSYGWNGRMHVHAKHLNKIYETSFNKCCAGSRLGI

SEQ ID NO: 4504 - protein, 125 aa, Homo Sapiens
MAKSLLKTASLSGRTKLLHQTGLSLYSTSHGFYEEEVKKTLQQFPGGSIDLQKEDNGIGILTLNNPSRMNAFSGVMMLQLLEKVIELENWTEGKGLIVRGAKNTFSSGSDLNAVKSLGTPEGDFL

SEQ ID NO: 4505 - protein, 145 aa, Homo Sapiens
MAKSLLKTASLSGRTKLLHQTGLSLYSTSHGFYEEEVKKTLQQFPGGSIDLQKEDNGIGILTLNNPSRMNAFSGVMMLQLLEKVIELENWTEGKGLIVRGAKNTFSSGSDLNAVKSLGTPETSFNKCCAGSRLGIGWRSRIYYSM

SEQ ID NO: 4506 - protein, 145 aa, Homo Sapiens; identical to SEQ ID NO: 4505

SEQ ID NO: 4507 - protein, 307 aa, Homo Sapiens
MALKQEMAKSLLKTASLSGRTKLLHQTGLSLYSTSHGFYEEEVKKTLQQFPGGSIDLQKEDNGIGILTLNNPSRMNAFSGVMMLQLLEKVIELENWTEGKGLIVRGAKNTFSSGSDLNAVKSLGTPEDGMAVCMFMQNTLTRFMRLPLISVALVQGWALGGGAEFTTACDFRLMTPESKIRFVHKEMGIIPSWGGTTRLVEIIGSRQALKVLSGALKLDSKNALNIGMVEEVLQSSDETKSLEEAQEWLKQFIQGPPEVIRALKKSVCSGRELYLEEALQNERDLLGTVWGGPANLEAIAKKGKFNK

SEQ ID NO: 4508 - protein, 226 aa, Homo Sapiens
MMLQLLEKVIELENWTEGKGLIVRGAKNTFSSGSDLNAVKSLGTPEDGMAVCMFMQNTLTRFMRLPLISVALVQGWALGGGAEFTTACDFRLMTPESKIRFVHKEMGIIPSWGGTTRLVEIIGSRQALKVLSGALKLDSKNALNIGMVEEVLQSSDETKSLEEAQEWLKQFIQGPPEVIRALKKSVCSGRELYLEEALQNERDLLGTVWGGPANLEAIAKKGKFNK

SEQ ID NO: 4509 - protein, 70 aa, Homo Sapiens
MMLQLLEKVIELENWTEGKGLIVRGAKNTFSSGSDLNAVKSLGTPETSFNKCCAGSRLGIGWRSRIYYSM

SEQ ID NO: 4510 - protein, 34 aa, Homo Sapiens
  misc_feature (1)..(1): Xaa can be any naturally occurring amino acid
XFMRLPLISVALVQGWALGGGAEFTTACDFSFRH

SEQ ID NO: 4511 - protein, 76 aa, Homo Sapiens
  misc_feature (1)..(1): Xaa can be any naturally occurring amino acid
XMLQLLEKVIELENWTEGKGLIVRGAKNTFSSGSDLNAVKSLGTPEDGMAVCMFMQNTLTRFMSRMCGEVVCIQRR

SEQ ID NO: 4512 - protein, 100 aa, Homo Sapiens
  misc_feature (1)..(1): Xaa can be any naturally occurring amino acid
XTPEVKKQRGKILLGLSRLPLISVALVQGWALGGGAEFTTACDFRLMTPESKIRFVHKEMGIIPSWGGTTRLVEIIGSRQALKVLSGALKLDSKNALNIG

SEQ ID NO: 4513 - protein, 255 aa, Homo Sapiens
  misc_feature (1)..(1): Xaa can be any naturally occurring amino acid
XTSHGFYEEEVKKTLQQFPGGSIDLQKEDNGIGILTLNNPSRMNAFSGVMMLQLLEKVIELENWTEGKGLIVRGAKNTFSSGSDLNAVKSLGTPEESCRWNTEFLYTLHPVSPFINILYSYGWNGRMHVHAKHLNKIYEVKKQRGKILLGLSRLPLISVALVQGWALGGGAEFTTACDFRLMTPESKIRFVHKEMGIIPSWGGTTRLVEIIGSRQALKVLSGALKLDSKNALNIGMVEEVLQSSDETKSLEEAQE

SEQ ID NO: 4514 - protein, 567 aa, Homo Sapiens
MGTTARAALVLTYLAVASAASEGGFTATGQRQLRPEHFQEVGYAAPPSPPLSRSLPMDHPDSSQHGPPFEGQSGKEGRGPRPHSQPWLGERVGCSHIPPSIVQPPPSQEATPLQQEKLLPAQLPAEKEVGPPLPQEAVPLQKELPSLQHPNEQKEGTPAPFGDQSHPEPESWNAAQHCQQDRSQGGWGHRLDGFPPGRPSPDNLNQICLPNRQHVVYGPWNLPQSSYSHLTRQGETLNFLEIGYSRCCHCRSHTNRLECAKLVWEEAMSRFCEAEFSVKTRPHWCCTRQGEARFSCFQEEAPQPHYQLRACPSHQPDISSGLELPFPPGVPTLDNIKNICHLRRFRSVPRNLPATDPLQRELLALIQLEREFQRCCRQGNNHTCTWKAWEDTLDKYCDREYAVKTHHHLCCRHPPSPTRDECFARRAPYPNYDRDILTIDIGRVTPNLMGHLCGNQRVLTKHKHIPGLIHNMTARCCDLPFPEQACCAEEEKLTFINDLCGPRRNIWRDPALCCYLSPGDEQVNCFNINYLRNVALVSGDTENAKGQGEQGSTGGTNISSTSEPKEE

SEQ ID NO: 4515 - protein, 415 aa, Homo Sapiens
MGTTARAALVLTYLAVASAASEGGFTATGQRQLRPEHFQEVGYAAPPSPPLSRSLPMDHPDSSQHGPPFEGQSQVQPPPSQEATPLQQEKLLPAQLPAEKEVGPPLPQEAVPLQKELPSLQHPNEQKEGTPAPFGDQSHPEPESWNAAQHCQQDRSQGGWGHRLDGFPPGRPSPDNLNQICLPNRQHVVYGPWNLPQSSYSHLTRQGETLNFLEIGYSRCCHCRSHTNRLECAKLVWEDTLDKYCDREYAVKTHHHLCCRHPPSPTRDECFARRAPYPNYDRDILTIDIGRVTPNLMGHLCGNQRVLTKHKHIPGLIHNMTARCCDLPFPEQACCAEEEKLTFINDLCGPRRNIWRDPALCCYLSPGDEQVNCFNINYLRNVALVSGDTENAKGQGEQGSTGGTNISSTSEPKEE

SEQ ID NO: 4516 - protein, 540 aa, Homo Sapiens
MGTTARAALVLTYLAVASAASEGGFTATGQRQLRPEHFQEVGYAAPPSPPLSRSLPMDHPDSSQHGPPFEGQSQVQPPPSQEATPLQQEKLLPAQLPAEKEVGPPLPQEAVPLQKELPSLQHPNEQKEGTPAPFGDQSHPEPESWNAAQHCQQDRSQGGWGHRLDGFPPGRPSPDNLNQICLPNRQHVVYGPWNLPQSSYSHLTRQGETLNFLEIGYSRCCHCRSHTNRLECAKLVWEEAMSRFCEAEFSVKTRPHWCCTRQGEARFSCFQEEAPQPHYQLRACPSHQPDISSGLELPFPPGVPTLDNIKNICHLRRFRSVPRNLPATDPLQRELLALIQLEREFQRCCRQGNNHTCTWKAWEDTLDKYCDREYAVKTHHHLCCRHPPSPTRDECFARRAPYPNYDRDILTIDIGRVTPNLMGHLCGNQRVLTKHKHIPGLIHNMTARCCDLPFPEQACCAEEEKLTFINDLCGPRRNIWRDPALCCYLSPGDEQVNCFNINYLRNVALVSGDTENAKGQGEQGSTGGTNISSTSEPKEE

SEQ ID NO: 4517 - protein, 160 aa, Homo Sapiens
MKIAVLFCFFLLIIFQTDFGKNEEIPRKQRRKIYHRRLRKSSTSHKHRSNRQLGIQQTTVFTPVARLPIVNFDYSMEEKFESFSSFPGVESSYNVLPGKKGHCLVKGITMYNKAVWSPEPCTTCLCSDGRVLCDETMCHPQRCPQTVIPEGECCPVCSAT

SEQ ID NO: 4518 - protein, 643 aa, Homo Sapiens
MKIAVLFCFFLLIIFQTDFGKNEEIPRKQRRKIYHRRLRKSSTSHKHRSNRQLGIQQTTVFTPVARLPIVNFDYSMEEKFESFSSFPGVESSYNVLPGKKGHCLVKGITMYNKAVWSPEPCTTCLCSDGRVLCDETMCHPQRCPQTVIPEGECCPVCSATEQREPTNLLHKQLPPPQVGMDRIVRKEALQSEEDEEVKEEDTEQKRETPESRNQGQLYSEGDSRGGDRKQRPGEERRLAHQQQRQGREEEEDEEEEGEEGEEDEEDEEDPVRGDMFRMPSRSPLPAPPRGTLRLPSGCSLSYRTISCINAMLTQIPPLTAPQITSLELTGNSIASIPDEAFNGLPNLERLDLSKNNITSSGIGPKAFKLLKKLMRLNMDGNNLIQIPSQLPSTLEELKVNENNLQAIDEESLSDLNQLVTLELEGNNLSEANVNPLAFKPLKSLAYLRLGKNKFRIIPQGLPGSIEELYLENNQIEEITEICFNHTRKINVIVLRYNKIEENRIAPLAWINQENLESIDLSYNKLYHVPSYLPKSLLHLVLLGNQIERIPGYVFGHMEPGLEYLYLSFNKLADDGMDRVSFYGAYHSLRELFLDHNDLKSIPPGIQEMKALHFLRLNNNKIRCVSDAVLETVTNRSDVAFPLW

SEQ ID NO: 4519 - protein, 164 aa, Homo Sapiens
MKIAVLFCFFLLIIFQTDFGKNEEIPRKQRRKIYHRRLRKSSTSHKHRSNRQLGIQQTTVFTPVARLPIVNFDYSMEEKFESFSSFPGVESSYNVLPGKKGHCLVKGITMYNKAVWSPEPCTTCLCSDGRVLCDETMCHPQRCPQTVIPEGECCPVCSATGTEI

SEQ ID NO: 4520 - protein, 699 aa, Homo Sapiens
MKIAVLFCFFLLIIFQTDFGKNEEIPRKQRRKIYHRRLRKSSTSHKHRSNRQLGIQQTTVFTPVARLPIVNFDYSMEEKFESFSSFPGVESSYNVLPGKKGHCLVKGITMYNKAVWSPEPCTTCLCSDGRVLCDETMCHPQRCPQTVIPEGECCPVCSATVSYSLLSGIALNDRNEFSGDSSEQREPTNLLHKQLPPPQVGMDRIVRKEALQSEEDEEVKEEDTEQKRETPESRNQGQLYSEGDSRGGDRKQRPGEERRLAHQQQRQGREEEEDEEEEGEEGEEDEEDEEDPVRGDMFRMPSRSPLPAPPRGTLRLPSGCSLSYRTISCINAMLTQIPPLTAPQITSLELTGNSIASIPDEAFNGLPNLERLDLSKNNITSSGIGPKAFKLLKKLMRLNMDGNNLIQIPSQLPSTLEELKVNENNLQAIDEESLSDLNQLVTLELEGNNLSEANVNPLAFKPLKSLAYLRLGKNKFRIIPQGLPGSIEELYLENNQIEEITEICFNHTRKINVIVLRYNKIEENRIAPLAWINQENLESIDLSYNKLYHVPSYLPKSLLHLVLLGNQIERIPGYVFGHMEPGLEYLYLSFNKLADDGMDRVSFYGAYHSLRELFLDHNDLKSIPPGIQEMKALHFLRLNNNKIRNILPEEICNAEEDDDSNLEHLHLENNYIKIREIPSYTFSCIRSYSSIVLKPQNIK

SEQ ID NO: 4521 - protein, 102 aa, Homo Sapiens
MREYGVERDLAVYNQLLNIFPKEVFRPRNIIQRIFVHYPRQQECGIAVLEQMENHGVMPNKETEFLLIQIFGRKSYPMLKLVRLKLWFPRFMNVNPFPVPRD

SEQ ID NO: 4522 - protein, 223 aa, Homo Sapiens
MREYGVERDLAVYNQLLNIFPKEVFRPRNIIQRIFVHYPRQQECGIAVLEQMENHGVMPNKETEFLLIQIFGRKSYPMLKLVRLKLWFPRFMNVNPFPVPRDLPQDPVELAMFGLRHMEPDLSARVTIYQVPLPKDSTGAADPPQPHIVGIQSPDQQAALARHNPARPVFVEGPFSLWLRNKCVYYHILRADLLPPEEREVEETPEEWNLYYPMQLDLEYVRS

SEQ ID NO: 4523 - protein, 267 aa, Homo Sapiens
MREYGVERDLAVYNQLLNIFPKEVFRPRNIIQRIFVHYPRQQECGIAVLEQMENHGVMPNKETEFLLIQIFGRKSYPMLKLVRLKLWFPRFMNVNPFPVPRDLPQDPVELAMFGLRHMEPDLSARVTIYQVPLPKDSTGAADPPQPHIVGKSESMGAAKSLTLPRPCQVLAGPRLGSLGLWAESLAGHRACMSPHQESRVPISRPPWPATIQPGLSLLRAPSPCGSATSVCITTSSELTCCPRRRGKWKRRRRSGTSTTRCSWTWSM

SEQ ID NO: 4524 - protein, 25 aa, Homo Sapiens
MSWVQATLLARGLCRAWGGTCGAAL

SEQ ID NO: 4525 - protein, 217 aa, Homo Sapiens
MSWVQATLLARGLCRAWGGTCGAALTGTSISQVPLPKDSTGAADPPQPHIVGIQSPDQQAALARHNPARPVFVEGPFSLWLRNKCVYYHILRADLLPPEEREVEETPEEWNLYYPMQLDLEYVRSGWDNYEFDINEVEEGPVFAMCMAGAHDQATMAKWIQGLQETNPTLAQIPVVFRLAGSTRELQTSSAGLEEPPLPEDHQEEDDNLQRQQQGQS

SEQ ID NO: 4526 - protein, 82 aa, Homo Sapiens
MSWVQATLLARGLCRAWGGTCGAALTGTSISQVPLPKDSTGAADPPQPHIVGSGRDAGGVEPLLPDAAGPGVCEEWLGQLRV

SEQ ID NO: 4527 - protein, 227 aa, Homo Sapiens
MSWVQATLLARGLCRAWGGTCGAALTGTSISQVPRRLPRGLHCSAAAHSSEQSLVPSPPEPRQRPTKALVPFEDLFGQAPGGERDKASFLQTVQKFAEHSVRKRGHIDFIYLALRKMREYGVERDLAVYNQLLNIFPKEVFRPRNIIQRIFVHYPRQQECGIAVLEQMENHGVMPNKETEFLLIQIFGRKSYPMLKLVRLKLWFPRFMNVNPFPVPRDLPQDPVELA

SEQ ID NO: 4528 - protein, 296 aa, Homo Sapiens
MSWVQATLLARGLCRAWGGTCGAALTGTSISQVPRRLPRGLHCSAAAHSSEQSLVPSPPEPRQRPTKALVPFEDLFGQAPGGERDKASFLQTVQKFAEHSVRKRGHIDFIYLALRKMREYGVERDLAVYNQLLNIFPKEVFRPRNIIQRIFVHYPRQQECGIAVLEQMENHGVMPNKETEFLLIQIFGRKSYPMLKLVRLKLWFPRFMNVNPFPVPRDLPQDPVELAMFGLRHMEPDLSARVTIYQVPLPKDSTGAADPPQPHIVGSGRDAGGVEPLLPDAAGPGVCEEWLGQLRV

SEQ ID NO: 4529 - protein, 431 aa, Homo Sapiens
MSWVQATLLARGLCRAWGGTCGAALTGTSISQVPRRLPRGLHCSAAAHSSEQSLVPSPPEPRQRPTKALVPFEDLFGQAPGGERDKASFLQTVQKFAEHSVRKRGHIDFIYLALRKMREYGVERDLAVYNQLLNIFPKEVFRPRNIIQRIFVHYPRQQECGIAVLEQMENHGVMPNKETEFLLIQIFGRKSYPMLKLVRLKLWFPRFMNVNPFPVPRDLPQDPVELAMFGLRHMEPDLSARVTIYQVPLPKDSTGAADPPQPHIVGIQSPDQQAALARHNPARPVFVEGPFSLWLRNKCVYYHILRADLLPPEEREVEETPEEWNLYYPMQLDLEYVRSGWDNYEFDINEVEEGPVFAMCMAGAHDQATMAKWIQGLQETNPTLAQIPVVFRLAGSTRELQTSSAGLEEPPLPEDHQEEDDNLQRQQQGQS

SEQ ID NO: 4530 - protein, 296 aa, Homo Sapiens
MSWVQATLLARGLCRAWGGTCGAALTGTSISQVPRRLPRGLHCSAAAHSSEQSLVPSPPEPRQRPTKALVPFEDLFGQAPGGERDKASFLQTVQKFAEHSVRKRGHIDFIYLALRKMREYGVERDLAVYNQLLNIFPKEVFRPRNIIQRIFVHYPRQQECGIAVLEQMENHGVMPNKETEFLLIQIFGRKSYPMLKLVRLKLWFPRFMNVNPFPVPRDLPQDPVELAMFGLRHMEPDLSARVTIYQVPLPKDSTGAADPPQPHIVELTCCPRRRGKWKRRRRSGTSTTRCSWTWSM

SEQ ID NO: 4531 - protein, 59 aa, Homo Sapiens
  misc_feature (1)..(1): Xaa can be any naturally occurring amino acid
XMREYGVERDLAVYNQLLNIFPKEVFRPRNIIQRIFVHYPRQQECGIAVLEQMENHAQV

SEQ ID NO: 4532 - protein, 71 aa, Homo Sapiens
  misc_feature (1)..(1): Xaa can be any naturally occurring amino acid
XVNPFPVPRDLPQDPVELAMFGLRHMEPDLSARVTIYQAPCAAPDAARLPPQRFLCPKTQQVQQIPPSPTS

SEQ ID NO: 4533 - protein, 147 aa, Homo Sapiens
MTSSLKIWGILLALLCILCRLCVYSNNIYWREFIKLHYLSPSREFKEYKCDVLMREKEALKGKSFHMFIYSLWFKIQRACINEKGSDRYRNAYVWAPGALKVLECHWEKYNNRYTESRSFSYIEFHCGVDGYVDNIEDLRIIEPISN

SEQ ID NO: 4534 - protein, 147 aa, Homo Sapiens
MASSLKIWGTLLALLCILCTLLVQSKEVSWREFMKQHYLSPSREFREYKCDVLMRENEALKDKSSHMFIYISWYKIEHICTSDNWMDRFRNAYVWVQNPLKVLKCHQENSKNSYTESRSFNYIEFHCSMDGYVDSIEDLKMVEPIGN

SEQ ID NO: 4535 - protein, 578 aa, Homo Sapiens
MPFRLLIPLGLLCALLPQHHGAPGPDGSAPDPAHYRERVKAMFYHAYDSYLENAFPFDELRPLTCDGHDTWGSFSLTLIDALDTLLILGNVSEFQRVVEVLQDSVDFDIDVNASVFETNIRVVGGLLSAHLLSKKAGVEVEAGWPCSGPLLRMAEEAARKLLPAFQTPTGMPYGTVNLLHGVNPGETPVTCTAGIGTFIVEFATLSSLTGDPVFEDVARVALMRLWESRSDIGLVGNHIDVLTGKWVAQDAGIGAGVDSYFEYLVKGAILLQDKKLMAMFLEYNKAIRNYTRFDDWYLWVQMYKGTVSMPVFQSLEAYWPGLQSLIGDIDNAMRTFLNYYTVWKQFGGLPEFYNIPQGYTVEKREGYPLRPELIESAMYLYRATGDPTLLELGRDAVESIEKISKVECGFATIKDLRDHKLDNRMESFFLAETVKYLYLLFDPTNFIHNNGSTFDAVITPYGECILGAGGYIFNTEAHPIDPAALHCCQRLKEEQWEVEDLMREFYSLKRSRSKFQKNTVSSGPWEPPARPGTLFSPENHDQARERKPAKQKVPLLSCPSQPFTSKLALLGQVFLDSS

SEQ ID NO: 4536 - protein, 541 aa, Homo Sapiens
MPFRLLIPLGLLCALLPQHHGAPGPDGSAPDPAHYSFSLTLIDALDTLLILGNVSEFQRVVEVLQDSVDFDIDVNASVFETNIRVVGGLLSAHLLSKKAGVEVEAGWPCSGPLLRMAEEAARKLLPAFQTPTGMPYGTVNLLHGVNPGETPVTCTAGIGTFIVEFATLSSLTGDPVFEDVARVALMRLWESRSDIGLVGNHIDVLTGKWVAQDAGIGAGVDSYFEYLVKGAILLQDKKLMAMFLEYNKAIRNYTRFDDWYLWVQMYKGTVSMPVFQSLEAYWPGLQSLIGDIDNAMRTFLNYYTVWKQFGGLPEFYNIPQGYTVEKREGYPLRPELIESAMYLYRATGDPTLLELGRDAVESIEKISKVECGFATIKDLRDHKLDNRMESFFLAETVKYLYLLFDPTNFIHNNGSTFDAVITPYGECILGAGGYIFNTEAHPIDPAALHCCQRLKEEQWEVEDLMREFYSLKRSRSKFQKNTVSSGPWEPPARPGTLFSPENHDQARERKPAKQKVPLLSCPSQPFTSKLALLGQVFLDSS

SEQ ID NO: 4537 - protein, 932 aa, Homo Sapiens
MSEAGGRGCGSPVPQRARWRLVAATAAFCLVSATSVWTAGAEPMSREEKQKLGNQVLEMFDHAYGNYMEHAYPADELMPLTCRGRVRGQEPSRGDVDDALGKFSLTLIDSLDTLVVLNKTKEFEDAVRKVLRDVNLDNDVVVSVFETNIRVLGGLLGGHSLAIMLKEKGEYMQWYNDELLQMAKQLGYKLLPAFNTTSGLPYPRINLKFGIRKPEARTGTETDTCTACAGTLILEFAALSRFTGATIFEEYARKALDFLWEKRQRSSNLVGVTINIHTGDWVRKDSGVGAGIDSYYEYLLKAYVLLGDDSFLERFNTHYDAIMRYISQPPLLLDVHIHKPMLNARTWMDALLAFFPGLQVLKGDIRPAIETHEMLYQVIKKHNFLPEAFTTDFRVHWAQHPLRPEFAESTYFLYKATGDPYYLEVGKTLIENLNKYARVPCGFAAMKDVRTGSHEDRMDSFFLAEMFKYLYLLFADKEDIIFDIEDYIFTTEAHLLPLWLSTTNQSISKKNTTSEYTELDDSNFDWTCPNTQILFPNDPLYAQSIREPLKNVVDKSCPRGIIRVEESFRSGAKPPLRARDFMATNPEHLEILKKMGVSLIHLKDGRVQLVQHAIQAASSIDAEDGLRFMQEMIELSSQQQKEQQLPPRAVQIVSHPFFGRVVLTAGPAQFGLDLSKHKETRGFVASSKPSNGCSELTNPEAVMGKIALIQRGQCMFAEKARNIQNAGAIGGIVIDDNEGSSSDTAPLFQMAGDGKDTDDIKIPMLFLFSKEGSIILDAIREYEEVEVLLSDKAKDRDPEMENEEQPSSENDSQNQSGEQISSSSQEVDLVDQESSEENSLNSHPESLSLADMDNAASISPSEQTSNPTENHETTNLNGECTDLDNQLQEQSETEEDSNPNVSWGKKVQPIDSILADWNEDIEAFEMMEKDEL

SEQ ID NO: 4538 - protein, 905 aa, Homo Sapiens
MSREEKQKLGNQVLEMFDHAYGNYMEHAYPADELMPLTCRGRVRGQEPSRGDVDDALGKFSLTLIDSLDTLVVLNKTKEFEDAVRKVLRDVNLDNDVVVSVFETNIRVLGGLLGGHSLAIMLKEKGEYMQWYNDELLQMAKQLGYKLLPAFNTTSGLPYPRINLKFGIRKPEARTGTETDTCTACAGTLILEFAALSRFTGATIFEEYARKALDFLWEKRQRSSNLVGVTINIHTGDWVRKDSGVGAGIDSYYEYLLKAYVLLGDDSFLERFNTHYDAIMRYISQPPLLLDVHIHKPMLNARTWMDALLAFFPGLQVLKGDIRPAIETHEMLYQVIKKHNFLPEAFTTDFRVHWAQHPLRPEFAESTYFLYKATGDPYYLEVGKTLIENLNKYARVPCGFAAMKDVRTGSHEDRMDSFFLAEMFKYLYLLFADKEDIIFDIEDYIFTTEAHLLPLWLSTTNQSISKKNTTSEYTELDDSNFDWTCPNTQILFPNDPLYAQSIREPLKNVVDKSCPRGIIRVEESFRSGAKPPLRARDFMATNPEHLEILKKMGVSLIHLKDGRVQLVQHAIQAASSIDAEDGLRFMQEMIELSSQQQKEQQLPPRAVQIVSHPFFGRVVLTAGPAQFGLDLSKHKETRGFVASSKPSNGCSELTNPEAVMGKIALIQRGQCMFAEKARNIQNAGAIGGIVIDDNEGSSSDTAPLFQMAGDGKDTDDIKIPMLFLFSKEGSIILDAIREYEEVEVLLSDKAKDRAAILKGKMIPSYIINSNPEMENEEQPSSENDSQNQSGEQISSSSQEVDLVDQESSEENSLNSHPESLSLADMDNAASISPSEQTSNPTENHETTNLNGECTDLDNQLQEQSETEEDSNPNVSWGKKVQPIDSILADWNEDIEAFEMMEKDEL

SEQ ID NO: 4539 - protein, 380 aa, Homo Sapiens
VDKSCPRGIIRVEESFRSGAKPPLRARDFMATNPEHLEILKKMGVSLIHLKDGRVQLVQHAIQAASSIDAEDGLRFMQEMIELSSQQQKEQQLPPRAVQIVSHPFFGRVVLTAGPAQFGLDLSKHKETRGFVASSKPSNGCSELTNPEAVMGKIALIQRGQCMFAEKARNIQNAGAIGGIVIDDNEGSSSDTAPLFQMAGDGKDTDDIKIPMLFLFSKEGSIILDAIREYEEVEVLLSDKAKDRDPEMENEEQPSSENDSQNQSGEQISSSSQEVDLVDQESSEENSLNSHPESLSLADMDNAASISPSEQTSNPTENHETTNLNGECTDLDNQLQEQSETEEDSNPNVSWGKKVQPIDSILADWNEDIEAFEMMEKDEL

SEQ ID NO: 4540 - protein, 480 aa, Homo Sapiens
MKRSVAVWLLVGLSLGVPQFGKGDICDPNPCENGGICLPGLADGSFSCECPDGFTDPNCSSVVEVASDEEEPTSAGPCTPNPCHNGGTCEISEAYRGDTFIGYVCKCPRGFNGIHCQHNINECEVEPCKNGGICTDLVANYSCECPGEFMGRNCQYKCSGPLGIEGGIISNQQITASSTHRALFGLQKWYPYYARLNKKGLINAWTAAENDRWPWIQINLQRKMRVTGVITQGAKRIGSPEYIKSYKIAYSNDGKTWAMYKVKGTNEDMVFRGNIDNNTPYANSFTPPIKAQYVRLYPQVCRRHCTLRMELLGCELSGCSEPLGMKSGHIQDYQITASSIFRTLNMDMFTWEPRKARLDKQGKVNAWTSGHNDQSQWLQVDLLVPTKVTGIITQGAKDFGHVQFVGSYKLAYSNDGEHWTVYQDEKQRKDKVFQGNFDNDTHRKNVIDPPIYARHIRILPWSWYGRITLRSELLGCTEEE

SEQ ID NO: 4541 - protein, 470 aa, Homo Sapiens
MKRSVAVWLLVGLSLGVPQFGKGDICDPNPCENGGICLPGLADGSFSCECPDGFTDPNCSSVVEVGPCTPNPCHNGGTCEISEAYRGDTFIGYVCKCPRGFNGIHCQHNINECEVEPCKNGGICTDLVANYSCECPGEFMGRNCQYKCSGPLGIEGGIISNQQITASSTHRALFGLQKWYPYYARLNKKGLINAWTAAENDRWPWIQINLQRKMRVTGVITQGAKRIGSPEYIKSYKIAYSNDGKTWAMYKVKGTNEDMVFRGNIDNNTPYANSFTPPIKAQYVRLYPQVCRRHCTLRMELLGCELSGCSEPLGMKSGHIQDYQITASSIFRTLNMDMFTWEPRKARLDKQGKVNAWTSGHNDQSQWLQVDLLVPTKVTGIITQGAKDFGHVQFVGSYKLAYSNDGEHWTVYQDEKQRKDKVFQGNFDNDTHRKNVIDPPIYARHIRILPWSWYGRITLRSELLGCTEEE

SEQ ID NO: 4542 - protein, 212 aa, Homo Sapiens
MDYLLMIFSLLFVACQGAPETAVLGAELSAVGENGGEKPTPSPPWRLRRSKRCSCSSLMDKECVYFCHLDIIWVNTPEHVVPYGLGSPRSKRALENLLPTKATDRENRCQCASQKDKKCWNFCQAGKELRAEDIMEKDWNNHKKGKDCSKLGKKCIYQQLVRGRKIRRSSEEHLRQTRSETMRNSVKSSFHDPKLKGKPSRERYVTHNRAHW

SEQ ID NO: 4543 - protein, 178 aa, Homo Sapiens
MVSVPTTWCSVALALLVALHEGKGQAAATLEQPASSSHAQGTHLRLRRCSCSSWLDKECVYFCHLDIIWVNTPEQTAPYGLGNPPRRRRRSLPRRCQCSSARDPACATFCLRRPWTEAGAVPSRKSPADVFQTGKTGATTGELLQRLRDISTVKSLFAKRQQEAMREPRSTHSRWRKR

SEQ ID NO: 4544 - protein, 192 aa, Homo Sapiens
MEPGLWLLFGLTVTSAAGFVPCSQSGDAGRRGVSQAPTAARSEGDCEETVAGPGEETVAGPGEGTVAPTALQGPSPGSPGQEQAAEGAPEHHRSRRCTCFTYKDKECVYYCHLDIIWINTPEQTVPYGLSNYRGSFRGKRSAGPLPGNLQLSHRPHLRCACVGRYDKACLHFCTQTLDVSRLKSRTNKASRL

SEQ ID NO: 4545 - protein, 224 aa, Homo Sapiens
MEPGLWLLFGLTVTSAAGFVPCSQSGDAGRRGVSQAPTAARSEGDCEETVAGPGEETVAGPGEGTVAPTALQGPSPGSPGQEQAAEGAPEHHRSRRCTCFTYKDKECVYYCHLDIIWINTPEQTVPYGLSNYRGSFRGKRSAGPLPGNLQLSHRPHLRCACVGRYDKACLHFCTQTLDVSRQVEVKDQQSKQALDLHHPKLMPGSGLALAPSTCPRCLFQEGAP

SEQ ID NO: 4546 - protein, 238 aa, Homo Sapiens
MEPGLWLLFGLTVTSAAGFVPCSQSGDAGRRGVSQAPTAARSEGDCEETVAGPGEETVAGPGEGTVAPTALQGPSPGSPGQEQAAEGAPEHHRSRRCTCFTYKDKECVYYCHLDIIWINTPEQTVPYGLSNYRGSFRGKRSAGPLPGNLQLSHRPHLRCACVGRYDKACLHFCTQTLDVSSNSRTAEKTDKEEEGKVEVKDQQSKQALDLHHPKLMPGSGLALAPSTCPRCLFQEGAP

SEQ ID NO: 4547 - protein, 238 aa, Homo Sapiens; identical to SEQ ID NO: 4546

SEQ ID NO: 4548 - protein, 219 aa, Homo Sapiens
MEPGLWLLFGLTVTSAAGFVPCSQSGDAGRRGVSQAPTAARSEGDCEETVAGPGEETVAGPGEGTVAPTALQGPSPGSPGQEQAAEGAPEHHRSRRCTCFTYKDKECVYYCHLDIIWINTPEQTVPYGLSNYRGSFRGKRSAGPLPGNLQLSHRPHLRCACVGRYDKACLHFCTQTLDVSSNSRTAEKTDKEEEGKVRGANRGLCQRRLKSRTNKASRL

SEQ ID NO: 4549 - protein, 198 aa, Homo Sapiens
MEPGLWLLFGLTVTSAAGFVPCSQSGDAGRRGVSQAPTAARSEGDCEETVAGPGEETVAGPGEGTVAPTALQGPSPGSPGQEQAAEGAPEHHRSRRCTCFTYKDKECVYYCHLDIIWINTPEQTVPYGLSNYRGSFRGKRSAGPLPGNLQLSHRPHLRCACVGRYDKACLHFCTQTLDVSSNSRTAEKTDKEEEGKVT

SEQ ID NO: 4550 - protein, 162 aa, Homo Sapiens
KLVPFIQKASVGITVLSLCALSIDRYRAVASWSRIKGIGVPKWTAVEIVLIWVVSVVLAVPEAIGFDIITMDYKGSYLRICLLHPVQKTAFMQFYKTAKDWWLFSFYFCLPLAITAFFYTLMTCEMLRKKSGMQIALNDHLKQLSVGIGLYWYQHGFTEFLH

SEQ ID NO: 4551 - protein, 532 aa, Homo Sapiens
MNKSTCLMAAETPSKRWRLHCLAFSQRFVRAGPACSSREACSSPRAGWNPAGFRLPGRWSPFVALHLVCQIREALKLRSGHRTPSGAGSSMQPPPSLCGRALVALVLACGLSRIWGEERGFPPDRATPLLQTAEIMTPPTKTLWPKGSNASLARSLAPAEVPKGDRTAGSPPRTISPPPCQGPIEIKETFKYINTVVSCLVFVLGIIGNSTLLRIIYKNKCMRNGPNILIASLALGDLLHIVIDIPINVYKLLAEDWPFGAEMCKLVPFIQKASVGITVLSLCALSIDRYRAVASWSRIKGIGVPKWTAVEIVLIWVVSVVLAVPEAIGFDIITMDYKGSYLRICLLHPVQKTAFMQFYKTAKDWWLFSFYFCLPLAITAFFYTLMTCEMLRKKSGMQIALNDHLKQRREVAKTVFCLVLVFALCWLPLHLSRILKLTLYNQNDPNRCELLSFLLVLDYIGINMASLNSCINPIALYLVSKRFKNCFKSCLCCWCQSFEEKQSLEEKQSCLKFKANDHGYDNFRSSNKYSSS

SEQ ID NO: 4552 - protein, 442 aa, Homo Sapiens
MQPPPSLCGRALVALVLACGLSRIWGEERGFPPDRATPLLQTAEIMTPPTKTLWPKGSNASLARSLAPAEVPKGDRTAGSPPRTISPPPCQGPIEIKETFKYINTVVSCLVFVLGIIGNSTLLRIIYKNKCMRNGPNILIASLALGDLLHIVIDIPINVYKLLAEDWPFGAEMCKLVPFIQKASVGITVLSLCALSIDRYRAVASWSRIKGIGVPKWTAVEIVLIWVVSVVLAVPEAIGFDIITMDYKGSYLRICLLHPVQKTAFMQFYKTAKDWWLFSFYFCLPLAITAFFYTLMTCEMLRKKSGMQIALNDHLKQRREVAKTVFCLVLVFALCWLPLHLSRILKLTLYNQNDPNRCELLSFLLVLDYIGINMASLNSCINPIALYLVSKRFKNCFKSCLCCWCQSFEEKQSLEEKQSCLKFKANDHGYDNFRSSNKYSSS

SEQ ID NO: 4553 - protein, 409 aa, Homo Sapiens
MQPPPSLCGRALVALVLACGLSRIWGEERGFPPDRATPLLQTAEIMTPPTKTLWPKGSNASLARSLAPAEVPKGDRTAGSPPRTISPPPCQGPIEIKETFKYINTVVSCLVFVLGIIGNSTLLRIIYKNKCMRNGPNILIASLALGDLLHIVIDIPINVYKLLAEDWPFGAEMCKLVPFIQKASVGITVLSLCALSIDRYRAVASWSRIKGIGVPKWTAVEIVLIWVVSVVLAVPEAIGFDIITMDYKGSYLRICLLHPVQKTAFMQFYKTAKDWWLFSFYFCLPLAITAFFYTLMTCEMLRKKSGMQIALNDHLKQRREVAKTVFCLVLVFALCWLPLHLSRILKLTLYNQNDPNRCELLSFLLVLDYIGINMASLNSCINPIALYLVSKRFKNCFKVRDYPKIKSSL

SEQ ID NO: 4554 - protein, 442 aa, Homo Sapiens; identical to SEQ ID NO: 4552

SEQ ID NO: 4555 - protein, 436 aa, Homo Sapiens
MQPPPSLCGRALVALVLACGLSRIWGEERGFPPDRATPLLQTAEIMTPPTKTLWPKGSNASLARSLAPAEVPKGDRTAGSPPRTISPPPCQGPIEIKETFKYINTVVSCLVFVLGIIGNSTLLRIIYKNKCMRNGPNILIASLALGDLLHIVIDIPINVYKLLAEDWPFGAEMCKLVPFIQKASVGITVLSLCALSIDRYRAVASWSRIKGIGVPKWTAVEIVLIWVVSVVLAVPEAIGFDIITMDYKGSYLRICLLHPVQKTAFMQFYKTAKDWWLFSFYFCLPLAITAFFYTLMTCEMLRKKSGMQIALNDHLKQRREVAKTVFCLVLVFALCWLPLHLSRILKLTLYNQNDPNRCELLSFLLVLDYIGINMASLNSCINPIALYLVSKRFKNCFKAGPHVGNKLVMLFSVNIECDGTVNQNPTMWPERKSNNN

SEQ ID NO: 4556 - protein, 442 aa, Homo Sapiens; identical to SEQ ID NO: 4552

SEQ ID NO: 4557 - protein, 442 aa, Homo Sapiens; identical to SEQ ID NO: 4552

SEQ ID NO: 4558 - protein, 442 aa, Homo Sapiens; identical to SEQ ID NO: 4552

SEQ ID NO: 4559 - protein, 27 aa, Homo Sapiens
MLKALFLTMLTLALVKSQDTEETITYT

SEQ ID NO: 4560 - protein, 52 aa, Homo Sapiens
MLKALFLTMLTLALVKSQDTEETITYTQCTDGYEWDPVRQQCKDIDECDIVP

SEQ ID NO: 4561 - protein, 62 aa, Homo Sapiens
MLKALFLTMLTLALVKSQDTEETITYTQCTDGYEWDPVRQQCKDIDECDIVPDACKGGMKCV

SEQ ID NO: 4562 - protein, 87 aa, Homo Sapiens
MLKALFLTMLTLALVKSQDTEETITYTQCTDGYEWDPVRQQCKDIDECDIVPDACKGGMKCVNHYGGYLCLPKTAQIIVNNEQPQQE

SEQ ID NO: 4563 - protein, 106 aa, Homo Sapiens
MLKALFLTMLTLALVKSQDTEETITYTQCTDGYEWDPVRQQCKDIDECDIVPDACKGGMKCVNHYGGYLCLPKTAQIIVNNEQPQQETQPAEGTSGATTGVVAASS

SEQ ID NO: 4564 - protein, 119 aa, Homo Sapiens
MLKALFLTMLTLALVKSQDTEETITYTQCTDGYEWDPVRQQCKDIDECDIVPDACKGGMKCVNHYGGYLCLPKTAQIIVNNEQPQQETQPAEGTSGATTGVVAASSMATSGVLPGGGFV

SEQ ID NO: 4565 - protein, 172 aa, Homo Sapiens
MLKALFLTMLTLALVKSQDTEETITYTQCTDGYEWDPVRQQCKDIDECDIVPDACKGGMKCVNHYGGYLCLPKTAQIIVNNEQPQQETQPAEGTSGATTGVVAASSMATSGVLPGGGFVASAAAVAGPEMQTGRNNFVIRRNPADPQRIPSNPSHRIQCAAGYEQSEHNVCQ

SEQ ID NO: 4566 - protein, 493 aa, Homo Sapiens
MLKALFLTMLTLALVKSQDTEETITYTQCTDGYEWDPVRQQCKDIDECDIVPDACKGGMKCVNHYGGYLCLPKTAQIIVNNEQPQQETQPAEGTSGATTGVVAASSMATSGVLPGGGFVASAAAVAGPEMQTGRNNFVIRRNPADPQRIPSNPSHRIQCAAGYEQSEHNVCQDIDECTAGTHNCRADQVCINLRGSFACQCPPGYQKRGEQCVDIDECTIPPYCHQRCVNTPGSFYCQCSPGFQLAANNYTCVDINECDASNQCAQQCYNILGSFICQCNQGYELSSDRLNCEDIDECRTSSYLCQYQCVNEPGKFSCMCPQGYQVVRSRTCQDINECETTNECREDEMCWNYHGGFRCYPRNPCQDPYILTPENRCVCPVSNAMCRELPQSIVYKYMSIRSDRSVPSDIFQIQATTIYANTINTFRIKSGNENGEFYLRQTSPVSAMLVLVKSLSGPREHIVDLEMLTVSSIGTFRTSSVLRLTIIVGPFSF

SEQ ID NO: 4567 - protein, 493 aa, Homo Sapiens; identical to SEQ ID NO: 4566

SEQ ID NO: 4568 - protein, 46 aa, Homo Sapiens
MLKALFLTMLTLALVKSQDTEETITYTQCTDGYEWDPVRQQCKEDS

SEQ ID NO: 4569 - protein, 280 aa, Homo Sapiens
  misc_feature (1)..(1): Xaa can be any naturally occurring amino acid
XNNFVIRRNPADPQRIPSNPSHRIQCAAGYEQSEHNVCQDIDECTAGTHNCRADQVCINLRGSFACQCPPGYQKRGEQCVDIDECRTSSYLCQYQCVNEPGKFSCMCPQGYQVVRSRTCQDINECETTNECREDEMCWNYHGGFRCYPRNPCQDPYILTPENRCVCPVSNAMCRELPQSIVYKYMSIRSDRSVPSDIFQIQATTIYANTINTFRIKSGNENGEFYLRQTSPVSAMLVLVKSLSGPREHIVDLEMLTVSSIGTFRTSSVLRLTIIVGPFSF

SEQ ID NO: 4570 - protein, 182 aa, Homo Sapiens
DECESGAHQCSEAQTCVNFHGGYRCVDTNRCVEPYIQVSENRCLCPASNPLCREQPSSIVHRYMTITSERSVPADVFQIQATSVYPGAYNAFQIRAGNSQGDFYIRGPTPSEEQEGATLPAATLAEEPVVRGRMRKAQGPPLTGAGSSAPRASVTPRGEEVTRRADSRPRPRDLDLAGLQGS

SEQ ID NO: 4571 - protein, 183 aa, Homo Sapiens
MLPCASCLPGSLLLWALLLLLLGSASPQDSEEPDSYTECTDGYEWDPDSQHCRDVNECLTIPEACKGEMKCINHYGGYLCLPRSAAVINDLHGEGPPPPVPPAQHPNPCPPGYEPDDQDSCVDVDECAQALHDCRPSQDCHNLPGSYQCTCPDGYRKIGPECVDIDECRYRYCQHRCVNLPGS

SEQ ID NO: 4572 - protein, 202 aa, Homo Sapiens
MLPCASCLPGSLLLWALLLLLLGSASPQDSEEPDSYTECTDGYEWDPDSQHCRDVNECLTIPEACKGEMKCINHYGGYLCLPRSAAVINDLHGEGPPPPVPPAQHPNPCPPGYEPDDQDSCVDVDECAQALHDCRPSQDCHNLPGSYQCTCPDGYRKIGPECVDIDECRYRYCQHRCVNLPGSFRCQCEPGFQLGPNNRSCV

SEQ ID NO: 4573 - protein, 443 aa, Homo Sapiens
MLPCASCLPGSLLLWALLLLLLGSASPQDSEEPDSYTECTDGYEWDPDSQHCRDVNECLTIPEACKGEMKCINHYGGYLCLPRSAAVINDLHGEGPPPPVPPAQHPNPCPPGYEPDDQDSCVDVDECAQALHDCRPSQDCHNLPGSYQCTCPDGYRKIGPECVDIDECRYRYCQHRCVNLPGSFRCQCEPGFQLGPNNRSCVDVNECDMGAPCEQRCFNSYGTFLCRCHQGYELHRDGFSCSDIDECSYSSYLCQYRCINEPGRFSCHCPQGYQLLATRLCQDIDECESGAHQCSEAQTCVNFHGGYRCVDTNRCVEPYIQVSENRCLCPASNPLCREQPSSIVHRYMTITSERSVPADVFQIQATSVYPGAYNAFQIRAGNSQGDFYIRQINNVSAMLVLARPVTGPREYVLDLEMVTMNSLMSYRASSVLRLTVFVGAYTF

SEQ ID NO: 4574 - protein, 443 aa, Homo Sapiens; identical to SEQ ID NO: 4573

SEQ ID NO: 4575 - protein, 436 aa, Homo Sapiens
MLPCASCLPGSLLLWALLLLLLGSASPQDSEEPDSYTECTDGYEWDPDSQHCRDVNECLTIPEACKGEMKCINHYGGYLCLPRSAAVINDLHGEGPPPPVPPAQHPNPCPPGYEPDDQDSCVDVDECAQALHDCRPSQDCHNLPGSYQCTCPDGYRKIGPECVDIDECRYRYCQHRCVNLPGSFRCQCEPGFQLGPNNRSCVDVNECDMGAPCEQRCFNSYGTFLCRCHQGYELHRDGFSCSDIDECSYSSYLCQYRCINEPGRFSCHCPQGYQLLATRLCQDIDECESGAHQCSEAQTCVNFHGGYRCVDTNRCVEPYIQVSENRCLCPASNPLCREQPSSIVHRYMTITSERSVPADVFQIQATSVYPGAYNAFQIRAGNSQGDFYIRAQGPPLTGAGSSAPRASVTPRGEEVTRRADSRPRPRDLDLAGLQGS

SEQ ID NO: 4576 - protein, 77 aa, Homo Sapiens
MLPCASCLPGSLLLWALLLLLLGSASPQDSEEPDSYTECTDGYEWDPDSQHCRGPAQETGCAQQAPLCRCQRVSDHP

SEQ ID NO: 4577 - protein, 58 aa, Homo Sapiens
MLPCASCLPGSLLLWALLLLLLGSASPQDSEEPDSYTVGTVRAAGLGQEGCQRVSDHP

SEQ ID NO: 4578 - protein, 76 aa, Homo Sapiens
MTITSERSVPADVFQIQATSVYPGAYNAFQIRAGNSQGDFYIRQINNVSAMLVLARPVTGPREYVLDLEMVTMNSL

SEQ ID NO: 4579 - protein, 74 aa, Homo Sapiens
SIVHRYMTITSERSVPADVFQIQATSVYPGAYNAFQIRAGNSQGDFYIRQINNVSAMLVLARPVTGPREPRGPH

SEQ ID NO: 4580 - protein, 69 aa, Homo Sapiens
  misc_feature (1)..(1): Xaa can be any naturally occurring amino acid
XFQIRAGNSQGDFYIRQINNVSAMLVLARPVTGPREYVLDLEMVTMNSLMSYRASSVLRLTVFVGAYTF

SEQ ID NO: 4581 - protein, 54 aa, Homo Sapiens
  misc_feature (1)..(1): Xaa can be any naturally occurring amino acid
XQINNVSAMLVLARPVTGPREYVLDLEMVTMNSLMSYRASSVLRLTVFVGAYTF

SEQ ID NO: 4582 - protein, 183 aa, Homo Sapiens
MEFLWAPLLGLCCSLAAADRHTVFWNSSNPKFRNEDYTIHVQLNDYVDIICPHYEDHSVADAAMEQYILYLVEHEEYQLCQPQSKDQVRWQCNRPSAKHGPEKLSEKFQRFTPFTLGKEFKEGHSYYYISHSPQAHDNPQEKRLAADDPEVRVLHSIGHSAAPRLFPLAWTVLLLPLLLLQTP

SEQ ID NO: 4583 - protein, 205 aa, Homo Sapiens
MEFLWAPLLGLCCSLAAADRHTVFWNSSNPKFRNEDYTIHVQLNDYVDIICPHYEDHSVADAAMEQYILYLVEHEEYQLCQPQSKDQVRWQCNRPSAKHGPEKLSEKFQRFTPFTLGKEFKEGHSYYYISKPIHQHEDRCLRLKVTVSGKITHSPQAHDNPQEKRLAADDPEVRVLHSIGHSAAPRLFPLAWTVLLLPLLLLQTP

SEQ ID NO: 4584 - protein, 213 aa, Homo Sapiens
MAPAQRPLLPLLLLLLPLPPPPFARAEDAARANSDRYAVYWNRSNPRFHAGAGDDGGGYTVEVSINDYLDIYCPHYGAPLPPAERMEHYVLYMVNGEGHASCDHRQRGFKRWECNRPAAPGGPLKFSEKFQLFTPFSLGFEFRPGHEYYYISATPPNAVDRPCLRLKVYVRPTNETLYEAPEPIFTSNNSCSSPGGCRLFLSTIPVLWTLLGS

SEQ ID NO: 4585 - protein, 201 aa, Homo Sapiens
MRLLPLLRTVLWAAFLGSPLRGGSSLRHVVYWNSSNPRLLRGDAVVELGLNDYLDIVCPHYEGPGPPEGPETFALYMVDWPGYESCQAEGPRAYKRWVCSLPFGHVQFSEKIQRFTPFSLGFEFLPGETYYYISVPTPESSGQCLRLQVSVCCKERKSESAHPVGSPGESGTSGWRGGDTPSPLCLLLLLLLLILRLLRIL

SEQ ID NO: 4586 - protein, 193 aa, Homo Sapiens
MRLLPLLRTVLWAAFLGSPLRGGSSLRHVVYWNSSNPRLLRGDAVVELGLNDYLDIVCPHYEGPGPPEGPETFALYMVDWPGYESCQAEGPRAYKRWVCSLPFGHVQFSEKIQRFTPFSLGFEFLPGETYYYISVPTPESSGQCLRLQVSVCCKERNLPSHPKEPESSQDPLEEEGSLLPALGVPIQTDKMEH

SEQ ID NO: 4587 - protein, 207 aa, Homo Sapiens
MRLLPLLRTVLWAAFLGSPLRGGSSLRHVVYWNSSNPRLLRGDAVVELGLNDYLDIVCPHYEGPGPPEGPETFALYMVDWPGYESCQAEGPRAYKRWVCSLPFGHVQFSEKIQRFTPFSLGFEFLPGETYYYISVPTPESSGQCLRLQVSVCCKERRARVLPRSPGGGGIPAACTGGANSDRQDGALMGEIRGSEVTLAGACPLITG

SEQ ID NO: 4588 - protein, 553 aa, Homo Sapiens
MPLPWSLALPLLLSWVAGGFGNAASARHHGLLASARQPGVCHYGTKLACCYGWRRNSKGVCEATCEPGCKFGECVGPNKCRCFPGYTGKTCSQDVNECGMKPRPCQHRCVNTHGSYKCFCLSGHMLMPDATCVNSRTCAMINCQYSCEDTEEGPQCLCPSSGLRLAPNGRDCLDIDECASGKVICPYNRRCVNTFGSYYCKCHIGFELQYISGRYDCIDINECTMDSHTCSHHANCFNTQGSFKCKCKQGYKGNGLRCSAIPENSVKEVLRAPGTIKDRIKKLLAHKNSMKKKAKIKNVTPEPTRTPTPKVNLQPFNYEEIVSRGGNSHGGKKGNEEKMKEGLEDEKREEKALKNDIEERSLRGDVFFPKVNEAGEFGLILVQRKALTSKLEHKDLNISVDCSFNHGICDWKQDREDDFDWNPADRDNAIGFYMAVPALAGHKKDIGRLKLLLPDLQPQSNFCLLFDYRLAGDKVGKLRVFVKNSNNALAWEKTTSEDEKWKTGKIQLYQGTDATKSIIFEAERGKGKTGEIAVDGVLLVSGLCPDSLLSVDD

SEQ ID NO: 4589 - protein, 554 aa, Homo Sapiens
MPLPWSLALPLLLSWVAGGFGNAASARHHGLLASARQPGVCHYGTKLACCYGWRRNSKGVCEATCEPGCKFGECVGPNKCRCFPGYTGKTCSQDVNECGMKPRPCQHRCVNTHGSYKCFCLSGHMLMPDATCVNSRTCAMINCQYSCEDTEEGPQCLCPSSGLRLAPNGRDCLDIDECASGKVICPYNRRCVNTFGSYYCKCHIGFELQYISGRYDCIDINECTMDSHTCSHHANCFNTQGSFKCKCKQGYKGNGLRCSAIPENSVKEVLRAPGTIKDRIKKLLAHKNSMKKKAKIKNVTPEPTRTPTPKVNLQPFNYEEIVSRGGNSHGGKKGNEEKMKEGLEDEKREEKALKNDIEERSLRGDVFFPKVNEAGEFGLILVQRKALTSKLEHKADLNISVDCSFNHGICDWKQDREDDFDWNPADRDNAIGFYMAVPALAGHKKDIGRLKLLLPDLQPQSNFCLLFDYRLAGDKVGKLRVFVKNSNNALAWEKTTSEDEKWKTGKIQLYQGTDATKSIIFEAERGKGKTGEIAVDGVLLVSGLCPDSLLSVDD

SEQ ID NO: 4590 - protein, 66 aa, Homo Sapiens
MRGSQEVLLMWLLVLAVGGTEHAYRPGRRVCAVRAHGDPVSESFVQRVYQPFLTTCDGHRACSTYR

SEQ ID NO: 4591 - protein, 273 aa, Homo Sapiens
MRGSQEVLLMWLLVLAVGGTEHAYRPGRRVCAVRAHGDPVSESFVQRVYQPFLTTCDGHRACSTYRTIYRTAYRRSPGLAPARPRYACCPGWKRTSGLPGACGAAICQPPCRNGGSCVQPGRCRCPAGWRGDTCQSDVDECSARRGGCPQRCVNTAGSYWCQCWEGHSLSADGTLCVPKGGPPRVAPNPTGVDSAMKEEVQRLQSRVDLLEEKLQLVLAPLHSLASQALEHGLPDPGSLLVHSFQQLGRIDSLSEQISFLEEQLGSCSCKKDS

SEQ ID NO: 4592 - protein, 273 aa, Homo Sapiens; identical to SEQ ID NO: 4591

SEQ ID NO: 4593 - protein, 273 aa, Homo Sapiens; identical to SEQ ID NO: 4591

SEQ ID NO: 4594 - protein, 273 aa, Homo Sapiens; identical to SEQ ID NO: 4591

SEQ ID NO: 4595 - protein, 293 aa, Homo Sapiens
MGSRAELCTLLGGFSFLLLLIPGEGAKGGSLRESQGVCSKQTLVVPLHYNESYSQPVYKPYLTLCAGRRICSTYRTMYRVMWREVRREVQQTHAVCCQGWKKRHPGALTCEAICAKPCLNGGVCVRPDQCECAPGWGGKHCHVDVDECRTSITLCSHHCFNTAGSFTCGCPHDLVLGVDGRTCMEGSPEPPTSASILSVAVREAEKDERALKQEIHELRGRLERLEQWAGQAGAWVRAVLPVPPEELQPEQVAELWGRGDRIESLSDQVLLLEERLGACSCEDNSLGLGVNHR

SEQ ID NO: 4596 - protein, 293 aa, Homo Sapiens; identical to SEQ ID NO: 4595

SEQ ID NO: 4597 - protein, 258 aa, Homo Sapiens
MGSRAELCTLLGGFSFLLLLIPGEGAKGGSLRESQGVCSKQTLVVPLHYNESYSQPVYKPYLTLCAGRRICSTYRTMYRVMWREVRREVQQTHAVCCQGWKKRHPGALTCEAICAKPCLNGGVCVRPDQCECAPGWGGKHCHVGSFTCGCPHDLVLGVDGRTCMEGSPEPPTSASILSVAVREAEKDERALKQEIHELRGRLERLEQWAGQAGAWVRAVLPVPPEELQPEQVAELWGRGDRIESLSDQVLLLEERLGA

SEQ ID NO: 4598 - protein, 1009 aa, Homo Sapiens
MDLIRGVLLRLLLLASSLGPGAVSLRAAIRKPGKVGPPLDIKLGALNCTAFSIQWKMPRHPGSPILGYTVFYSEVGADKSLQEQLHSVPLSRDIPTTEEVIGDLKPGTEYRVSIAAYSQAGKGRLSSPRHVTTLSQDSCLPPAAPQQPHVIVVSDSEVALSWKPGASEGSAPIQYYSVEFIRPDFDKKWTSIHERIQMDSMVIKGLDPDTNYQFAVRAMNSHGPSPRSWPSDIIRTLCPEEAGSGRYGPRYITDMGAGEDDEGFEDDLDLDISFEEVKPLPATKGGNKKFLVESKKMSISNPKTISRLIPPTSASLPVTTVAPQPIPIQRKGKNGVAIMSRLFDMPCDETLCSADSFCVNDYTWGGSRCQCTLGKGGESCSEDIVIQYPQFFGHSYVTFEPLKNSYQAFQITLEFRAEAEDGLLLYCGENEHGRGDFMSLAIIRRSLQFRFNCGTGVAIIVSETKIKLGGWHTVMLYRDGLNGLLQLNNGTPVTGQSQGQYSKITFRTPLYLGGAPSAYWLVRATGTNRGFQGCVQSLAVNGRRIDMRPWPLGKALSGADVGECSSGICDEASCIHGGTCTAIKADSYICLCPLGFKGRHCEDAFTLTIPQFRESLRSYAATPWPLEPQHYLSFMEFEITFRPDSGDGVLLYSYDTGSKDFLSINLAGGHVEFRFDCGSGTGVLRSEDPLTLGNWHELRVSRTAKNGILQVDKQKIVEGMAEGGFTQIKCNTDIFIGGVPNYDDVKKNSGVLKPFSGSIQKIILNDRTIHVKHDFTSGVNVENAAHPCVRAPCAHGGSCRPRKEGYDCDCPLGFEGLHCQKAIIEAIEIPQFIGRSYLTYDNPDILKRVSGSRSNVFMRFKTTAKDGLLLWRGDSPMRPNSDFISLGLRDGALVFSYNLGSGVASIMVNGSFNDGRWHRVKAVRDGQSGKITVDDYGARTGKSPGMMRQLNINGALYVGGMKEIALHTNRQYMRGLVGCISHFTLSTDYHISLVEDAVDGKNINTCGAK

SEQ ID NO: 4599 - protein, 1017 aa, Homo Sapiens
MDLIRGVLLRLLLLASSLGPGAVSLRAAIRKPGKVGPPLDIKLGALNCTAFSIQWKMPRHPGSPILGYTVFYSEVGADKSLQEQLHSVPLSRDIPTTEEVIGDLKPGTEYRVSIAAYSQAGKGRLSSPRHVTTLSQDSCLPPAAPQQPHVIVVSDSEVALSWKPGASEGSAPIQYYSVEFIRPDFDKKWTSIHERIQMDSMVIKGLDPDTNYQFAVRAMNSHGPSPRSWPSDIIRTLCPEEAGSGRYGPRYITDMGAGEDDEGFEDDLDLDISFEEVKPLPATKGGNKKFLVESKKMSISNPKTISRLIPPTSASLPVTTVAPQPIPIQRKGKNGVAIMSRLFDMPCDETLCSADSFCVNDYTWGGSRCQCTLGKGGESCSEDIVIQYPQFFGHSYVTFEPLKNSYQAFQITLEFRAEAEDGLLLYCGENEHGRGDFMSLAIIRRSLQFRFNCGTGVAIIVSETKIKLGGWHTVMLYRDGLNGLLQLNNGTPVTGQSQGQYSKITFRTPLYLGGAPSAYWLVRATGTNRGFQGCVQSLAVNGRRIDMRPWPLGKALSGADVGECSSGICDEASCIHGGTCTAIKADSYICLCPLGFKGRHCEDAFTLTIPQFRESLRSYAATPWPLEPQHYLSFMEFEITFRPDSGDGVLLYSYDTGSKDFLSINLAGGHVEFRFDCGSGTGVLRSEDPLTLGNWHELRVSRTAKNGILQVDKQKIVEGMAEGGFTQIKCNTDIFIGGVPNYDDVKKNSGVLKPFSGSIQKIILNDRTIHVKHDFTSGVNVENAAHPCVRAPCAHGGSCRPRKEGYDCDCPLGFEGLHCQKECGNYCLNTIIEAIEIPQFIGRSYLTYDNPDILKRVSGSRSNVFMRFKTTAKDGLLLWRGDSPMRPNSDFISLGLRDGALVFSYNLGSGVASIMVNGSFNDGRWHRVKAVRDGQSGKITVDDYGARTGKSPGMMRQLNINGALYVGGMKEIALHTNRQYMRGLVGCISHFTLSTDYHISLVEDAVDGKNINTCGAK

SEQ ID NO: 4600 - protein, 47 aa, Homo Sapiens
MDLIRGVLLRLLLLASSLGPGAVSLRAAIRKPGRCWRMTVTKTWTEP

SEQ ID NO: 4601 - protein, 375 aa, Homo Sapiens
MEFEITFRPDSGDGVLLYSYDTGSKDFLSINLAGGHVEFRFDCGSGTGVLRSEDPLTLGNWHELRVSRTAKNGILQVDKQKIVEGMAEGGFTQIKCNTDIFIGGVPNYDDVKKNSGVLKPFSGSIQKIILNDRTIHVKHDFTSGVNVENAAHPCVRAPCAHGGSCRPRKEGYDCDCPLGFEGLHCQKAIIEAIEIPQFIGRSYLTYDNPDILKRVSGSRSNVFMRFKTTAKDGLLLWRGDSPMRPNSDFISLGLRDGALVFSYNLGSGVASIMVNGSFNDGRWHRVKAVRDGQSGKITVDDYGARTGKSPGMMRQLNINGALYVGGMKEIALHTNRQYMRGLVGCISHFTLSTDYHISLVEDAVDGKNINTCGAK

SEQ ID NO: 4602 - protein, 775 aa, Homo Sapiens
MHPGPEEAGSGRYGPRYITDMGAGEDDEGFEDDLDLDISFEEVKPLPATKGGNKKFLVESKKMSISNPKTISRLIPPTSASLPVTTVAPQPIPIQRKGKNGVAIMSRLFDMPCDETLCSADSFCVNDYTWGGSRCQCTLGKGGESCSEDIVIQYPQFFGHSYVTFEPLKNSYQAFQITLEFRAEAEDGLLLYCGENEHGRGDFMSLAIIRRSLQFRFNCGTGVAIIVSETKIKLGGWHTVMLYRDGLNGLLQLNNGTPVTGQSQGQYSKITFRTPLYLGGAPSAYWLVRATGTNRGFQGCVQSLAVNGRRIDMRPWPLGKALSGADVGECSSGICDEASCIHGGTCTAIKADSYICLCPLGFKGRHCEDAFTLTIPQFRESLRSYAATPWPLEPQHYLSFMEFEITFRPDSGDGVLLYSYDTGSKDFLSINLAGGHVEFRFDCGSGTGVLRSEDPLTLGNWHELRVSRTAKNGILQVDKQKIVEGMAEGGFTQIKCNTDIFIGGVPNYDDVKKNSGVLKPFSGSIQKIILNDRTIHVKHDFTSGVNVENAAHPCVRAPCAHGGSCRPRKEGYDCDCPLGFEGLHCQKAIIEAIEIPQFIGRSYLTYDNPDILKRVSGSRSNVFMRFKTTAKDGLLLWRGDSPMRPNSDFISLGLRDGALVFSYNLGSGVASIMVNGSFNDGRWHRVKAVRDGQSGKITVDDYGARTGKSPGMMRQLNINGALYVGGMKEIALHTNRQYMRGLVGCISHFTLSTDYHISLVEDAVDGKNINTCGAK

SEQ ID NO: 4603 - protein, 112 aa, Homo Sapiens
MRFKTTAKDGLLLWRGDSPMRPNSDFISLGLRDGALVFSYNLGSGVASIMVNGSFNDGRWHRVKAVRDGQSGKITVDDYGARTGKSPGMMRQLNINGALYVGGMKEIALHTN

SEQ ID NO: 4604 - protein, 152 aa, Homo Sapiens
MRFKTTAKDGLLLWRGDSPMRPNSDFISLGLRDGALVFSYNLGSGVASIMVNGSFNDGRWHRVKAVRDGQSGKITVDDYGARTGKSPGMMRQLNINGALYVGGMKEIALHTNRQYMRGLVGCISHFTLSTDYHISLVEDAVDGKNINTCGAK

SEQ ID NO: 4605 - protein, 152 aa, Homo Sapiens; identical to SEQ ID NO: 4604

SEQ ID NO: 4606 - protein, 152 aa, Homo Sapiens; identical to SEQ ID NO: 4604

SEQ ID NO: 4607 - protein, 128 aa, Homo Sapiens
MFNNCEVVLGNLEITYVQRNYDLSFLKTIQEVAGYVLIALNTVERIPLENLQIIRGNMYYENSYALAVLSNYDANKTGLKELPMRNLQEILHGAVRFSNNPALCNVESIQWRDIVSSDFLSNMSMDFQ

SEQ ID NO: 4608 - protein, 1210 aa, Homo Sapiens [sequence omitted]

SEQ ID NO: 4609 - protein, 628 aa, Homo Sapiens
MRPSGTAGAALLALLAALCPASRALEEKKVCQGTSNKLTQLGTFEDHFLSLQRMFNNCEVVLGNLEITYVQRNYDLSFLKTIQEVAGYVLIALNTVERIPLENLQIIRGNMYYENSYALAVLSNYDANKTGLKELPMRNLQEILHGAVRFSNNPALCNVESIQWRDIVSSDFLSNMSMDFQNHLGSCQKCDPSCPNGSCWGAGEENCQKLTKIICAQQCSGRCRGKSPSDCCHNQCAAGCTGPRESDCLVCRKFRDEATCKDTCPPLMLYNPTTYQMDVNPEGKYSFGATCVKKCPRNYVVTDHGSCVRACGADSYEMEEDGVRKCKKCEGPCRKVCNGIGIGEFKDSLSINATNIKHFKNCTSISGDLHILPVAFRGDSFTHTPPLDPQELDILKTVKEITGFLLIQAWPENRTDLHAFENLEIIRGRTKQHGQFSLAVVSLNITSLGLRSLKEISDGDVIISGNKNLCYANTINWKKLFGTSGQKTKIISNRGENSCKATGQVCHALCSPEGCWGPEPRDCVSCRNVSRGRECVDKCNLLEGEPREFVENSECIQCHPECLPQAMNITCTGRGPDNCIQCAHYIDGPHCVKTCPAGVMGENNTLVWKYADAGHVCHLCHPNCTYGS

SEQ ID NO: 4610 - protein, 705 aa, Homo Sapiens
MRPSGTAGAALLALLAALCPASRALEEKKVCQGTSNKLTQLGTFEDHFLSLQRMFNNCEVVLGNLEITYVQRNYDLSFLKTIQEVAGYVLIALNTVERIPLENLQIIRGNMYYENSYALAVLSNYDANKTGLKELPMRNLQEILHGAVRFSNNPALCNVESIQWRDIVSSDFLSNMSMDFQNHLGSCQKCDPSCPNGSCWGAGEENCQKLTKIICAQQCSGRCRGKSPSDCCHNQCAAGCTGPRESDCLVCRKFRDEATCKDTCPPLMLYNPTTYQMDVNPEGKYSFGATCVKKCPRNYVVTDHGSCVRACGADSYEMEEDGVRKCKKCEGPCRKVCNGIGIGEFKDSLSINATNIKHFKNCTSISGDLHILPVAFRGDSFTHTPPLDPQELDILKTVKEITGFLLIQAWPENRTDLHAFENLEIIRGRTKQHGQFSLAVVSLNITSLGLRSLKEISDGDVIISGNKNLCYANTINWKKLFGTSGQKTKIISNRGENSCKATGQVCHALCSPEGCWGPEPRDCVSCRNVSRGRECVDKCNLLEGEPREFVENSECIQCHPECLPQAMNITCTGRGPDNCIQCAHYIDGPHCVKTCPAGVMGENNTLVWKYADAGHVCHLCHPNCTYGPGNESLKAMLFCLFKLSSCNQSNDGSVSHQSGSPAAQESCLGWIPSLLPSEFQLGWGGCSHLHAWPSASVIITASSCH

SEQ ID NO: 4611 - protein, 405 aa, Homo Sapiens
MRPSGTAGAALLALLAALCPASRALEEKKVCQGTSNKLTQLGTFEDHFLSLQRMFNNCEVVLGNLEITYVQRNYDLSFLKTIQEVAGYVLIALNTVERIPLENLQIIRGNMYYENSYALAVLSNYDANKTGLKELPMRNLQEILHGAVRFSNNPALCNVESIQWRDIVSSDFLSNMSMDFQNHLGSCQKCDPSCPNGSCWGAGEENCQKLTKIICAQQCSGRCRGKSPSDCCHNQCAAGCTGPRESDCLVCRKFRDEATCKDTCPPLMLYNPTTYQMDVNPEGKYSFGATCVKKCPRNYVVTDHGSCVRACGADSYEMEEDGVRKCKKCEGPCRKVCNGIGIGEFKDSLSINATNIKHFKNCTSISGDLHILPVAFRGDSFTHTPPLDPQELDILKTVKEITGLS

SEQ ID NO: 4612 - protein, 1091 aa, Homo Sapiens
MRPSGTAGAALLALLAALCPASRALEEKKVCQGTSNKLTQLGTFEDHFLSLQRMFNNCEVVLGNLEITYVQRNYDLSFLKTIQEVAGYVLIALNTVERIPLENLQIIRGNMYYENSYALAVLSNYDANKTGLKELPMRNLQGQKCDPSCPNGSCWGAGEENCQKLTKIICAQQCSGRCRGKSPSDCCHNQCAAGCTGPRESDCLVCRKFRDEATCKDTCPPLMLYNPTTYQMDVNPEGKYSFGATCVKKCPRNYVVTDHGSCVRACGADSYEMEEDGVRKCKKCEGPCRKVCNGIGIGEFKDSLSINATNIKHFKNCTSISGDLHILPVAFRGDSFTHTPPLDPQELDILKTVKEITGFLLIQAWPENRTDLHAFENLEIIRGRTKQHGQFSLAVVSLNITSLGLRSLKEISDGDVIISGNKNLCYANTINWKKLFGTSGQKTKIISNRGENSCKATGQVCHALCSPEGCWGPEPRDCVSCRNVSRGRECVDKCNLLEGEPREFVENSECIQCHPECLPQAMNITCTGRGPDNCIQCAHYIDGPHCVKTCPAGVMGENNTLVWKYADAGHVCHLCHPNCTYGCTGPGLEGCPTNGPKIPSIATGMVGALLLLLVVALGIGLFMRRRHIVRKRTLRRLLQERELVEPLTPSGEAPNQALLRILKETEFKKIKVLGSGAFGTVYKGLWIPEGEKVKIPVAIKELREATSPKANKEILDEAYVMASVDNPHVCRLLGICLTSTVQLITQLMPFGCLLDYVREHKDNIGSQYLLNWCVQIAKGMNYLEDRRLVHRDLAARNVLVKTPQHVKITDFGLAKLLGAEEKEYHAEGGKVPIKWMALESILHRIYTHQSDVWSYGVTVWELMTFGSKPYDGIPASEISSILEKGERLPQPPICTIDVYMIMVKCWMIDADSRPKFRELIIEFSKMARDPQRYLVIQGDERMHLPSPTDSNFYRALMDEEDMDDVVDADEYLIPQQGFFSSPSTSRTPLLSSLSATSNNSTVACIDRNGLQSCPIKEDSFLQRYSSDPTGALTEDSIDDTFLPVPGEWLVWKQSCSSTSSTHSAAASLQCPSQVLPPASPEGETVADLQTQ

SEQ ID NO: 4613 - protein, 1165 aa, Homo Sapiens
MRPSGTAGAALLALLAALCPASRALEEKKVCQGTSNKLTQLGTFEDHFLSLQRMFNNCEVVLGNLEITYVQRNYDLSFLKTIQEVAGYVLIALNTVERIPLENLQIIRGNMYYENSYALAVLSNYDANKTGLKELPMRNLQGQKCDPSCPNGSCWGAGEENCQKLTKIICAQQCSGRCRGKSPSDCCHNQCAAGCTGPRESDCLVCRKFRDEATCKDTCPPLMLYNPTTYQMDVNPEGKYSFGATCVKKCPRNYVVTDHGSCVRACGADSYEMEEDGVRKCKKCEGPCRKVCNGIGIGEFKDSLSINATNIKHFKNCTSISGDLHILPVAFRGDSFTHTPPLDPQELDILKTVKEITGFLLIQAWPENRTDLHAFENLEIIRGRTKQHGQFSLAVVSLNITSLGLRSLKEISDGDVIISGNKNLCYANTINWKKLFGTSGQKTKIISNRGENSCKATGQVCHALCSPEGCWGPEPRDCVSCRNVSRGRECVDKCNLLEGEPREFVENSECIQCHPECLPQAMNITCTGRGPDNCIQCAHYIDGPHCVKTCPAGVMGENNTLVWKYADAGHVCHLCHPNCTYGCTGPGLEGCPTNGPKIPSIATGMVGALLLLLVVALGIGLFMRRRHIVRKRTLRRLLQERELVEPLTPSGEAPNQALLRILKETEFKKIKVLGSGAFGTVYKGLWIPEGEKVKIPVAIKELREATSPKANKEILDEAYVMASVDNPHVCRLLGICLTSTVQLITQLMPFGCLLDYVREHKDNIGSQYLLNWCVQIAKGMNYLEDRRLVHRDLAARNVLVKTPQHVKITDFGLAKLLGAEEKEYHAEGGKVPIKWMALESILHRIYTHQSDVWSYGVTVWELMTFGSKPYDGIPASEISSILEKGERLPQPPICTIDVYMIMVKCWMIDADSRPKFRELIIEFSKMARDPQRYLVIQGDERMHLPSPTDSNFYRALMDEEDMDDVVDADEYLIPQQGFFSSPSTSRTPLLSSLSATSNNSTVACIDRNGLQSCPIKEDSFLQRYSSDPTGALTEDSIDDTFLPVPEYINQSVPKRPAGSVQNPVYHNQPLNPAPSRDPHYQDPHSTAVGNPEYLNTVQPTCVNSTFDSPAHWAQKGSHQISLDNPDYQQDFFPKEAKPNGIFKGSTAENAEYLRVAPQSSEFIGA

SEQ ID NO: 4614 - protein, 464 aa, Homo Sapiens
MSSLTKIICAQQCSGRCRGKSPSDCCHNQCAAGCTGPRESDCLVCRKFRDEATCKDTCPPLMLYNPTTYQMDVNPEGKYSFGATCVKKCPRNYVVTDHGSCVRACGADSYEMEEDGVRKCKKCEGPCRKVCNGIGIGEFKDSLSINATNIKHFKNCTSISGDLHILPVAFRGDSFTHTPPLDPQELDILKTVKEITGFLLIQAWPENRTDLHAFENLEIIRGRTKQHGQFSLAVVSLNITSLGLRSLKEISDGDVIISGNKNLCYANTINWKKLFGTSGQKTKIISNRGENSCKATGQVCHALCSPEGCWGPEPRDCVSCRNVSRGRECVDKCNLLEGEPREFVENSECIQCHPECLPQAMNITCTGRGPDNCIQCAHYIDGPHCVKTCPAGVMGENNTLVWKYADAGHVCHLCHPNCTYGCTGPGLEGCPTNGPKIPSIATGMVGALLLLLVVALGIGLFMRR

SEQ ID NO: 4615 - protein, 77 aa, Homo Sapiens
MASVWKRLQRVGKHASKFQFVASYQELMVECTKKWQPDKLVVVWTRRSRRKSSKAHSWQPGIKNPYRGVVVWPVPEN

SEQ ID NO: 4616 - protein, 1231 aa, Homo Sapiens
MASVWKRLQRVGKHASKFQFVASYQELMVECTKKWQPDKLVVVWTRRSRRKSSKAHSWQPGIKNPYRGVVVWPVPENIEITVTLFKDPHAEEFEDKEWTFVIENESPSGRRKALATSSINMKQYASPMPTQTDVKLKFKPLSKKVVSAALQFSLSCIFLREGKATDEDMQSLASLMSMKQADIGNLDDFEEDNEDDDENRVNQEEKAAKITEIVNQLNALSSLDEDQDDCIKQANMRSAKSASSSEELINKLNFLDEAEKDLATVNSNPFDDPDAAELNPFGDPDSEEPITETASPRKTEDSFYNNSYNPFKEVQTPQYLNPFDEPEAFVTIKDSPPQSTKRKNIRPVDMSKYLYADSSKTEEEELDESNPFYEPKSTPPPNNLVNPVQELETERRVKRKAPAPPVLSPKTGVLNENTVSAGKDLSTSPKPSPIPSPVLGRKPNASQSLLVWCKEVTKNYRGVKITNFTTSWRNGLSFCAILHHFRPDLIDYKSLNPQDIKENNKKAYDGFASIGISRLLEPSDMVLLAIPDKLTVMTYLYQIRAHFSGQELNVVQIEENSSKSTYKVGNYETDTNSSVDQEKFYAELSDLKREPELQQPISGAVDFLSQDDSVFVNDSGVGESESEHQTPDDHLSPSTASPYCRRTKSDTEPQKSQQSSGRTSGSDDPGICSNTDSTQAQVLLGKKRLLKAETLELSDLYVSDKKKDMSPPFICEETDEQKLQTLDIGSNLEKEKLENSRSLECRSDPESPIKKTSLSPTSKLGYSYSRDLDLAKKKHASLRQTESDPDADRTTLNHADHSSKIVQHRLLSRQEELKERARVLLEQARRDAALKAGNKHNTNTATPFCNRQLSDQQDEERRRQLRERARQLIAEARSGVKMSELPSYGEMAAEKLKERSKASGDENDNIEIDTNEEIPEGFVVGGGDELTNLENDLDTPEQNSKLVDLKLKKLLEVQPQVANSPSSAAQKAVTESSEQDMKSGTEDLRTERLQKTTERFRNPVVFSKDSTVRKTQLQSFSQYIENRPEMKRQRSIQEDTKKGNEEKAAITETQRKPSEDEVLNKGFKDTSQYVVGELAALENEQKQIDTRAALVEKRLRYLMDTGRNTEEEEAMMQEWFMLVNKKNALIRRMNQLSLLEKEHDLERRYELLNRELRAMLAIEDWQKTEAQKRREQLLLDELVALVNKRDALVRDLDAQEKQAEEEDEHLERTLEQNKGKMAKKEEKCVLQ

SEQ ID NO: 4617 - protein, 1160 aa, Homo Sapiens
MASVWKRLQRVGKHASKFQFVASYQELMVECTKKWQPDKLVVVWTRRSRRKSSKAHSWQPGIKNPYRGVVVWPVPENIEITVTLFKDPHAEEFEDKEWTFVIENESPSGRRKALATSSINMKQYASPMPTQTDVKLKFKPLSKKVVSAALQFSLSCIFLREGKATDEDMQSLASLMSMKQADIGNLDDFEEDNEDDDENRVNQEEKAAKITELINKLNFLDEAEKDLATVNSNPFDDPDAAELNPFGDPDSEEPITETASPRKTEDSFYNNSYNPFKEVQTPQYLNPFDEPEAFVTIKDSPPQSTKRKNIRPVDMSKYLYADSSKTEEEELDESNPFYEPKSTPPPNNLVNPVQELETERRVKRKAPAPPVLSPKTGVLNENTVSAGKDLSTSPKPSPIPSPVLGRKPNASQSLLVWCKEVTKNYRGVKITNFTTSWRNGLSFCAILHHFRPDLIDYKSLNPQDIKENNKKAYDGFASIGISRLLEPSDMVLLAIPDKLTVMTYLYQIRAHFSGQELNVVQIEENSSKSTYKVGNYETDTNSSVDQEKFYAELSDLKREPELQQPISGAVDFLSQDDSVFVNDSGVGESESEHQTPDDHLSPSTASPYCRRTKSDTEPQKSQQSSGRTSGSDDPGICSNTDSTQAQVLLGKKRLLKAETLELSDLYVSDKKKDMSPPFICEETDEQKLQTLDIGSNLEKEKLENSRSLECRSDPESPIKKTSLSPTSKLGYSYSRDLDLAKKKHASLRQTESDPDADRTTLNHADHSSKIVQHRLLSRQEELKERARVLLEQARRDAALKAGNKHNTNTATPFCNRQLSDQQDEERRRQLRERARQLIAEARSGVKMSELPSYGEMAAEKLKERSKASGEQNSKLVDLKLKKLLEVQPQVANSPSSAAQKAVTESSEQDMKSGTEDLRTERLQKTTERFRNPVVFSKDSTVRKTQLQSFSQYIENRPEMKRQRSIQEDTKKGNEEKAAITETQRKPSEDEVLNKGFKDTSQYVVGELAALENEQKQIDTRAALVEKRLRYLMDTGRNTEEEEAMMQEWFMLVNKKNALIRRMNQLSLLEKEHDLERRYELLNRELRAMLAIEDWQKTEAQKRREQLLLDELVALVNKRDALVRDLDAQEKQAEEEDEHLERTLEQNKGKMAKKEEKCVLQ

SEQ ID NO: 4618 - protein, 310 aa, Homo Sapiens
MASVWKRLQRVGKHASKFQFVASYQELMVECTKKWQPDKLVVVWTRRSRRKSSKAHSWQPGIKNPYRGVVVWPVPENIEITVTLFKDPHAEEFEDKEWTFVIENESPSGRRKALATSSINMKQYASPMPTQTDVKLKFKPLSKKVVSAALQFSLSCIFLREGKATDEDMQSLASLMSMKQADIGNLDDFEEDNEDDDENRVNQEEKAAKITELINKLNFLDEAEKDLATVNSNPFDDPDAAELNPFGDPDSEEPITETASPRKTEDSFYNNSYNPFKEVQTPQYLNPFDEPEAFVTIKDSPPQSTKRKNI

SEQ ID NO: 4619 - protein, 1196 aa, Homo Sapiens
MASVWKRLQRVGKHASKFQFVASYQELMVECTKKWQPDKLVVVWTRRSRRKSSKAHSWQPGIKNPYRGVVVWPVPENIEITVTLFKDPHAEEFEDKEWTFVIENESPSGRRKALATSSINMKQYASPMPTQTDVKLKFKPLSKKVVSAALQFSLSCIFLREGKATDEDMQSLASLMSMKQADIGNLDDFEEDNEDDDENRVNQEEKAAKITELINKLNFLDEAEKDLATVNSNPFDDPDAAELNPFGDPDSEEPITETASPRKTEDSFYNNSYNPFKEVQTPQYLNPFDEPEAFVTIKDSPPQSTKRKNIRPVDMSKYLYADSSKTEEEELDESNPFYEPKSTPPPNNLVNPVQELETERRVKRKAPAPPVLSPKTGVLNENTVSAGKDLSTSPKPSPIPSPVLGRKPNASQSLLVWCKEVTKNYRGVKITNFTTSWRNGLSFCAILHHFRPDLIDYKSLNPQDIKENNKKAYDGFASIGISRLLEPSDMVLLAIPDKLTVMTYLYQIRAHFSGQELNVVQIEENSSKSTYKVGNYETDTNSSVDQEKFYAELSDLKREPELQQPISGAVDFLSQDDSVFVNDSGVGESESEHQTPDDHLSPSTASPYCRRTKSDTEPQKSQQSSGRTSGSDDPGICSNTDSTQAQVLLGKKRLLKAETLELSDLYVSDKKKDMSPPFICEETDEQKLQTLDIGSNLEKEKLENSRSLECRSDPESPIKKTSLSPTSKLGYSYSRDLDLAKKKHASLRQTESDPDADRTTLNHADHSSKIVQHRLLSRQEELKERARVLLEQARRDAALKAGNKHNTNTATPFCNRQLSDQQDEERRRQLRERARQLIAEARSGVKMSELPSYGEMAAEKLKERSKASGDENDNIEIDTNEEIPEGFVVGGGDELTNLENDLDTPEQNSKLVDLKLKKLLEVQPQVANSPSSAAQKAVTESSEQDMKSGTEDLRTERLQKTTERFRNPVVFSKDSTVRKTQLQSFSQYIENRPEMKRQRSIQEDTKKGNEEKAAITETQRKPSEDEVLNKGFKDTSQYVVGELAALENEQKQIDTRAALVEKRLRYLMDTGRNTEEEEAMMQEWFMLVNKKNALIRRMNQLSLLEKEHDLERRYELLNRELRAMLAIEDWQKTEAQKRREQLLLDELVALVNKRDALVRDLDAQEKQAEEEDEHLERTLEQNKGKMAKKEEKCVLQ

SEQ ID NO: 4620 - protein, 1160 aa, Homo Sapiens; identical to SEQ ID NO: 4617

SEQ ID NO: 4621 - protein, 41 aa, Homo Sapiens
MKQYASPMPTQTDVKLKFKPLSKKVVSAALQFSLSCIFLRE

SEQ ID NO: 4622 - protein, 95 aa, Homo Sapiens
MKQYASPMPTQTDVKLKFKPLSKKVVSAALQFSLSCIFLREGKATDEDMQSLASLMSMKQADIGNLDDFEEDNEDDDENRVNQEEKAAKITEIVN

SEQ ID NO: 4623 - protein, 108 aa, Homo Sapiens
MNWQPDKLVVVWTRRSRRKSSKAHSWQPGIKNPYRGVVVWPVPENIEITVTLFKDPHAEEFEDKEWTFVIENESPSGRRKALATSSINMKQYASPMPTQTDVKLKFKP

SEQ ID NO: 4624 - protein, 110 aa, Homo Sapiens
  misc_feature (1)..(1): Xaa can be any naturally occurring amino acid
XLEKEKLENSRSLECRSDPESPIKKTSLSPTSKLGYSYSRDLDLAKKKHASLRQTESDPDADRTTLNHADHSSKIVQQQDEERRRQLRERARQLIAEARSGVKMSELPSY

SEQ ID NO: 4625 - protein, 223 aa, Homo Sapiens
  misc_feature (1)..(1): Xaa can be any naturally occurring amino acid
XNTNTATPFCNRQLSDQDEERRRQLRERARQLIAEARSGVKMSELPSYGEMAAEKLKERSKASGDENDNIEIDTNEEIPEGFVVGGGDELTNLENDLDTPEQNSKLVDLKLKKLLEVQPQVANSPSSAAQKAVTESSEQDMKSGTEDLRTERLQKTTERFRNPVVFSKDSTVRKTQLQSFSQYIENRPEMKRQRSIQEDTKKGNEEKAAITETQRKPSEDEVL

SEQ ID NO: 4626 - protein, 154 aa, Homo Sapiens
  misc_feature (1)..(1): Xaa can be any naturally occurring amino acid
XRLLEPSDMTESDPDADRTTLNHADHSSKIVQHRLLSRQEELKERARVLLEQARRDAALKAGNKHNTNTATPFCNRQLSDQQDEERRRQLRERARQLIAEARSGVKMSELPSYGEMAAEKLKERSKASGDENDNIEIDTNEEIPEGFVVGGGDE

SEQ ID NO: 4627 - protein, 322 aa, Homo Sapiens
MGLPERRGLVLLLSLAEILFKIMILEGGGVMNLNPGNNLLHQPPAWTDSYSTCNVSSGFFGGQWHEIHPQYWTKYQVWEWLQHLLDTNQLDANCIPFQEFDINGEHLCSMSLQEFTRAAGTAGQLLYSNLQHLKWNGQCSSDLFQSTHNVIVKTEQTEPSIMNTWKDENYLYDTNYGSTVDLLDSKTFCRAQISMTTTSHLPVAESPDMKKEQDPPAKCHTKKHNPRGTHLWEFIRDILLNPDKNPGLIKWEDRSEGVFRFLKSEAVAQLWGKKKNNSSMTYEKLSRAMRYYYKREILERVDGRRLVYKFGKNARGWRENEN

SEQ ID NO: 4628 - protein, 126 aa, Homo Sapiens
MILEGGGVMNLNPGNNLLHQPPAWTDSYSTCNVSSGFFGGQWHEIHPQYWTKYQVWEWLQHLLDTNQLDANCIPFQEFDINGEHLCSMSLQEFTRAAGTAGQLLYSNLQHLKWNGDSLFLCLSLPC

SEQ ID NO: 4629 - protein, 126 aa, Homo Sapiens; identical to SEQ ID NO: 4628

SEQ ID NO: 4630 - protein, 158 aa, Homo Sapiens
MILEGGGVMNLNPGNNLLHQPPAWTDSYSTCNVSSGFFGGQWHEIHPQYWTKYQVWEWLQHLLDTNQLDANCIPFQEFDINGEHLCSMSLQEFTRAAGTAGQLLYSNLQHLKWNGQCSSDLFQSTHNVIVKTEQTEPSIMNTWKDENYLYDTNYGSTV

SEQ ID NO: 4631 - protein, 166 aa, Homo Sapiens
MILEGGGVMNLNPGNNLLHQPPAWTDSYSTCNVSSGFFGGQWHEIHPQYWTKYQVWEWLQHLLDTNQLDANCIPFQEFDINGEHLCSMSLQEFTRAAGTAGQLLYSNLQHLKWNGQCSSDLFQSTHNVIVKTEQTEPSIMNTWKDENYLYDTNYGSTVAESPDMKK

SEQ ID NO: 4632 - protein, 277 aa, Homo Sapiens
MILEGGGVMNLNPGNNLLHQPPAWTDSYSTCNVSSGFFGGQWHEIHPQYWTKYQVWEWLQHLLDTNQLDANCIPFQEFDINGEHLCSMSLQEFTRAAGTAGQLLYSNLQHLKWNGQCSSDLFQSTHNVIVKTEQTEPSIMNTWKDENYLYDTNYGSTVAESPDMKKEQDPPAKCHTKKHNPRGTHLWEFIRDILLNPDKNPGLIKWEDRSEGVFRFLKSEAVAQLWGKKKNNSSMTYEKLSRAMRYYYKREILERVDGRRLVYKFGKNARGWRENEN

SEQ ID NO: 4633 - protein, 173 aa, Homo Sapiens
MILEGGGVMNLNPGNNLLHQPPAWTDSYSTCNVSSGFFGGQWHEIHPQYWTKYQVWEWLQHLLDTNQLDANCIPFQEFDINGEHLCSMSLQEFTRAAGTAGQLLYSNLQHLKWNGQCSSDLFQSTHNVIVKTEQTEPSIMNTWKDENYLYDTNYGSTVDLLDSKTFCRAQISM

SEQ ID NO: 4634 - protein, 300 aa, Homo Sapiens
MILEGGGVMNLNPGNNLLHQPPAWTDSYSTCNVSSGFFGGQWHEIHPQYWTKYQVWEWLQHLLDTNQLDANCIPFQEFDINGEHLCSMSLQEFTRAAGTAGQLLYSNLQHLKWNGQCSSDLFQSTHNVIVKTEQTEPSIMNTWKDENYLYDTNYGSTVDLLDSKTFCRAQISMTTTSHLPVAESPDMKKEQDPPAKCHTKKHNPRGTHLWEFIRDILLNPDKNPGLIKWEDRSEGVFRFLKSEAVAQLWGKKKNNSSMTYEKLSRAMRYYYKREILERVDGRRLVYKFGKNARGWRENEN

SEQ ID NO: 4635 - protein, 300 aa, Homo Sapiens; identical to SEQ ID NO: 4634

SEQ ID NO: 4636 - protein, 300 aa, Homo Sapiens; identical to SEQ ID NO: 4634

SEQ ID NO: 4637 - protein, 370 aa, Homo Sapiens
GLGRPTPGLSQGPGKETLESALIALDSEKPKKLRFHPKQLYFSARQGELQKVLLMLVDGIDPNFKMEHQNKRSPLHAAAEAGHVDICHMLVQAGANIDTCSEDQRTPLMEAAENNHLEAVKYLIKAGALVDPKDAEGSTCLHLAAKKGHYEVVQYLLSNGQMDVNCQDDGGWTPMIWATEYKHVDLVKLLLSKGSDINIRDNEENICLHWAAFSGCVDIAEILLAAKCDLHAVNIHGDSPLHIAARENRYDCVVLFLSRDSDVTLKNKEGETPLQCASLNSQVWSALQMSKALQDSAPDRPSPVERIVSRDIARGYERIPIPCVNAVDSEPCPSNYKYVSQNCVTSPMNIDRNITHLQALDMFLPAQPSP

SEQ ID NO: 4638 - protein, 1298 aa, Homo Sapiens
MAAADAEAVPARGEPQQDCCVKTELLGEETPMAADEGSAEKQAGEAHMAADGETNGSCENSDASSHANAAKHTQDSARVNPQDGTNTLTRIAENGVSERDSEAAKQNHVTADDFVQTSVIGSNGYILNKPALQAQPLRTTSTLASSLPGHAAKTLPGGAGKGRTPSAFPQTPAAPPATLGEGSADTEDRKLPAPGADVKVHRARKTMPKSVVGLHAASKDPREVREARDHKEPKEEINKNISDFGRQQLLPPFPSLHQSLPQNQCYMATTKSQTACLPFVLAAAVSRKKKRRMGTYSLVPKKKTKVLKQRTVIEMFKSITHSTVGSKGEKDLGASSLHVNGESLEMDSDEDDSEELEEDDGHGAEQAAAFPTEDSRTSKESMSEADRAQKMDGESEEEQESVDTGEEEEGGDESDLSSESSIKKKFLKRKGKTDSPWIKPARKRRRRSRKKPSGALGSESYKSSAGSAEQTAPGDSTGYMEVSLDSLDLRVKGILSSQAEGLANGPDVLETDGLQEVPLCSCRMETPKSREITTLANNQCMATESVDHELGRCTNSVVKYELMRPSNKAPLLVLCEDHRGRMVKHQCCPGCGYFCTAGNFMECQPESSISHRFHKDCASRVNNASYCPHCGEESSKAKEVTIAKADTTSTVTPVPGQEKGSALEGRADTTTGSAAGPPLSEDDKLQGAASHVPEGFDPTGPAGLGRPTPGLSQGPGKETLESALIALDSEKPKKLRFHPKQLYFSARQGELQKVLLMLVDGIDPNFKMEHQNKRSPLHAAAEAGHVDICHMLVQAGANIDTCSEDQRTPLMEAAENNHLEAVKYLIKAGALVDPKDAEGSTCLHLAAKKGHYEVVQYLLSNGQMDVNCQDDGGWTPMIWATEYKHVDLVKLLLSKGSDINIRDNEENICLHWAAFSGCVDIAEILLAAKCDLHAVNIHGDSPLHIAARENRYDCVVLFLSRDSDVTLKNKEGETPLQCASLNSQVWSALQMSKALQDSAPDRPSPVERIVSRDIARGYERIPIPCVNAVDSEPCPSNYKYVSQNCVTSPMNIDRNITHLQYCVCIDDCSSSNCMCGQLSMRCWYDKDGRLLPEFNMAEPPLIFECNHACSCWRNCRNRVVQNGLRARLQLYRTRDMGWGVRSLQDIPPGTFVCEYVGELISDSEADVREEDSYLFDLDNKDGEVYCIDARFYGNVSRFINHHCEPNLVPVRVFMAHQDLRFPRIAFFSTRLIEAGEQLGFDYGERFWDIKGKLFSCRCGSPKCRHSSAALAQRQASAAQEAQEDGLPDTSSAAAADPL

SEQ ID NO: 4639 - protein, 808 aa, Homo Sapiens
MAAADAEAVPARGEPQQDCCVKTELLGEETPMAADEGSAEKQAGEAHMAADGETNGSCENSDASSHANAAKHTQDSARVNPQDGTNTLTRIAENGVSERDSEAAKQNHVTADDFVQTSVIGSNGYILNKPALQAQPLRTTSTLASSLPGHAAKTLPGGAGKGRTPSAFPQTPAAPPATLGEGSADTEDRKLPAPGADVKVHRARKTMPKSVVGLHAASKDPREVREARDHKEPKEEINKNISDFGRQQLLPPFPSLHQSLPQNQCYMATTKSQTACLPFVLAAAVSRKKKRRMGTYSLVPKKKTKVLKQRTVIEMFKSITHSTVGSKGEKDLGASSLHVNGESLEMDSDEDDSEELEEDDGHGAEQAAAFPTEDSRTSKESMSEADRAQKMDGESEEEQESVDTGEEEEGGDESDLSSESSIKKKFLKRKGKTDSPWIKPARKRRRRSRKKPSGALGSESYKSSAGSAEQTAPGDSTGYMEVSLDSLDLRVKGILSSQAEGLANGPDVLETDGLQEVPLCSCRMETPKSREITTLANNQCMATESVDHELGRCTNSVVKYELMRPSNKAPLLVLCEDHRGRMVKHQCCPGCGYFCTAGNFMECQPESSISHRFHKDCASRVNNASYCPHCGEESSKAKEVTIAKADTTSTVTPVPGQEKGSALEGRADTTTGSAAGPPLSEDDKLQGAASHVPEGFDPTGPAGLGRPTPGLSQGPGKETLESALIALDSEKPKKLRFHPKQLYFSARQGELQKVLLMLVDGIDPNFKMEHQNKRSPLHAAAEAGHVDICHMLVQFCRLGSPRSRGCLW

SEQ ID NO: 4640 - protein, 556 aa, Homo Sapiens
MAAADAEAVPARGEPQQDCCVKTELLGEETPMAADEGSAEKQAGEAHMAADGETNGSCENSDASSHANAAKHTQDSARVNPQDGTNTLTRIAENGVSERDSEAAKQNHVTADDFVQTSVIGSNGYILNKPALQAQPLRTTSTLASSLPGHAAKTLPGGAGKGRTPSAFPQTPAAPPATLGEGSADTEDRKLPAPGADVKVHRARKTMPKSVVGLHAASKDPREVREARDHKEPKEEINKNISDFGRQQLLPPFPSLHQSLPQNQCYMATTKSQTACLPFVLAAAVSRKKKRRMGTYSLVPKKKTKVLKQRTVIEMFKSITHSTVGSKGEKDLGASSLHVNGESLEMDSDEDDSEELEEDDGHGAEQAAAFPTEDSRTSKESMSEADRAQKMDGESEEEQESVDTGEEEEGGDESDLSSESSIKKKFLKRKGKTDSPWIKPARKRRRRSRKKPSGALGSESYKSSAGSAEQTAPGDSTGYMEVSLDSLDLRVKGILSSQAEGLANGPDVLETDGLQEVPLCSCRMETPKSREITTLANNQCMATESVDHEVSTFVFI

SEQ ID NO: 4641 - protein, 66 aa, Homo Sapiens
MAAADAERHLWLPMKAQQRNRQERPTWLRTVRPMGLVKTAMPAVMQMLQSTLRTAQGSTPRMAPTH

SEQ ID NO: 4642 - protein, 106 aa, Homo Sapiens
MAADEGSAEKQAGEAHMAADGETNGSCENSDASSHANAAKHTQDSARVNPQDGTNTLTRIAENGVSERDSEAAKQNHVTADDFVQTSVIGSNGYILNKPALQAQPL

SEQ ID NO: 4643 - protein, 134 aa, Homo Sapiens
MAADEGSAEKQAGEAHMAADGETNGSCENSDASSHANAAKHTQDSARVNPQDGTNTLTRIAENGVSERDSEAAKQNHVTADDFVQTSVIGSNGYILNKPALQAQPLRTTSTLASSLPGHAAKTLPGGAGKGRTP

SEQ ID NO: 4644 - protein, 137 aa, Homo Sapiens
MAADEGSAEKQAGEAHMAADGETNGSCENSDASSHANAAKHTQDSARVNPQDGTNTLTRIAENGVSERDSEAAKQNHVTADDFVQTSVIGSNGYILNKPALQAQPLRTTSTLASSLPGHAAKTLPGGAGKGRTPSAF

SEQ ID NO: 4645 - protein, 139 aa, Homo Sapiens
MAADEGSAEKQAGEAHMAADGETNGSCENSDASSHANAAKHTQDSARVNPQDGTNTLTRIAENGVSERDSEAAKQNHVTADDFVQTSVIGSNGYILNKPALQAQPLRTTSTLASSLPGHAAKTLPGGAGKGRTPSAFPQ

SEQ ID NO: 4646 - protein, 982 aa, Homo Sapiens
MAADEGSAEKQAGEAHMAADGETNGSCENSDASSHANAAKHTQDSARVNPQDGTNTLTRIAENGVSERDSEAAKQNHVTADDFVQTSVIGSNGYILNKPALQAQPLRTTSTLASSLPGHAAKTLPGGAGKGRTPSAFPQTPAAPPATLGEGSADTEDRKLPAPGADVKVHRARKTMPKSVVGLHAASKDPREVREARDHKEPKEEINKNISDFGRQQLLPPFPSLHQSLPQNQCYMATTKSQTAAAVSRKKKRRMGTYSLVPKKKTKVLKQRTVIEMFKSITHSTVGSKGEKDLGASSLHVNGESLEMDSDEDDSEELEEDDGHGAEQAAAFPTEDSRTSKESMSEADRAQKMDGESEEEQESVDTGEEEEGGDESDLSSESSIKKKFLKRKGKTDSPWIKPARKRRRRSRKKPSGALGSESYKSSAGSAEQTAPGDSTGYMEVSLDSLDLRVKGILSSQAEGLANGPDVLETDGLQEVPLCSCRMETPKSREITTLANNQCMATESVDHELGRCTNSVVKYELMRPSNKAPLLVLCEDHRGRMVKHQCCPGCGYFCTAGNFMECQPESSISHRFHKDCASRVNNASYCPHCGEESSKAKEVTIAKADTTSTVTPVPGQEKGSALEGRADTTTGSAAGPPLSEDDKLQGAASHVPEGFDPTGPAGLGRPTPGLSQGPGKETLESALIALDSEKPKKLRFHPKQLYFSARQGELQKVLLMLVDGIDPNFKMEHQNKRSPLHAAAEAGHVDICHMLVQAGANIDTCSEDQRTPLMEAAENNHLEAVKYLIKAGALVDPKDAEGSTCLHLAAKKGHYEVVQYLLSNGQMDVNCQDDGGWTPMIWATEYKHVDLVKLLLSKGSDINIRDNEENICLHWAAFSGCVDIAEILLAAKCDLHAVNIHGDSPLHIAARENRYDCVVLFLSRDSDVTLKNKEGETPLQCASLNSQVWSALQMSKALQDSAPDRPSPVERIVSRDIARGYER

SEQ ID NO: 4647 - protein, 1267 aa, Homo Sapiens
MAADEGSAEKQAGEAHMAADGETNGSCENSDASSHANAAKHTQDSARVNPQDGTNTLTRIAENGVSERDSEAAKQNHVTADDFVQTSVIGSNGYILNKPALQAQPLRTTSTLASSLPGHAAKTLPGGAGKGRTPSAFPQTPAAPPATLGEGSADTEDRKLPAPGADVKVHRARKTMPKSVVGLHAASKDPREVREARDHKEPKEEINKNISDFGRQQLLPPFPSLHQSLPQNQCYMATTKSQTACLPFVLAAAVSRKKKRRMGTYSLVPKKKTKVLKQRTVIEMFKSITHSTVGSKGEKDLGASSLHVNGESLEMDSDEDDSEELEEDDGHGAEQAAAFPTEDSRTSKESMSEADRAQKMDGESEEEQESVDTGEEEEGGDESDLSSESSIKKKFLKRKGKTDSPWIKPARKRRRRSRKKPSGALGSESYKSSAGSAEQTAPGDSTGYMEVSLDSLDLRVKGILSSQAEGLANGPDVLETDGLQEVPLCSCRMETPKSREITTLANNQCMATESVDHELGRCTNSVVKYELMRPSNKAPLLVLCEDHRGRMVKHQCCPGCGYFCTAGNFMECQPESSISHRFHKDCASRVNNASYCPHCGEESSKAKEVTIAKADTTSTVTPVPGQEKGSALEGRADTTTGSAAGPPLSEDDKLQGAASHVPEGFDPTGPAGLGRPTPGLSQGPGKETLESALIALDSEKPKKLRFHPKQLYFSARQGELQKVLLMLVDGIDPNFKMEHQNKRSPLHAAAEAGHVDICHMLVQAGANIDTCSEDQRTPLMEAAENNHLEAVKYLIKAGALVDPKDAEGSTCLHLAAKKGHYEVVQYLLSNGQMDVNCQDDGGWTPMIWATEYKHVDLVKLLLSKGSDINIRDNEENICLHWAAFSGCVDIAEILLAAKCDLHAVNIHGDSPLHIAARENRYDCVVLFLSRDSDVTLKNKEGETPLQCASLNSQVWSALQMSKALQDSAPDRPSPVERIVSRDIARGYERIPIPCVNAVDSEPCPSNYKYVSQNCVTSPMNIDRNITHLQYCVCIDDCSSSNCMCGQLSMRCWYDKDGRLLPEFNMAEPPLIFECNHACSCWRNCRNRVVQNGLRARLQLYRTRDMGWGVRSLQDIPPGTFVCEYVGELISDSEADVREEDSYLFDLDNKDGEVYCIDARFYGNVSRFINHHCEPNLVPVRVFMAHQDLRFPRIAFFSTRLIEAGEQLGFDYGERFWDIKGKLFSCRCGSPKCRHSSAALAQRQASAAQEAQEDGLPDTSSAAAADPL

SEQ ID NO: 4648 - protein, 117 aa, Homo Sapiens
MEAAENNHLEAVKYLIKAGALVDPKDAEGSTCLHLAAKKGHYEVVQYLLSNGQMDVNCQDDGGWTPMIWATEYKHVDLVKLLLSKGSDINIRDNDDGTMKRGALSRQKEEKREAEEP

SEQ ID NO: 4649 - protein, 107 aa, Homo Sapiens
MEAAENNHLEAVKYLIKAGALVDPKDAEGSTCLHLAAKKGHYEVVQYLLSNGQMDVNCQDDGGWTPMIWATEYKHVDLVKLLLSKGSDINIRDNRVPEARNGKSSHK

SEQ ID NO: 4650 - protein, 394 aa, Homo Sapiens
MGFAAAAVSRKKKRRMGTYSLVPKKKTKVLKQRTVIEMFKSITHSTVGSKGEKDLGASSLHVNGESLEMDSDEDDSEELEEDDGHGAEQAAAFPTEDSRTSKESMSEADRAQKMDGESEEEQESVDTGEEEEGGDESDLSSESSIKKKFLKRKGKTDSPWIKPARKRRRRSRKKPSGALGSESYKSSAGSAEQTAPGDSTGYMEVSLDSLDLRVKGILSSQAEGLANGPDVLETDGLQEVPLCSCRMETPKSREITTLANNQCMATESVDHELGRCTNSVVKYELMRPSNKAPLLVLCEDHRGRMVKHQCCPGCGYFCTAGNFMECQPESSISHRFHKDCASRVNNASYCPHCGEESSKAKEVTIAKADTTSTVTPVPGQEKGSALEGRADTTT

SEQ ID NO: 4651 - protein, 126 aa, Homo Sapiens
MGTYSLVPKKKTKVLKQRTVIEMFKSITHSTVGSKGEKDLGASSLHVNGESLEMDSDEDDSEELEEDDGHGAEQAAAFPTEDSRTSKESMSEADRAQKKHEEENTASSPHCPGGSGTLKQSLQELP

SEQ ID NO: 4652 - protein, 126 aa, Homo Sapiens; identical to SEQ ID NO: 4651

SEQ ID NO: 4653 - protein, 268 aa, Homo Sapiens
MLYFSRSHFPRPCGGQVSAGSGLTLLLLLLPALWRGWLEGDGQQAVPARGEPQQDCCVKTELLGEETPMAADEGSAEKQAGEAHMAADGETNGSCENSDASSHANAAKHTQDSARVNPQDGTNTLTRIAENGVSERDSEAAKQNHVTADDFVQTSVIGSNGYILNKPALQAQPLRTTSTLASSLPGHAAKTLPGGAGKGRTPSAFPQTPAAPPATLGEGSADTEDRKLPAPGADVKVHRARKTMPKSVVGLHAASKDPREVREARDHK

SEQ ID NO: 4654 - protein, 803 aa, Homo Sapiens
MSEADRAQKMDGESEEEQESVDTGEEEEGGDESDLSSESSIKKKFLKRKGKTDSPWIKPARKRRRRSRKKPSGALGSESYKSSAGSAEQTAPGDSTGYMEVSLDSLDLRVKGILSSQAEGLANGPDVLETDGLQEVPLCSCRMETPKSREITTLANNQCMATESVDHELGRCTNSVVKYELMRPSNKAPLLVLCEDHRGRMVKHQCCPGCGYFCTAGNFMECQPESSISHRFHKDCASRVNNASYCPHCGEESSKAKEVTIAKADTTSTVTPVPGQEKGSALEGRADTTTGSAAGPPLSEDDKLQGAASHVPEGFDPTGPAGLGRPTPGLSQGPGKETLESALIALDSEKPKKLRFHPKQLYFSARQGELQKVLLMLVDGIDPNFKMEHQNKRSPLHAAAEAGHVDICHMLVQAGANIDTCSEDQRTPLMEAAENNHLEAVKYLIKAGALVDPKDAEGSTCLHLAAKKGHYEVVQYLLSNGQMDVNCQDDGGWTPMIWATEYKHVDLVKLLLSKGSDINIRDNEENICLHWAAFSGCVDIAEILLAAKCDLHAVNIHGDSPLHIAARENRYDCVVLFLSRDSDVTLKNKEGETPLQCASLNSQVWSALQMSKALQDSAPDRPSPVERIVSRDIARGYERIPIPCVNAVDSEPCPSNYKYVSQNCVTSPMNIDRNITHLQYCVCIDDCSSSNCMCGQLSMRCWYDKDGRLLPEFNMAEPPLIFECNHACSCWRNCRNRVVQNGLRARLQLYRTRDMGWGVRSLQDIPPGTFVCEYVGELISDSEADVREEDSYLFDLDNKISSA

SEQ ID NO: 4655 - protein, 153 aa, Homo Sapiens
SPLHAAAEAGHVDICHMLVQAGANIDTCSEDQRTPLMEAAENNHLEAVKYLIKAGALVDPKDAEGSTCLHLAAKKGHYEVVQYLLSNGQMDVNCQDDGGWTPMIWATEYKHVDLVKLLLSKGSDINIRDNDDGTMKRGALSRQKEEKREAEEP

SEQ ID NO: 4656 - protein, 277 aa, Homo Sapiens
VPARGEPQQDCCVKTELLGEETPMAADEGSAEKQAGEAHMAADGETNGSCENSDASSHANAAKHTQDSARVNPQDGTNTLTRIAENGVSERDSEAAKQNHVTADDFVQTSVIGSNGYILNKPALQAQPLRTTSTLASSLPGHAAKTLPGGAGKGRTPSAFPQTPAAPPATLGEGSADTEDRKLPAPGADVKVHRARKTMPKSVVGLHAASKDPREVREARDHKEPKEEINKNISDFGRQQLLPPFPSLHQSLPQNQCYMATTKSQTGKEDPATVSAL

SEQ ID NO: 4657 - protein, 168 aa, Homo Sapiens
WIKPARKRRRRSRKKPSGALGSESYKSSAGSAEQTAPGDSTGYMEVSLDSLDLRVKGILSSQAEGLANGPDVLETDGLQEVPLCSCRMETPKSREITTLANNQCMATESVDHEGNFMECQPESSISHRFHKDCASRVNNASYCPHCGEESSKAKEVTIAKADTTSTVT

SEQ ID NO: 4658 - protein, 543 aa, Homo Sapiens
  misc_feature (1)..(1): Xaa can be any naturally occurring amino acid
XCVKTELLGEETPMAADEGSAEKQAGEAHMAADGETNGSCENSDASSHANAAKHTQDSARVNPQDGTNTLTRIAENGVSERDSEAAKQNHVTADDFVQTSVIGSNGYILNKPALQAQPLRTTSTLASSLPGHAAKTLPGGAGKGRTPSAFPQTPAAPPATLGEGSADTEDRKLPAPGADVKVHRARKTMPKSVVGLHAASKDPREVREARDHKEPKEEINKNISDFGRQQLLPPFPSLHQSLPQNQCYMATTKSQTACLPFVLAAAVSRKKKRRMGTYSLVPKKKTKVLKQRTVIEMFKSITHSTVGSKGEKDLGASSLHVNGESLEMDSDEDDSEELEEDDGHGAEQAAAFPTEDSRTSKESMSEADRAQKMDGESEEEQESVDTGEEEEGGDESDLSSESSIKKKFLKRKGKTDSPWIKPARKRRRRSRKKPSGALGSESYKSSAGSAEQTAPGDSTGYMEVSLDSLDLRVKGILSSQAEGLANGPDVLETDGLQEVPLCSCRMETPKSREITTLANNQCMATESVDHEVLNRIQWSQIPV

SEQ ID NO: 4659 - protein, 433 aa, Homo Sapiens
  misc_feature (1)..(1): Xaa can be any naturally occurring amino acid
XGEETPMAADEGSAEKQAGEAHMAADGETNGSCENSDASSHANAAKHTQDSARVNPQDGTNTLTRIAENGVSERDSEAAKQNHVTADDFVQTSVIGSNGYILNKPALQAQPLRTTSTLASSLPGHAAKTLPGGAGKGRTPSAFPQTPAAPPATLGEGSADTEDRKLPAPGADVKVHRARKTMPKSVVGLHAASKDPREVREARDHKEPKEEINKNISDFGRQQLLPPFPSLHQSLPQNQCYMATTKSQTAAAVSRKKKRRMGTYSLVPKKKTKVLKQRTVIEMFKSITHSTVGSKGEKDLGASSLHVNGESLEMDSDEDDSEELEEDDGHGAEQAAAFPTEDSRTSKESMSEADRAQKMDGESEEEQESVDTGEEEEGGDESDLSSESSIKKKFLKRKGKTDSPWIKPARKRRRRSRKKPSGALGSESYKSSA

SEQ ID NO: 4660 - protein, 112 aa, Homo Sapiens
  misc_feature (1)..(1): Xaa can be any naturally occurring amino acid
XPALQAQPLRTTSTLASSLPGHAAKTLPGGAGKGRTPSAFPQTPAAPPATLGEGSADTEDRKLPAPGADVKVHRARKTMPKSVVGLVILCLLLLFPFSHLFCFNNGKWTLVH

SEQ ID NO: 4661 - protein, 230 aa, Homo Sapiens
  misc_feature (1)..(1): Xaa can be any naturally occurring amino acid
XPFVLAAAVSRKKKRRMGTYSLVPKKKTKVLKQRTVIEMFKSITHSTVGSKGEKDLGASSLHVNGESLEMDSDEDDSEELEEDDGHGAEQAAAFPTEDSRTSKESMSEADRAQKSSESSIKKKFLKRKGKTDSPWIKPARKRRRRSRKKPSGALGSESYKSSAGSAEQTAPGDSTGYMEVSLDSLDLRVKGILSSQAEGLANGPDVLETDGLQEVPLCSCRMETPKSREI

SEQ ID NO: 4662 - protein, 108 aa, Homo Sapiens
  misc_feature (1)..(1): Xaa can be any naturally occurring amino acid
XPLMEAAENNHLEAVKYLIKAGALVDPKDAEGSTCLHLAAKKGHYEVVQYLLSNGQMDVNCQDDGGWTPMIWATEYKHVDLVKLLLSKGSDINIRDNVGCIYSKYTLG

SEQ ID NO: 4663 - protein, 1176 aa, Homo Sapiens
MAAAAGAAAAAAAEGEAPAEMGALLLEKETRGATERVHGSLGDTPRSEETLPKATPDSLEPAGPSSPASVTVTVGDEGADTPVGATPLIGDESENLEGDGDLRGGRILLGHATKSFPSSPSKGGSCPSRAKMSMTGAGKSPPSVQSLAMRLLSMPGAQGAAAAGSEPPPATTSPEGQPKVHRARKTMSKPGNGQPPVPEKRPPEIQHFRMSDDVHSLGKVTSDLAKRRKLNSGGGLSEELGSARRSGEVTLTKGDPGSLEEWETVVGDDFSLYYDSYSVDERVDSDSKSEVEALTEQLSEEEEEEEEEEEEEEEEEEEEEEEEDEESGNQSDRSGSSGRRKAKKKWRKDSPWVKPSRKRRKREPPRAKEPRGVSNDTSSLETERGFEELPLCSCRMEAPKIDRISERAGHKCMATESVDGELSGCNAAILKRETMRPSSRVALMVLCETHRARMVKHHCCPGCGYFCTAGTFLECHPDFRVAHRFHKACVSQLNGMVFCPHCGEDASEAQEVTIPRGDGVTPPAGTAAPAPPPLSQDVPGRADTSQPSARMRGHGEPRRPPCDPLADTIDSSGPSLTLPNGGCLSAVGLPLGPGREALEKALVIQESERRKKLRFHPRQLYLSVKQGELQKVILMLLDNLDPNFQSDQQSKRTPLHAAAQKGSVEICHVLLQAGANINAVDKQQRTPLMEAVVNNHLEVARYMVQRGGCVYSKEEDGSTCLHHAAKIGNLEMVSLLLSTGQVDVNAQDSGGWTPIIWAAEHKHIEVIRMLLTRGADVTLTDNEENICLHWASFTGSAAIAEVLLNARCDLHAVNYHGDTPLHIAARESYHDCVLLFLSRGANPELRNKEGDTAWDLTPERSDVWFALQLNRKLRLGVGNRAIRTEKIICRDVARGYENVPIPCVNGVDGEPCPEDYKYISENCETSTMNIDRNITHLQHCTCVDDCSSSNCLCGQLSIRCWYDKDGRLLQEFNKIEPPLIFECNQACSCWRNCKNRVVQSGIKVRLQLYRTAKMGWGVRALQTIPQGTFICEYVGELISDAEADVREDDSYLFDLDNKDGEVYCIDARYYGNISRFINHLCDPNIIPVRVFMLHQDLRFPRIAFFSSRDIRTGEELGFDYGDRFWDIKSKYFTCQCGSEKCKHSAEAIALEQSRLARLDPHPELLPELGSLPPVNT

SEQ ID NO: 4664 - protein, 1210 aa, Homo Sapiens
MAAAAGAAAAAAAEGEAPAEMGALLLEKETRGATERVHGSLGDTPRSEETLPKATPDSLEPAGPSSPASVTVTVGDEGADTPVGATPLIGDESENLEGDGDLRGGRILLGHATKSFPSSPSKGGSCPSRAKMSMTGAGKSPPSVQSLAMRLLSMPGAQGAAAAGSEPPPATTSPEGQPKVHRARKTMSKPGNGQPPVPEKRPPEIQHFRMSDDVHSLGKVTSDLAKRRKLNSGGGLSEELGSARRSGEVTLTKGDPGSLEEWETVVGDDFSLYYDSYSVDERVDSDSKSEVEALTEQLSEEEEEEEEEEEEEEEEEEEEEEEEDEESGNQSDRSGSSGRRKAKKKWRKDSPWVKPSRKRRKREPPRAKEPRGVNGVGSSGPSEYMEVPLGSLELPSEGTLSPNHAGVSNDTSSLETERGFEELPLCSCRMEAPKIDRISERAGHKCMATESVDGELSGCNAAILKRETMRPSSRVALMVLCETHRARMVKHHCCPGCGYFCTAGTFLECHPDFRVAHRFHKACVSQLNGMVFCPHCGEDASEAQEVTIPRGDGVTPPAGTAAPAPPPLSQDVPGRADTSQPSARMRGHGEPRRPPCDPLADTIDSSGPSLTLPNGGCLSAVGLPLGPGREALEKALVIQESERRKKLRFHPRQLYLSVKQGELQKVILMLLDNLDPNFQSDQQSKRTPLHAAAQKGSVEICHVLLQAGANINAVDKQQRTPLMEAVVNNHLEVARYMVQRGGCVYSKEEDGSTCLHHAAKIGNLEMVSLLLSTGQVDVNAQDSGGWTPIIWAAEHKHIEVIRMLLTRGADVTLTDNEENICLHWASFTGSAAIAEVLLNARCDLHAVNYHGDTPLHIAARESYHDCVLLFLSRGANPELRNKEGDTAWDLTPERSDVWFALQLNRKLRLGVGNRAIRTEKIICRDVARGYENVPIPCVNGVDGEPCPEDYKYISENCETSTMNIDRNITHLQHCTCVDDCSSSNCLCGQLSIRCWYDKDGRLLQEFNKIEPPLIFECNQACSCWRNCKNRVVQSGIKVRLQLYRTAKMGWGVRALQTIPQGTFICEYVGELISDAEADVREDDSYLFDLDNKDGEVYCIDARYYGNISRFINHLCDPNIIPVRVFMLHQDLRFPRIAFFSSRDIRTGEELGFDYGDRFWDIKSKYFTCQCGSEKCKHSAEAIALEQSRLARLDPHPELLPELGSLPPVNT

SEQ ID NO: 4665 - protein, 1233 aa, Homo Sapiens
MRGLPRGRGLMRARGRGRAAPPGSRGRGRGGPHRGRGRPRSLLSLPRAQASWTPQLSTGLTSPPVPCLPSQGEAPAEMGALLLEKETRGATERVHGSLGDTPRSEETLPKATPDSLEPAGPSSPASVTVTVGDEGADTPVGATPLIGDESENLEGDGDLRGGRILLGHATKSFPSSPSKGGSCPSRAKMSMTGAGKSPPSVQSLAMRLLSMPGAQGAAAAGSEPPPATTSPEGQPKVHRARKTMSKPGNGQPPVPEKRPPEIQHFRMSDDVHSLGKVTSDLAKRRKLNSGGGLSEELGSARRSGEVTLTKGDPGSLEEWETVVGDDFSLYYDSYSVDERVDSDSKSEVEALTEQLSEEEEEEEEEEEEEEEEEEEEEEEEDEESGNQSDRSGSSGRRKAKKKWRKDSPWVKPSRKRRKREPPRAKEPRGVSNDTSSLETERGFEELPLCSCRMEAPKIDRISERAGHKCMATESVDGELSGCNAAILKRETMRPSSRVALMVLCETHRARMVKHHCCPGCGYFCTAGTFLECHPDFRVAHRFHKACVSQLNGMVFCPHCGEDASEAQEVTIPRGDGVTPPAGTAAPAPPPLSQDVPGRADTSQPSARMRGHGEPRRPPCDPLADTIDSSGPSLTLPNGGCLSAVGLPLGPGREALEKALVIQESERRKKLRFHPRQLYLSVKQGELQKVILMLLDNLDPNFQSDQQSKRTPLHAAAQKGSVEICHVLLQAGANINAVDKQQRTPLMEAVVNNHLEVARYMVQRGGCVYSKEEDGSTCLHHAAKIGNLEMVSLLLSTGQVDVNAQDSGGWTPIIWAAEHKHIEVIRMLLTRGADVTLTDNEENICLHWASFTGSAAIAEVLLNARCDLHAVNYHGDTPLHIAARESYHDCVLLFLSRGANPELRNKEGDTAWDLTPERSDVWFALQLNRKLRLGVGNRAIRTEKIICRDVARGYENVPIPCVNGVDGEPCPEDYKYISENCETSTMNIDRNITHLQHCTCVDDCSSSNCLCGQLSIRCWYDKDGRLLQEFNKIEPPLIFECNQACSCWRNCKNRVVQSGIKVRLQLYRTAKMGWGVRALQTIPQGTFICEYVGELISDAEADVREDDSYLFDLDNKDGEVYCIDARYYGNISRFINHLCDPNIIPVRVFMLHQDLRFPRIAFFSSRDIRTGEELGFDYGDRFWDIKSKYFTCQCGSEKCKHSAEAIALEQSRLARLDPHPELLPELGSLPPVNT

SEQ ID NO: 4666 - protein, 1267 aa, Homo Sapiens
MRGLPRGRGLMRARGRGRAAPPGSRGRGRGGPHRGRGRPRSLLSLPRAQASWTPQLSTGLTSPPVPCLPSQGEAPAEMGALLLEKETRGATERVHGSLGDTPRSEETLPKATPDSLEPAGPSSPASVTVTVGDEGADTPVGATPLIGDESENLEGDGDLRGGRILLGHATKSFPSSPSKGGSCPSRAKMSMTGAGKSPPSVQSLAMRLLSMPGAQGAAAAGSEPPPATTSPEGQPKVHRARKTMSKPGNGQPPVPEKRPPEIQHFRMSDDVHSLGKVTSDLAKRRKLNSGGGLSEELGSARRSGEVTLTKGDPGSLEEWETVVGDDFSLYYDSYSVDERVDSDSKSEVEALTEQLSEEEEEEEEEEEEEEEEEEEEEEEEDEESGNQSDRSGSSGRRKAKKKWRKDSPWVKPSRKRRKREPPRAKEPRGVNGVGSSGPSEYMEVPLGSLELPSEGTLSPNHAGVSNDTSSLETERGFEELPLCSCRMEAPKIDRISERAGHKCMATESVDGELSGCNAAILKRETMRPSSRVALMVLCETHRARMVKHHCCPGCGYFCTAGTFLECHPDFRVAHRFHKACVSQLNGMVFCPHCGEDASEAQEVTIPRGDGVTPPAGTAAPAPPPLSQDVPGRADTSQPSARMRGHGEPRRPPCDPLADTIDSSGPSLTLPNGGCLSAVGLPLGPGREALEKALVIQESERRKKLRFHPRQLYLSVKQGELQKVILMLLDNLDPNFQSDQQSKRTPLHAAAQKGSVEICHVLLQAGANINAVDKQQRTPLMEAVVNNHLEVARYMVQRGGCVYSKEEDGSTCLHHAAKIGNLEMVSLLLSTGQVDVNAQDSGGWTPIIWAAEHKHIEVIRMLLTRGADVTLTDNEENICLHWASFTGSAAIAEVLLNARCDLHAVNYHGDTPLHIAARESYHDCVLLFLSRGANPELRNKEGDTAWDLTPERSDVWFALQLNRKLRLGVGNRAIRTEKIICRDVARGYENVPIPCVNGVDGEPCPEDYKYISENCETSTMNIDRNITHLQHCTCVDDCSSSNCLCGQLSIRCWYDKDGRLLQEFNKIEPPLIFECNQACSCWRNCKNRVVQSGIKVRLQLYRTAKMGWGVRALQTIPQGTFICEYVGELISDAEADVREDDSYLFDLDNKDGEVYCIDARYYGNISRFINHLCDPNIIPVRVFMLHQDLRFPRIAFFSSRDIRTGEELGFDYGDRFWDIKSKYFTCQCGSEKCKHSAEAIALEQSRLARLDPHPELLPELGSLPPVNT

SEQ ID NO: 4667 - protein, 298 aa, Homo Sapiens
  misc_feature (1)..(1): Xaa can be any naturally occurring amino acid
XSKRTPLHAAAQKGSVEICHVLLQAGANINAVDKQQRTPLMEAVVNNHLEVARYMVQRGGCVYSKEEDGSTCLHHAAKIGNLEMVSLLLSTGQVDVNAQGQLPPPSLPSHPQDSGGWTPIIWAAEHKHIEVIRMLLTRGADVTLTDNEENICLHWASFTGSAAIAEVLLNARCDLHAVNYHGDTPLHIAARESYHDCVLLFLSRGANPELRNKEGDTAWDLTPERSDVWFALQLNRKLRLGVGNRAIRTEKIICRDVARGYENVPIPCVNGVDGEPCPEDYKYISENCETSTMNIDRN

SEQ ID NO: 4668 - protein, 81 aa, Homo Sapiens
MQGGNSGVRKREEEGDGAGAVAAPPAIDFPAEGPDPEYDEMWSCCVSQAGLERLASSDSPASAFQNAGIIDNLMFQQKSRC

SEQ ID NO: 4669 - protein, 164 aa, Homo Sapiens
MQGGNSGVRKREEEGDGAGAVAAPPAIDFPAEGPDPEYDESDVPAEIQVLKEPLQQPTFPFAVANQLLLVSLLEHLSHVHEPNPLRSRQVFKLLCQTFIKMGLLSSFTCSDEFSSLRLHHNRAITHLMRSAKERVRQDPCEDISRIQKIRDEKFHFSPSFPNQH

SEQ ID NO: 4670 - protein, 630 aa, Homo Sapiens
MQGGNSGVRKREEEGDGAGAVAAPPAIDFPAEGPDPEYDESDVPAEIQVLKEPLQQPTFPFAVANQLLLVSLLEHLSHVHEPNPLRSRQVFKLLCQTFIKMGLLSSFTCSDEFSSLRLHHNRAITHLMRSAKERVRQDPCEDISRIQKIRSREVALEAQTSRYLNEFEELAILGKGGYGRVYKVRNKLDGQYYAIKKILIKGATKTVCMKVLREVKVLAGLQHPNIVGYHTAWIEHVHVIQPRADRAAIELPSLEVLSDQEEDREQCGVKNDESSSSSIIFAEPTPEKEKRFGESDTENQNNKSVKYTTNLVIRESGELESTLELQENGLAGLSASSIVEQQLPLRRNSHLEESFTSTEESSEENVNFLGQTEAQYHLMLHIQMQLCELSLWDWIVERNKRGREYVDESACPYVMANVATKIFQELVEGVFYIHNMGIVHRDLKPRNIFLHGPDQQVKIGDFGLACTDILQKNTDWTNRNGKRTPTHTSRVGTCLYASPEQLEGSEYDAKSDMYSLGVVLLELFQPFGTEMERAEVLTGLRTGQLPESLRKRCPVQAKYIQHLTRRNSSQRPSAIQLLQSELFQNSGNVNLTLQMKIIEQEKEIAELKKQLNLLSQDKGVRDDGKDGGVG

SEQ ID NO: 4671 - protein, 72 aa, Homo Sapiens
  misc_feature (1)..(1): Xaa can be any naturally occurring amino acid
XLAGLTPLGVAAVASAGTGGICWCSQRGAEGWGPTPQRRPVNLTLQMKIIEQEKEIAELKKQLNLLSQDKGA

SEQ ID NO: 4672 - protein, 267 aa, Homo Sapiens
MTLGRRLACLFLACVLPALLLGGTALASEIVGGRRARPHAWPFMVSLQLRGGHFCGATLIAPNFVMSAAHCVANVNVRAVRVVLGAHNLSRREPTRQVFAVQRIFENGYDPVNLLNDIVILQLNGSATINANVQVAQLPAQGRRLGNGVQCLAMGWGLLGRNRGIASVLQELNVTVVTSLCRRSNVCTLVRGRQAGVCFGDSGSPLVCNGLIHGIASFVRGGCASGLYPDAFAPVAQFVNWIDSIIQRSEDNPCPHPRDPDPASRTH

SEQ ID NO: 4673 - protein, 267 aa, Homo Sapiens; identical to SEQ ID NO: 4672

SEQ ID NO: 4674 - protein, 152 aa, Homo Sapiens [sequence omitted]

SEQ ID NO: 4675 - protein, 700 aa, Homo Sapiens
MAGLTAAAPRPGVLLLLLSILHPSRPGGVPGAIPGGVPGGVFYPALGPGGKPLKPVPGGLAGAGLGAGLGAFPAVTFPGALVPGGVADAAAAYKAAKAGAGLGGVPGVGGLGVSAAPSVPGAVVPQPGAGVKPGKVPGVGLPGVYPGGVLPGARFPGVGVLPGVPTGAGVKPKAPGVGGAFAGIPGVGPFGGPQPGVPLGYPIKAPKLPGGYGLPYTTGKLPYGYGPGGVAGAAGKAGYPTGTGVGPQAAAAAAAKAAAKFGAGAAGVLPGVGGAGVPGVPGAIPGIGGIAGVGTPAAAAAAAAAAKAAKYGAAAGLVPGGPGFGPGVVGVPGAGVPGVGVPGAGIPVVPGAGIPGAAVPGVVSPEAAAKAAAKAAKYGARPGVGVGGIPTYGVGAGGFPGFGVGVGGIPGVAGVPGVGGVPGVGGVPGVGISPEAQAAAAAKAAKYGLVPGVGVAPGVGVAPGVGVAPGVGLAPGVGVAPGVGVAPGVGVAPGIGPGGVAAAAKSAAKVAAKAQLRAAAGLGAGIPGLGVGVGVPGLGVGAGVPGLGVGAGVPGFGAVPGALAAAKAAKYGAAVPGVLGGLGALGGVGIPGGVVGAGPAAAAAAAKAAAKAAQFGLVGAAGLGGLGVGGLGVPGVGGLGGIPPAAAAKAAKYGAAGLGGVLGGAGQFPLGGVAARPGFGLSPIFPGGACLGKACGRKRK

SEQ ID NO: 4676 - protein, 677 aa, Homo Sapiens
MAGLTAAAPRPGVLLLLLSILHPSRPGGVPGAIPGGVPGGVFYPALGPGGKPLKPVPGGLAGAGLGAGLGAFPAVTFPGALVPGGVADAAAAYKAAKAGAGLGGVPGVGGLGVSAGAVVPQPGAGVKPGKVPGVGLPGVYPGGVLPGARFPGVGVLPGVPTGAGVKPKAPGVGGAFAGIPGVGPFGGPQPGVPLGYPIKAPKLPGGYGLPYTTGKLPYGYGPGGVAGAAGKAGYPTGTGVGPQAAAAAAAKAAAKFGAGAAGVLPGVGGAGVPGVPGAIPGIGGIAGVGTPAAAAAAAAAAKAAKYGAAAGLVPGGPGFGPGVVGVPGAGVPGVGVPGAGIPVVPGAGIPGAAVPGVVSPEAAAKAAAKAAKYGARPGVGVGGIPTYGVGAGGFPGFGVGVGGIPGVAGVPGVGGVPGVGGVPGVGISPEAQAAAAAKAAKYGLVPGVGVAPGVGVAPGVGVAPGVGLAPGVGVAPGVGVAPGVGVAPGIGPGGVAAAAKSAAKVAAKAQLRAAAGLGAGIPGLGVGVGVPGLGVGAGVPGLGVGAGVPGFGAVPGALAAAKAAKYGAAVPGVLGGLGALGGVGIPGGVVGAGPAAAAAAAKAAAKAAQFGLVGAAGLGGLGVGGLGVPGVGGLGGIPPAAAAKAAKYGVAARPGFGLSPIFPGGACLGKACGRKRK

SEQ ID NO: 4677 - protein, 714 aa, Homo Sapiens
MAGLTAAAPRPGVLLLLLSILHPSRPGGVPGAIPGGVPGGVFYPALGPGGKPLKPVPGGLAGAGLGAGLGAFPAVTFPGALVPGGVADAAAAYKAAKAGAGLGGVPGVGGLGVSAGAVVPQPGAGVKPGKVPGVGLPGVYPGGVLPGARFPGVGVLPGVPTGAGVKPKAPGVGGAFAGIPGVGPFGGPQPGVPLGYPIKAPKLPGGYGLPYTTGKLPYGYGPGGVAGAAGKAGYPTGTGVGPQAAAAAAAKAAAKFGAGAAGVLPGVGGAGVPGVPGAIPGIGGIAGVGTPAAAAAAAAAAKAAKYGAAAGLVPGGPGFGPGVVGVPGAGVPGVGVPGAGIPVVPGAGIPGAAVPGVVSPEAAAKAAAKAAKYGARPGVGVGGIPTYGVGAGGFPGFGVGVGGIPGVAGVPGVGGVPGVGGVPGVGISPEAQAAAAAKAAKYGVGTPAAAAAKAAAKAAQFGLVPGVGVAPGVGVAPGVGVAPGVGLAPGVGVAPGVGVAPGVGVAPGIGPGGVAAAAKSAAKVAAKAQLRAAAGLGAGIPGLGVGVGVPGLGVGAGVPGLGVGAGVPGFGAVPGALAAAKAAKYGAAVPGVLGGLGALGGVGIPGGVVGAGPAAAAAAAKAAAKAAQFGLVGAAGLGGLGVGGLGVPGVGGLGGIPPAAAAKAAKYGAAGLGGVLGGAGQFPLGGVAARPGFGLSPIFPGGACLGKACGRKRK

SEQ ID NO: 4678 - protein, 617 aa, Homo Sapiens
MAGLTAAAPRPGVLLLLLSILHPSRPGGVPGAIPGGVPGGVFYPALGPGGKPLKPVPGGLAGAGLGAGLGAFPAVTFPGALVPGGVADAAAAYKAAKAGAGLGGVPGVGGLGVSAGAVVPQPGAGVKPGKVPGVGLPGVYPGGVLPGVGPFGGPQPGVPLGYPIKAPKLPGGYGLPYTTGKLPYGYGPGGVAGAAGKAGYPTGTGVGPQAAAAAAAKAAAKFGAGAAGVLPGVGGAGVPGVPGAIPGIGGIAGVGTPAAAAAAAAAAKAAKYGAAAGLVPGGPGFGPGVVGVPGAGVPGVGVPGAGIPVVPGAGIPGAAVPGVVSPEAAAKAAAKAAKYGARPGVGVGGIPTYGVGAGGFPGFGVGVGAEAQAAAAAKAAKYGLVPGVGVAPGVGVAPGVGVAPGVGLAPGVGVAPGVGVAPGVGVAPGIGPGGVAAAAKSAAKVAAKAQLRAAAGLGAGIPGLGVGVGVPGLGVGAGVPGLGVGAGVPGFGAVPGALAAAKAAKYGAAVPGVLGGLGALGGVGIPGGVVGAGPAAAAAAAKAAAKAAQFGLVGAAGLGGLGVGGLGVPGVGGLGGIPPAAAAKAAKYGVAARPGFGLSPIFPGGACLGKACGRKRK

SEQ ID NO: 4679 - protein, 294 aa, Homo Sapiens
MAGLTAAAPRPGVLLLLLSILHPSRPGGVPGAIPGGVPGGVFYPGAGLGALGGGALGPGGKPLKPGLGAFPAVTFPGALVPGGVADAAAAYKAAKAGAGLGGVPGVGGLGVSAGAVVPQPGAGVKPGKVPGVGLPGVYPGGVLPGARFPGVGVLPGVPTGAGVKPKAPGVGPFGGPQPGVPLGYPIKAPKLPGGYGLPYTTGKLPYGYGPGGVAGAAGKAGYPTGTGVGPQAAAAAAAKAAAKFGAGAAGVLPGVGGAGVPGVPGAIPGIGGIAGVGTPAAAAAAAAAAKAAKY

SEQ ID NO: 4680 - protein, 643 aa, Homo Sapiens
MAGLTAAAPRPGVLLLLLSILHPSRPGGVPGAIPGGVPGGVFYPGAGLGALGGGALGPGGKPLKPGLGAFPAVTFPGALVPGGVADAAAAYKAAKAGAGLGGVPGVGGLGVSAGAVVPQPGAGVKPGKVPGVGLPGVYPGGVLPGARFPGVGVLPGVPTGAGVKPKAPGVGPFGGPQPGVPLGYPIKAPKLPGYGPGGVAGAAGKAGYPTGTGVGPQAAAAAAAKAAAKFGAGAAGVLPGVGGAGVPGVPGAIPGIGGIAGVGTPAAAAAAAAAAKAAKYGAAAGLVPGGPGFGPGVVGVPGAGVPGVGVPGAGIPVVPGAGIPGAAVPGVVSPEAAAKAAAKAAKYGARPGVGVGGIPTYGVGAGGFPGFGVGVGAEAQAAAAAKAAKYGLVPGVGVAPGVGVAPGVGVAPGVGLAPGVGVAPGVGVAPGVGVAPGIGPGGVAAAAKSAAKVAAKAQLRAAAGLGAGIPGLGVGVGVPGLGVGAGVPGLGVGAGVPGFGAVPGALAAAKAAKYGAAVPGVLGGLGALGGVGIPGGVVGAGPAAAAAAAKAAAKAAQFGLVGAAGLGGLGVGGLGVPGVGGLGGIPPAAAAKAAKYGAAGLGGVLGGAGQFPLGGVAARPGFGLSPIFPGGACLGKACGRKRK

SEQ ID NO: 4681 - protein, 168 aa, Homo Sapiens
MAGLTAAAPRPGVLLLLLSILHPSRPGGVPGAIPGGVPGGVFYPGAGLGALGGGALGPGGKPLKPGVGPFGGPQPGVPLGYPIKAPKLPGYGPGGVAGAAGKAGYPTGTGVGPQAAAAAAAKAAAKFGAGAAGVLPGVGGAGVPGVPGAIPGIGGIAGVGTPAAAAAA

SEQ ID NO: 4682 - protein, 711 aa, Homo Sapiens
MAGLTAAAPRPGVLLLLLSILHPSRPGGVPGAIPGGVPGGVFYPGAGLGALGGGALGPGGKPLKPVPGGLAGAGLGAGLGAFPAVTFPGALVPGGVADAAAAYKAAKAGAGLGGVPGVGGLGVSAAPSVPGAVVPQPGAGVKPGKVPGVGLPGVYPGGVLPGARFPGVGVLPGVPTGAGVKPKAPGVGGAFAGIPGVGPFGGPQPGVPLGYPIKAPKLPGGYGLPYTTGKLPYGYGPGGVAGAAGKAGYPTGTGVGPQAAAAAAAKAAAKFGAGAAGVLPGVGGAGVPGVPGAIPGIGGIAGVGTPAAAAAAAAAAKAAKYGAAAGLVPGGPGFGPGVVGVPGAGVPGVGVPGAGIPVVPGAGIPGAAVPGVVSPEAAAKAAAKAAKYGARPGVGVGGIPTYGVGAGGFPGFGVGVGGIPGVAGVPGVGGVPGVGGVPGVGISPEAQAAAAAKAAKYGVGTPAAAAAKAAAKAAQFGLVPGVGVAPGVGVAPGVGVAPGVGLAPGVGVAPGVGVAPGVGVAPGIGPGGVAAAAKSAAKVAAKAQLRAAAGLGAGIPGLGVGVGVPGLGVGAGVPGLGVGAGVPGFGAVPGALAAAKAAKYGAAVPGVLGGLGALGGVGIPGGVVGAGPAAAAAAAKAAAKAAQFGLVGAAGLGGLGVGGLGVPGVGGLGGIPPAAAAKAAKYGVAARPGFGLSPIFPGGACLGKACGRKRK

SEQ ID NO: 4683 - protein, 692 aa, Homo Sapiens
MAGLTAAAPRPGVLLLLLSILHPSRPGGVPGAIPGGVPGGVFYPGAGLGALGGGALGPGGKPLKPVPGGLAGAGLGAGLGAFPAVTFPGALVPGGVADAAAAYKAAKAGAGLGGVPGVGGLGVSAAPSVPGAVVPQPGAGVKPGKVPGVGLPGVYPGGVLPGARFPGVGVLPGVPTGAGVKPKAPGVGGAFAGIPGVGPFGGPQPGVPLGYPIKAPKLPGGYGLPYTTGKLPYGYGPGGVAGAAGKAGYPTGTGVGPQAAAAAAAKAAAKFGAGAAGVLPGVGGAGVPGVPGAIPGIGGIAGVGTPAAAAAAAAAAKAAKYGAAAGLVPGGPGFGPGVVGVPGAGVPGVGVPGAGIPVVPGAGIPGAAVPGVVSPEAAAKAAAKAAKYGARPGVGVGGIPTYGVGAGGFPGFGVGVGGIPGVAGVPGVGGVPGVGGVPGVGISPEAQAAAAAKAAKYGLVPGVGVAPGVGVAPGVGVAPGVGLAPGVGVAPGVGVAPGVGVAPGIGPGGVAAAAKSAAKVAAKAQLRAAAGLGAGIPGLGVGVGVPGLGVGAGVPGLGVGAGVPGFGAVPGALAAAKAAKYGAAVPGVLGGLGALGGVGIPGGVVGAGPAAAAAAAKAAAKAAQFGLVGAAGLGGLGVGGLGVPGVGGLGGIPPAAAAKAAKYGVAARPGFGLSPIFPGGACLGKACGRKRK

SEQ ID NO: 4684 - protein, 176 aa, Homo Sapiens
MAGLTAAAPRPGVLLLLLSILHPSRPGGVPGAIPGGVPGGVFYPGAGLGALGGGALGPGGKPLKPVPGGLAGAGLGAGLGAFPAVTFPGALVPGGVADAAAAYKAAKAGAGLGGVPGVGGLGVSAGAVVPQPGAGVKPGKVPGVGGAFAGIPGVGPFGGPQPGVPLGYPIKAPKLP

SEQ ID NO: 4685 - protein, 724 aa, Homo Sapiens
MAGLTAAAPRPGVLLLLLSILHPSRPGGVPGAIPGGVPGGVFYPGAGLGALGGGALGPGGKPLKPVPGGLAGAGLGAGLGAFPAVTFPGALVPGGVADAAAAYKAAKAGAGLGGVPGVGGLGVSAGAVVPQPGAGVKPGKVPGVGLPGVYPGGVLPGARFPGVGVLPGVPTGAGVKPKAPGVGGAFAGIPGVGPFGGPQPGVPLGYPIKAPKLPGGYGLPYTTGKLPYGYGPGGVAGAAGKAGYPTGTGVGPQAAAAAAAKAAAKFGAGAAGVLPGVGGAGVPGVPGAIPGIGGIAGVGTPAAAAAAAAAAKAAKYGAAAGLVPGGPGFGPGVVGVPGAGVPGVGVPGAGIPVVPGAGIPGAAVPGVVSPEAAAKAAAKAAKYGARPGVGVGGIPTYGVGAGGFPGFGVGVGGIPGVAGVPGVGGVPGVGGVPGVGISPEAQAAAAAKAAKYGVGTPAAAAAKAAAKAAQFGLVPGVGVAPGVGVAPGVGVAPGVGLAPGVGVAPGVGVAPGVGVAPGIGPGGVAAAAKSAAKVAAKAQLRAAAGLGAGIPGLGVGVGVPGLGVGAGVPGLGVGAGVPGFGAVPGALAAAKAAKYGAAVPGVLGGLGALGGVGIPGGVVGAGPAAAAAAAKAAAKAAQFGLVGAAGLGGLGVGGLGVPGVGGLGGIPPAAAAKAAKYGAAGLGGVLGGAGQFPLGGVAARPGFGLSPIFPGGACLGKACGRKRK

SEQ ID NO: 4686 - protein, 757 aa, Homo Sapiens
MAGLTAAAPRPGVLLLLLSILHPSRPGGVPGAIPGGVPGGVFYPGAGLGALGGGALGPGGKPLKPVPGGLAGAGLGAGLGAFPAVTFPGALVPGGVADAAAAYKAAKAGAGLGGVPGVGGLGVSAGAVVPQPGAGVKPGKVPGVGLPGVYPGGVLPGARFPGVGVLPGVPTGAGVKPKAPGVGGAFAGIPGVGPFGGPQPGVPLGYPIKAPKLPGGYGLPYTTGKLPYGYGPGGVAGAAGKAGYPTGTGVGPQAAAAAAAKAAAKFGAGAAGVLPGVGGAGVPGVPGAIPGIGGIAGVGTPAAAAAAAAAAKAAKYGAAAGLVPGGPGFGPGVVGVPGAGVPGVGVPGAGIPVVPGAGIPGAAVPGVVSPEAAAKAAAKAAKYGARPGVGVGGIPTYGVGAGGFPGFGVGVGGIPGVAGVPGVGGVPGVGGVPGVGISPEAQAAAAAKAAKYGVGTPAAAAAKAAAKAAQFGLVPGVGVAPGVGVAPGVGVAPGVGLAPGVGVAPGVGVAPGVGVAPGIGPGGVAAAAKSAAKVAAKAQLRAAAGLGAGIPGLGVGVGVPGLGVGAGVPGLGVGAGVPGFGAGADEGVRRSLSPELREGDPSSSQHLPSTPSSPRVPGALAAAKAAKYGAAVPGVLGGLGALGGVGIPGGVVGAGPAAAAAAAKAAAKAAQFGLVGAAGLGGLGVGGLGVPGVGGLGGIPPAAAAKAAKYGAAGLGGVLGGAGQFPLGGVAARPGFGLSPIFPGGACLGKACGRKRK

SEQ ID NO: 4687 - protein, 786 aa, Homo Sapiens
MAGLTAAAPRPGVLLLLLSILHPSRPGGVPGAIPGGVPGGVFYPGAGLGALGGGALGPGGKPLKPVPGGLAGAGLGAGLGAFPAVTFPGALVPGGVADAAAAYKAAKAGAGLGGVPGVGGLGVSAGAVVPQPGAGVKPGKVPGVGLPGVYPGGVLPGARFPGVGVLPGVPTGAGVKPKAPGVGGAFAGIPGVGPFGGPQPGVPLGYPIKAPKLPGGYGLPYTTGKLPYGYGPGGVAGAAGKAGYPTGTGVGPQAAAAAAAKAAAKFGAGAAGVLPGVGGAGVPGVPGAIPGIGGIAGVGTPAAAAAAAAAAKAAKYGAAAGLVPGGPGFGPGVVGVPGAGVPGVGVPGAGIPVVPGAGIPGAAVPGVVSPEAAAKAAAKAAKYGARPGVGVGGIPTYGVGAGGFPGFGVGVGGIPGVAGVPGVGGVPGVGGVPGVGISPEAQAAAAAKAAKYGAAGAGVLGGLVPGAPGAVPGVPGTGGVPGVGTPAAAAAKAAAKAAQFGLVPGVGVAPGVGVAPGVGVAPGVGLAPGVGVAPGVGVAPGVGVAPGIGPGGVAAAAKSAAKVAAKAQLRAAAGLGAGIPGLGVGVGVPGLGVGAGVPGLGVGAGVPGFGAGADEGVRRSLSPELREGDPSSSQHLPSTPSSPRVPGALAAAKAAKYGAAVPGVLGGLGALGGVGIPGGVVGAGPAAAAAAAKAAAKAAQFGLVGAAGLGGLGVGGLGVPGVGGLGGIPPAAAAKAAKYGAAGLGGVLGGAGQFPLGGVAARPGFGLSPIFPGGACLGKACGRKRK

SEQ ID NO: 4688 - protein, 706 aa, Homo Sapiens
MAGLTAAAPRPGVLLLLLSILHPSRPGGVPGAIPGGVPGGVFYPGAGLGALGGGALGPGGKPLKPVPGGLAGAGLGAGLGAFPAVTFPGALVPGGVADAAAAYKAAKAGAGLGGVPGVGGLGVSAGAVVPQPGAGVKPGKVPGVGLPGVYPGGVLPGARFPGVGVLPGVPTGAGVKPKAPGVGGAFAGIPGVGPFGGPQPGVPLGYPIKAPKLPGGYGLPYTTGKLPYGYGPGGVAGAAGKAGYPTGTGVGPQAAAAAAAKAAAKFGAGAAGVLPGVGGAGVPGVPGAIPGIGGIAGVGTPAAAAAAAAAAKAAKYGAAAGLVPGGPGFGPGVVGVPGAGVPGVGVPGAGIPVVPGAGIPGAAVPGVVSPEAAAKAAAKAAKYGARPGVGVGGIPTYGVGAGGFPGFGVGVGGIPGVAGVPGVGGVPGVGGVPGVGISPEAQAAAAAKAAKYGVGTPAAAAAKAAAKAAQFGLVPGVGVAPGVGVAPGVGVAPGVGLAPGVGVAPGVGVAPGVGVAPGIGPGGVAAAAKSAAKVAAKAQLRAAAGLGAGIPGLGVGVGVPGLGVGAGVPGLGVGAGVPGFGAVPGALAAAKAAKYGAAVPGVLGGLGALGGVGIPGGVVGAGPAAAAAAAKAAAKAAQFGLVGAAGLGGLGVGGLGVPGVGGLGGIPPAAAAKAAKYGVAARPGFGLSPIFPGGACLGKACGRKRK

SEQ ID NO: 4689 - protein, 730 aa, Homo Sapiens
MAGLTAAAPRPGVLLLLLSILHPSRPGGVPGAIPGGVPGGVFYPGAGLGALGGGALGPGGKPLKPVPGGLAGAGLGAGLGAFPAVTFPGALVPGGVADAAAAYKAAKAGAGLGGVPGVGGLGVSAGAVVPQPGAGVKPGKVPGVGLPGVYPGGVLPGARFPGVGVLPGVPTGAGVKPKAPGVGGAFAGIPGVGPFGGPQPGVPLGYPIKAPKLPGGYGLPYTTGKLPYGYGPGGVAGAAGKAGYPTGTGVGPQAAAAAAAKAAAKFGAGAAGVLPGVGGAGVPGVPGAIPGIGGIAGVGTPAAAAAAAAAAKAAKYGAAAGLVPGGPGFGPGVVGVPGAGVPGVGVPGAGIPVVPGAGIPGAAVPGVVSPEAAAKAAAKAAKYGARPGVGVGGIPTYGVGAGGFPGFGVGVGGIPGVAGVPGVGGVPGVGGVPGVGISPEAQAAAAAKAAKYGVGTPAAAAAKAAAKAAQFALLNLAGLVPGVGVAPGVGVAPGVGVAPGVGLAPGVGVAPGVGVAPGVGVAPGIGPGGVAAAAKSAAKVAAKAQLRAAAGLGAGIPGLGVGVGVPGLGVGAGVPGLGVGAGVPGFGAVPGALAAAKAAKYGAAVPGVLGGLGALGGVGIPGGVVGAGPAAAAAAAKAAAKAAQFGLVGAAGLGGLGVGGLGVPGVGGLGGIPPAAAAKAAKYGAAGLGGVLGGAGQFPLGGVAARPGFGLSPIFPGGACLGKACGRKRK

SEQ ID NO: 4690 - protein, 705 aa, Homo Sapiens
MAGLTAAAPRPGVLLLLLSILHPSRPGGVPGAIPGGVPGGVFYPGAGLGALGGGALGPGGKPLKPVPGGLAGAGLGAGLGAFPAVTFPGALVPGGVADAAAAYKAAKAGAGLGGVPGVGGLGVSAGAVVPQPGAGVKPGKVPGVGLPGVYPGGVLPGARFPGVGVLPGVPTGAGVKPKAPGVGGAFAGIPGVGPFGGPQPGVPLGYPIKAPKLPGGYGLPYTTGKLPYGYGPGGVAGAAGKAGYPTGTGVGPQAAAAAAAKAAAKFGAGAAGVLPGVGGAGVPGVPGAIPGIGGIAGVGTPAAAAAAAAAAKAAKYGAAAGLVPGGPGFGPGVVGVPGAGVPGVGVPGAGIPVVPGAGIPGAAVPGVVSPEAAAKAAAKAAKYGARPGVGVGGIPTYGVGAGGFPGFGVGVGGIPGVAGVPGVGGVPGVGGVPGVGISPEAQAAAAAKAAKYGLVPGVGVAPGVGVAPGVGVAPGVGLAPGVGVAPGVGVAPGVGVAPGIGPGGVAAAAKSAAKVAAKAQLRAAAGLGAGIPGLGVGVGVPGLGVGAGVPGLGVGAGVPGFGAVPGALAAAKAAKYGAAVPGVLGGLGALGGVGIPGGVVGAGPAAAAAAAKAAAKAAQFGLVGAAGLGGLGVGGLGVPGVGGLGGIPPAAAAKAAKYGAAGLGGVLGGAGQFPLGGVAARPGFGLSPIFPGGACLGKACGRKRK

SEQ ID NO: 4691 - protein, 658 aa, Homo Sapiens
MAGLTAAAPRPGVLLLLLSILHPSRPGGVPGAIPGGVPGGVFYPGAGLGALGGGALGPGGKPLKPVPGGLAGAGLGAGLGAFPAVTFPGALVPGGVADAAAAYKAAKAGAGLGGVPGVGGLGVSAGAVVPQPGAGVKPGKVPGVGLPGVYPGGVLPGARFPGVGVLPGVPTGAGVKPKAPGVGGAFAGIPGVGPFGGPQPGVPLGYPIKAPKLPGYGPGGVAGAAGKAGYPTGTGVGPQAAAAAAAKAAAKFGAGAAGVLPGVGGAGVPGVPGAIPGIGGIAGVGTPAAAAAAAAAAKAAKYGAAAGLVPGGPGFGPGVVGVPGAGVPGVGVPGAGIPVVPGAGIPGAAVPGVVSPEAAAKAAAKAAKYGARPGVGVGGIPTYGVGAGGFPGFGVGVGGIPGVAGVPGVGGVPGVGGVPGVGISPEAQAAAAAKAAKYGLVPGVGVAPGVGVAPGVGVAPGVGLAPGVGVAPGVGVAPGVGVAPGIGPGGVAGAAAGLGAGIPGLGVGVGVPGLGVGAGVPGLGVGAGVPGFGAVPGALAAAKAAKYGAAVPGVLGGLGALGGVGIPGGVVGAGPAAAAAAAKAAAKAAQFGLVGAAGLGGLGVGGLGVPGVGGLGGIPPAAAAKAAKYGVAARPGFGLSPIFPGGACLGKACGRKRK

SEQ ID NO: 4692 - protein, 214 aa, Homo Sapiens
MAGLTAAAPRPGVLLLLLSILHPSRPGGVPGAIPGGVPGGVFYPGAGLGALGGGALGPGGKPLKPVPGGLAGAGLGAGLGAFPAVTFPGALVPGGVADAAAAYKAAKAGAGLGGVPGVGGLGVSAGAVVPQPGAGVKPGKVPGVGLPGVYPGGVLPGVGPFGGPQPGVPLGYPIKAPKLPGGYGLPYTTGKLPYGYGPGGVAGAAGKAGYPTGT

SEQ ID NO: 4693 - protein, 167 aa, Homo Sapiens [sequence omitted]

SEQ ID NO: 4694 - protein, 570 aa, Homo Sapiens
MAGLTAAAPRPGVLLLLLSILHPSRPGGVPGAIPGGVPGGVFYPGAGLGALGGGALGPGGKPLKPVPGGLAGAGLGAGVGGAFAGIPGVGPFGGPQPGVPLGYPIKAPKLPGYGPGGVAGAAGKAGYPTGTGVGPQAAAAAAAKAAAKFGAGAAGVLPGVGGAGVPGVPGAIPGIGGIAGVGTPAAAAAAAAAAKAAKYGAAAGLVPGGPGFGPGVVGVPGAGVPGVGVPGAGIPVVPGAGIPGAAVPGVVSPEAAAKAAAKAAKYGARPGVGVGGIPTYGVGAGGFPGFGVGVGGIPGVAGVPGVGGVPGVGGVPGVGISPEAQAAAAAKAAKYGLVPGVGVAPGVGVAPGVGVAPGVGLAPGVGVAPGVGVAPGVGVAPGIGPGGVAAAAKSAAKVAAKAQLRAAAGLGAGIPGLGVGVGVPGLGVGAGVPGLGVGAGVPGFGAVPGALAAAKAAKYGAAVPGVLGGLGALGGVGIPGGVVGAGPAAAAAAAKAAAKAAQFGLVGAAGLGGLGVGGLGVPGVGGLGGIPPAAAAKAAKYGVAARPGFGLSPIFPGGACLGKACGRKRK

SEQ ID NO: 4695 - protein, 68 aa, Homo Sapiens
MAGLTAAAPRPGVLLLLLSILHPSRPGGVPGAIPGGVPGGVFYPGNVHETSTHPGHADDADVHNRCTF

SEQ ID NO: 4696 - protein, 60 aa, Homo Sapiens
VTFPGALVPGGVADAAAAYKAAKAGAGLGGVPGVGGLGVSAGAVVPQPGAGVKPGKVPAL

SEQ ID NO: 4697 - protein, 47 aa, Homo Sapiens
DEEELLTSTGFEYQQVAFQPSILTEPPTEDHLLQNTLWPEVQKLASF

SEQ ID NO: 4698 - protein, 57 aa, Homo Sapiens
MCLQTLNFGNGFALALCLSFLPNTDVPILACGNDDCRIHIFAQQNDQFQKVLSLCGH

SEQ ID NO: 4699 - protein, 120 aa, Homo Sapiens
MVAPVLETSHVFCCPNRVRGVLNWSSGPRGLLAFGTSCSVVLYDPLKRVVVTNLNGHTARVNCIQWICKQDGSPSTELVSGGSDNQVIHWEIEDNQAMKDLFMRCMLFTRGGHQILHYVH

SEQ ID NO: 4700 - protein, 101 aa, Homo Sapiens
MVAPVLETSHVFCCPNRVRGVLNWSSGPRGLLAFGTSCSVVLYDPLKRVVVTNLNGHTARVNCIQWICKQDGSPSTELVSGGSDNQVIHWEIEDNQIWARL

SEQ ID NO: 4701 - protein, 756 aa, Homo Sapiens
MVAPVLETSHVFCCPNRVRGVLNWSSGPRGLLAFGTSCSVVLYDPLKRVVVTNLNGHTARVNCIQWICKQDGSPSTELVSGGSDNQVIHWEIEDNQLLKAVHLQGHEGPVYAVHAVYQRRTSDPALCTLIVSAAADSAVRLWSKKGPEGRDLFLASCSQDCLIRIWKLYIKSTSLETQDDDNIRLKENTFTIENESVKIAFAVTLETVLAGHENWVNAVHWQPVFYKDGVLQQPVRLLSASMDKTMILWAPDEESGVWLEQVRVGEVGGNTLGFYDCQFNEDGSMIIAHAFHGALHLWKQNTVNPREWTPEIVISGHFDGVQDLVWDPEGEFIITVGTDQTTRLFAPWKRKDQSQVTWHEIARPQIHGYDLKCLAMINRFQFVSGADEKVLRVFSAPRNFVENFCAITGQSLNHVLCNQDSDLPEGATVPALGLSNKAVFQGDIASQPSDEEELLTSTGFEYQQVAFQPSILTEPPTEDHLLQNTLWPEVQKLYGHGYEIFCVTCNSSKTLLASACKAAKKEHAAIILWNTTSWKQVQNLVFHSLTVTQMAFSPNEKFLLAVSRDRTWSLWKKQDTISPEFEPVFSLFAFTNKITSVHSRIIWSCDWSPDSKYFFTGSRDKKVVVWGECDSTDDCIEHNIGPCSSVLDVGGAVTAVSVCPVLHPSQRYVVAVGLECGKICLYTWKKTDQVPEINDWTHCVETSQSQSHTLAIRKLCWKNCSGKTEQKEAEGAEWLHFASCGEDHTVKIHRVNKCAL

SEQ ID NO: 4702 - protein, 826 aa, Homo Sapiens
MVAPVLETSHVFCCPNRVRGVLNWSSGPRGLLAFGTSCSVVLYDPLKRVVVTNLNGHTARVNCIQWICKQDGSPSTELVSGGSDNQVIHWEIEDNQLLKAVHLQGHEGPVYAVHAVYQRRTSDPALCTLIVSAAADSAVRLWSKKGPEVMCLQTLNFGNGFALALCLSFLPNTDVPILACGNDDCRIHIFAQQNDQFQKVLSLCGHEDWIRGVEWAAFGRDLFLASCSQDCLIRIWKLYIKSTSLETQDDDNIRLKENTFTIENESVKIAFAVTLETVLAGHENWVNAVHWQPVFYKDGVLQQPVRLLSASMDKTMILWAPDEESGVWLEQVRVGEVGGNTLGFYDCQFNEDGSMIIAHAFHGALHLWKQNTVNPREWTPEIVISGHFDGVQDLVWDPEGEFIITVGTDQTTRLFAPWKRKDQSQVTWHEIARPQIHGYDLKCLAMINRFQFVSGADEKVLRVFSAPRNFVENFCAITGQSLNHVLCNQDSDLPEGATVPALGLSNKAVFQGDIASQPSDEEELLTSTGFEYQQVAFQPSILTEPPTEDHLLQNTLWPEVQKLYGHGYEIFCVTCNSSKTLLASACKAAKKEHAAIILWNTTSWKQVQNLVFHSLTVTQMAFSPNEKFLLAVSRDRTWSLWKKQDTISPEFEPVFSLFAFTNKITSVHSRIIWSCDWSPDSKYFFTGSRDKKVVVWGECDSTDDCIEHNIGPCSSVLDVGGAVTAVSVCPVLHPSQRYVVAVGLECGKICLYTWKKTDQVPEINDWTHCVETSQSQSHTLAIRKLCWKNCSGKTEQKEAEGAEWLHFASCGEDHTVKIHRVNKCAL

SEQ ID NO: 4703 - protein, 705 aa, Homo Sapiens
MVAPVLETSHVFCCPNRVRGVLNWSSGPRGLLAFGTSCSVVLYDPLKRVVVTNLNGHTARVNCIQWICKQDGSPSTELVSGGSDNQVIHWEIEDNQLLKAVHLQGHEGPVYAVHAVYQRRTSDPALCTLIVSAAADSAVRLWSKKGPEVMCLQTLNFGNGFALALCLSFLPNTDVPILACGNDDCRIHIFAQQNDQFQKVLSLCGHEDWIRGVEWAAFGRDLFLASCSQDCLIRIWKLYIKSTSLETQDDDNIRLKENTFTIENESVKIAFAVTLETVLAGHENWVNAVHWQPVFYKDGVLQQPVRLLSASMDKTMILWAPDEESGVWLEQVRVGEVGGNTLGFYDCQFNEDGSMIIAHAFHGALHLWKQNTVNPREWTPEIVISGHFDGVQDLVWDPEGEFIITVGTDQTTRLFAPWKRKDQSQVTWHEIARPQIHGYDLKCLAMINRFQFVSGADEKVLRVFSAPRNFVENFCAITGQSLNHVLCNQDSDLPEGATVPALGLSNKAVFQGDIASQPSDEEELLTSTGFEYQQVAFQPSILTEPPTEDHLLQNTLWPEVQKLYGHGYEIFCVTCNSSKTLLASACKAAKKEHAAIILWNTTSWKQVQNLVFHSLTVTQMAFSPNEKFLLAVSRDRTWSLWKKQDTISPEFVELFGLVIGVLTASISSLGVETKRWLSGVSATPLMTVLSTTLAPAPQSWTWVGL

SEQ ID NO: 4704 - protein, 891 aa, Homo Sapiens
MVAPVLETSHVFCCPNRVRGVLNWSSGPRGLLAFGTSCSVVLYDPLKRVVVTNLNGHTARVNCIQWICKQDGSPSTELVSGGSDNQVIHWEIEDNQLLKAVHLQGHEGPVYAVHAVYQRRTSDPALCTLIVSAAADSAVRLWSKKGPEVMCLQTLNFGNGFALALCLSFLPNTDVTWKTGQVERGRAWKPPASLALCSRSCDSMVSCYASILCKALWKEKLHTFWHHNRISFLPSAFRPIPILACGNDDCRIHIFAQQNDQFQKVLSLCGHEDWIRGVEWAAFGRDLFLASCSQDCLIRIWKLYIKSTSLETQDDDNIRLKENTFTIENESVKIAFAVTLETVLAGHENWVNAVHWQPVFYKDGVLQQPVRLLSASMDKTMILWAPDEESGVWLEQVRVGEVGGNTLGFYDCQFNEDGSMIIAHAFHGALHLWKQNTVNPREWTPEIVISGHFDGVQDLVWDPEGEFIITVGTDQTTRLFAPWKRKDQSQVTWHEIARPQIHGYDLKCLAMINRFQFVSGADEKVLRVFSAPRNFVENFCAITGQSLNHVLCNQDSDLPEGATVPALGLSNKAVFQGDIASQPSDEEELLTSTGFEYQQVAFQPSILTEPPTEDHLLQNTLWPEVQKLYGHGYEIFCVTCNSSKTLLASACKAAKKEHAAIILWNTTSWKQVQNLVFHSLTVTQMAFSPNEKFLLAVSRDRTWSLWKKQDTISPEFEPVFSLFAFTNKITSVHSRIIWSCDWSPDSKYFFTGSRDKKVVVWGECDSTDDCIEHNIGPCSSVLDVGGAVTAVSVCPVLHPSQRYVVAVGLECGKICLYTWKKTDQVPEINDWTHCVETSQSQSHTLAIRKLCWKNCSGKTEQKEAEGAEWLHFASCGEDHTVKIHRVNKCAL

SEQ ID NO: 4705 - protein, 800 aa, Homo Sapiens
MVAPVLETSHVFCCPNRVRGVLNWSSGPRGLLAFGTSCSVVLYDPLKRVVVTNLNGHTARVNCIQWICKQDGSPSTELVSGGSDNQVIHWEIEDNQLLKAVHLQGHEGPVYAVHAVYQRRTSDPALCTLIVSAAADSAVRLWSKKGPEVPILACGNDDCRIHIFAQQNDQFQKVLSLCGHEDWIRGVEWAAFGRDLFLASCSQDCLIRIWKLYIKSTSLETQDDDNIRLKENTFTIENESVKIAFAVTLETVLAGHENWVNAVHWQPVFYKDGVLQQPVRLLSASMDKTMILWAPDEESGVWLEQVRVGEVGGNTLGFYDCQFNEDGSMIIAHAFHGALHLWKQNTVNPREWTPEIVISGHFDGVQDLVWDPEGEFIITVGTDQTTRLFAPWKRKDQSQVTWHEIARPQIHGYDLKCLAMINRFQFVSGADEKVLRVFSAPRNFVENFCAITGQSLNHVLCNQDSDLPEGATVPALGLSNKAVFQGDIASQPSDEEELLTSTGFEYQQVAFQPSILTEPPTEDHLLQNTLWPEVQKLYGHGYEIFCVTCNSSKTLLASACKAAKKEHAAIILWNTTSWKQVQNLVFHSLTVTQMAFSPNEKFLLAVSRDRTWSLWKKQDTISPEFEPVFSLFAFTNKITSVHSRIIWSCDWSPDSKYFFTGSRDKKVVVWGECDSTDDCIEHNIGPCSSVLDVGGAVTAVSVCPVLHPSQRYVVAVGLECGKICLYTWKKTDQVPEINDWTHCVETSQSQSHTLAIRKLCWKNCSGKTEQKEAEGAEWLHFASCGEDHTVKIHRVNKCAL

SEQ ID NO: 4706 - protein, 756 aa, Homo Sapiens
MVAPVLETSHVFCCPNRVRGVLNWSSGPRGLLAFGTSCSVVLYDPLKRVVVTNLNGHTARVNCIQWICKQDGSPSTELVSGGSDNQVIHWEIEDNQLLKAVHLQGHEGPVYAVHAVYQRRTSDPALCTLIVSAAADSAVRLWSKKGPEVPILACGNDDCRIHIFAQQNDQFQKVLSLCGHEDWIRGVEWAAFGRDLFLASCSQDCLIRIWKLYIKSTSLETQDDDNIRLKENTFTIENESVKIAFAVTLETVLAGHENWVNAVHWQPVFYKDGVLQQPVRLLSASMDKTMILWAPDEESGVWLEQREWTPEIVISGHFDGVQDLVWDPEGEFIITVGTDQTTRLFAPWKRKDQSQVTWHEIARPQIHGYDLKCLAMINRFQFVSGADEKVLRVFSAPRNFVENFCAITGQSLNHVLCNQDSDLPEGATVPALGLSNKAVFQGDIASQPSDEEELLTSTGFEYQQVAFQPSILTEPPTEDHLLQNTLWPEVQKLYGHGYEIFCVTCNSSKTLLASACKAAKKEHAAIILWNTTSWKQVQNLVFHSLTVTQMAFSPNEKFLLAVSRDRTWSLWKKQDTISPEFEPVFSLFAFTNKITSVHSRIIWSCDWSPDSKYFFTGSRDKKVVVWGECDSTDDCIEHNIGPCSSVLDVGGAVTAVSVCPVLHPSQRYVVAVGLECGKICLYTWKKTDQVPEINDWTHCVETSQSQSHTLAIRKLCWKNCSGKTEQKEAEGAEWLHFASCGEDHTVKIHRVNKCAL

SEQ ID NO: 4707 - protein, 821 aa, Homo Sapiens
MVAPVLETSHVFCCPNRVRGVLNWSSGPRGLLAFGTSCSVVLYDPLKRVVVTNLNGHTARVNCIQWICKQDGSPSTELVSGGSDNQVIHWEIEDNQLLKAVHLQGHEGPVYAVHAVYQRRTSDPALCTLIVSAAADSAVRLWSKKGPEVTWKTGQVERGRAWKPPASLALCSRSCDSMVSCYASILCKALWKEKLHTFWHHNRISFLPSAFRPIPILACGNDDCRIHIFAQQNDQFQKVLSLCGHEDWIRGVEWAAFGRDLFLASCSQDCLIRIWKLYIKSTSLETQDDDNIRLKENTFTIENESVKIAFAVTLETVLAGHENWVNAVHWQPVFYKDGVLQQPVRLLSASMDKTMILWAPDEESGVWLEQREWTPEIVISGHFDGVQDLVWDPEGEFIITVGTDQTTRLFAPWKRKDQSQVTWHEIARPQIHGYDLKCLAMINRFQFVSGADEKVLRVFSAPRNFVENFCAITGQSLNHVLCNQDSDLPEGATVPALGLSNKAVFQGDIASQPSDEEELLTSTGFEYQQVAFQPSILTEPPTEDHLLQNTLWPEVQKLYGHGYEIFCVTCNSSKTLLASACKAAKKEHAAIILWNTTSWKQVQNLVFHSLTVTQMAFSPNEKFLLAVSRDRTWSLWKKQDTISPEFEPVFSLFAFTNKITSVHSRIIWSCDWSPDSKYFFTGSRDKKVVVWGECDSTDDCIEHNIGPCSSVLDVGGAVTAVSVCPVLHPSQRYVVAVGLECGKICLYTWKKTDQVPEINDWTHCVETSQSQSHTLAIRKLCWKNCSGKTEQKEAEGAEWLHFASCGEDHTVKIHRVNKCAL

SEQ ID NO: 4708 - protein, 51 aa, Homo Sapiens
MVAPVLETSHVFCCPNRVRGVLNWSSGPRGLLAFGTSCSVVLYDPLPLLLN

SEQ ID NO: 4709 - protein, 51 aa, Homo Sapiens; identical to SEQ ID NO: 4708

SEQ ID NO: 4710 - protein, 150 aa, Homo Sapiens
MTRWSSYLLGWTTFLLYSYESSGDYPRCIFPFIYRGKAYNSCISQGSFLGSLWCSVTSVFDEKQQWKFCETNEYGGNSLRKPCIFPSIYRNNVVSDCMEDESNKLWCPTTENMDKDGKWSFCADTRISALVPGFPCHFPFNYKNKNYFNC

SEQ ID NO: 4711 - protein, 75 aa, Homo Sapiens
MTRWSSYLLGWTTFLLYSYESSGGISALVPGFPCHFPFNYKNKNYFNCTNEGSKENLVWCATSYNYDQDHTWVYC

SEQ ID NO: 4712 - protein, 223 aa, Homo Sapiens [sequence omitted]

SEQ ID NO: 4713 - protein, 220 aa, Homo Sapiens
MVQLPVGWTTFLLYSYESSGGMHEECVFPFTYKGSVYFTCTHIHSLSPWCATRAVYNGQWKYCQSEDYPRCIFPFIYRGKAYNSCISQGSFLGSLWCSVTSVFDEKQQWKFCETNEYGGNSLRKPCIFPSIYRNNVVSDCMEDESNKLWCPTTENMDKDGKWSFCADTRISALVPGFPCHFPFNYKNKNYFNCTNEGSKENLVWCATSYNYDQDHTWVYC

SEQ ID NO: 4714 - protein, 76 aa, Homo Sapiens
SNKLWCPTTENMDKDGKWSFCADTRISALVPGFPCHFPFNYKNKNYFNCTNEGSKENLVWCATSYNYDQDHTWVYC

SEQ ID NO: 4715 - protein, 154 aa, Homo Sapiens
  misc_feature (1)..(1): Xaa can be any naturally occurring amino acid
XYPRCIFPFIYRGKAYNSCISQGSFLGSLWCSVTSVFDEKQQWKFCETNEYGGNSLRKPCIFPSIYRNNVVSDCMEDESNKLWCPTTENMDKDGKWSFCADTRISALVPGFPCHFPFNYKNKNYFNCTNEGSKENLVWCATSYNYDQDHTWVYC

SEQ ID NO: 4716 - protein, 178 aa, Homo Sapiens
FIGIFLIDGVTGRIIHSSVQKKAKGPVHIVHSENWVVYQYWNTKARRNEFTVLELYEGTEQYNATAFSSLDRPQLPQVLQQSYIFPSSISAMEATITERGITSRHLLSFAGSPPPRDPNRTKQMYRYTQSDSSTITRQFLECEVSTQLPRVWSPLVWLWPMVWTFTKLESTHPSSLTF

SEQ ID NO: 4717 - protein, 75 aa, Homo Sapiens
MAAEWASRFWLWATLLIPAAAVYEDQVGKFDWRQQYVGKVKFASLEFSPGSKKLVVATEKNVIAALNSRTGEICE

SEQ ID NO: 4718 - protein, 992 aa, Homo Sapiens
MAAEWASRFWLWATLLIPAAAVYEDQVGKFDWRQQYVGKVKFASLEFSPGSKKLVVATEKNVIAALNSRTGEILWRHVDKGTAEGAVDAMLLHGQDVITVSNGGRIMRSWETNIGGLNWEITLDSGSFQALGLVGLQESVRYIAVLKKTTLALHHLSSGHLKWVEHLPESDSIHYQMVYSYGSGVVWALGVVPFSHVNIVKFNVEDGEIVQQVRVSTPWLQHLSGACGVVDEAVLVCPDPSSRSLQTLALETEWELRQIPLQSLDLEFGSGFQPRVLPTQPNPVDASRAQFFLHLSPSHYALLQYHYGTLSLLKNFPQTALVSFATTGEKTVAAVMACRNEVKSSSSEDGSMGSFSEKSSSKDSLACFNQTYTINLYLVETGRRLLDTTITFSLEQSGTRPERLYIQVFLKKDDSVGYRALVQTEDHLLLFLQQLAGKVVLWSREESLAEVVCLEMVDLPLTGAQAELEGEFGKKADGLLGMFLKRLSSQLILLQAWTSHLWKMFYDARKPRSQIKNEINIDTLARDEFNLQKMMVMVTASGKLFGIESSSGTILWKQYLPNVKPDSSFKLMVQRTTAHFPHPPQCTLLVKDKESGMSSLYVFNPIFGKWSQVAPPVLKRPILQSLLLPVMDQDYAKVLLLIDDEYKVTAFPATRNVLRQLHELAPSIFFYLVDAEQGRLCGYRLRKDLTTELSWELTIPPEVQRIVKVKGKRSSEHVHSQGRVMGDRSVLYKSLNPNLLAVVTESTDAHHERTFIGIFLIDGVTGRIIHSSVQKKAKGPVHIVHSENWVVYQYWNTKARRNEFTVLELYEGTEQYNATAFSSLDRPQLPQVLQQSYIFPSSISAMEATITERGITSRHLLIGLPSGAILSLPKALLDPRRPEIPTEQSREENLIPYSPDVQIHAERFINYNQTVSRMRGIYTAPSGLESTCLVVAYGLDIYQTRVYPSKQFDVLKDDYDYVLISSVLFGLVFATMITKRLAQVKLLNRAWR

SEQ ID NO: 4719 - protein, 993 aa, Homo Sapiens
MAAEWASRFWLWATLLIPAAAVYEDQVGKFDWRQQYVGKVKFASLEFSPGSKKLVVATEKNVIAALNSRTGEILWRHVDKGTAEGAVDAMLLHGQDVITVSNGGRIMRSWETNIGGLNWEITLDSGSFQALGLVGLQESVRYIAVLKKTTLALHHLSSGHLKWVEHLPESDSIHYQMVYSYGSGVVWALGVVPFSHVNIVKFNVEDGEIVQQVRVSTPWLQHLSGACGVVDEAVLVCPDPSSRSLQTLALETEWELRQIPLQSLDLEFGSGFQPRVLPTQPNPVDASRAQFFLHLSPSHYALLQYHYGTLSLLKNFPQTALVSFATTGEKTVAAVMACRNEVQKSSSSEDGSMGSFSEKSSSKDSLACFNQTYTINLYLVETGRRLLDTTITFSLEQSGTRPERLYIQVFLKKDDSVGYRALVQTEDHLLLFLQQLAGKVVLWSREESLAEVVCLEMVDLPLTGAQAELEGEFGKKADGLLGMFLKRLSSQLILLQAWTSHLWKMFYDARKPRSQIKNEINIDTLARDEFNLQKMMVMVTASGKLFGIESSSGTILWKQYLPNVKPDSSFKLMVQRTTAHFPHPPQCTLLVKDKESGMSSLYVFNPIFGKWSQVAPPVLKRPILQSLLLPVMDQDYAKVLLLIDDEYKVTAFPATRNVLRQLHELAPSIFFYLVDAEQGRLCGYRLRKDLTTELSWELTIPPEVQRIVKVKGKRSSEHVHSQGRVMGDRSVLYKSLNPNLLAVVTESTDAHHERTFIGIFLIDGVTGRIIHSSVQKKAKGPVHIVHSENWVVYQYWNTKARRNEFTVLELYEGTEQYNATAFSSLDRPQLPQVLQQSYIFPSSISAMEATITERGITSRHLLIGLPSGAILSLPKALLDPRRPEIPTEQSREENLIPYSPDVQIHAERFINYNQTVSRMRGIYTAPSGLESTCLVVAYGLDIYQTRVYPSKQFDVLKDDYDYVLISSVLFGLVFATMITKRLAQVKLLNRAWR

SEQ ID NO: 4720 - protein, 971 aa, Homo Sapiens
MAAEWASRFWLWATLLIPAAAVYEDQVGKFDWRQQYVGKVKFASLEFSPGSKKLVVATEKNVIAALNSRTGEIYVITVSNGGRIMRSWETNIGGLNWEITLDSGSFQALGLVGLQESVRYIAVLKKTTLALHHLSSGHLKWVEHLPESDSIHYQMVYSYGSGVVWALGVVPFSHVNIVKFNVEDGEIVQQVRVSTPWLQHLSGACGVVDEAVLVCPDPSSRSLQTLALETEWELRQIPLQSLDLEFGSGFQPRVLPTQPNPVDASRAQFFLHLSPSHYALLQYHYGTLSLLKNFPQTALVSFATTGEKTVAAVMACRNEVQKSSSSEDGSMGSFSEKSSSKDSLACFNQTYTINLYLVETGRRLLDTTITFSLEQSGTRPERLYIQVFLKKDDSVGYRALVQTEDHLLLFLQQLAGKVVLWSREESLAEVVCLEMVDLPLTGAQAELEGEFGKKADGLLGMFLKRLSSQLILLQAWTSHLWKMFYDARKPRSQIKNEINIDTLARDEFNLQKMMVMVTASGKLFGIESSSGTILWKQYLPNVKPDSSFKLMVQRTTAHFPHPPQCTLLVKDKESGMSSLYVFNPIFGKWSQVAPPVLKRPILQSLLLPVMDQDYAKVLLLIDDEYKVTAFPATRNVLRQLHELAPSIFFYLVDAEQGRLCGYRLRKDLTTELSWELTIPPEVQRIVKVKGKRSSEHVHSQGRVMGDRSVLYKSLNPNLLAVVTESTDAHHERTFIGIFLIDGVTGRIIHSSVQKKAKGPVHIVHSENWVVYQYWNTKARRNEFTVLELYEGTEQYNATAFSSLDRPQLPQVLQQSYIFPSSISAMEATITERGITSRHLLIGLPSGAILSLPKALLDPRRPEIPTEQSREENLIPYSPDVQIHAERFINYNQTVSRMRGIYTAPSGLESTCLVVAYGLDIYQTRVYPSKQFDVLKDDYDYVLISSVLFGLVFATMITKRLAQVKLLNRAWR

SEQ ID NO: 4721 - protein, 86 aa, Homo Sapiens
  misc_feature (1)..(1): Xaa can be any naturally occurring amino acid
XNATAFSSLDRPQLPQVLQQSYIFPSSISAMEATITERGITSRHLLIGLPSGAILSLPKALLDPRRPEIPTEQSRCTDTRRAIHQL

SEQ ID NO: 4722 - protein, 191 aa, Homo Sapiens
  misc_feature (1)..(1): Xaa can be any naturally occurring amino acid
XSSKDSLACFNQTYTINLYLVETGRRLLDTTITFSLEQSGTRPERLYIQVFLKKDDSVGYRALVQTEDHLLLFLQQLAGKVVLWSREESLAEVVCLEMVDLPLTGAQAELEGEFGKKAAIQDGLLGMFLKRLSSQLILLQAWTSHLWKMFYDARKPRSQIKNEINIDTLARDEFNLQKMMVMVTASGKVSG

SEQ ID NO: 4723 - protein, 43 aa, Homo Sapiens
MAAASAGATRLLLLLLMAHSFEIDDSANFRKRGSLLWNQQDGT

SEQ ID NO: 4724 - protein, 254 aa, Homo Sapiens
MAAASAGATRLLLLLLMAVAAPSRARGSGCRAGTGARGAGAEGREGEACGTVGLLLEHSFEIDDSANFRKRGSLLWNQQDGTLSLSQRQLSEEERGRLRDVAALNGLYRVRIPRRPGALDGLEAGGYVSSFVPACSLVESHLSDQLTLHVDVAGNVVGVSVVTHPGGCRGHEVEDVDLELFNTSVQLQPPTTAPGPETAAFIERLEMEQAQKAKNPQEQKSFFAKYWHIILGGAVLLTALRPAAPGPAPPPQEA

SEQ ID NO: 4725 - protein, 262 aa, Homo Sapiens
MAAASAGATRLLLLLLMAVAAPSRARGSGCRAGTGARGAGAEGREGEACGTVGLLLEHSFEIDDSANFRKRGSLLWNQQDGTLSLSQRQLSEEERGRLRDVAALNGLYRVRIPRRPGALDGLEAGGYVSSFVPACSLVESHLSDQLTLHVDVAGNVVGVSVVTHPGGCRGHEVEDVDLELFNTSVQLQPPTTAPGPETAAFIERLEMEQAQKAKNPQEQKSFFAKYWMYIIPVVLFLMMSGAPDTGGQGGGGGGGGGGGSGR

SEQ ID NO: 4726 - protein, 371 aa, Homo Sapiens
MAAASAGATRLLLLLLMAVAAPSRARGSGCRAGTGARGAGAEGREGEACGTVGLLLEHSFEIDDSANFRKRGSLLWNQQDGTLSLSQRQLSEEERGRLRDVAALNGLYRVRIPRRPGALDGLEAGGYVSSFVPACSLVESHLSDQLTLHVDVAGNVVGVSVVTHPGGCRGHEVEDVDLELFNTSVQLQPPTTAPGPETAAFIERLEMEQAQKAKNPQEQKSFFAKYWMYIIPVVLFLMMSGAPDTGGQGGGGGGGGGGGSGRPLSSAFCWQRSSWTGAFGTAAGVSCARLPHGPMQPQGLPPCPWSRARDPGHYASSDLASPYPEPMQSGNMPPSLQPLCLCSRWSHPPVPGWARWSCPGSCSAPLTLTLD

SEQ ID NO: 4727 - protein, 42 aa, Homo Sapiens
MAAASAGATRLLLLLLMAVAAPSRARGSGCRAGTGARGVSAL

SEQ ID NO: 4728 - protein, 42 aa, Homo Sapiens; identical to SEQ ID NO: 4727

SEQ ID NO: 4729 - protein, 89 aa, Homo Sapiens [sequence omitted]

SEQ ID NO: 4730 - protein, 94 aa, Homo Sapiens
MGEVEISALAYVKMCLHAARYPHAAVNGLFLAPAPRSGECLCLTDCVPLFHSHLALSVMLEVALNQVDVWGAQAGLVVAGYYHANAAVNDQSNI

SEQ ID NO: 4731 - protein, 208 aa, Homo Sapiens
MGEVEISALAYVKMCLHAARYPHAAVNGLFLAPAPRSGECLCLTDCVPLFHSHLALSVMLEVALNQVDVWGAQAGLVVAGYYHANAAVNDQSPGPLALKIAGRIAEFFPDAVLIMLDNQKLVPQPRVPPVIVLENQGLRWVPKDKNLVMWRDWEESRQMVGALLEDRAHQHLVDFDCHLDDIRQDWTNQRLNTQITQWVGPTNGNGNA

SEQ ID NO: 4732 - protein, 208 aa, Homo Sapiens; identical to SEQ ID NO: 4731

SEQ ID NO: 4733 - protein, 134 aa, Homo Sapiens
MGFAHSWLLTPLIFPLHSPGPLALKIAGRIAEFFPDAVLIMLDNQKLVPQPRVPPVIVLENQGLRWVPKDKNLVMWRDWEESRQMVGALLEDRAHQHLVDFDCHLDDIRQDWTNQRLNTQITQWVGPTNGNGNA

SEQ ID NO: 4734 - protein, 76 aa, Homo Sapiens
LMSTATFLTSKDEGLKATTTDVRKNDSIISNVTVTSVTLPNAVSTLQSSKPKTETQSSIKTTEIPGEHSAQGKTKN

SEQ ID NO: 4735 - protein, 248 aa, Homo Sapiens
MELLQVTILFLLPSICSSNSTGVLEAANNSLVVTTTKPSITTPNTESLQKNVVTPTTGTTPKGTITNELLKMSLMSTATFLTSKDEGLKATTTDVRKNDSIISNVTVTSVTLPNAVSTLQSSKPKSSVLQPDASPSKTGTLTSIPVTIPENTSQSQVIGTEGGKNASTSATSRSYSSIILPVVIALIVITLSVFVLVGLYRMCWKADPGTPENGNDQPQSDKESVKLLTVKTISHESGEHSAQGKTKN

SEQ ID NO: 4736 - protein, 165 aa, Homo Sapiens
MELLQVTILFLLPSICSSNSTGVLEAANNSLVVTTTKPSITTPNTESLQKNVVTPTTGTTPKGTITNELLKMSLMSTATFLTSKDEGLKATTTDVRKNDSIISNVTVTSVTLPNAVSTLQSSKPKTETQSSIKTTEIPGIILPVVIALIVITLSVFVLVGLYRMC

SEQ ID NO: 4737 - protein, 261 aa, Homo Sapiens
MELLQVTILFLLPSICSSNSTGVLEAANNSLVVTTTKPSITTPNTESLQKNVVTPTTGTTPKGTITNELLKMSLMSTATFLTSKDEGLKATTTDVRKNDSIISNVTVTSVTLPNAVSTLQSSKPKTETQSSIKTTEIPGSVLQPDASPSKTGTLTSIPVTIPENTSQSQVIGTEGGKNASTSATSRSYSSIILPVVIALIVITLSVFVLVGLYRMCWKADPGTPENGNDQPQSDKESVKLLTVKTISHESGEHSAQGKTKN

SEQ ID NO: 4738 - protein, 178 aa, Homo Sapiens
MELLQVTILFLLPSICSSNSTGVLEAANNSLVVTTTKPSITTPNTESLQKNVVTPTTGTTPKGTITNELLKMSLMSTATFLTSKDEGLKATTTDVRKNDSIISNVTVTSVTLPNAVSTLQSSKPKTETQSSIKTTEIPGTPENGNDQPQSDKESVKLLTVKTISHESGEHSAQGKTKN

SEQ ID NO: 4739 - protein, 34 aa, Homo Sapiens
MGGPRAWALLCLGLLLPGGGAAWSIGAAPFSGRR

SEQ ID NO: 4740 - protein, 175 aa, Homo Sapiens
MGGPRAWALLCLGLLLPGGGAAWSIGAAPFSGRRNWCSYVVTRTISCHVQNGTYLQRVLQNCPWPMSCPGSSYRTVVRPTYKVMYKIVTAREWRCCPGHSGVSCEEGCLNCSKVSELTERLKVLEAKMTMLTVIEQPVPPTPATPEDPAPLWGPPPAQGSPGDGGLQDQVGAWGL

SEQ ID NO: 4741 - protein, 443 aa, Homo Sapiens
MGGPRAWALLCLGLLLPGGGAAWSIGAAPFSGRRNWCSYVVTRTISCHVQNGTYLQRVLQNCPWPMSCPGSSYRTVVRPTYKVMYKIVTAREWRCCPGHSGVSCEEVAASSASLEPMWSGSTMRRMALRPTAFSGCLNCSKVSELTERLKVLEAKMTMLTVIEQPVPPTPATPEDPAPLWGPPPAQGSPGDGGLQDQVGAWGLPGPTGPKGDAGSRGPMGMRGPPGPQGPPGSPGRAGAVGTPGERGPPGPPGPPGPPGPPAPVGPPHARISQHGDPLLSNTFTETNNHWPQGPTGPPGPPGPMGPPGPPGPTGVPGSPGHIGPPGPTGPKGISGHPGEKGERGLRGEPGPQGSAGQRGEPGPKGDPGEKSHWGEGLHQLREALKILAERVLILETMIGLYEPELGSGAGPAGTGTPSLLRGKRGGHATNYRIVAPRSRDERG

SEQ ID NO: 4742 - protein, 422 aa, Homo Sapiens
MGGPRAWALLCLGLLLPGGGAAWSIGAAPFSGRRNWCSYVVTRTISCHVQNGTYLQRVLQNCPWPMSCPGSSYRTVVRPTYKVMYKIVTAREWRCCPGHSGVSCEEVAASSASLEPMWSGSTMRRMALRPTAFSGCLNCSKVSELTERLKVLEAKMTMLTVIEQPVPPTPATPEDPAPLWGPPPAQGSPGDGGLQDQVGAWGLPGPTGPKGDAGSRGPMGMRGPPGPQGPPGSPGRAGAVGTPGERGPPGPPGPPGPPGPPAPVGPPHARISQHGDPLLSNTFTETNNHWPQGPTGPPGPPGPMGPPGPPGPTGVPGSPGHIGLRGEPGPQGSAGQRGEPGPKGDPGEKSHWGEGLHQLREALKILAERVLILETMIGLYEPELGSGAGPAGTGTPSLLRGKRGGHATNYRIVAPRSRDERG

SEQ ID NO: 4743 - protein, 445 aa, Homo Sapiens
MGGPRAWALLCLGLLLPGGGAAWSIGAAPFSGRRNWCSYVVTRTISCHVQNGTYLQRVLQNCPWPMSCPGSSYRTVVRPTYKVMYKIVTAREWRCCPGHSGVSCEEVAASSASLEPMWSGSTMRRMALRPTAFSGCLNCSKVSELTERLKVLEAKMTMLTVIEQPVPPTPATPEDPAPLWGPPPAQGSPGDGGLQDQVGAWGLPGPTGPKGDAGSRGPMGMRGPPGPQGPPGSPGRAGAVGTPGERGPPGPPGPPGPPGPPAPVGPPHARISQHGDPLLSNTFTETNNHWPQGPTGPPGPPGPMGPPGPPGPTGVPGSPGHIGPPGPTGPKGISGHPGEKGERGLRGEPGPQGSAGQRGEPGPKGDPGEKSHWAPSLQSFLQQQAQLELLARRVTLLEAIIWPEPELGSGAGPAGTGTPSLLRGKRGGHATNYRIVAPRSRDERG

SEQ ID NO: 4744 - protein, 212 aa, Homo Sapiens
MGGPRAWALLCLGLLLPGGGAAWSIGAAPFSGRRNWCSYVVTRTISCHVQNGTYLQRVLQNCPWPMSCPGSSYRTVVRPTYKVMYKIVTAREWRCCPGHSGVSCEEVAASSASLEPMWSGSTMRRMALRPTAFSGCLNCSKVSELTERLKVLEAKMTMLTVIEQPVPPTPATPEDPAPLWGPPPAQGSPGDGGLQGDPLLSNTFTETNNHWP

SEQ ID NO: 4745 - protein, 236 aa, Homo Sapiens
  misc_feature (1)..(1): Xaa can be any naturally occurring amino acid
XMTMLTVIEQPVPPTPATPEDPAPLWGPPPAQGSPGDGGLQGLPGAIESVRVPLLPRNDQVGAWGLPGPTGPKGDAGSRGPMGMRGPPGPQGPPGSPGRAGAVGTPGERGPPGPPGPPGPPGPPAPVGPPHARISQHGDPLLSNTFTETNNHWPQGPTGPPGPPGPMGPPGPPGPTGVPGSPGHIGPPGPTGPKGISGHPGEKGERGLRGEPGPQGSAGQRGEPGPKGDPGEKSHW

SEQ ID NO: 4746 - protein, 1016 aa, Homo Sapiens
MAPRTLWSCYLCCLLTAAAGAASYPPRGFSLYTGSSGALSPGGPQAQIAPRPASRHRNWCAYVVTRTVSCVLEDGVETYVKYQPCAWGQPQCPQSIMYRRFLRPRYRVAYKTVTDMEWRCCQGYGGDDCAESPAPALGPASSTPRPLARPARPNLSGSSAGSPLSGLGGEGPGESEKVQQLEEQVQSLTKELQGLRGVLQGLSGRLAEDVQRAVETAFNGRQQPADAAARPGVHETLNEIQHQLQLLDTRVSTHDQELGHLNNHHGGSSSSGGSRAPAPASAPPGPSEELLRQLEQRLQESCSVCLAGLDGFRRQQQEDRERLRAMEKLLASVEERQRHLAGLAVGRRPPQECCSPELGRRLAELERRLDVVAGSVTVLSGRRGTELGGAAGQGGHPPGYTSLASRLSRLEDRFNSTLGPSEEQEESWPGAPGGLSHWLPAARGRLEQLGGLLANVSGELGGRLDLLEEQVAGAMQACGQLCSGAPGEQDSQVSEILSALERRVLDSEGQLRLVGSGLHTVEAAGEARQATLEGLQEVVGRLQDRVDAQDETAAEFTLRLNLTAARLGQLEGLLQAHGDEGCGACGGVQEELGRLRDGVERCSCPLLPPRGPGAGPGVGGPSRGPLDGFSVFGGSSGSALQALQGELSEVILSFSSLNDSLNELQTTVEGQGADLADLGATKDRIISEINRLQQEATEHATESEERFRGLEEGQAQAGQCPSLEGRLGRLEGVCERLDTVAGGLQGLREGLSRHVAGLWAGLRETNTTSQMQAALLEKLVGGQAGLGRRLGALNSSLQLLEDRLHQLSLKDLTGPAGEAGPPGPPGLQGPPGPAGPPGSPGKDGQEGPIGPPGPQGEQGVEGAPAAPVPQVAFSAALSLPRSEPGTVPFDRVLLNDGGYYDPETGVFTAPLAGRYLLSAVLTGHRHEKVEAVLSRSNQGVARVDSGGYEPEGLENKPVAESQPSPGTLGVFSLILPLQAGDTVCVDLVMGQLAHSEEPLTIFSGALLYGDPELEHA

SEQ ID NO: 4747 - protein, 347 aa, Homo Sapiens
  misc_feature (1)..(1): Xaa can be any naturally occurring amino acid
XADLGATKDRIISEINRLQQEATEHATESEERFRGLEEGQAQAGQCPSLEGRLGRLEGVCERLDTVAGGLQGLREGLSRHVAGLWAGLRETNTTSQMQAALLEKLVGGQAGLGRRLGALNSSLQLLEDRLHQLSLKDLTGEGTKGPAGEAGPPGPPGLQGPPGPAGPPGSPGKDGQEGPIGPPGPQGEQGVEGAPAAPVPQVAFSAALSLPRSEPGTVPFDRVLLNDGGYYDPETGVFTAPLAGRYLLSAVLTGHRHEKVEAVLSRSNQGVARVDSGGYEPEGLENKPVAESQPSPGTLGVFSLILPLQAGDTVCVDLVMGQLAHSEEPLTIFSGALLYGDPELEHA

SEQ ID NO: 4748 - protein, 1053 aa, Homo Sapiens
MWQPRRPWPRVPWRWALALLALVGAGLCHAGPQPGYPARPSARNKNWCAYIVNKNVSCSVLEGSESFIQAQYNCAWNQMPCPSALVYRVNFRPRYVTRYKTVTQLEWRCCPGFRGGDCQEGPKDPVKTLRPTPARPRNSLKKATDNEPSQFSEPRKTLSPTGTAQPSWGVDPKEGPQELQEKKIQVLEEKVLRLTRTVLDLQSSLAGVSENLKHATQDDASRTRAPGLSSQHPKPDTTVSGDTETGQSPGVFNTKESGMKDIKSELAEVKDTLKNKSDKLEELDGKVKGYEGQLRQLQEAAQGPTVTMTTNELYQAYVDSKIDALREELMEGMDRKLADLKNSCEYKLTGLQQQCDDYGSSYLGVIELIGEKETSLRKEINNLRARLQEPSAQANCCDSEKNGDIGQQIKTLDQKIERVAEATRMLNGRLDNEFDRLIVPEPDVDFDAKWNELDARINVTEKNAEEHCFYIEETLRGAINGEVGDLKQLVDQKIQSLEDRLGSVLLQMTNNTGAELSPPGAAALPGVSGSGDERVMMELNHLKDKVQVVEDICLLNIQGKPHGMEGALPNREDRAVRDSLHLLKSLNDTMHRKFQETEQTIQKLQQDFSFLYSQLNHTENDVTHLQKEMSNCRAGENAGMGRFTKVGEQERTVDTLPSPQHPVAHCCSQLEERWQRLQSQVISELDACKECTQGVQREVSMVEGRVSHMEKTCSKLDSISGNLQRIKEGLNKHVSSLWNCVRQMNGTLRSHSRDISGLKNSVQQFYSHVFQISTDLQDLVKFQPSAKAPSPPPPAEAPKEPLQPEPAPPRPSGPATAEDPGRRPVLPQRPPEERPPQPPGSTGVIAETGQAGPPAGAGVSGRGLPRGVDGQTGSGTVPGAEGFAGAPGYPKSPPVASPGAPVPSLVSFSAGLTQKPFPSDGGVVLFNKVLVNDGDVYNPSTGVFTAPYDGRYLITATLTPERDAYVEAVLSVSNASVAQLHTAGYRREFLEYHRPPGALHTCGGPGAFHLIVHLKAGDAVNVVVTGGKLAHTDFDEMYSTFSGVFLYPFLSHL

SEQ ID NO: 4749 - protein, 766 aa, Homo Sapiens
MGRRRLLVWLCAVAALLSGAQARGTPLLARPAPPGASRYSLYTTGWRPRLRPGPHKALCAYVVHRNVTCILQEGAESYVKAEYRQCRWGPKCPGTVTYRTVLRPKYKVGYKTVTDLAWRCCPGFTGKRCPEHLTDHGAASPQLEPEPQIPSGQLDPGPRPPSYSRAAPSPHGRKGPGLFGERLERLEGDVQRLAQTYGTLSGLVASHEDPNRMTGGPRAPAVPVGFGVIPEGLVGPGDRARGPLTPPLDEILSKVTEVSNTLQTKVQLLDKVHGLALGHEAHLQRLREAPPSPLTSLALLEEYVDRRLHRLWGSLLDGFEQKLQGVQSECDLRVQEVRRQCEEGQAASRRLHQSLDGRELALRQELSQLGSQLQGLSVSGRGSCCGQLALINARMDGLERALQAVTETQRGPGAPAGDELTRLSAAMLEGGVDGLLEGLETLNGTEGGARGCCLRLDMGGWGVGGFGTMLEERVQSLEERLATLAGELSHDSASPGRSARPLVQTELAVLEQRLVSLETSCTPSTTSAILDSLVAEVKAWQSRSEALLRQVASHAALLQQLNGTVAEVQGQLAEGTGSSLQGEITLLKVNLNSVSKSLTGLSDSVSQYSDAFLAANTSLDERERKVEAEVQAIQEQVSSQGSRLQAGHRQVLNLRGELEQLKAGVAKVASGLSRCQDTAQKLQHTVGHFDQRVAQVEGACRRLGLLAAGLDSLPTEPLRPREGLWSHVDQLNRTLAQHTQDIARLRDDLLDCQAQLAEQVRPGQAN

SEQ ID NO: 4750 - protein, 1142 aa, Homo Sapiens
MLVLRCRLGTSFPKLDNLVPKGKMKILLVFLGLLGNSVAMPMHMPRMPGFSSKSEEMMRYNQFNFMNGPHMAHLGPFFGNGLPQQFPQYQMPMWPQPPPNTWHPRKSSAPKRHNKTDQTQETQKPNQTQSKKPPQKRPLKQPSHNQPQPEEEAQPPQAFPPFGNGLFPYQQPPWQIPQRLPPPGYGRPPISNEEGGNPYFGYFGYHGFGGRPPYYSEEMFEQDFEKPKEEDPPKAESPGTEPTANSTVTETNSTQPNPKGSQGGNDTSPTGNSTPGLNTGNNPPAQNGIGPLPAVNASGQGGPGSQIPWRPSQPNIRENHPYPNIRNFPSGRQWYFTGTVMGHRQNRPFYRNQQVQRGPRWNFFAWERKQVARPGNPVYHKAYPPTSRGNYPNYAGNPANLRRKPQGPNKHPVGTTVAPLGPKPGPVVRNEKIQNPKEKPLGPKEQIIVPTKNPTSPWRNSQQYEVNKSNYKLPHSEGYMPVPNFNSVDQHENSYYPRGDSRKVPNSDGQTQSQNLPKGIVLGSRRMPYESETNQSELKHSSYQPAVYPEEIPSPAKEHFPAGRNTWDHQEISPPFKEDPGRQEEHLPHPSHGSRGSVFYPEYNPYDPRENSPYLRGNTWDERDDSPNTMGQKESPLYPINTPDQKEIVPYNEEDPVDPTGDEVFPGQNRWGEELSFKGGPTVRHYEGEQYTSNQPKEYLPYSLDNPSKPREDFYYSEFYPWSPDENFPSYNTASTMPPPIESRGYYVNNAAGPEESTLFPSRNSWDHRIQAQGQRERRPYFNRNIWDQATHLQKAPARPPDQKGNQPYYSNTPAGLQKNPIWHEGENLNYGMQITRMNSPEREHSSFPNFIPPSYPSGQKEAHLFHLSQRGSCCAGSSTGPKDNPLALQDYTPSYGLAPGENQDTSPLYTDGSHTKQTRDIISPTSILPGQRNSSEKRESQNPFRDDVSTLRRNTPCSIKNQLGQKEIMPFPEASSLQSKNTPCLKNDLGGDGNNILEQVFEDNQLNERTVDLTPEQLVIGTPDEGSNPEGIQSQVQENESERQQQRPSNILHLPCFGSKLAKHHSSTTGTPSSDGRQSPFDGDSITPTENPNTLVELATEEQFKSINVDPLDADEHSPFEFLQRGTNVQDQVQDCLLLQA

SEQ ID NO: 4751 - protein, 297 aa, Homo Sapiens
MRALRAGLTLASGAGLGAVVEGWRRRREDARAAPGLLGRLPVLPVAAAAELPPVPGGPRGPGELAKYGLPGLAQLKSRESYVLCYDPRTRGALWVVEQLRPERLRGDGDRRECDFREDDSVHAYHRATNADYRGSGFDRGHLAAAANHRWSQKAMDDTFYLSNVAPQVPHLNQNAWNNLEKYSRSLTRSYQNVYVCTGPLFLPRTEADGKSYVKYQVIGKNHVAVPTHFFKVLILEAAGGQIELRTYVMPNAPVDEAIPLERFLVPIESIERASGLLFVPNILARAGSLKAITAGSK

SEQ ID NO: 4752 - protein, 347 aa, Homo Sapiens
MRACISLVLAVLCGLAWADLYSAPTSCQGRCYEAFDKHHQCHCNARCQEFGNCCKDFESLCSDHEVSHSSDAITKEEIQSISEKIYRADTNKAQKEDIVLNSQNCISPSETRNQVDRCPKPLFTYVNEKLFSKPTYAAFINLLNNYQRATGHGEHFSAQELAEQDAFLREIMKTAVMKELYSFLHHQNRYGSEQEFVDDLKNMWFGLYSRGNEEGDSSGFEHVFSGEVKKGKVTGFHNWIRFYLEEKEGLVDYYSHIYDGPWDSYPDVLAMQFNWDGYYKEVGSAFIGSSPEFEFALYSLCFIARPGKVCQLSLGGYPLAVRTYTWDKSTYGNGKKYIATAYIVSST

SEQ ID NO: 4753 - protein, 369 aa, Homo Sapiens
MRACISLVLAVLCGLAWAEDHKESEPLPQLEEETEEALASNLYSAPTSCQGRCYEAFDKHHQCHCNARCQEFGNCCKDFESLCSDHEVSHSSDAITKEEIQSISEKIYRADTNKAQKEDIVLNSQNCISPSETRNQVDRCPKPLFTYVNEKLFSKPTYAAFINLLNNYQRATGHGEHFSAQELAEQDAFLREIMKTAVMKELYSFLHHQNRYGSEQEFVDDLKNMWFGLYSRGNEEGDSSGFEHVFSGEVKKGKVTGFHNWIRFYLEEKEGLVDYYSHIYDGPWDSYPDVLAMQFNWDGYYKEVGSAFIGSSPEFEFALYSLCFIARPGKVCQLSLGGYPLAVRTYTWDKSTYGNGKKYIATAYIVSST

SEQ ID NO: 4754 - protein, 410 aa, Homo Sapiens
MRACISLVLAVLCGLAWAGKIESCASRCNEKFNRDAACQCDRRCLWHGNCCEDYEHLCTEDHKESEPLPQLEEETEEALASNLYSAPTSCQGRCYEAFDKHHQCHCNARCQEFGNCCKDFESLCSDHEVSHSSDAITKEEIQSISEKIYRADTNKAQKEDIVLNSQNCISPSETRNQVDRCPKPLFTYVNEKLFSKPTYAAFINLLNNYQRATGHGEHFSAQELAEQDAFLREIMKTAVMKELYSFLHHQNRYGSEQEFVDDLKNMWFGLYSRGNEEGDSSGFEHVFSGEVKKGKVTGFHNWIRFYLEEKEGLVDYYSHIYDGPWDSYPDVLAMQFNWDGYYKEVGSAFIGSSPEFEFALYSLCFIARPGKVCQLSLGGYPLAVRTYTWDKSTYGNGKKYIATAYIVSST

SEQ ID NO: 4755 - protein, 76 aa, Homo Sapiens
MGAAISQGALIAIVCNGLVGFLLLLLWVILCWACHSRSADVDSLSESSPNSSPGPCPEKAPPPQKPSHEGSYLLQP

SEQ ID NO: 4756 - protein, 363 aa, Homo Sapiens
MAIGAVSLAVAKACAMLLNKPLYLNIALLKHNQEQPTTLSMPLLMVSLVSCGKSSSGKLNLMKEVICIPHPELTTKQGVEMLMEMQKHINKIIEMPSPPKAETKKGHDGSKRGQQQITGKMSHLGCLTINCDSIEQPLLLIQEICANLGLELGTNLHLAINCAGHELMDYNKGKYEVIMGTYKNAAEMVDLYVDLINKYPSIIALIDPFRKEDSEQWDSIYHALGSRCYIIAGTASKSISKLLEQGNISIPKSNGLIIKHTNQTTMSDLVEITNLIDSKKHITVFGSTEGESSDDSLVDLAVGLGVRFIKLGGLSRGERVTKYNRLLTIEEELVQNGTLATSSSSCDARIGGQEQETMTLVKV

SEQ ID NO: 4757 - protein, 625 aa, Homo Sapiens
MEEEGGGRSCGTTRELQKLKQQAMEYYRENDVPRRLEELLNSTFYLQPADVYGHLANCFSKLAKPPTICKIVGKDVLDGLGLPTLQVDIFCTIQNFPKNVCSVVISTHFEVHENALPELAKAEEAERASAVSTAVQWVNSTITHELQGMAPSDQAEVDHLLRIFFASKVQEDKGRKELEKSLEYSTVPTPLPPVPPPPPPPPPTKKKGQKPGRKDTITEKPIAPAEPVEPVLSGSMAIGAVSLAVAKACAMLLNKPLYLNIALLKHNQEQPTTLSMPLLMVSLVSCGKSSSGKLNLMKEVICIPHPELTTKQGVEMLMEMQKHINKIIEMPSPPKAETKKGHDGSKRGQQQITGKMSHLGCLTINCDSIEQPLLLIQEICANLGLELGTNLHLAINCAGHELMDYNKGKYEVIMGTYKNAAEMVDLYVDLINKYPSIIALIDPFRKEDSEQWDSIYHALGSRCYIIAGTASKSISKLLEQGNISIPKSNGLIIKHTNQTTMSDLVEITNLIDSKKHITVFGSTEGESSDDSLVDLAVGLGVRFIKLGGLSRGERVTKYNRLLTIEEELVQNGTLGFKEEHTFFYFNEEAEKAAEALEAAAAREPLVPTFPTQGVEESAETGASSG

SEQ ID NO: 4758 - protein, 628 aa, Homo Sapiens [sequence omitted]

SEQ ID NO: 4759 - protein, 308 aa, Homo Sapiens
MEEEGGGRSCGTTRELQKLKQQAMEYYRENDVPRRLEELLNSTFYLQPADVYGHLPSPPKAETKKGHDGSKRGQQQITGKMSHLGCLTINCDSIEQPLLLIQEICANLGLELGTNLHLAINCAGHELMDYDSEQWDSIYHALGSRCYIIAGTASKSISKLLEQGNISIPKSNGLIIKHTNQTTMSDLVEITNLIDSKKHITVFGSTEGESSDDSLVDLAVGLGVRFIKLGGLSRGERVTKYNRLLTIEEELVQNGTLGFKEEHTFFYFNEEAEKAAEALEAAAAREPLVPTFPTQGVEESAETGASSG

SEQ ID NO: 4760 - protein, 138 aa, Homo Sapiens
  misc_feature (1)..(1): Xaa can be any naturally occurring amino acid
XGRSCGTTRELQKLKQQAMEYYRENDVPRRLEELLNSTFYLQPADVYGHLANCFSKLAKPPTICKIVGKDVLDGLGLPTLQVDIFCTIQNFPKNVCSVVISTHFEVHENALPELAKAEEAERASAVSTAVQWVNSTIT

SEQ ID NO: 4761 - protein, 440 aa, Homo Sapiens
MAVKLGTLLLALALGLAQPASARRKLLVFLLDGFRSDYISDEALESLPGFKEIVSRGVKVDYLTPDFPSLSYPNYYTLMTGRHCEVHQMIGNYMWDPTTNKSFDIGVNKDSLMPLWWNGSEPLWVTLTKAKRKVYMYYWPGCEVEILGVRPTYCLEYKNVPTDINFANAVSDALDSFKSGRADLAAIYHERIDVEGHHYGPASPQRKDALKAVDTVLKYMTKWIQERGLQDRLNVIIFSDHGMTDIFWMDKVIELNKYISLNDLQQVKDRGPVVSLWPAPGKHSEIYNKLSTVEHMTVYEKEAIPSRFYYKKGKFVSPLTLVADEGWFITENREMLPFWMNSTGRREGWQRGWHGYDNELMDMRGIFLAFGPDFKSNFRAAPIRSVDVYNVMCNVVGITPLPNNGSWSRVMCMLKGRASTAPPVWPSHCALALILLFLLA

SEQ ID NO: 4762 - protein, 194 aa, Homo Sapiens
MIGNYMWDPTTNKSFDIGVNKDSLMPLWWNGSEPLWVTLTKAKRKVYMYYWPGCEVEILGVRPTYCLEYKNVPTDINFANAVSDALDSFKSGRADLAAIYHERIDVEGHHYGPASPQRKDALKAVDTVLKYMTKWIQERGLQDRLNVIIFSDHGMTDIFWMDKVIELNKYISLNDLQQVKDRGPVVSLWPAPGK

SEQ ID NO: 4763 - protein, 159 aa, Homo Sapiens
LKDAHPKLHVYKKEAFPEAFHYANNPRVTPLLMYSDLGYVIHGRINVQFNNGEHGFDNKDMDMKTIFRAVGPSFRAGLEVEPFESVHVYELMCRLLGIVPEANDGHLATLLPMLHTESALPPDGRPTLLPKGRSALPPSSRPLLVMGLLGTVILLSEVA

SEQ ID NO: 4764 - protein, 458 aa, Homo Sapiens
MRGPAVLLTVALATLLAPGAGAPVQSQGSQNKLLLVSFDGFRWNYDQDVDTPNLDAMARDGVKARYMTPAFVTMTSPCHFTLVTGKYIENHGVVHNMYYNTTSKVKLPYHATLGIQRWWDNGSVPIWITAQRQGLRAGSFFYPGGNVTYQGVAVTRSRKEGIAHNYKNETEWRANIDTVMAWFTEEDLDLVTLYFGEPDSTGHRYGPESPERREMVRQVDRTVGYLRESIARNHLTDRLNLIITSDHGMTTVDKRAGDLVEFHKFPNFTFRDIEFELLDYGPNGMLLPKEGRLEKVYDALKDAHPKLHVYKKEAFPEAFHYANNPRVTPLLMYSDLGYVIHGRINVQFNNGEHGFDNKDMDMKTIFRAVGPSFRAGLEVEPFESVHVYELMCRLLGIVPEANDGHLATLLPMLHTESALPPDGRPTLLPKGRSALPPSSRPLLVMGLLGTVILLSEVA

SEQ ID NO: 4765 - protein, 91 aa, Homo Sapiens
MATSWGTVFFMLVVSCVCSAVSHRNQQTWFEGIFLSSMCPINVSASTLYGIMFDAGSTGTRIHVYTFVQKMPGHLWSLGKGGGVRCPPEKW

SEQ ID NO: 4766 - protein, 211 aa, Homo Sapiens
MATSWGTVFFMLVVSCVCSAVSHRNQQTWFEGIFLSSMCPINVSASTLYGIMFDAGSTGTRIHVYTFVQKMPGQLPILEGEVFDSVKPGLSAFVDQPKQGAETVQGLLEVAKDSIPRSHWKKTPVVLKATAGLRLLPEHKAKALLFEVKEIFRKSPFLVPKGSVSIMDGSDEGILAWVTVNFLTGQLHGHRQETVGTLDLGGASTQITFLP

SEQ ID NO: 4767 - protein, 428 aa, Homo Sapiens
MATSWGTVFFMLVVSCVCSAVSHRNQQTWFEGIFLSSMCPINVSASTLYGIMFDAGSTGTRIHVYTFVQKMPGQLPILEGEVFDSVKPGLSAFVDQPKQGAETVQGLLEVAKDSIPRSHWKKTPVVLKATAGLRLLPEHKAKALLFEVKEIFRKSPFLVPKGSVSIMDGSDEGILAWVTVNFLTGQLHGHRQETVGTLDLGGASTQITFLPQFEKTLEQTPRGYLTSFEMFNSTYKLYTHSYLGFGLKAARLATLGALETEGTDGHTFRSACLPRWLEAEWIFGGVKYQYGGNQEGEVGFEPCYAEVLRVVRGKLHQPEEVQRGSFYAFSYYYDRAVDTDMIDYEKGGILKVEDFERKAREVCDNLENFTSGSPFLCMDLSYITALLKDGFGFADSTVLQLTKKVNNIETGWALGATFHLLQSLGISH

SEQ ID NO: 4768 - protein, 407 aa, Homo Sapiens
MATSWGTVFFMLVVSCVCSAVSHRNQQTWFEGIFLSSMCPINVSASTLYGIMFDAGSTGTRIHVYTFVQKMPGQLPILEGEVFDSVKPGLSAFVDQPKQGAETVQGLLEVAKDSIPRSHWKKTPVVLKATAGLRLLPEHKAKALLFEVKEIFRKSPFLVPKGSVSIMDGSDEGILAWVTVNFLTGQLHGHRQETVGTLDLGGASTQITFLPQFEKTLEQTPRGYLTSFEMFNSTYKLYTHSYLGFGLKAARLATLGALETEGTDGHTFRSACLPRWLEAEWIFGGVKYQYGGNQEGEVGFEPCYAEVLRVVRGKLHQPEEVQRGSFYAFSYYYDRAVDTDMIDYEKGGILKVEDFERKAREVCDNLENFTSGSPFLCMDLSYITALLKDGFGFADSTVLQHIISWVN

SEQ ID NO: 4769 - protein, 80 aa, Homo Sapiens
  misc_feature (1)..(1): Xaa can be any naturally occurring amino acid
XYAFSYYYDRAVDTDMIDYEKGGILKVEDFERKAREVCDNLENFTSGSPFLCMDLSYITALLKDGFGFADSTVLQAAVLR

SEQ ID NO: 4770 - protein, 223 aa, Homo Sapiens
LGASGVSGLTALILLLVEATSVLLPTDIKFGIVFDAGSSHTSLFLYQWLANKENGTGVVSQALACQVEGPGISSYTSNAAQAGESLQGCLEEALVLIPEAQHRKTPTFLGATAGMRLLSSHPGPGPVSRGLLGCRAPGRAGRRCLWLDHCQLRLGDAGQVLLHWRMDPASGGDAGGCPGHGRGLHPDHVRAWGPHLGQEHPGRFSPLRLRLQRLHSQLPVLWT

SEQ ID NO: 4771 - protein, 458 aa, Homo Sapiens
MGLSRKEQVFLALLGASGVSGLTALILLLVEATSVLLPTDIKFGIVFDAGSSHTSLFLYQWLANKENGTGVVSQALACQVEGPGISSYTSNAAQAGESLQGCLEEALVLIPEAQHRKTPTFLGATAGMRLLSRKNSSQARDIFAAVTQVLGRSPVDFWGAELLAGQAEGAFGWITVNYGLGTLVKYSFTGEWIQPPEEMLVGALDMGGASTQITFVPGGPILDKSTQADFRLYGSDYSVYTHSYLCFGRDQMLSRLLVGLVQSRPAALLRHPCYLSGYQTTLALGPLYESPCVHATPPLSLPQNLTVEGTGNPGACVSAIRELFNFSSCQGQEDCAFDGVYQPPLRGQFYVEASYPGQDRWLRDYCASGLYILTLLHEGYGFSEETWPSLEFRKQAGGVDIGWTLGYMLNLTGMIPADAPAQWRAESYGVWVAKVVFMVLALVAVVGAALVQLFWLQD

SEQ ID NO: 4772 - protein, 495 aa, Homo Sapiens
MGLSRKEQVFLALLGASGVSGLTALILLLVEATSVLLPTDIKFGIVFDAGSSHTSLFLYQWLANKENGTGVVSQALACQVEGPGISSYTSNAAQAGESLQGCLEEALVLIPEAQHRKTPTFLGATAGMRLLSRKNSSQARDIFAAVTQVLGRSPVDFWGAELLAGQAEGAFGWITVNYGLGTLVKYSFTGEWIQPPEEMLVGALDMGGASTQITFVPGGPILDKSTQADFRLYGSDYSVYTHSYLCFGRDQMLSRLLVGLVQSRPAALLRHPCYLSGYQTTLALGPLYESPCVHATPPLSLPQNLTVEGTGNPGACVSAIRELFNFSSCQGQEDCAFDGVYQPPLRGQFYAFSNFYYTFHFLNLTSRQPLSTVNATIWEFCQRPWKLVEASYPGQDRWLRDYCASGLYILTLLHEGYGFSEETWPSLEFRKQAGGVDIGWTLGYMLNLTGMIPADAPAQWRAESYGVWVAKVVFMVLALVAVVGAALVQLFWLQD

SEQ ID NO: 4773 - protein, 495 aa, Homo Sapiens; identical to SEQ ID NO: 4772

SEQ ID NO: 4774 - protein, 135 aa, Homo Sapiens
MISAHCNLCLLDSSDSCALASQVAGITGVHHHAQLIFVFLIETEFHHVGQAGLELWVQEILPPCLPKCWDYRCEPPRMALNFLFLGIPKFSTFSALEFVNIFVEYHMTVIPECSNLFMIYLGKFTTVLLFAIIWL

SEQ ID NO: 4775 - protein, 124 aa, Homo Sapiens
MLMLFVFGVLLHEVSLSGQNEAPPNTHSIPGEPLYNYASIRLPEEHIPFFLHNNRHIATVCRKDSLCPYKKHLEKLKYCWGYEKSCKPEFRFGYPVCSYVDMGWTDTLESAEDIFWKQADFGYA

SEQ ID NO: 4776 - protein, 132 aa, Homo Sapiens
MLMLFVFGVLLHEVSLSGQNEAPPNTHSIPGEPLYNYASIRLPEEHIPFFLHNNRHIATVCRKDSLCPYKKHLEKLKYCWGYEKSCKPEFRFGYPVCSYVDMGWTDTLESAEDIFWKQADFGYARERLEEMH

SEQ ID NO: 4777 - protein, 206 aa, Homo Sapiens
MLMLFVFGVLLHEVSLSGQNEAPPNTHSIPGEPLYNYASIRLPEEHIPFFLHNNRHIATVCRKDSLCPYKKHLEKLKYCWGYEKSCKPEFRFGYPVCSYVDMGWTDTLESAEDIFWKQADFGYARERLEEMHVLCQPKETSDSSLVCSRYLQYCRATNLYLDLRNIKRNHDRFKEDFFQSGEIGGHCKLDIRTLTSEGQRKSPLQS

SEQ ID NO: 4778 - protein, 443 aa, Homo Sapiens
MLMLFVFGVLLHEVSLSGQNEAPPNTHSIPGEPLYNYASIRLPEEHIPFFLHNNRHIATVCRKDSLCPYKKHLEKLKYCWGYEKSCKPEFRFGYPVCSYVDMGWTDTLESAEDIFWKQADFGYARERLEEMHVLCQPKETSDSSLVCSRYLQYCRATNLYLDLRNIKRNHDRFKEDFFQSGEIGGHCKLDIRTLTSEGQRKSPLQSWFAELQSYTQLNFRPIEDAKCDIVIEKPTYFMKLDAGVNMYHHFCDFINLYITQHVNNSFSTDVYIVMWDTDGKIRVTILARSTEYRKILNQNELVNALKTVSTFEVQIVDYKYRELGFLDQLRITHNTDIFIGMHGAGLTHLLFLPDWAAVFELYNCEDERCYLDLARLRGVHYITWRRQNKVFPQDKGHHPTLGEHPKFTNYSFDVEEFMYLVLQAADHVLQHPKWPFKKKHDEL

SEQ ID NO: 4779 - protein, 527 aa, Homo Sapiens
MLMLFVFGVLLHEVSLSGQNEAPPNTHSIPGEPLYNYASIRLPEEHIPFFLHNNRHIATVCRKDSLCPYKKHLEKLKYCWGYEKSCKPEFRFGYPVCSYVDMGWTDTLESAEDIFWKQADFGYARERLEEMHVLCQPKETSDSSLVCSRYLQYCRATNLYLDLRNIKRNHDRFKEDFFQSGEIGGHCKLDIRTLTSEGQRKSPLQSWFAELQSYTQLNFRPIEDAKCDIVIEKPTYFMKLDAGVNMYHHFCDFINLYITQHVNNSFSTDVYIVMWDTSSYGYGDLFSDTWNAFTDYDVIHLKTYDSKRVCFKEAVFSLLPRMRYGLFYNTPLISGCQNTGLFRAFAQHVLHRLNITQEGPKDGKIRVTILARSTEYRKILNQNELVNALKTVSTFEVQIVDYKYRELGFLDQLRITHNTDIFIGMHGAGLTHLLFLPDWAAVFELYNCEDERCYLDLARLRGVHYITWRRQNKVFPQDKGHHPTLGEHPKFTNYSFDVEEFMYLVLQAADHVLQHPKWPFKKKHDEL

SEQ ID NO: 4780 - protein, 443 aa, Homo Sapiens; identical to SEQ ID NO: 4778

SEQ ID NO: 4781 - protein, 527 aa, Homo Sapiens; identical to SEQ ID NO: 4779

SEQ ID NO: 4782 - protein, 314 aa, Homo Sapiens
MAPPQVLAFGLLLAAATATFAAAQEECVCENYKLAVNCFVNNNRQCQCTSVGAQNTVICSKLAAKCLVMKAEMNGSKLGRRAKPEGALQNNDGLYDPDCDESGLFKAKQCNGTSMCWCVNTAGVRRTDKDTEITCSERVRTYWIIIELKHKAREKPYDSKSLRTALQKEITTRYQLDPKFITSILYENNVITIDLVQNSSQKTQNDVDIADVAYYFEKDVKGESLFHSKKMDLTVNGEQLDLDPGQTLIYYVDEKAPEFSMQGLKAGVIAVIVVVVIAVVAGIVVLVISRKKRMAKYEKAEIKEMGEMHRELNA

SEQ ID NO: 4783 - protein, 199 aa, Homo Sapiens
MAPPQVLAFGLLLAAATATFAAAQEGEARIGAELWSWAGLGGSGPRPSAPETGIIGRGPRGRAFQRGDRTVRPCSGSGPPRGRKRRGPSRGAASLRSFARLECVCENYKLAVNCFVNNNRQCQCTSVGAQNTVICSKLAAKCLVMKAEMNGSKLGRRAKPEGALQNNDGLYDPDCDESGLFKAKQCNGTSMCWCVNTAG

SEQ ID NO: 4784 - protein, 342 aa, Homo Sapiens
METKHLGRGGAGRAGPHLWRGPRPNCSAGAGGGEPTHSPNSRAVTHQRAPAARECVCENYKLAVNCFVNNNRQCQCTSVGAQNTVICSKLAAKCLVMKAEMNGSKLGRRAKPEGALQNNDGLYDPDCDESGLFKAKQCNGTSMCWCVNTAGVRRTDKDTEITCSERVRTYWIIIELKHKAREKPYDSKSLRTALQKEITTRYQLDPKFITSILYENNVITIDLVQNSSQKTQNDVDIADVAYYFEKDVKGESLFHSKKMDLTVNGEQLDLDPGQTLIYYVDEKAPEFSMQGLKAGVIAVIVVVVIAVVAGIVVLVISRKKRMAKYEKAEIKEMGEMHRELNA

SEQ ID NO: 4785 - protein, 342 aa, Homo Sapiens; identical to SEQ ID NO: 4784

SEQ ID NO: 4786 - protein, 122 aa, Homo Sapiens
MFQIDQATKQCSKMTLTQPWDPLDIPQNSTFEDQYSIGGPQEQITVQEWSDRKSARSYETWIGIYTVKDCYPVQETFTINYSVILSTRFFDIQLGIKDPSVFTPPSTCQMAQLEKMSEDCSW

SEQ ID NO: 4787 - protein, 90 aa, Homo Sapiens
MPGRAPLRTVPGALGAWLLGGLWAWTLCGLCSLGAVGAPRPCQAPQQWEGRQVMYQQSSGRNSRALLSYDGLNQRVRVLDERKALIPCKR

SEQ ID NO: 4788 - protein, 224 aa, Homo Sapiens
MPGRAPLRTVPGALGAWLLGGLWAWTLCGLCSLGAVGAPRPCQAPQQWEGRQVMYQQSSGRNSRALLSYDGLNQRVRVLDERKALIPCKRLFEYILLYKDGVMFQIDQATKQCSKMTLTQPWDPLDIPQNSTFEDQYSIGGPQEQITVQEWSDRKSARSYETWIGIYTVKDCYPVQETFTINYSVILSTRFFDIQLGIKDPSVFTPPSTCQMAQLEKMSEDCSW

SEQ ID NO: 4789 - protein, 163 aa, Homo Sapiens
MVRDWEGRCAHRGRPAGGGLSNTQRGGGRLFEYILLYKDGVMFQIDQATKQCSKMTLTQPWDPLDIPQNSTFEDQYSIGGPQEQITVQEWSDRKSARSYETWIGIYTVKDCYPVQETFTINYSVILSTRFFDIQLGIKDPSVFTPPSTCQMAQLEKMSEDCSW

SEQ ID NO: 4790 - protein, 73 aa, Homo Sapiens
MALGVPISVYLLFNADNIEGPIALKFSHLCLEDHNSYCINGACAFHHELEKAICRCLKLKSPYNVCSGERRPL

SEQ ID NO: 4791 - protein, 133 aa, Homo Sapiens
MALGVPISVYLLFNAMTALTEEAAVTVTPPITAQQADNIEGPIALKFSHLCLEDHNSYCINGACAFHHELEKAICRCFTGYTGERCEHLTLTSYAVDSYEKYIAIGIGVGLLLSGFLVIFYCYIRKRYEKDKI

SEQ ID NO: 4792 - protein, 103 aa, Homo Sapiens
MALGVPISVYLLFNAMTALTEEAAVTVTPPITAQQADNIEGPIALKFSHLCLEDHNSYCINGACAFHHELEKAICRCFTGYTGERCLKLKSPYNVCSGERRPL

SEQ ID NO: 4793 - protein, 94 aa, Homo Sapiens
MALGVPISVYLLFNAMTALTEEAAVTVTPPITAQQADNIEGPIALKFSHLCLEDHNSYCINGACAFHHELEKAICRCLKLKSPYNVCSGERRPL

SEQ ID NO: 4794 - protein, 94 aa, Homo Sapiens
MALGVPISVYLLFNAMTALTEEAAVTVTPPITAQQGNWTVNKTEADNIEGPIALKFSHLCLEDHNSYCINGACAFHHELEKAICRCFTGYTGER

SEQ ID NO: 4795 - protein, 154 aa, Homo Sapiens
MALGVPISVYLLFNAMTALTEEAAVTVTPPITAQQGNWTVNKTEADNIEGPIALKFSHLCLEDHNSYCINGACAFHHELEKAICRCFTGYTGERCEHLTLTSYAVDSYEKYIAIGIGVGLLLSGFLVIFYCYIRKRCLKLKSPYNVCSGERRPL

SEQ ID NO: 4796 - protein, 112 aa, Homo Sapiens
MALGVPISVYLLFNAMTALTEEAAVTVTPPITAQQGNWTVNKTEADNIEGPIALKFSHLCLEDHNSYCINGACAFHHELEKAICRCFTGYTGERCLKLKSPYNVCSGERRPL

SEQ ID NO: 4797 - protein, 103 aa, Homo Sapiens
MALGVPISVYLLFNAMTALTEEAAVTVTPPITAQQGNWTVNKTEADNIEGPIALKFSHLCLEDHNSYCINGACAFHHELEKAICRCLKLKSPYNVCSGERRPL

SEQ ID NO: 4798 - protein, 130 aa, Homo Sapiens
  misc_feature (1)..(1): Xaa can be any naturally occurring amino acid
XTALTEEAAVTVTPPITAQQADNIEGPIALKFSHLCLEDHNSYCINGACAFHHELEKAICRCFTGYTGERCEHLTLTSYAVDSYEKYIAIGIGVGLLLSGFLVIFYCYIRKRCLKLKSPYNVCSGERRPL

SEQ ID NO: 4799 - protein, 218 aa, Homo Sapiens
AQVTVSTGPGAPWEEDEIRRDRVEPQSVSLSWREPIPAGAPGANDTEYEIRYYEKGQSEQTYSMVKTGAPTVTVTNLKPATRYVFQIRAASPGPSWEAQSFNPSIEVQTLGEAASGSRDQSPAIVVTVVTISALLVLGSVMSVLAIWRRPCSYGKGGGDAHDEEELYFHFKVPTRRTFLDPQSCGDLLQAVHLFAKELDAKSVTLERSLGGGLETSPH

SEQ ID NO: 4800 - protein, 392 aa, Homo Sapiens
EQTYSMVKTGAPTVTVTNLKPATRYVFQIRAASPGPSWEAQSFNPSIEVQTLGEAASGSRDQSPAIVVTVVTISALLVLGSVMSVLAIWRRPCSYGKGGGDAHDEEELYFHFKVPTRRTFLDPQSCGDLLQAVHLFAKELDAKSVTLERSLGGGRFGELCCGCLQLPGRQELLVAVHMLRDSASDSQRLGFLAEALTLGQFDHSHIVRLEGVVTRGSTLMIVTEYMSHGALDGFLRRHEGQLVAGQLMGLLPGLASAMKYLSEMGYVHRGLAARHVLVSSDLVCKISGFGRGPRDRSEAVYTTMSGRSPALWAAPETLQFGHFSSASDVWSFGIIMWEVMAFGERPYWDMSGQDVIKAVEDGFRLPPPRNCPNLLHRLMLDCWQKDPGLPPH

SEQ ID NO: 4801 - protein, 295 aa, Homo Sapiens
METCAGPHPLRLFLCRMQLCLALLLGPWRPGTAEEVILLDSKASQAELGWTALPSNGWEEISGVDEHDRPIRTYQVCNVLEPNQDNWLQTGWISRGRGQRIFVELQFTLRDCSSIPGAAGTCKETFNVYYLETEADLGRGRPRLGGSRPRKIDTIAADESFTQGDLGERKMKLNTEVREIGPLSRRGFHLAFQDVGACVALVSVRVYYKQCRATVRGLATFPATAAESAFSTLVEVAGTCVAHSEGEPGSPPRMHCGADGEWLVPVGRCSCSAGFQERGDFCEGIQLAGGRGVGV

SEQ ID NO: 4802 - protein, 1008 aa, Homo Sapiens
METCAGPHPLRLFLCRMQLCLALLLGPWRPGTAEEVILLDSKASQAELGWTALPSNGWEEISGVDEHDRPIRTYQVCNVLEPNQDNWLQTGWISRGRGQRIFVELQFTLRDCSSIPGAAGTCKETFNVYYLETEADLGRGRPRLGGSRPRKIDTIAADESFTQGDLGERKMKLNTEVREIGPLSRRGFHLAFQDVGACVALVSVRVYYKQCRATVRGLATFPATAAESAFSTLVEVAGTCVAHSEGEPGSPPRMHCGADGEWLVPVGRCSCSAGFQERGDFCEACPPGFYKVSPRRPLCSPCPEHSRALENASTFCVCQDSYARSPTDPPSASCTRPPSAPRDLQYSLSRSPLVLRLRWLPPADSGGRSDVTYSLLCLRCGREGPAGACEPCGPRVAFLPRQAGLRERAATLLHLRPGARYTVRVAALNGVSGPAAAAGTTYAQVTVSTGPGAPWEEDEIRRDRVEPQSVSLSWREPIPAGAPGANDTEYEIRYYEKGQSEQTYSMVKTGAPTVTVTNLKPATRYVFQIRAASPGPSWEAQSFNPSIEVQTLGEAASGSRDQSPAIVVTVVTISALLVLGSVMSVLAIWRRPCSYGKGGGDAHDEEELYFHFKVPTRRTFLDPQSCGDLLQAVHLFAKELDAKSVTLERSLGGGRFGELCCGCLQLPGRQELLVAVHMLRDSASDSQRLGFLAEALTLGQFDHSHIVRLEGVVTRGSTLMIVTEYMSHGALDGFLRRHEGQLVAGQLMGLLPGLASAMKYLSEMGYVHRGLAARHVLVSSDLVCKISGFGRGPRDRSEAVYTTMSGRSPALWAAPETLQFGHFSSASDVWSFGIIMWEVMAFGERPYWDMSGQDVIKAVEDGFRLPPPRNCPNLLHRLMLDCWQKDPGERPRFSQIHSILSKMVQDPEPPKCALTTCPRPPTPLADRAFSTFPSFGSVGAWLEALDLCRYKDSFAAAGYGSLEAVAEMTAQDLVSLGISLAEHREALLSGISALQARVLQLQGQGVQV

SEQ ID NO: 4803 - protein, 1014 aa, Homo Sapiens
METCAGPHPLRLFLCRMQLCLALLLGPWRPGTAEEVILLDSKASQAELGWTALPSNGWEEISGVDEHDRPIRTYQVCNVLEPNQDNWLQTGWISRGRGQRIFVELQFTLRDCSSIPGAAGTCKETFNVYYLETEADLGRGRPRLGGSRPRKIDTIAADESFTQGDLGERKMKLNTEVREIGPLSRRGFHLAFQDVGACVALVSVRVYYKQCRATVRGLATFPATAAESAFSTLVEVAGTCVAHSEGEPGSPPRMHCGADGEWLVPVGRCSCSAGFQERGDFCEACPPGFYKVSPRRPLCSPCPEHSRALENASTFCVCQDSYARSPTDPPSASCTRPPSAPRDLQYSLSRSPLVLRLRWLPPADSGGRSDVTYSLLCLRCGREGPAGACEPCGPRVAFLPRQAGLRERAATLLHLRPGARYTVRVAALNGVSGPAAAAGTTYAQVTVSTGPGAPWEEDEIRRDRVEPQSVSLSWREPIPAGAPGANDTEYEIRYYEKGQSEQTYSMVKTGAPTVTVTNLKPATRYVFQIRAASPGPSWEAQSFNPSIEVQTLGEAASGSRDQSPAIVVTVVTISALLVLGSVMSVLAIWRRPCSYGKGGGDAHDEEELYFHFKVPTRRTFLDPQSCGDLLQAVHLFAKELDAKSVTLERSLGGGRFGELCCGCLQLPGRQELLVAVHMLRDSASDSQRLGFLAEALTLGQFDHSHIVRLEGVVTRGSTLMIVTEYMSHGALDGFLRRHEGQLVAGQLMGLLPGLASAMKYLSEMGYVHRGLAARHVLVSSDLVCKISGFGRGPRDRSEAVYTTMSGRSPALWAAPETLQFGHFSSASDVWSFGIIMWEVMAFGERPYWDMSGQDVIKAVEDGFRLPPPRNCPNLLHRLMLDCWQKDPGERPRFSQIHSILSKMVQDPEPPKCALTTCPRPPTPLADRAFSTFPSFGSVGAWLEALDLCRYKDSFAAAGYGSLEAVAEMTAQDLVSLGISLAEHREALLSGISALQARVLQLQGQGVQVIIKTCL

SEQ ID NO: 4804 - protein, 155 aa, Homo Sapiens
MVKTGAPTVTVTNLKPATRYVFQIRAASPGPSWEAQSFNPSIEVQTLGEAASGSRDQSPAIVVTVVTISALLVLGSVMSVLAIWRRPCSYGKGGGDAHDEEELYFHFKVPTRRTFLDPQSCGDLLQAVHLFAKELDAKSVTLERSLGGGLETSPH

SEQ ID NO: 4805 - protein, 92 aa, Homo Sapiens
  misc_feature (1)..(1): Xaa can be any naturally occurring amino acid
XHLRPGARYTVRVAALNGVSGPAAAAGTTYAQVTVSTGPGAPWEEDEIRRDRVEPQSVSLSWREPIPAGAPGANDTEYEIRYYEKDTCADFC

SEQ ID NO: 4806 - protein, 217 aa, Homo Sapiens
  misc_feature (1)..(1): Xaa can be any naturally occurring amino acid
XQIRAASPGPSWEAQSFNPSIEVQTLGEAASGSRDQSPAIVVTVVTISALLVLGSVMSVLAIWRRPCSYGKGGGDAHDEEELYFHFKVPTRRTFLDPQSCGDLLQAVHLFAKELDAKSVTLERSLGGGLCSCLEALPPHQAHPPPRKSLACLIIGKRMAEGSVTLSWSSRAVWGAVLWLLAAPRSPGAARSRAYAEGQRLRLTEARLPGRGPHAGPV

SEQ ID NO: 4807 - protein, 983 aa, Homo Sapiens
MDCQLSILLLLSCSVLDSFGELIPQPSNEVNLLDSKTIQGELGWISYPSHGWEEISGVDEHYTPIRTYQVCNVMDHSQNNWLRTNWVPRNSAQKIYVELKFTLRDCNSIPLVLGTCKETFNLYYMESDDDHGVKFREHQFTKIDTIAADESFTQMDLGDRILKLNTEIREVGPVNKKGFYLAFQDVGACVALVSVRVYFKKCPFTVKNLAMFPDTVPMDSQSLVEVRGSCVNNSKEEDPPRMYCSTEGEWLVPIGKCSCNAGYEERGFMCQACRPGFYKALDGNMKCAKCPPHSSTQEDGSMNCRCENNYFRADKDPPSMACTRPPSSPRNVISNINETSVILDWSWPLDTGGRKDVTFNIICKKCGWNIKQCEPCSPNVRFLPRQFGLTNTTVTVTDLLAHTNYTFEIDAVNGVSELSSPPRQFAAVSITTNQAAPSPVLTIKKDRTSRNSISLSWQEPEHPNGIILDYEVKYYEKQEQETSYTILRARGTNVTISSLKPDTIYVFQIRARTAAGYGTNSRKFEFETSPDSFSISGESSQVVMIAISAAVAIILLTVVIYVLIGRFCGYKSKHGADEKRLHFGNGHLKLPGLRTYVDPHTYEDPTQAVHEFAKELDATNISIDKVVGAGEFGEVCSGRLKLPSKKEISVAIKTLKVGYTEKQRRDFLGEASIMGQFDHPNIIRLEGVVTKSKPVMIVTEYMENGSLDSFLRKHDAQFTVIQLVGMLRGIASGMKYLSDMGYVHRDLAARNILINSNLVCKVSDFGLSRVLEDDPEAAYTTRGGKIPIRWTSPEAIAYRKFTSASDVWSYGIVLWEVMSYGERPYWEMSNQDVIKAVDEGYRLPPPMDCPAALYQLMLDCWQKDRNNRPKFEQIVSILDKLIRNPGSLKIITSAAARPSNLLLDQSNVDITTFRTTGDWLNGVWTAHCKEIFTGVEYSSCDTIAKISTDDMKKVGVTVVGPQKKIISSIKALETQSKNGPVPV

SEQ ID NO: 4808 - protein, 918 aa, Homo Sapiens
MDCQLSILLLLSCSVLDSFGELIPQPSNEVNLLDSKTIQGELGWISYPSHGWEEISGVDEHYTPIRTYQVCNVMDHSQNNWLRTNWVPRNSAQKIYVELKFTLRDCNSIPLVLGTCKETFNLYYMESDDDHGVKFREHQFTKIDTIAADESFTQMDLGDRILKLNTEIREVGPVNKKGFYLAFQDVGACVALVSVRVYFKKCPFTVKNLAMFPDTVPMDSQSLVEVRGSCVNNSKEEDPPRMYCSTEGEWLVPIGKCSCNAGYEERGFMCQACRPGFYKALDGNMKCAKCPPHSSTQEDGSMNCRCENNYFRADKDPPSMACTRPPSSPRNVISNINETSVILDWSWPLDTGGRKDVTFNIICKKCGWNIKQCEPCSPNVRFLPRQFGLTNTTVTVTDLLAHTNYTFEIDAVNGVSELSSPPRQFAAVSITTNQAAPSPVLTIKKDRTSRNSISLSWQEPEHPNGIILDYEVKYYEKQEQETSYTILRARGTNVTISSLKPDTIYVFQIRARTAAGYGTNSRKFEFETSPDSFSISGESSQVVMIAISAAVAIILLTVVIYVLIGRFCGYKSKHGADEKRLHFGNGHLKLPGLRTYVDPHTYEDPTQAVHEFAKELDATNISIDKVVGAGEFGEVCSGRLKLPSKKEISVAIKTLKVGYTEKQRRDFLGEASIMGQFDHPNIIRLEGVVTKSKPVMIVTEYMENGSLDSFLRKHDAQFTVIQLVGMLRGIASGMKYLSDMGYVHRDLAARNILINSNLVCKVSDFGLSRVLEDDPEAAYTTRGGKIPIRWTSPEAIAYRKFTSASDVWSYGIVLWEVMSYGERPYWEMSNQDVIKAVDEGYRLPPPMDCPAALYQLMLDCWQKDRNNRPKFEQIVSILDKLIRNPGSLKIITSAAARPSNLLLDQSNVDITTFRTTVT

SEQ ID NO: 4809 - protein, 539 aa, Homo Sapiens
MDCQLSILLLLSCSVLDSFGELIPQPSNEVNLLDSKTIQGELGWISYPSHGWEEISGVDEHYTPIRTYQVCNVMDHSQNNWLRTNWVPRNSAQKIYVELKFTLRDCNSIPLVLGTCKETFNLYYMESDDDHGVKFREHQFTKIDTIAADESFTQMDLGDRILKLNTEIREVGPVNKKGFYLAFQDVGACVALVSVRVYFKKCPFTVKNLAMFPDTVPMDSQSLVEVRGSCVNNSKEEDPPRMYCSTEGEWLVPIGKCSCNAGYEERGFMCQACRPGFYKALDGNMKCAKCPPHSSTQEDGSMNCRCENNYFRADKDPPSMACTRPPSSPRNVISNINETSVILDWSWPLDTGGRKDVTFNIICKKCGWNIKQCEPCSPNVRFLPRQFGLTNTTVTVTDLLAHTNYTFEIDAVNGVSELSSPPRQFAAVSITTNQAAPSPVLTIKKDRTSRNSISLSWQEPEHPNGIILDYEVKYYEKQEQETSYTILRARGTNVTISSLKPDTIYVFQIRARTAAGYGTNSRKFEFETSPDCMYYFNAV

SEQ ID NO: 4810 - protein, 37 aa, Homo Sapiens
AYRKFTSASDVWSYGIVMWEVMSYGERPYWDMSNQDT

SEQ ID NO: 4811 - protein, 177 aa, Homo Sapiens
MAGIFYFALFSCLFGICDAVTGSRVYPANEGPPSAPLNLISNVNETSVNLEWSSPQNTGGRQDISYNVVCKKCGAGDPSKCRPCGSGVHYTPQQNGLKTTKVSITDLLAHTNYTFEIWAVNGVSKYNPNPDQSVSVTVTTNQAAPSSIALVQAKEVTRYSVALAWLEPDRPNGVILE

SEQ ID NO: 4812 - protein, 38 aa, Homo Sapiens
MAGIFYFALFSCLFGICDAVTGSRVYPANEVGGSEYHG

SEQ ID NO: 4813 - protein, 91 aa, Homo Sapiens
MAGIFYFALFSCLFGICDAVTGSRVYPANEVTLLDSRSVQGELGWIASPLEGGWEEVSIMDEKNTPIRTYQVCNVMEPSQNNWLRTDWITR

SEQ ID NO: 4814 - protein, 149 aa, Homo Sapiens
MAGIFYFALFSCLFGICDAVTGSRVYPANEVTLLDSRSVQGELGWIASPLEGGWEEVSIMDEKNTPIRTYQVCNVMEPSQNNWLRTDWITREGAQRVYIEIKFTLRDCNSLPGVMGTCKETFNLYYYESDNDKERFIRENQFVKIDTIA

SEQ ID NO: 4815 - protein, 986 aa, Homo Sapiens
MAGIFYFALFSCLFGICDAVTGSRVYPANEVTLLDSRSVQGELGWIASPLEGGWEEVSIMDEKNTPIRTYQVCNVMEPSQNNWLRTDWITREGAQRVYIEIKFTLRDCNSLPGVMGTCKETFNLYYYESDNDKERFIRENQFVKIDTIAADESFTQVDIGDRIMKLNTEIRDVGPLSKKGFYLAFQDVGACIALVSVRVFYKKCPLTVRNLAQFPDTITGADTSSLVEVRGSCVNNSEEKDVPKMYCGADGEWLVPIGNCLCNAGHEERSGECQACKIGYYKALSTDATCAKCPPHSYSVWEGATSCTCDRGFFRADNDAASMPCTRPPSAPLNLISNVNETSVNLEWSSPQNTGGRQDISYNVVCKKCGAGDPSKCRPCGSGVHYTPQQNGLKTTKVSITDLLAHTNYTFEIWAVNGVSKYNPNPDQSVSVTVTTNQAAPSSIALVQAKEVTRYSVALAWLEPDRPNGVILEYEVKYYEKDQNERSYRIVRTAARNTDIKGLNPLTSYVFHVRARTAAGYGDFSEPLEVTTNTVPSRIIGDGANSTVLLVSVSGSVVLVVILIAAFVISRRRSKYSKAKQEADEEKHLNQGVRTYVDPFTYEDPNQAVREFAKEIDASCIKIEKVIGVGEFGEVCSGRLKVPGKREICVAIKTLKAGYTDKQRRDFLSEASIMGQFDHPNIIHLEGVVTKCKPVMIITEYMENGSLDAFLRKNDGRFTVIQLVGMLRGIGSGMKYLSDMSYVHRDLAARNILVNSNLVCKVSDFGMSRVLEDDPEAAYTTRGGKIPIRWTAPEAIAYRKFTSASDVWSYGIVMWEVMSYGERPYWDMSNQDVIKAIEEGYRLPPPMDCPIALHQLMLDCWQKERSDRPKFGQIVNMLDKLIRNPNSLKRTGTESSRPNTALLDPSSPEFSAVVSVGDWLQAIKMDRYKDNFTAAGYTTLEAVVHVNQEDLARIGITAITHQNKILSSVQAMRTQMQQMHGRMVPV

SEQ ID NO: 4816 - protein, 986 aa, Homo Sapiens; identical to SEQ ID NO: 4815

SEQ ID NO: 4817 - protein, 949 aa, Homo Sapiens
MAGIFYFALFSCLFGICDAVTGSRVYPANEVTLLDSRSVQGELGWIASPLEGGWEEVSIMDEKNTPIRTYQVCNVMEPSQNNWLRTDWITREGAQRVYIEIKFTLRDCNSLPGVMGTCKETFNLYYYESDNDKERFIRENQFVKIDTIAADESFTQVDIGDRIMKLNTEIRDVGPLSKKGFYLAFQDVGACIALVSVRVFYKKCPLTVRNLAQFPDTITGADTSSLVEVRGSCVNNSEEKDVPKMYCGADGEWLVPIGNCLCNAGHEERSGECQACKIGYYKALSTDATCAKCPPHSYSVWEGATSCTCDRGFFRADNDAASMPCTRPPSAPLNLISNVNETSVNLEWSSPQNTGGRQDISYNVVCKKCGAGDPSKCRPCGSGVHYTPQQNGLKTTKVSITDLLAHTNYTFEIWAVNGVSKYNPNPDQSVSVTVTTNQAAPSSIALVQAKEVTRYSVALAWLEPDRPNGVILEYEVKYYEKDQNERSYRIVRTAARNTDIKGLNPLTSYVFHVRARTAAGYGDFSEPLEVTTNTVPSRIIGDGANSTVLLVSVSGSVVLVVILIAAFVISRRRSKYSKAKQEADEEKHLNQGVRTYVDPFTYEDPNQAVREFAKEIDASCIKIEKVIGVGEFGEVCSGRLKVPGKREICVAIKTLKAGYTDKQRRDFLSEASIMGQFDHPNIIHLEGVVTKCKPVMIITEYMENGSLDAFLRKNDGRFTVIQLVGMLRGIGSGMKYLSDMSYVHRDLAARNILVNSNLVCKVSDFGMSRVLEDDPEAAYTTRGGKIPIRWTAPEAIAYRKFTSASDVWSYGIVMWEVMSYGERPYWDMSNQDVIKAIEEGYRLPPPMDCPIALHQLMLDCWQKERSDRPKFGQIVNMLDKLIRNPNSLKRTGTESSRPNTALLDPSSPEFSAVVSVGDWLQAIKMDRYKDNFTAAGYTTLEAVVHVNQE

SEQ ID NO: 4818 - protein, 126 aa, Homo Sapiens
MDEKNTPIRTYQVCNVMEPSQNNWLRTDWITREGAQRVYIEIKFTLRDCNSLPGVMGTCKETFNLYYYESDNDKERFIRENQFVKIDTIAADESFTQVDIGDRIMKLNTEIRDVGPLSKKGFYLAF

SEQ ID NO: 4819 - protein, 189 aa, Homo Sapiens
  misc_feature (1)..(1): Xaa can be any naturally occurring amino acid
XFHGSLSSTHFTCKIGYYKALSTDATCAKCPPHSYSVWEGATSCTCDRGFFRADNDAASMPCTRPPSAPLNLISNVNETSVNLEWSSPQNTGGRQDISYNVVCKKCGAGDPSKCRPCGSGVHYTPQQNGLKTTKVSITDLLAHTNYTFEIWAVNGVSKYNPNPDQSVSVTVTTNQAAPSSIALVQAKEV

SEQ ID NO: 4820 - protein, 279 aa, Homo Sapiens
MVFQTRYPSWIILCYIWLLRFAHTGEAQAAKEVLLLDSKAQQTELEWISSPPNGWEEISGLDENYTPIRTYQVCQVMEPNQNNWLRTNWISKGNAQRIFVELKFTLRDCNSLPGVLGTCKETFNLYYYETDYDTGRNIRENLYVKIDTIAADESFTQGDLGERKMKLNTEVREIGPLSKKGFYLAFQDVGACIALVSVKVYYKKCWSIIENLAIFPDTVTGSEFSSLVEVRGTCVSSAEEEAENAPRMHCSAEGEWLVPIGKCICKAGYQQKGDTCERK

SEQ ID NO: 4821 - protein, 998 aa, Homo Sapiens
MVFQTRYPSWIILCYIWLLRFAHTGEAQAAKEVLLLDSKAQQTELEWISSPPNGWEEISGLDENYTPIRTYQVCQVMEPNQNNWLRTNWISKGNAQRIFVELKFTLRDCNSLPGVLGTCKETFNLYYYETDYDTGRNIRENLYVKIDTIAADESFTQGDLGERKMKLNTEVREIGPLSKKGFYLAFQDVGACIALVSVKVYYKKCWSIIENLAIFPDTVTGSEFSSLVEVRGTCVSSAEEEAENAPRMHCSAEGEWLVPIGKCICKAGYQQKGDTCEPCGRGFYKSSSQDLQCSRCPTHSFSDKEGSSRCECEDGYYRAPSDPPYVACTRPPSAPQNLIFNINQTTVSLEWSPPADNGGRNDVTYRILCKRCSWEQGECVPCGSNIGYMPQQTGLEDNYVTVMDLLAHANYTFEVEAVNGVSDLSRSQRLFAAVSITTGQAAPSQVSGVMKERVLQRSVELSWQEPEHPNGVITEYEIKYYEKDQRERTYSTVKTKSTSASINNLKPGTVYVFQIRAFTAAGYGNYSPRLDVATLEEATGKMFEATAVSSEQNPVIIIAVVAVAGTIILVFMVFGFIIGRRHCGYSKADQEGDEELYFHFKFPGTKTYIDPETYEDPNRAVHQFAKELDASCIKIERVIGAGEFGEVCSGRLKLPGKRDVAVAIKTLKVGYTEKQRRDFLCEASIMGQFDHPNVVHLEGVVTRGKPVMIVIEFMENGALDAFLRKHDGQFTVIQLVGMLRGIAAGMRYLADMGYVHRDLAARNILVNSNLVCKVSDFGLSRVIEDDPEAVYTTTGGKIPVRWTAPEAIQYRKFTSASDVWSYGIVMWEVMSYGERPYWDMSNQDVIKAIEEGYRLPAPMDCPAGLHQLMLDCWQKERAERPKFEQIVGILDKMIRNPNSLKTPLGTCSRPISPLLDQNTPDFTTFCSVGEWLQAIKMERYKDNFTAAGYNSLESVARMTIEDVMSLGITLVGHQKKIMSSIQTMRAQMLHLHGTGIQV

SEQ ID NO: 4822 - protein, 1005 aa, Homo Sapiens
MAPARGRLPPALWVVTAAAAAATCVSAARGEVNLLDTSTIHGDWGWLTYPAHGWDSINEVDESFQPIHTYQVCNVMSPNQNNWLRTSWVPRDGARRVYAEIKFTLRDCNSMPGVLGTCKETFNLYYLESDRDLGASTQESQFLKIDTIAADESFTGADLGVRRLKLNTEVRSVGPLSKRGFYLAFQDIGACLAILSLRIYYKKCPAMVRNLAAFSEAVTGADSSSLVEVRGQCVRHSEERDTPKMYCSAEGEWLVPIGKCVCSAGYEERRDACVACELGFYKSAPGDQLCARCPPHSHSAAPAAQACHCDLSYYRAALDPPSSACTRPPSAPVNLISSVNGTSVTLEWAPPLDPGGRSDITYNAVCRRCPWALSRCEACGSGTRFVPQQTSLVQASLLVANLLAHMNYSFWIEAVNGVSDLSPEPRRAAVVNITTNQAAPSQVVVIRQERAGQTSVSLLWQEPEQPNGIILEYEIKYYEKDKEMQSYSTLKAVTTRATVSGLKPGTRYVFQVRARTSAGCGRFSQAMEVETGKPRPRYDTRTIVWICLTLITGLVVLLLLLICKKRHCGYSKAFQDSDEEKMHYQNGQAPPPVFLPLHHPPGKLPEPQFYAEPHTYEEPGRAGRSFTREIEASRIHIEKIIGSGDSGEVCYGRLRVPGQRDVPVAIKALKAGYTERQRRDFLSEASIMGQFDHPNIIRLEGVVTRGRLAMIVTEYMENGSLDTFLRTHDGQFTIMQLVGMLRGVGAGMRYLSDLGYVHRDLAARNVLVDSNLVCKVSDFGLSRVLEDDPDAAYTTTGGKIPIRWTAPEAIAFRTFSSASDVWSFGVVMWEVLAYGERPYWNMTNRDVISSVEEGYRLPAPMGCPHALHQLMLDCWHKDRAQRPRFSQIVSVLDALIRSPESLRATATVSRCPPPAFVRSCFDLRGGSGGGGGLTVGDWLDSIRMGRYRDHFAAGGYSSLGMVLRMNAQDVRALGITLMGHQKKILGSIQTMRAQLTSTQGPRRHL

SEQ ID NO: 4823 - protein, 495 aa, Homo Sapiens
MAPARGRLPPALWVVTAAAAAATCVSAARGEVNLLDTSTIHGDWGWLTYPAHGWDSINEVDESFQPIHTYQVCNVMSPNQNNWLRTSWVPRDGARRVYAEIKFTLRDCNSMPGVLGTCKETFNLYYLESDRDLGASTQESQFLKIDTIAADESFTGADLGVRRLKLNTEVRSVGPLSKRGFYLAFQDIGACLAILSLRIYYKKCPAMVRNLAAFSEAVTGADSSSLVEVRGQCVRHSEERDTPKMYCSAEGEWLVPIGKCVCSAGYEERRDACVACELGFYKSAPGDQLCARCPPHSHSAAPAAQACHCDLSYYRAALDPPSSACTRPPSAPVNLISSVNGTSVTLEWAPPLDPGGRSDITYNAVCRRCPWALSRCEACGSGTRFVPQQTSLVQASLLVANLLAHMNYSFWIEAVNGVSDLSPEPRRAAVVNITTNQAGRRRNSVPQRPGPPASPASDPSRDQSSAGDVLWAFRQVPLWPCAPHQDPELEALHCL

SEQ ID NO: 4824 - protein, 986 aa, Homo Sapiens
MALRRLGAALLLLPLLAAVEETLMDSTTATAELGWMVHPPSGWEEVSGYDENMNTIRTYQVCNVFESSQNNWLRTKFIRRRGAHRIHVEMKFSVRDCSSIPSVPGSCKETFNLYYYEADFDSATKTFPNWMENPWVKVDTIAADESFSQVDLGGRVMKINTEVRSFGPVSRSGFYLAFQDYGGCMSLIAVRVFYRKCPRIIQNGAIFQETLSGAESTSLVAARGSCIANAEEVDVPIKLYCNGDGEWLVPIGRCMCKAGFEAVENGTVCRGCPSGTFKANQGDEACTHCPINSRTTSEGATNCVCRNGYYRADLDPLDMPCTTIPSAPQAVISSVNETSLMLEWTPPRDSGGREDLVYNIICKSCGSGRGACTRCGDNVQYAPRQLGLTEPRIYISDLLAHTQYTFEIQAVNGVTDQSPFSPQFASVNITTNQAAPSAVSIMHQVSRTVDSITLSWSQPDQPNGVILDYELQYYEKELSEYNATAIKSPTNTVTVQGLKAGAIYVFQVRARTVAGYGRYSGKMYFQTMTEAEYQTSIQEKLPLIIGSSAAGLVFLIAVVVIAIVCNRRGFERADSEYTDKLQHYTSGHMTPGMKIYIDPFTYEDPNEAVREFAKEIDISCVKIEQVIGAGEFGEVCSGHLKLPGKREIFVAIKTLKSGYTEKQRRDFLSEASIMGQFDHPNVIHLEGVVTKSTPVMIITEFMENGSLDSFLRQNDGQFTVIQLVGMLRGIAAGMKYLADMNYVHRDLAARNILVNSNLVCKVSDFGLSRFLEDDTSDPTYTSALGGKIPIRWTAPEAIQYRKFTSASDVWSYGIVMWEVMSYGERPYWDMTNQDVINAIEQDYRLPPPMDCPSALHQLMLDCWQKDRNHRPKFGQIVNTLDKMIRNPNSLKAMAPLSSGINLPLLDRTIPDYTSFNTVDEWLEAIKMGQYKESFANAGFTSFDVVSQMMMEDILRVGVTLAGHQKKILNSIQVMRAQMNQIQSVEV

SEQ ID NO: 4825 - protein, 1055 aa, Homo Sapiens
MALRRLGAALLLLPLLAAVEETLMDSTTATAELGWMVHPPSGWEEVSGYDENMNTIRTYQVCNVFESSQNNWLRTKFIRRRGAHRIHVEMKFSVRDCSSIPSVPGSCKETFNLYYYEADFDSATKTFPNWMENPWVKVDTIAADESFSQVDLGGRVMKINTEVRSFGPVSRSGFYLAFQDYGGCMSLIAVRVFYRKCPRIIQNGAIFQETLSGAESTSLVAARGSCIANAEEVDVPIKLYCNGDGEWLVPIGRCMCKAGFEAVENGTVCRGCPSGTFKANQGDEACTHCPINSRTTSEGATNCVCRNGYYRADLDPLDMPCTTIPSAPQAVISSVNETSLMLEWTPPRDSGGREDLVYNIICKSCGSGRGACTRCGDNVQYAPRQLGLTEPRIYISDLLAHTQYTFEIQAVNGVTDQSPFSPQFASVNITTNQAAPSAVSIMHQVSRTVDSITLSWSQPDQPNGVILDYELQYYEKELSEYNATAIKSPTNTVTVQGLKAGAIYVFQVRARTVAGYGRYSGKMYFQTMTEAEYQTSIQEKLPLIIGSSAAGLVFLIAVVVIAIVCNRRGFERADSEYTDKLQHYTSGHMTPGMKIYIDPFTYEDPNEAVREFAKEIDISCVKIEQVIGAGEFGEVCSGHLKLPGKREIFVAIKTLKSGYTEKQRRDFLSEASIMGQFDHPNVIHLEGVVTKSTPVMIITEFMENGSLDSFLRQNDGQFTVIQLVGMLRGIAAGMKYLADMNYVHRDLAARNILVNSNLVCKVSDFGLSRFLEDDTSDPTYTSALGGKIPIRWTAPEAIQYRKFTSASDVWSYGIVMWEVMSYGERPYWDMTNQDVINAIEQDYRLPPPMDCPSALHQLMLDCWQKDRNHRPKFGQIVNTLDKMIRNPNSLKAMAPLSSGINLPLLDRTIPDYTSFNTVDEWLEAIKMGQYKESFANAGFTSFDVVSQMMMEDILRVGVTLAGHQKKILNSIQVMRAQMNQIQSVEGQPLARRPRATGRTKRCQPRDVTKKTCNSNDGKKKGMGKKKTDPGRGREIQGIFFKEDSHKESNDCSCGG

SEQ ID NO: 4826 - protein, 987 aa, Homo Sapiens
MALRRLGAALLLLPLLAAVEETLMDSTTATAELGWMVHPPSGWEEVSGYDENMNTIRTYQVCNVFESSQNNWLRTKFIRRRGAHRIHVEMKFSVRDCSSIPSVPGSCKETFNLYYYEADFDSATKTFPNWMENPWVKVDTIAADESFSQVDLGGRVMKINTEVRSFGPVSRSGFYLAFQDYGGCMSLIAVRVFYRKCPRIIQNGAIFQETLSGAESTSLVAARGSCIANAEEVDVPIKLYCNGDGEWLVPIGRCMCKAGFEAVENGTVCRGCPSGTFKANQGDEACTHCPINSRTTSEGATNCVCRNGYYRADLDPLDMPCTTIPSAPQAVISSVNETSLMLEWTPPRDSGGREDLVYNIICKSCGSGRGACTRCGDNVQYAPRQLGLTEPRIYISDLLAHTQYTFEIQAVNGVTDQSPFSPQFASVNITTNQAAPSAVSIMHQVSRTVDSITLSWSQPDQPNGVILDYELQYYEKELSEYNATAIKSPTNTVTVQGLKAGAIYVFQVRARTVAGYGRYSGKMYFQTMTEAEYQTSIQEKLPLIIGSSAAGLVFLIAVVVIAIVCNRRRGFERADSEYTDKLQHYTSGHMTPGMKIYIDPFTYEDPNEAVREFAKEIDISCVKIEQVIGAGEFGEVCSGHLKLPGKREIFVAIKTLKSGYTEKQRRDFLSEASIMGQFDHPNVIHLEGVVTKSTPVMIITEFMENGSLDSFLRQNDGQFTVIQLVGMLRGIAAGMKYLADMNYVHRDLAARNILVNSNLVCKVSDFGLSRFLEDDTSDPTYTSALGGKIPIRWTAPEAIQYRKFTSASDVWSYGIVMWEVMSYGERPYWDMTNQDVINAIEQDYRLPPPMDCPSALHQLMLDCWQKDRNHRPKFGQIVNTLDKMIRNPNSLKAMAPLSSGINLPLLDRTIPDYTSFNTVDEWLEAIKMGQYKESFANAGFTSFDVVSQMMMEDILRVGVTLAGHQKKILNSIQVMRAQMNQIQSVEV

SEQ ID NO: 4827 - protein, 482 aa, Homo Sapiens
MALRRLGAALLLLPLLAAVEETLMDSTTATAELGWMVHPPSGWEEVSGYDENMNTIRTYQVCNVFESSQNNWLRTKFIRRRGAHRIHVEMKFSVRDCSSIPSVPGSCKETFNLYYYEADFDSATKTFPNWMENPWVKVDTIAADESFSQVDLGGRVMKINTEVRSFGPVSRSGFYLAFQDYGGCMSLIAVRVFYRKCPRIIQNGAIFQETLSGAESTSLVAARGSCIANAEEVDVPIKLYCNGDGEWLVPIGRCMCKAGFEAVENGTVCRGCPSGTFKANQGDEACTHCPINSRTTSEGATNCVCRNGYYRADLDPLDMPCTTIPSAPQAVISSVNETSLMLEWTPPRDSGGREDLVYNIICKSCGSGRGACTRCGDNVQYAPRQLGLTEPRIYISDLLAHTQYTFEIQAVNGVTDQSPFSPQFASVNITTNQAAPSAVSIMHQVSRTVDSITLSWSQPDQPNGVILDYELQYYEKMKTQRS

SEQ ID NO: 4828 - protein, 946 aa, Homo Sapiens
MWVPVLALPVCTYAETLMDSTTATAELGWMVHPPSGWEEVSGYDENMNTIRTYQVCNVFESSQNNWLRTKFIRRRGAHRIHVEMKFSVRDCSSIPSVPGSCKETFNLYYYEADFDSATKTFPNWMENPWVKVDTIAADESFSQVDLGGRVMKINTEVRSFGPVSRSGFYLAFQDYGGCMSLIAVRVFYRKCPRIIQNGAIFQETLSGAESTSLVAARGSCIANAEEVDVPIKLYCNGDGEWLVPIGRCMCKAGFEAVENGTVCRGCPSGTFKANQGDEACTHCPINSRTTSEGATNCVCRNGYYRADLDPLDMPCTTIPSAPQAVISSVNETSLMLEWTPPRDSGGREDLVYNIICKSCGSGRGACTRCGDNVQYAPRQLGLTEPRIYISDLLAHTQYTFEIQAVNGVTDQSPFSPQFASVNITTNQAAPSAVSIMHQVSRTVDSITLSWSQPDQPNGVILDYELQYYEKQELSEYNATAIKSPTNTVTVQGLKAGAIYVFQVRARTVAGYGRYSGKMYFQTMTEAEYQTSIQEKLPLIIGSSAAGLVFLIAVVVIAIVCNRRGFERADSEYTDKLQHYTSGHMTPGMKIYIDPFTYEDPNEAVREFAKEIDISCVKIEQVIGAGEFGEVCSGHLKLPGKREIFVAIKTLKSGYTEKQRRDFLSEASIMGQFDHPNVIHLEGVVTKSTPVMIITEFMENGSLDSFLRQNDGQFTVIQLVGMLRGIAAGMKYLADMNYVHRDLAARNILVNSNLVCKVSDFGLSRFLEDDTSDPTYTSALGGKIPIRWTAPEAIQYRKFTSASDVWSYGIVMWEVMSYGERPYWDMTNQDVINAIEQDYRLPPPMDCPSALHQLMLDCWQKDRNHRPKFGQIVNTLDKMIRNPNSLKAMAPLSSGINLPLLDRTIPDYTSFNTVDEWLEAIKMGQYKESFANAGFTSFDVVSQMMME

SEQ ID NO: 4829 - protein, 935 aa, Homo Sapiens
MELRVLLCWASLAAALEETLLNTKLETADLKWVTFPQVDGQWEELSGLDEEQHSVRTYEVCDVQRAPGQAHWLRTGWVPRRGAVHVYATLRFTMLECLSLPRAGRSCKETFTVFYYESDADTATALTPAWMENPYIKVDTVAAEHLTRKRPGAEATGKVNVKTLRLGPLSKAGFYLAFQDQGACMALLSLHLFYKKCAQLTVNLTRFPETVPRELVVPVAGSCVVDAVPAPGPSPSLYCREDGQWAEQPVTGCSCAPGFEAAEGNTKCRACAQGTFKPLSGEGSCQPCPANSHSNTIGSAVCQCRVGYFRARTDPRGAPCTTPPSAPRSVVSRLNGSSLHLEWSAPLESGGREDLTYALRCRECRPGGSCAPCGGDLTFDPGPRDLVEPWVVVRGLRPDFTYTFEVTALNGVSSLATGPVPFEPVNVTTDREVPPAVSDIRVTRSSPSSLSLAWAVPRAPSGAVLDYEVKYHEKGAEGPSSVRFLKTSENRAELRGLKRGASYLVQVRARSEAGYGPFGQEHHSQTQLDESEGWREQLALIAGTAVVGVVLVLVVIVVAVLCLRKQSNGREAEYSDKHGQYLIGHGTKVYIDPFTYEDPNEAVREFAKEIDVSYVKIEEVIGAGEFGEVCRGRLKAPGKKESCVAIKTLKGGYTERQRREFLSEASIMGQFEHPNIIRLEGVVTNSMPVMILTEFMENGALDSFLRLNDGQFTVIQLVGMLRGIASGMRYLAEMSYVHRDLAARNILVNSNLVCKVSDFGLSRFLEENSSDPTYTSSLGGKIPIRWTAPEAIAFRKFTSASDAWSYGIVMWEVMSFGERPYWDMSNQDVINAIEQDYRLPPPPDCPTSLHQLMLDCWQKDRNARPRFPQVVSALDKMIRNPASLKIVARENGGDLLRIGVTLAGHQKKILASVQHMKSQAKPGTPGGTGGPAPQY

SEQ ID NO: 4830 - protein, 987 aa, Homo Sapiens
MELRVLLCWASLAAALEETLLNTKLETADLKWVTFPQVDGQWEELSGLDEEQHSVRTYEVCDVQRAPGQAHWLRTGWVPRRGAVHVYATLRFTMLECLSLPRAGRSCKETFTVFYYESDADTATALTPAWMENPYIKVDTVAAEHLTRKRPGAEATGKVNVKTLRLGPLSKAGFYLAFQDQGACMALLSLHLFYKKCAQLTVNLTRFPETVPRELVVPVAGSCVVDAVPAPGPSPSLYCREDGQWAEQPVTGCSCAPGFEAAEGNTKCRACAQGTFKPLSGEGSCQPCPANSHSNTIGSAVCQCRVGYFRARTDPRGAPCTTPPSAPRSVVSRLNGSSLHLEWSAPLESGGREDLTYALRCRECRPGGSCAPCGGDLTFDPGPRDLVEPWVVVRGLRPDFTYTFEVTALNGVSSLATGPVPFEPVNVTTDREVPPAVSDIRVTRSSPSSLSLAWAVPRAPSGAVLDYEVKYHEKGAEGPSSVRFLKTSENRAELRGLKRGASYLVQVRARSEAGYGPFGQEHHSQTQLDESEGWREQLALIAGTAVVGVVLVLVVIVVAVLCLRKQSNGREAEYSDKHGQYLIGHGTKVYIDPFTYEDPNEAVREFAKEIDVSYVKIEEVIGAGEFGEVCRGRLKAPGKKESCVAIKTLKGGYTERQRREFLSEASIMGQFEHPNIIRLEGVVTNSMPVMILTEFMENGALDSFLRLNDGQFTVIQLVGMLRGIASGMRYLAEMSYVHRDLAARNILVNSNLVCKVSDFGLSRFLEENSSDPTYTSSLGGKIPIRWTAPEAIAFRKFTSASDAWSYGIVMWEVMSFGERPYWDMSNQDVINAIEQDYRLPPPPDCPTSLHQLMLDCWQKDRNARPRFPQVVSALDKMIRNPASLKIVARENGGASHPLLDQRQPHYSAFGSVGEWLRAIKMGRYEESFAAAGFGSFELVSQISAEDLLRIGVTLAGHQKKILASVQHMKSQAKPGTPGGTGGPAPQY

SEQ ID NO: 4831 - protein, 306 aa, Homo Sapiens
MELRVLLCWASLAAALEETLLNTKLETADLKWVTFPQVDGQWEELSGLDEEQHSVRTYEVCDVQRAPGQAHWLRTGWVPRRGAVHVYATLRFTMLECLSLPRAGRSCKETFTVFYYESDADTATALTPAWMENPYIKVDTVAAEHLTRKRPGAEATGKVNVKTLRLGPLSKAGFYLAFQDQGACMALLSLHLFYKKCAQLTVNLTRFPETVPRELVVPVAGSCVVDAVPAPGPSPSLYCREDGQWAEQPVTGCSCAPGFEAAEGNTKCRGRRGSQQRAVPEDVRKPGRAAGAEAGSQLPGAGTGAL

SEQ ID NO: 4832 - protein, 126 aa, Homo Sapiens
MPELVVTALLAPSRLSLKLLRAFMWSLVFSVALVAAAVYGCIALTHVLCRPRRGCCGRRRSASPACLSDPSLGEHGFLNLKSSGLRLHYVSAGRGNGPLMLFLHGFPENWFSWRYQLREFQSRFHV

SEQ ID NO: 4833 - protein, 360 aa, Homo Sapiens
MPELVVTALLAPSRLSLKLLRAFMWSLVFSVALVAAAVYGCIALTHVLCRPRRGCCGRRRSASPACLSDPSLGEHGFLNLKSSGLRLHYVSAGRGNGPLMLFLHGFPENWFSWRYQLREFQSRFHVVAVDLRGYGPSDAPRDVDCYTIDLLLVDIKDVILGLGYSKCILVAHDWGALLAWHFSIYYPSLVERMVVVSGAPMSVYQDYSLHHISQFFRSHYMFLFQLPWLPEKLLSMSDFQILKTTLTHRKTGIPCLTPSELEAFLYNFSQPGGLTGPLNYYRNLFRNFPLEPQELTTPTLLLWGEKDTYLELGLVEAIGSRFVPGRLEAHILPGIGHWIPQSNPQEMHQYMWAFLQDLLD

SEQ ID NO: 4834 - protein, 360 aa, Homo Sapiens; identical to SEQ ID NO: 4833

SEQ ID NO: 4835 - protein, 360 aa, Homo Sapiens; identical to SEQ ID NO: 4833

SEQ ID NO: 4836 - protein, 193 aa, Homo Sapiens
MGVHECPAWLWLLLSLLSLPLGLPVLGAPPRLICDSRVLERYLLEAKEAENITTGCAEHCSLNENITVPDTKVNFYAWKRMEVGQQAVEVWQGLALLSEAVLRGQALLVNSSQPWEPLQLHVDKAVSGLRSLTTLLRALGAQKEAISPPDAASAAPLRTITADTFRKLFRVYSNFLRGKLKLYTGEACRTGDR

SEQ ID NO: 4837 - protein, 133 aa, Homo Sapiens
MGSSGLLSLLVLFVLLANVQGPGLTDWLFPRRCPKIREECEFQERDVCTKDRQCQDNKKCCVFSCGKKCLDLKQDVCEMPKETGPCLAYFLHWWYDKKDNTCSMFVYGGCQGNNNNFQSKANCLNTCKNKRFP

SEQ ID NO: 4838 - protein, 77 aa, Homo Sapiens
MGSSGLLSLLVLFVLLANVQGPGLTDWLFPRRCPKIREECEFQERDVCTKDRQCQDNKKCCVFSCGKKCLDLKQGKQ

SEQ ID NO: 4839 - protein, 117 aa, Homo Sapiens
MLSKAHGCKTALSLGRCPKIREECEFQERDVCTKDRQCQDNKKCCVFSCGKKCLDLKQDVCEMPKETGPCLAYFLHWWYDKKDNTCSMFVYGGCQGNNNNFQSKANCLNTCKNKRFP

SEQ ID NO: 4840 - protein, 179 aa, Homo Sapiens
MGSSGLLSLLVLFVLLANVQGPGLTDWLFPRRCPKIREECEFQERDVCTKDRQCQDNKKCCVFSCGKKCLDLKQDVCEMPKETGPCLAYFLHWWYDKKDNTCSMFVYGGCQGNNNNFQSKANCLNTCKNKQPCPKIKVECEVEEIDQCTKPRDCPENMKCCPFSRGKKCLDFRKASLST

SEQ ID NO: 4841 - protein, 762 aa, Homo Sapiens
MAAAAQLSLTQLSSGNPVYEKYYRQVDTGNTGRVLASDAAAFLKKSGLPDLILGKIWDLADTDGKGILNKQEFFVALRLVACAQNGLEVSLSSLNLAVPPPRFHDTSSPLLISGTSAAELPWAVKPEDKAKYDAIFDSLSPVNGFLSGDKVKPVLLNSKLPVDILGRVWELSDIDHDGMLDRDEFAVAMFLVYCALEKEPVPMSLPPALVPPSKRKTWVVSPAEKAKYDEIFLKTDKDMDGFVSGLEVREIFLKTGLPSTLLAHIWSLCDTKDCGKLSKDQFALAFHLISQKLIKGIDPPHVLTPEMIPPSDRASLQKNIIGSSPVADFSAIKELDTLNNEIVDLQREKNNVEQDLKEKEDTIKQRTSEVQDLQDEVQRENTNLQKLQAQKQQVQELLDELDEQKAQLEEQLKEVRKKCAEEAQLARSSPELLPSGVTDENEVTTAVTEKVCSELDNNRHSKEEDPFNVDSSSLTGPVADTNLDFFQSDPFVGSDPFKDDPFGKIDPFGGDPFKGSDPFASDCFFRQSTDPFATSSTDPFSAANNSSITSVETLKHNDPFAPGGTVVAASDSATDPFASVFGNESFGGGFADFSTLSKVNNEDPFRSATSSSVSNVVITKNVFEETSVKSEDEPPALPPKIGTPTRPCPLPPGKRSINKLDSPDPFKLNDPFQPFPGNDSPKEKDPEIFCDPFTSATTTTNKEADPSNFANFSAYPSEEDMIEWAKRESEREEEQRLARLNQQEQEDLELAIALSKSEISEA

SEQ ID NO: 4842 - protein, 896 aa, Homo Sapiens
MAAAAQLSLTQLSSGNPVYEKYYRQVDTGNTGRVLASDAAAFLKKSGLPDLILGKIWDLADTDGKGILNKQEFFVALRLVACAQNGLEVSLSSLNLAVPPPRFHDTSSPLLISGTSAAELPWAVKPEDKAKYDAIFDSLSPVNGFLSGDKVKPVLLNSKLPVDILGRVWELSDIDHDGMLDRDEFAVAMFLVYCALEKEPVPMSLPPALVPPSKRKTWVVSPAEKAKYDEIFLKTDKDMDGFVSGLEVREIFLKTGLPSTLLAHIWSLCDTKDCGKLSKDQFALAFHLISQKLIKGIDPPHVLTPEMIPPSDRASLQKNIIGSSPVADFSAIKELDTLNNEIVDLQREKNNVEQDLKEKEDTIKQRTSEVQDLQDEVQRENTNLQKLQAQKQQVQELLDELDEQKAQLEEQLKEVRKKCAEEAQLISSLKAELTSQESQISTYEEELAKAREELSRLQQETAELEESVESGKAQLEPLQQHLQDSQQEISSMQMKLMEMKDLENHNSQLNWCSSPHSILVNGATDYCSLSTSSSETANLNEHVEGQSNLESEPIHQESPARSSPELLPSGVTDENEVTTAVTEKVCSELDNNRHSKEEDPFNVDSSSLTGPVADTNLDFFQSDPFVGSDPFKDDPFGKIDPFGGDPFKGSDPFASDCFFRQSTDPFATSSTDPFSAANNSSITSVETLKHNDPFAPGGTVVAASDSATDPFASVFGNESFGGGFADFSTLSKVNNEDPFRSATSSSVSNVVITKNVFEETSVKSEDEPPALPPKIGTPTRPCPLPPGKRSINKLDSPDPFKLNDPFQPFPGNDSPKEKDPEIFCDPFTSATTTTNKEADPSNFANFSAYPSEEDMIEWAKRESEREEEQRLARLNQQEQEDLELAIALSKSEISEA

SEQ ID NO: 4843 - protein, 90 aa, Homo Sapiens
  misc_feature (1)..(1): Xaa can be any naturally occurring amino acid
XAAAQLSLTQLSSGNPVYEKYYRQVDTGNTGRVLASDAAAFLKKSGLPDLILGKIWDLADTDGKGILNKQHDTSSPLLISGTSAAELPWA

SEQ ID NO: 4844 - protein, 659 aa, Homo Sapiens
MDSQGRVWAQEMLLRVSPDHVTLLDPASKEELESYPLGAIVRCDAVMPPGRSRSLLLLVCQEPERAQPDVHFFQGLRLGAELIREDIQGALHNYRSGRGERRAAALRATQEELQRDRSPAAETPPLQRRPSVRAVISTVERGAGRGRPQAKPIPEAEEAQRPEPVGTSSNADSASPDLGPRGPDLAVLQAEREVDILNHVFDDVESFVSRLQKSAEAARVLEHRERGRRSRRRAAGEGLLTLRAKPPSEAEYTDVLQKIKYAFSLLARLRGNIADPSSPELLHFLFGPLQMIVNTSGGPEFASSVRRPHLTSDAVALLRDNVTPRENELWTSLGDSWTRPGLELSPEEGPPYRPEFFSGWEPPVTDPQSRAWEDPVEKQLQHERRRRQQSAPQVAVNGHRDLEPESEPQLESETAGKWVLCNYDFQARNSSELSVKQRDVLEVLDDSRKWWKVRDPAGQEGYVPYNILTPYPGPRLHHSQSPARSLNSTPPPPPAPAPAPPPALARPRWDRPRWDSCDSLNGLDPSEKEKFSQMLIVNEELQARLAQGRSGPSRAVPGPRAPEPQLSPGSDASEVRAWLQAKGFSSGTVDALGVLTGAQLFSLQKEELRAVSPEEGARVYSQVTVQRSLLEDKEKVSELEAVMEKQKKKVEGEVEMEVI

SEQ ID NO: 4845 - protein, 548 aa, Homo Sapiens
MGRKAIVLAIANTSLAFPLCQHLVTFCLGEDDGVHTVEDASRKLAVMDSQGRVWAQEMLLRVSPDHVTLLDPASKEELESYPLGAIVRCDAVMPPGRSRSLLLLVCQEPERAQPDVHFFQGLRLGAELIREDIQGALHNYRSGRGERRAAALRATQEELQRDRSPAAETPPLQRRPSVRAVISTVERGAGRGRPQAKPIPEAEEAQRPEPVGTSSNADSASPDLGPRGPDLAVLQAEREVDILNHVFDDVESFVSRLQKSAEAARVLEHRERGRRSRRRAAGEGLLTLRAKPPSEAEYTDVLQKIKYAFSLLARLRGNIADPSSPELLHFLFGPLQMIVNTSGGPEFASSVRRPHLTSDAVALLRDNVTPRENELWTSLGDSWTRPGLELSPEEGPPYRPEFFSGWEPPVTDPQSRAWEDPVEKQLQHERRRRQVTQATQQGRGWEVRGRGRSAWPRLTRLSYFLQQSAPQVAVNGHRDLEPESEPQLESETAGKWVLCNYDFQARNSSELSVKQRDVLEDKEKVSELEAVMEKQKKKVEGEVEMEVI

SEQ ID NO: 4846 - protein, 428 aa, Homo Sapiens
MHLVTFCLGEDDGVHTVEDASRKLAVMDSQGRVWAQEMLLRVSPDHVTLLDPASKEELESYPLGAIVRCDAVMPPGRSRSLLLLVCQEPERAQPDVHFFQGLRLGAELIREDIQGALHNYRSGRGERRAAALRATQEELQRDRSPAAETPPLQRRPSVRAVISTVERGAGRGRPQAKPIPEAEEAQRPEPVGTSSNADSASPDLGPRGPDLAVLQAEREVDILNHVFDDVESFVSRLQKSAEAARVLEHRERGRRSRRRAAGEGLLTLRAKPPSEAEYTDVLQKIKYAFSLLARLRGNIADPSSPELLHFLFGPLQMIVNTSGGPEFASSVRRPHLTSDAVALLRDNVTPRENELWTSLGDSWTRPGLELSPEEGPPYRPEFFSGWEPPVTDPQSRAWEDPVEKQLQHERRRRQQSAPQVAVNGWVRW

SEQ ID NO: 4847 - protein, 596 aa, Homo Sapiens
MNRTWPRRIWGSSQDEAELIREDIQGALHNYRSGRGERRAAALRATQEELQRDRSPAAETPPLQRRPSVRAVISTVERGAGRGRPQAKPIPEAEEAQRPEPVGTSSNADSASPDLGPRGPDLAVLQAEREVDILNHVFDDVESFVSRLQKSAEAARVLEHRERGRRSRRRAAGEGLLTLRAKPPSEAEYTDVLQKIKYAFSLLARLRGNIADPSSPELLHFLFGPLQMIVNTSGGPEFASSVRRPHLTSDAVALLRDNVTPRENELWTSLGDSWTRPGLELSPEEGPPYRPEFFSGWEPPVTDPQSRAWEDPVEKQLQHERRRRQQSAPQVAVNGHRDLEPESEPQLESETAGKWVLCNYDFQARNSSELSVKQRDVLEVLDDSRKWWKVRDPAGQEGYVPYNILTPYPGPRLHHSQSPARSLNSTPPPPPAPAPAPPPALARPRWDRPRWDSCDSLNGLDPSEKEKFSQMLIVNEELQARLAQGRSGPSRAVPGPRAPEPQLSPGSDASEVRAWLQAKGFSSGTVDALGVLTGAQLFSLQKEELRAVSPEEGARVYSQVTVQRSLLEDKEKVSELEAVMEKQKKKVEGEVEMEVI

SEQ ID NO: 4848 - protein, 409 aa, Homo Sapiens
MNRTWPRRIWGSSQDEVGFASSVRRPHLTSDAVALLRDNVTPRENELWTSLGDSWTRPGLELSPEEGPPYRPEFFSGWEPPVTDPQSRAWEDPVEKQLQHERRRRQVTQATQQGRGWEVRGRGRSAWPRLTRLSYFLQQSAPQVAVNGHRDLEPESEPQLESETAGKWVLCNYDFQARNSSELSVKQRDVLEVLDDSRKWWKVRDPAGQEGYVPYNILTPYPGPRLHHSQSPARSLNSTPPPPPAPAPAPPPALARPRWDRPRWDSCDSLNGLDPSEKEKFSQMLIVNEELQARLAQGRSGPSRAVPGPRAPEPQLSPGSDASEVRAWLQAKGFSSGTVDALGVLTGAQLFSLQKEELRAVSPEEGARVYSQVTVQRSLLEDKEKVSELEAVMEKQKKKVEGEVEMEVI

SEQ ID NO: 4849 - protein, 723 aa, Homo Sapiens
MSTATGPEAAPKPSAKSIYEQRKRYSTVVMADVSQYPVNHLVTFCLGEDDGVHTVEDASRKLAVMDSQGRVWAQEMLLRVSPDHVTLLDPASKEELESYPLGAIVRCDAVMPPGRSRSLLLLVCQEPERAQPDVHFFQGLRLGAELIREDIQGALHNYRSGRGERRAAALRATQEELQRDRSPAAETPPLQRRPSVRAVISTVERGAGRGRPQAKPIPEAEEAQRPEPVGTSSNADSASPDLGPRGPDLAVLQAEREVDILNHVFDDVESFVSRLQKSAEAARVLEHRERGRRSRRRAAGEGLLTLRAKPPSEAEYTDVLQKIKYAFSLLARLRGNIADPSSPELLHFLFGPLQMIVNTSGGPEFASSVRRPHLTSDAVALLRDNVTPRENELWTSLGDSWTRPGLELSPEEGPPYRPEFFSGWEPPVTDPQSRAWEDPVEKQLQHERRRRQQSAPQVAVNGHRDLEPESEPQLESETAGKWVLCNYDFQARNSSELSVKQRDVLEVLDDSRKWWKVRDPAGQEGYVPYNILTPYPGPRLHHSQSPARSLNSTPPPPPAPAPAPPPALARPRWDRPRWDSCDSLNGLDPSEKEKFSQMLIVNEELQARLAQGRSGPSRAVPGPRAPEPQLSPGSDASEVRAWLQAKGFSSGTVDALGVLTGAQLFSLQKEELRAVSPEEGARVYSQVTVQRSLLEDKEKVSELEAVMEKQKKKVEGEVEMEVI

SEQ ID NO: 4850 - protein, 715 aa, Homo Sapiens
MHLLPALAGVLATLVLAQPCEGTDPASPGAVETSVLRDCIAEAKLLVDAAYNWTQKSIKQRLRSGSASPMDLLSYFKQPVAATRTVVRAADYMHVALGLLEEKLQPQRSGPFNVTDVLTEPQLRLLSQASGCALRDQAERCSDKYRTITGRCNNKRRPLLGASNQALARWLPAEYEDGLSLPFGWTPSRRRNGFLLPLVRAVSNQIVRFPNERLTSDRGRALMFMQWGQFIDHDLDFSPESPARVAFTAGVDCERTCAQLPPCFPIKIPPNDPRIKNQRDCIPFFRSAPSCPQNKNRVRNQINALTSFVDASMVYGSEVSLSLRLRNRTNYLGLLAINQRFQDNGRALLPFDNLHDDPCLLTNRSARIPCFLAGDTRSTETPKLAAMHTLFMREHNRLATELRRLNPRWNGDKLYNEARKIMGAMVQIITYRDFLPLVLGKARARRTLGHYRGYCSNVDPRVANVFTLAFRFGHTMLQPFMFRLDSQYRASAPNSHVPLSSAFFASWRIVYEGGIDPILRGLMATPAKLNRQDAMLVDELRDRLFRQVRRIGLDLAALNMQRSRDHGLPGYNAWRRFCGLSQPRNLAQLSRVLKNQDLARKFLNLYGTPDNIDIWIGAIAEPLLPGARVGPLLACLFENQFRRARDGDRFWWQKRGVFTKRQRKALSRISLSRIICDNTGITTVSRDIFRANIYPRGFVNCSRIPRLNLSAWRGT

SEQ ID NO: 4851 - protein, 234 aa, Homo Sapiens
MKTLAGLVLGLVIFDAAVTAPTLESINYDSETYDATLEDLDNLYNYENIPVDKVEIEIATVMPSGNRELLTPPPQPEKAQEEEEEEESTPRLIDGSSPQEPEFTGVLGPHTNEDFPTCLLCTCISTTVYCDDHELDAIPPLPKNTAYFYSRFNRIKKINKNDFASLSDLKRIDLTSNLISEIDEDAFRKLPQLRELVLRDNKIRQLPELPTTLTFIDISNNRLGRKGIKQEAFK

SEQ ID NO: 4852 - protein, 322 aa, Homo Sapiens
MKTLAGLVLGLVIFDAAVTAPTLESINYDSETYDATLEDLDNLYNYENIPVDKVEIEIATVMPSGNRELLTPPPQPEKAQEEEEEEESTPRLIDGSSPQEPEFTGVLGPHTNEDFPTCLLCTCISTTVYCDDHELDAIPPLPKNTAYFYSRFNRIKKINKNDFASLSDLKRIDLTSNLISEIDEDAFRKLPQLRELVLRDNKIRQLPELPTTLTFIDISNNRLGRKGIKQEAFKDMYDLHHLYLTDNNLDHIPLPLPENLRALHLQNNNILEMHEDTFCNVKNLTYIRKALEDIRLDGNPINLSKTPQAYMCLPRLPVGSLV

SEQ ID NO: 4853 - protein, 294 aa, Homo Sapiens
MNFILFIFIPGVFSLKSSTLKPTIEALPNVLPLNEDVNKQEEKNEDHTPNYAPANEKNGNYYKDIKQYVFTTQNPNGTESEISVRATTDLNFALKNDKTVNATTYEKSTIEEETTTSEPSHKNIQRSTPNVPAFWTMLAKAINGTAVVMDDKDQLFHPIPESDVNATQGENQPDLEDLKIKIMLGISLMTLLLFVVLLAFCSATLYKLRHLSYKSCESQYSVNPELATMSYFHPSEGVSDTSFSKSAESSTFLGTTSSDMRRSGTRTSESKIMTDIISIGSDNEMHENDESVTR

SEQ ID NO: 4854 - protein, 127 aa, Homo Sapiens
MNFILFIFIPGVFSLKSSTLKPTIEALPNVLPLNEDVNKQEEKNEDHTPNYAPANEKNGNYYKDIKQYVFTTQNPNGTESEISVRATTDLNFALKNDKTVNATTYEKSTIEEETTTSEPSHKNIQSI

SEQ ID NO: 4855 - protein, 265 aa, Homo Sapiens
MNFILFIFIPGVFSLKSSTLKPTIEALPNVLPLNEDVNKQEEKNEDHTPNYAPANEKNGNYYKDIKQYVFTTQNPNGTESEISVRATTDLNFALKNGSTPNVPAFWTMLAKAINGTAVVMDDKDQLFHPIPESDVNATQGENQPDLEDLKIKIMLGISLMTLLLFVVLLAFCSATLYKLRHLSYKSCESQYSVNPELATMSYFHPSEGVSDTSFSKSAESSTFLGTTSSDMRRSGTRTSESKIMTDIISIGSDNEMHENDESVTR

SEQ ID NO: 4856 - skipped

SEQ ID NO: 4857 - protein, 9 aa, Homo Sapiens
MAFPCFDEP

SEQ ID NO: 4858 - protein, 129 aa, Homo Sapiens
MVFLPLKWSLATMSFLLSSLLALLTVSTPSWCQSTEASPKRSDGTPFPWNKIRLPEYVIPVHYDLLIHANLTTLTFWGTTKVEITASQPTSTIILHSHHLQISRATLRKGAGERLSEEPLQVLEHPRQE

SEQ ID NO: 4859 - protein, 948 aa, Homo Sapiens
MVFLPLKWSLATMSFLLSSLLALLTVSTPSWCQSTEASPKRSDGTPFPWNKIRLPEYVIPVHYDLLIHANLTTLTFWGTTKVEITASQPTSTIILHSHHLQISRATLRKGAGERLSEEPLQVLEHPRQEQIALLAPEPLLVGLPYTVVIHYAGNLSETFHGFYKSTYRTKEGELRILASTQFEPTAARMAFPCFDEPAFKASFSIKIRREPRHLAISNMPLVKSVTVAEGLIEDHFDVTVKMSTYLVAFIISDFESVSKITKSGVKVSVYAVPDKINQADYALDAAVTLLEFYEDYFSIPYPLPKQDLAAIPDFQSGAMENWGLTTYRESALLFDAEKSSASSKLGITMTVAHELAHQWFGNLVTMEWWNDLWLNEGFAKFMEFVSVSVTHPELKVGDYFFGKCFDAMEVDALNSSHPVSTPVENPAQIREMFDDVSYDKGACILNMLREYLSADAFKSGIVQYLQKHSYKNTKNEDLWDSMASICPTDGVKGMDGFCSRSQHSSSSSHWHQEGVDVKTMMNTWTLQKGFPLITITVRGRNVHMKQEHYMKGSDGAPDTGYLWHVPLTFITSKSDMVHRFLLKTKTDVLILPEEVEWIKFNVGMNGYYIVHYEDDGWDSLTGLLKGTHTAVSSNDRASLINNAFQLVSIGKLSIEKALDLSLYLKHETEIMPVFQGLNELIPMYKLMEKRDMNEVETQFKAFLIRLLRDLIDKQTWTDEGSVSERMLRSQLLLLACVHNYQPCVQRAEGYFRKWKESNGNLSLPVDVTLAVFAVGAQSTEGWDFLYSKYQFSLSSTEKSQIEFALCRTQNKEKLQWLLDESFKGDKIKTQEFPQILTLIGRNPVGYPLAWQFLRKNWNKLVQKFELGSSSIAHMVMGTTNQFSTRTRLEEVKGFFSSLKENGSQLRCVQQTIETIEENIGWMDKNFDKIRVWLQSEKLEHDPEADATG

SEQ ID NO: 4860 - protein, 941 aa, Homo Sapiens
MVFLPLKWSLATMSFLLSSLLALLTVSTPSWCQSTEASPKRSDGTPFPWNKIRLPEYVIPVHYDLLIHANLTTLTFWGTTKVEITASQPTSTIILHSHHLQISRATLRKGAGERLSEEPLQVLEHPRQEQIALLAPEPLLVGLPYTVVIHYAGNLSETFHGFYKSTYRTKEGELRILASTQFEPTAARMAFPCFDEPAFKASFSIKIRREPRHLAISNMPLVKSVTVAEGLIEDHFDVTVKMSTYLVAFIISDFESVSKITKSGVKVSVYAVPDKINQADYALDAAVTLLEFYEDYFSIPYPLPKQDLAAIPDFQSGAMENWGLTTYRESALLFDAEKSSASSKLGITMTVAHELAHQWFGNLVTMEWWNDLWLNEGFAKFMEFVSVSVTHPELKVGDYFFGKCFDAMEVDALNSSHPVSTPVENPAQIREMFDDVSYDKGACILNMLREYLSADAFKSGIVQYLQKHSYKNTKNEDLWDSMASICPTDGVKGMDGFCSRSQHSSSSSHWHQEGVDVKTMMNTWTLQKGFPLITITVRGRNVHMKQEHYMKGSDGAPDTGYLWHVPLTFITSKSDMVHRFLLKTKTDVLILPEEVEWIKFNVGMNGYYIVHYEDDGWDSLTGLLKGTHTAVSSNDRASLINNAFQLVSIGKLSIEKALDLSLYLKHETEIMPVFQGLNELIPMYKLMEKRDMNEVETQFKAFLIRLLRDLIDKQTWTDEGSVSERMLRSQLLLLACVHNYQPCVQRAEGYFRKWKESNGNLSLPVDVTLAVFAVGAQSTEGWDFLYSKYQFSLSSTEKSQIEFALCRTQNKEKLQWLLDESFKGDKIKTQEFPQILTLIGRNPVGYPLAWQFLRKNWNKLVQKFELGSSSIAHMVMGTTNQFSTRTRLEEVKGFFSSLKENGSQLRCVQQTIETIEENIGWMDKNFDKIRVWLQSEKLERM

SEQ ID NO: 4861 - protein, 144 aa, Homo Sapiens
  misc_feature (1)..(1): Xaa can be any naturally occurring amino acid
XKGDKIKTQEFPQILTLIGRNPVGYPLAWQFLRKNWNKLVQKFELGSSSIAHMVMGTTNQFSTRTRLEEVKGFFSSLKENGSQLRCVQQTIETIEENIGWMDKNFDKIRVWLQSEKLERVALQRKPKCWVPCHRRIKYLILLIL

SEQ ID NO: 4862 - protein, 960 aa, Homo Sapiens
MFHSSAMVNSHRKPMFNIHRGFYCLTAILPQICICSQFSVPSSYHFTEDPGAFPVATNGERFPWQELRLPSVVIPLHYDLFVHPNLTSLDFVASEKIEVLVSNATQFIILHSKDLEITNATLQSEEDSRYMKPGKELKVLSYPAHEQIALLVPEKLTPHLKYYVAMDFQAKLGDGFEGFYKSTYRTLGGETRILAVTDFEPTQARMAFPCFDEPLFKANFSIKIRRESRHIALSNMPKVKTIELEGGLLEDHFETTVKMSTYLVAYIVCDFHSLSGFTSSGVKVSIYASPDKRNQTHYALQASLKLLDFYEKYFDIYYPLSKLDLIAIPDFAPGAMENWGLITYRETSLLFDPKTSSASDKLWVTRVIAHELAHQWFGNLVTMEWWNDIWLKEGFAKYMELIAVNATYPELQFDDYFLNVCFEVITKDSLNSSRPISKPAETPTQIQEMFDEVSYNKGACILNMLKDFLGEEKFQKGIIQYLKKFSYRNAKNDDLWSSLSNSCLESDFTSGGVCHSDPKMTSNMLAFLGENAEVKEMMTTWTLQKGIPLLVVKQDGCSLRLQQERFLQGVFQEDPEWRALQERYLWHIPLTYSTSSSNVIHRHILKSKTDTLDLPEKTSWVKFNVDSNGYYIVHYEGHGWDQLITQLNQNHTLLRPKDRVGLIHDVFQLVGAGRLTLDKALDMTYYLQHETSSPALLEGLSYLESFYHMMDRRNISDISENLKRYLLQYFKPVIDRQSWSDKGSVWDRMLRSALLKLACDLNHAPCIQKAAELFSQWMESSGKLNIPTDVLKIVYSVGAQTTAGWNYLLEQYELSMSSAEQNKILYALSTSKHQEKLLKLIELGMEGKVIKTQNLAALLHAIARRPKGQQLAWDFVRENWTHLLKKFDLGSYDIRMIISGTTAHFSSKDKLQEVKLFFESLEAQGSHLDIFQTVLETITKNIKWLEKNLPTLRTWLMVNT

SEQ ID NO: 4863 - protein, 350 aa, Homo Sapiens
MFHSSAMVNSHRKPMFNIHRGFYCLTAILPQICICSQFSVPSSYHFTEDPGAFPVATNGERFPWQELRLPSVVIPLHYDLFVHPNLTSLDFVASEKIEVLVSNATQFIILHSKDLEITNATLQSEEDSRYMKPGKELKVLSYPAHEQIALLVPEKLTPHLKYYVAMDFQAKLGDGFEGFYKSTYRTLGGETRILAVTDFEPTQARMAFPCFDEPLFKANFSIKIRRESRHIALSNMPKVKTIELEGGLLEDHFETTVKMSTYLVAYIVCDFHSLSGFTSSGVKVSIYASPDKRNQTHYALQASLKLLDFYEKYFDIYYPLSKLGMFKFHIIVFIFAHKTCFDLFPLSLSM

SEQ ID NO: 4864 - protein, 694 aa, Homo Sapiens
MFHSSAMVNSHRKPMFNIHRGFYCLTAILPQICICSQFSVPSSYHFTEDPGAFPVATNGERFPWQELRLPSVVIPLHYDLFVHPNLTSLDFVASEKIEVLVSNATQFIILHSKDLEITNATLQSEEDSRYMKPGKELKVLSYPAHEQIALLVPEKLTPHLKYYVAMDFQAKLGDGFEGFYKSTYRTLGGETRILAVTDFEPTQARMAFPCFDEPLFKANFSIKIRRESRHIALSNMPKVKTIELEGGLLEDHFETTVKMSTYLVAYIVCDFHSLSGFTSSGVKVSIYASPDKRNQTHYALQASLKLLDFYEKYFDIYYPLSKLDLIAIPDFAPGAMENWGLITYRETSLLFDPKTSSASDKLWVTRVIAHELAHQWFGNLVTMEWWNDIWLKEGFAKYMELIAVNATYPELQFDDYFLNVCFEVITKDSLNSSRPISKPAETPTQIQEMFDEVSYNKGACILNMLKDFLGEEKFQKGIIQYLKKFSYRNAKNDDLWSSLSNSCLESDFTSGGVCHSDPKMTSNMLAFLGENAEVKEMMTTWTLQKGIPLLVVKQDGCSLRLQQERFLQGVFQEDPEWRALQERYLWHIPLTYSTSSSNVIHRHILKSKTDTLDLPEKTSWVKFNVDSNGYYIVHYEGHGWDQLITQLNQNHTLLRPKDRVGLIHDVFQLVGAGRLTLDKALDMTYYLQHETSSP

(The sequence listing continues in the following parts.)

1-147. (canceled)

148. A method for the ex-vivo genetic modification of a stem cell comprising delivering to the stem cell:
(a) a nucleic acid or amino acid sequence comprising a sequence encoding a transposase enzyme;
(b) a recombinant and non-naturally occurring DNA sequence comprising a DNA sequence encoding a transposon; and
(c) differentiating the stem cell into an immune cell.

149. The method of claim 148, wherein the stem cell is a hematopoietic stem cell (HSC).

150. The method of claim 148, wherein the stem cell comprises the cell-surface marker phenotype CD34+ and CD38−.

151. The method of claim 148, wherein the stem cell comprises the cell-surface marker phenotype CD34+, CD38−, and CD90+.

152. The method of claim 148, wherein the stem cell comprises the cell-surface marker phenotype CD34+, CD38−, CD90+, and CD45RA−.

153. The method of claim 148, wherein the stem cell comprises the cell-surface marker phenotype CD34+, CD38−, CD90+, CD45RA−, and CD49f+.

154. The method of claim 148, wherein the immune cell is a T-lymphocyte, a Natural Killer (NK) cell, a Cytokine-induced Killer (CIK) cell, a Natural Killer T (NKT) cell, or a B lymphocyte (B Cell).

155. The method of claim 148, wherein the differentiating comprises priming the stem cell with any combination of IL-3, Flt3L, TPO, SCF, or G-CSF.

156. The method of claim 155, wherein the stem cell is primed for at least 3 days.

157. The method of claim 156, wherein the primed stem cell is transferred to a layer of feeder cells and fed bi-weekly.

158. The method of claim 157, wherein the primed stem cell is cultured with the feeder cells for at least 7 days.

159. The method of claim 148, wherein the method further comprises the step of stimulating the stem cell with at least one cytokine.

160. The method of claim 159, wherein the at least one cytokine is IL-2, IL-21, IL-7 or IL-15, or a combination thereof.

161. The method of claim 148, wherein the sequence encoding a transposase enzyme is an mRNA sequence.

162. The method of claim 148, wherein the sequence encoding a transposase enzyme is a DNA sequence.

163. The method of claim 148, wherein the sequence encoding a transposase enzyme is an amino acid sequence.

164. The method of claim 148, wherein the transposon is a piggyBac transposon, piggyBac-like transposon, Sleeping Beauty transposon, Tol2 transposon or Helraiser transposon.

165. The method of claim 148, wherein the transposase is a piggyBac transposase, piggyBac-like transposase, hyperactive piggyBac transposase, Super piggyBac (SPB) transposase, Sleeping Beauty transposase, hyperactive Sleeping Beauty (SB100X) transposase, Tol2 transposase or helitron transposase.

166. The method of claim 148, further comprising administering the immune cells to a subject in need thereof.

167. The method of claim 166, wherein the subject has cancer.
